United States Patent Application Publication US 2025/0311734 A1 - sequence listing, part 9

SEQ ID NO: 35714 - protein, 480 aa, Cytophaga sp.
NGTMMQYFEWYVPNDGQQWNRLRTDAPYLSSVGITAVWTPPAYKGTSQADVGYGPYDLYDLGEFNQKGTVRTKYGTKGELKSAVNTLHSNGIQVYGDVVMNHKAGADYTENVTAVEVNPSNRNQETSGEYNIQAWTGFNFPGRGTTYSNFKWQWFHFDGTDWDQSRSLSRIFKFTGKAWDWEVSSENGNYDYLMYADIDYDHPDVVNEMKKWGVWYANEVGLDGYRLDAVKHIKFSFLKDWVDNARAATGKEMFTVGEYWQNDLGALNNYLAKVNYNQSLFDAPLHYNFYAASTGGGYYDMRNILNNTLVASNPTKAVTLVENHDTQPGQSLESTVQPWFKPLAYAFILTRSGGYPSVFYGDMYGTKGTTTREIPALKSKIEPLLKARKDYAYGTQRDYIDNPDVIGWTREGDSTKSKSGLATVITDGPGGSKRMYVGTSNAGEIWYDLTGNRTDKITIGSDGYATFPVNGGSVSVWVQQ

SEQ ID NO: 35715 - protein, 480 aa, Cytophaga sp.
NGTMMQYFEWYVPNDGQQWNRLRTDAPYLSSVGITAVWTPPAYKGTSQADVGYGPYDLYDLGEFNQKGTVRTKYGTKGELKSAVNTLHSNGIQVYGDVVMNHKAGADYTENVTAVEVNPSNRNQEVSGEYNIQAWTGFNFPGRGTTYSNFKWQWFHFDGTDWDQSRSLSRIFKFTGKAWDWEVSSENGNYDYLMYADIDYDHPDVVNEMKKWGVWYANEVGLDGYRLDAVKHIKFSFLKDWVDNARAATGKEMFTVGEYWQNDLGALNNYLAKVNYNQSLFDAPLHYNFYAASTGGGYYDMRNILNNTLVASNPTKAVTLVENHDTQPGQSLESTVQPWFKPLAYAFILTRSGGYPSVFYGDMYGTKGTTTREIPALKSKIEPLLKARKDYAYGTQRDYIDNPDVIGWTREGDSTKAKSGLATVITDGPGGSKRMYVGTSNAGEIWYDLTGNRTDKITIGSDGYATFPVNGGSVSVWVQQ

SEQ ID NO: 35716 - protein, 480 aa, Cytophaga sp.
NGTMMQYFEWYVPNDGQQWNRLRTDAPYLSSVGITAVWTPPAYKGTSQADVGYGPYDLYDLGEFNQKGTVRTKYGTKGELKSAVNTLHSNGIQVYGDVVMNHKAGADYTENVTAVEVNPSNRNQETSGEYNIQAWTGFNFPGRGTTYSNFKWQWFHFDGTDWDQIRSLSRIFKFTGKAWDWEVSSENGNYDYLMYADIDYDHPDVVNEMKKWGVWYANEVGLDGYRLDAVKHIKFSFLKDWVDNARAATGKEMFTVGEYWQNDLGALNNYLAKVNYNQSLFDAPLHYNFYAASTGGGYYDMRNILNNTLVASNPTKAVTLVENHDTQPGQSLESTVQPWFKPLAYAFILTRSGGYPSVFYGDMYGTKGTTTREIPALKSKIEPLLKARKDYAYGTQRDYIDNPDVIGWTREGDSTKAKSGLATVITDGPGGSKRMYVGTSNAGEIWYDLTGNRTDKITIGSDGYATFPVNGGSVSVWVQQ

SEQ ID NO: 35717 - protein, 480 aa, Cytophaga sp.
NGTMMQYFEWYVPNDGQQWNRLRTDAPYLSSVGITAVWTPPAYKGTSQADVGYGPYDLYDLGEFNQKGTVRTKYGTKGELKSAVNTLHSNGIQVYGDVVMNHKAGADYTENVTAVEVNPSNRNQETSGEYNIQAWTGFNFPGRGTTYSNFKWQWFHFDGTDWDQSRSLSRIFKFTGKAWDWEVSSENGNYDYLMYADIDYDHPDVVNEMKKWGVWYANEVGLDGYRLDAVKHIKFSFLKDWVDNARAATGKEMFTVGEYWQNDLGALNNYLAKVNYNQSLFDAPLHYNFYFASTGGGYYDMRNILNNTLVASNPTKAVTLVENHDTQPGQSLESTVQPWFKPLAYAFILTRSGGYPSVFYGDMYGTKGTTTREIPALKSKIEPLLKARKDYAYGTQRDYIDNPDVIGWTREGDSTKAKSGLATVITDGPGGSKRMYVGTSNAGEIWYDLTGNRTDKITIGSDGYATFPVNGGSVSVWVQQ

SEQ ID NO: 35718 - protein, 480 aa, Cytophaga sp.
NGTMMQYFEWYVPNDGQQWNRLRTDAPYLSSVGITAVWTPPAYKGTSQADVGYGPYDLYDLGEFNQKGTVRTKYGTKGELKSAVNTLHSNGIQVYGDVVMNHKAGADYTENVTAVEVNPSNRNQETSGEYNIQAWTGFNFPGRGTTYSNFKWQWFHFDGTDWDQSRSLSRIFKFTGKAWDWEVSSENGNYDYLMYADIDYDHPDVVNEMKKWGVWYANEVGLDGYRLDAVKHIKFSFLKDWVDNARAATGKEMFTVGEYWQNDLGALNNYLAKVNYNQSLFDAPLHYNFYAASTGGGYYDMRNILNNTLVASNPTKAVTLVENHDTQPGQSLESTVQPWFKPLAYAFILTRSGGYPSVFYGDMYGTKGTTTREIPALKSKIEPLLKARKDYAYGTQRDYIDNPDVIGWTREGTSTKAKSGLATVITDGPGGSKRMYVGTSNAGEIWYDLTGNRTDKITIGSDGYATFPVNGGSVSVWVQQ

SEQ ID NO: 35719 - protein, 480 aa, Cytophaga sp.
NGTMMQYFEWYVPNDGQQWNRLRTDAPYLSSVGITAVWTPPAYKGTSQADVGYGPYDLYDLGEFNQKGTVRTKYGTKGELKSAVNTLHSNGIQVYGDVVMNHKAGADYTENVTAVEVNPSNRNQETSGENNIQAWTGFNFPGRGTTYSNFKWQWFHFDGTDWDQSRSLSRIFKFTGKAWDWEVSSENGNYDYLMYADIDYDHPDVVNEMKKWGVWYANEVGLDGYRLDAVKHIKFSFLKDWVDNARAATGKEMFTVGEYWQNDLGALNNYLAKVNYNQSLFDAPLHYNFYAASTGGGYYDMRNILNNTLVASNPTKAVTLVENHDTQPGQSLESTVQPWFKPLAYAFILTRSGGYPSVFYGDMYGTKGTTTREIPALKSKIEPLLKARKDYAYGTQRDYIDNPDVIGWTREGDSTKAKSGLATVITDGPGGSKRMYVGTSNAGEIWYDLTGNRTDKITIGSDGYATFPVNGGSVSVWVQQ

SEQ ID NO: 35720 - protein, 480 aa, Cytophaga sp.
NGTMMQYFEWYVPNDGQQWNRLRTDAPYLSSVGITAVWTPPAYKGTSQADVGYGPYDLYDLGEFNQKGTVRTKYGTKGELKSAVNTLHSNGIQVYGDVVMNHKAGADYTENVTAVEVNPSNRNQETSGEYNIQAWTGFNFPRRGTTYSNFKWQWFHFDGTDWDQSRSLSRIFKFTGKAWDWEVSSENGNYDYLMYADIDYDHPDVVNEMKKWGVWYANEVGLDGYRLDAVKHIKFSFLKDWVDNARAATGKEMFTVGEYWQNDLGALNNYLAKVNYNQSLFDAPLHYNFYAASTGGGYYDMRNILNNTLVASNPTKAVTLVENHDTQPGQSLESTVQPWFKPLAYAFILTRSGGYPSVFYGDMYGTKGTTTREIPALKSKIEPLLKARKDYAYGTQRDYIDNPDVIGWTREGDSTKAKSGLATVITDGPGGSKRMYVGTSNAGEIWYDLTGNRTDKITIGSDGYATFPVNGGSVSVWVQQ

SEQ ID NO: 35721 - protein, 480 aa, Cytophaga sp.
NGTMMQYFEWYVPNDGQQWNRLRTDAPYLSSVGITAVWTPPAYKGTSQADVGYGPYDLYDLGEFNQKGTVRTKYGTKGELKSAVNTLHSNGIQVYGDVVMNHKAGADYTENVTAVEVNPSNRNQETSGEYNIQAWTGFNFPGRGTTYSNFKWQWFHFDGTDWDQSRSLSRIFKFTGKAWDWEVSSENGNYDYLMYADIDYDHPDVVNEMKKWGVWYANEVGLDGYRLDAVKHIKFSFLKDWVDNARAATGKEMFTVGEYWQNDLGALNNYLAKVNYNQSLFDAPLHYNFYAASTGGGYYDMRNIENNTLVASNPTKAVTLVENHDTQPGQSLESTVQPWFKPLAYAFILTRSGGYPSVFYGDMYGTKGTTTREIPALKSKIEPLLKARKDYAYGTQRDYIDNPDVIGWTREGDSTKAKSGLATVITDGPGGSKRMYVGTSNAGEIWYDLTGNRTDKITIGSDGYATFPVNGGSVSVWVQQ

SEQ ID NO: 35722 - protein, 480 aa, Cytophaga sp.
NGTMMQYFEWYVPNDGQQWNRLRTDAPYLSSVGITAVWTPPAYKGTSQADVGYGPYDLYDLGEFNQKGTVRTKYGTKGELKSAVNTLHSNGIQVYGDVVMNHKAGADYTENVTAVEVNPSNRNQETSGEYNIQAWTGFNFPGRGTTYSNFKWQWFHFDGTDWDQSRSLSRIFKFTGKAWDWEVSSENGNYDYLMYADIDYDHPDVVNEMKKWGVWYANEVGLDGYRLDAVKHIKFSFLKDWVDNARAATGKEMFTVGEYWQNDLGALNNYLAKVNYNQSLFDAPLHYNFYAASTGGGYYDMRNILNNTLVASNPTKAVTLVENHDTQPGQSLESTVQPWFKPLAYAFILTRSGGYPSVFYGDMYGTKGTTTREIPALKSKIEPLLKARKDYAYGTQRDYIDNPDVIGWTREGQSTKAKSGLATVITDGPGGSKRMYVGTSNAGEIWYDLTGNRTDKITIGSDGYATFPVNGGSVSVWVQQ

SEQ ID NO: 35723 - protein, 480 aa, Cytophaga sp.
NGTMMQYFEWYVPNDGQQWNRLRTDAPYLSSVGITAVWTPPAYKGTSQADVGYGPYDLYDLGEFNQKGTVRTKYGTKGELKSAVNTLHSNGIQVYGDVVMNHKAGADYTENVTAVEVNPSNRNQETSGEYNIQAWTGFNFPGRGTTYSNFKWQWFHFDGTDWDQSRSLSRIFKFTGKAWDWEVSSENGNYDYLMYADIDYDHPDVVNEMKKWGVWYANEVGLDGYRLDAVKHIKFSFLKDWVDNARAATGKEMFTVGEYWQNDLGALNNYLAKVNYNQSLFDAPLHYNFYAASTGGGYYDMRNILNNTLVASNPTKAVTLVENHDTQPGQSLESTVQPWFKPLAYAFILTRSGGYPSVFYGDMYGTKGTTTREIPALKSKIEPLLKARKDYAYGTQRDYIDNPDVIGWTREGDSTKAKSGLATVITDGPGGSKRMYVGTSNAGEIWYDLTGNRTDKITIGSDGYATFPVNGGSVSVWVKQ

SEQ ID NO: 35724 - protein, 480 aa, Cytophaga sp.
NGTMMQYFEWYVPNDGQQWNRLRTDAPYLSSVGITAVWTPPAYKGTSQADVGYGPYDLYDLGEFNQKGTVRTKYGTKGELKSAVNTLHSNGIQVYGDVVMNHKAGADYTENVTAVEVNPSNRNQETSGEYNIQAWTGFNFPGRGTTYSNFKWQWFHFDGTDWDQSRSLSRIFKFTGKAWDWEVSSENGNYDYLMYADIDYDHPDVVNEMKKWGVWYANEVGLDGYRLDAVKHIKFSFLKDWVDNARAATGKEMFTVGEYWQNDLGALNNYLAKVNYNQSLFDAPLHYNFYAASTGGGYYDMRNILNNTLVASNPTKAVTLVENHDTQPGQSLESTVQPWFKPLAYAFILTRSGGYPSVFYGDMYGTKGTTTREIPALKSKIEPLLKARKDYAYGTQRDYIDNPDVIGWTREGDSTKPKSGLATVITDGPGGSKRMYVGTSNAGEIWYDLTGNRTDKITIGSDGYATFPVNGGSVSVWVQQ

SEQ ID NO: 35725 - protein, 480 aa, Cytophaga sp.
NGTMMQYFEWYVPNDGQQWNRLRTDAPYLSSVGITAVWTPPAYKGTSQADVGYGPYDLYDLGEFNQKGTVRTKYGTKGELKSAVNTLHSNGIQVYGDVVMNHKAGADYTENVTAVEVNPSNRNQETSGEYNIQAWTGFNFPGRGTTYSNFKWQWFHFDGTDWDQSRSLSRIFKFTGKAWDWEVSSENGNYDYLMYADIDYDHPDVVNEMKKWGVWYANEVGLDGYRLDAVKHIKFSFLKDWVDNARAATGKEMFTVGEYWQNDLGALNNYLAKVNYNQSLFDAPLHYNFYAASTGGGYYDMRNILNNTLVASNPTKAVTLVENHDTQPGQSLESTVQPWFKPLAYAFILTRSGGYPSVFYGDMYGTKGTTTREIPALKSKIEPLLKARKDYAYGTQRDYIDNPDVIGWTREGDSTKTKSGLATVITDGPGGSKRMYVGTSNAGEIWYDLTGNRTDKITIGSDGYATFPVNGGSVSVWVQQ

SEQ ID NO: 35726 - protein, 480 aa, Cytophaga sp.
NGTMMQYFEWYVPNDGQQWNRLRTDAPYLSSVGITAVWTPPAYKGTSQADVGYGPYDLYDLGEFNQKGTVRTKYGTKGELKSAVNTLHSNGIQVYGDVVMNHKAGADYTENVTAVEVNPSNRNQETSGEYNIQAWTGFNFPGRGTTYSNFKWQWFHFDGTDWDQSRSLSRIFKFTGKAWDWEVSSENGNYDYLMYADIDYDHPDVVNEMKKWGVWYANEVGLDGYRLDAVKHIKFSFLKDWVDNARANTGKEMFTVGEYWQNDLGALNNYLAKVNYNQSLFDAPLHYNFYAASTGGGYYDMRNILNNTLVASNPTKAVTLVENHDTQPGQSLESTVQPWFKPLAYAFILTRSGGYPSVFYGDMYGTKGTTTREIPALKSKIEPLLKARKDYAYGTQRDYIDNPDVIGWTREGDSTKAKSGLATVITDGPGGSKRMYVGTSNAGEIWYDLTGNRTDKITIGSDGYATFPVNGGSVSVWVQQ

SEQ ID NO: 35727 - protein, 480 aa, Cytophaga sp.
NGTMMQYFEWYVPNDGQQWNRLRTDAPYLSSVGITAVWTPPAYKGTSQADVGYGPYDLYDLGEFNQKGTVRTKYGTKGELKSAVNTLHSNGIQVYGDVVMNHKAGADYTENVTAVEVNPSNRNQETSGEYNIQAWTGFNFPGRGTTYSNFKWQWFHFDGTDWDQSRSLSRIFKFTGKAWDWEVSSENGNYDYLMYADIDYDHPDVVNEMKKWGVWYANEVGLDGYRLDAVKHIKFSFLKDWVDNARAATGKEMFTVGEYWQNDLGALNNYLAKVNYNQSLFDAPLHYNFYAASTGGGYYDMRNILNNTLVASNPTKAVTLVENHDTQPGQSLESTVQPWFKPLAYAFILTRSGGYPSVFYGDMYGTKGTTTREIPALKSKIEPLLKARKDYAYGTQRDYIDNPDVIGWTRLGDSTKAKSGLATVITDGPGGSKRMYVGTSNAGEIWYDLTGNRTDKITIGSDGYATFPVNGGSVSVWVQQ

SEQ ID NO: 35728 - protein, 480 aa, Cytophaga sp.
NGTMMQYFEWYVPNDGQQWNRLRTDAPYLSSVGITAVWTPPAYKGTSQADVGYGPYDLYDLGEFNQKGTVRTKYGTKGELKSAVNTLHSNGIQVYGDVVMNHKAGADYTENVTAVEVNPSNRNQETSGEYNIQAWTGFNFPGRGTTYSNFKWQWFHFDGTDWDQSRSLSRIFKFTGKAWDWEVSSENGNYDYLMYADIDYDHPDVVNEMKKWGVWYANEVGLDGYRLDAVKHIKFSFLKDWVDNARAATGKEMFTVGEYWQNDLHALNNYLAKVNYNQSLFDAPLHYNFYAASTGGGYYDMRNILNNTLVASNPTKAVTLVENHDTQPGQSLESTVQPWFKPLAYAFILTRSGGYPSVFYGDMYGTKGTTTREIPALKSKIEPLLKARKDYAYGTQRDYIDNPDVIGWTREGDSTKAKSGLATVITDGPGGSKRMYVGTSNAGEIWYDLTGNRTDKITIGSDGYATFPVNGGSVSVWVQQ

SEQ ID NO: 35729 - protein, 480 aa, Cytophaga sp.
NGTMMQYFEWYVPNDGQQWNRLRTDAPYLSSVGITAVWTPPAYKGTSQADVGYGPYDLYDLGEFNQKGTVRTKYGTKGELKSAVNTLHSNGIQVYGDVVMNHKAGADYTENVTAVEVNPSNRNKETSGEYNIQAWTGFNFPGRGTTYSNFKWQWFHFDGTDWDQSRSLSRIFKFTGKAWDWEVSSENGNYDYLMYADIDYDHPDVVNEMKKWGVWYANEVGLDGYRLDAVKHIKFSFLKDWVDNARAATGKEMFTVGEYWQNDLGALNNYLAKVNYNQSLFDAPLHYNFYAASTGGGYYDMRNILNNTLVASNPTKAVTLVENHDTQPGQSLESTVQPWFKPLAYAFILTRSGGYPSVFYGDMYGTKGTTTREIPALKSKIEPLLKARKDYAYGTQRDYIDNPDVIGWTREGDSTKAKSGLATVITDGPGGSKRMYVGTSNAGEIWYDLTGNRTDKITIGSDGYATFPVNGGSVSVWVQQ

SEQ ID NO: 35730 - protein, 480 aa, Cytophaga sp.
NGTMMQYFEWYVPNDGQQWNRLRTDAPYLSSVGITAVWTPPAYKGTSQADVGYGPYDLYDLGEFNQKGTVRTKYGTKGELKSAVNTLHSNGIQVYGDVVMNHKAGADYTENVTAVEVNPSNRNQETSGEYNIQAWTGFNFPGRGTTYSNFKWQWFHFDGTDWDQSRSLSRIFKFTGKAWDWEVSSENGNYDYLMYADIDYDHPDVVNEMKKWGVWYANEVGLDGYRLDAVKHIKFSFLKDWVDNARASTGKEMFTVGEYWQNDLGALNNYLAKVNYNQSLFDAPLHYNFYAASTGGGYYDMRNILNNTLVASNPTKAVTLVENHDTQPGQSLESTVQPWFKPLAYAFILTRSGGYPSVFYGDMYGTKGTTTREIPALKSKIEPLLKARKDYAYGTQRDYIDNPDVIGWTREGDSTKAKSGLATVITDGPGGSKRMYVGTSNAGEIWYDLTGNRTDKITIGSDGYATFPVNGGSVSVWVQQ

SEQ ID NO: 35731 - protein, 480 aa, Cytophaga sp.
NGTMMQYFEWYVPNDGQQWNRLRTDAPYLSSVGITAVWTPPAYKGTSQADVGYGPYDLYDLGEFNQKGTVRTKYGTKGELKSAVNTLHSNGIQVYGDVVMNHKAGADYTENVTAVEVNPSNRNQETSGEYNIQAWTGFNFPGRGTTYSNFKWQWFHFDGTDWDQSRSLSRIFKFTGKAWDWEVSSENGNYDYLMYADIDYDHPDVVNEMKKWGVWYANEVGLDGYRLDAVKHIKFQFLKDWVDNARAATGKEMFTVGEYWQNDLGALNNYLAKVNYNQSLFDAPLHYNFYAASTGGGYYDMRNILNNTLVASNPTKAVTLVENHDTQPGQSLESTVQPWFKPLAYAFILTRSGGYPSVFYGDMYGTKGTTTREIPALKSKIEPLLKARKDYAYGTQRDYIDNPDVIGWTREGDSTKAKSGLATVITDGPGGSKRMYVGTSNAGEIWYDLTGNRTDKITIGSDGYATFPVNGGSVSVWVQQ

SEQ ID NO: 35732 - protein, 480 aa, Cytophaga sp.
NGTMMQYFEWYVPNDGQQWNRLRTDAPYLSSVGITAVWTPPAYKGTSQADVGYGPYDLYDLGEFNQKGTVRTKYGTKGELKSAVNTLHSNGIQVYGDVVMNHKAGADYTENVTAVEVNPSNRNQETSGEYNIQAWTGFNFPGRGTTYSNFKWQWFHFDGTDWDQSRSLSRIFKFTGKAWDWEVSSENGNYDYLMYADIDYDHPDVVNEMKKWGVWYANEVGLDGYRLDAVKHIKFSFLKDWVDNARAATGKEMFTVGEYWQNDLGALNNYLAKVNYNQSLFDAPLHYNFYAASTGGGYYDMRNILNNTLVASNPTKAVTLVENHDTQPGQSLESTVQPWFKPLAYAFILTRSGGYPSVFYGDMYGTKGTTTREIPALKSKIEKLLKARKDYAYGTQRDYIDNPDVIGWTREGDSTKAKSGLATVITDGPGGSKRMYVGTSNAGEIWYDLTGNRTDKITIGSDGYATFPVNGGSVSVWVQQ

SEQ ID NO: 35733 - protein, 480 aa, Cytophaga sp.
NGTMMQYFEWYVPNDGQQWNRLRTDAPYLSSVGITAVWTPPAYKGTSQADVGYGPYDLYDLGEFNQKGTVRTKYGTKGELKSAVNTLHSNGIQVYGDVVMNHKAGADYTENVTAVEVNPSNRNQETSGEYNIQAWTGFNFPGRGTTYSNFKWQWFHFDGTDWDQSRSLSRIFKFTGKAWDWEVSSENGNYDYLMEADIDYDHPDVVNEMKKWGVWYANEVGLDGYRLDAVKHIKFSFLKDWVDNARAATGKEMFTVGEYWQNDLGALNNYLAKVNYNQSLFDAPLHYNFYAASTGGGYYDMRNILNNTLVASNPTKAVTLVENHDTQPGQSLESTVQPWFKPLAYAFILTRSGGYPSVFYGDMYGTKGTTTREIPALKSKIEPLLKARKDYAYGTQRDYIDNPDVIGWTREGDSTKAKSGLATVITDGPGGSKRMYVGTSNAGEIWYDLTGNRTDKITIGSDGYATFPVNGGSVSVWVQQ

SEQ ID NO: 35734 - protein, 480 aa, Cytophaga sp.
NGTMMQYFEWYVPNDGQQWNRLRTDAPYLSSVGITAVWTPPAYKGTSQADVGYGPYDLYDLGEFNQKGTVRTKYGTKGELKSAVNTLHSNGIQVYGDVVMNHKAGADYTENVTAVEVNPSNRNQETSGEYNIQAWTGFNFPGRGTTYSNFKWQWFHFDGTDWDQSRSLSRIFKFTGKAWDWEVSSENGNYDYLMYADIDYDHPDVVNEMKKWGVWYANEVGLDGYRLDAVKHIKFSFLKDWVDNARAATGKEMFTVGEYWQNDLGALNNYLAKVNYNQSLFDAPLHYNFYAASTGGGYYDMRNILNNTLVASNPTKAVTLVENHDTQPGQSLESTVQPWFKPLAYAFILTRSGGYPSVFYGDMYGTKGTTTREIPALKSKIEPLLKARKDYAYGTQRDYIDNPDVIGWTREGDSTKAKSGLATVITDGQGGSKRMYVGTSNAGEIWYDLTGNRTDKITIGSDGYATFPVNGGSVSVWVQQ

SEQ ID NO: 35735 - protein, 480 aa, Cytophaga sp.
NGTMMQYFEWYVPNDGQQWNRLRTDAPYLSSVGITAVWTPPAYKGTSQADVGYGPYDLYDLGEFNQKGTVRTKYGTKGELKSAVNTLHSNGIQVYGDVVMNHKAGADYTENVTAVEVNPSNRNQETSGEYNIQAWTGFNFPGRGTTYSNFKWQWFHFDGTDWDQSRSLSRIFKFTGKAWDWEVSSENGNYDYLMYADIDYDHPDVVNEMKKWGVWYTNEVGLDGYRLDAVKHIKFSFLKDWVDNARAATGKEMFTVGEYWQNDLGALNNYLAKVNYNQSLFDAPLHYNFYAASTGGGYYDMRNILNNTLVASNPTKAVTLVENHDTQPGQSLESTVQPWFKPLAYAFILTRSGGYPSVFYGDMYGTKGTTTREIPALKSKIEPLLKARKDYAYGTQRDYIDNPDVIGWTREGDSTKAKSGLATVITDGPGGSKRMYVGTSNAGEIWYDLTGNRTDKITIGSDGYATFPVNGGSVSVWVQQ

SEQ ID NO: 35736 - protein, 480 aa, Cytophaga sp.
NGTMMQYFEWYVPNDGQQWNRLRTDAPYLSSVGITAVWTPPAYKGTSQADVGYGPYDLYDLGEFNQKGTVRTKYGTKGELKSAVNTLHSNGIQVYGDVVMNHKAGADYTENVTAVEVNPSNRNQETSGEYNIQAWTGFNFPGRGTTYSNFKWQWFHFDGTDWDQSRSLSRIFKFTGKAWDWEVSSENGNYDYLMYADIDYDHPDVVNEMKKWGVWYANEVGLDGYRLDAVKHIKFSFLKDWVDNARAATGKEMFTVGEYWENDLGALNNYLAKVNYNQSLFDAPLHYNFYAASTGGGYYDMRNILNNTLVASNPTKAVTLVENHDTQPGQSLESTVQPWFKPLAYAFILTRSGGYPSVFYGDMYGTKGTTTREIPALKSKIEPLLKARKDYAYGTQRDYIDNPDVIGWTREGDSTKAKSGLATVITDGPGGSKRMYVGTSNAGEIWYDLTGNRTDKITIGSDGYATFPVNGGSVSVWVQQ

SEQ ID NO: 35737 - protein, 480 aa, Cytophaga sp.
NGTMMQYFEWYVPNDGQQWNRLRTDAPYLSSVGITAVWTPPAYKGTSQADVGYGPYDLYDLGEFNQKGTVRTKYGTKGELKSAVNTLHSNGIQVYGDVVMNHKAGADYTENVTAVEVNPSNRNQETSGEYNIQAWTGFNFPGRGTTYSNFKWQWFHFDGTDWDQSRSLSRIFKFTGKAWDWEVSSENTNYDYLMYADIDYDHPDVVNEMKKWGVWYANEVGLDGYRLDAVKHIKFSFLKDWVDNARAATGKEMFTVGEYWQNDLGALNNYLAKVNYNQSLFDAPLHYNFYAASTGGGYYDMRNILNNTLVASNPTKAVTLVENHDTQPGQSLESTVQPWFKPLAYAFILTRSGGYPSVFYGDMYGTKGTTTREIPALKSKIEPLLKARKDYAYGTQRDYIDNPDVIGWTREGDSTKAKSGLATVITDGPGGSKRMYVGTSNAGEIWYDLTGNRTDKITIGSDGYATFPVNGGSVSVWVQQ

SEQ ID NO: 35738 - protein, 480 aa, Cytophaga sp.
NGTMMQYFEWYVPNDGQQWNRLRTDAPYLSSVGITAVWTPPAYKGTSQADVGYGPYDLYDLGEFNQKGTVRTKYGTKGELKSAVNTLHSNGIQVYGDVVMNHKAGADYTENVTAVEVNPSNRNQETSGEYNIQAWTGFNFPGRGTTYSNFKWQWFHFDGTDWGQSRSLSRIFKFTGKAWDWEVSSENGNYDYLMYADIDYDHPDVVNEMKKWGVWYANEVGLDGYRLDAVKHIKFSFLKDWVDNARAATGKEMFTVGEYWQNDLGALNNYLAKVNYNQSLFDAPLHYNFYAASTGGGYYDMRNILNNTLVASNPTKAVTLVENHDTQPGQSLESTVQPWFKPLAYAFILTRSGGYPSVFYGDMYGTKGTTTREIPALKSKIEPLLKARKDYAYGTQRDYIDNPDVIGWTREGDSTKAKSGLATVITDGPGGSKRMYVGTSNAGEIWYDLTGNRTDKITIGSDGYATFPVNGGSVSVWVQQ

SEQ ID NO: 35739 - protein, 480 aa, Cytophaga sp.
NGTMMQYFEWYVPNDGQQWNRLRTDAPYLSSVGITAVWTPPAYKGTSQADVGYGPYDLYDLGEFNQKGTVRTKYGTKGELKSAVNTLHSNGIQVYGDVVMNHKAGADYTENVTAVEVNPSNRNQETSGEYNIQAWTGFNFPGRGTTYSNFKWQWFHFDGTDWDQSRSLSRIFKFTGKAWDWEVSSENGNYDYLMYADIDYDHPDVVNEMKKWGVWYANEVGLDGYRLDAVKHIKFSFLKDWVDNARAATGKEMFTVGEYWQNDLDALNNYLAKVNYNQSLFDAPLHYNFYAASTGGGYYDMRNILNNTLVASNPTKAVTLVENHDTQPGQSLESTVQPWFKPLAYAFILTRSGGYPSVFYGDMYGTKGTTTREIPALKSKIEPLLKARKDYAYGTQRDYIDNPDVIGWTREGDSTKAKSGLATVITDGPGGSKRMYVGTSNAGEIWYDLTGNRTDKITIGSDGYATFPVNGGSVSVWVQQ

SEQ ID NO: 35740 - protein, 480 aa, Cytophaga sp.
NGTMMQYFEWYVPNDGQQWNRLRTDAPYLSSVGITAVWTPPAYKGTSQADVGYGPYDLYDLGEFNQKGTVRTKYGTKGELKSAVNTLHSNGIQVYGDVVMNHKAGADYTENVTAVEVNPSNRNQETSGEYNIQAWTGFNFPGRGTTYSNFKWQWFHFDGTDWDQSRSLSRIFKFTGKAWDWEVSSENGNYDYLMYADIDYDHPDVVNEMKKWGVWYANEVGLDGYRLDAVKHIKFSFLKDWVDNARAATGKEMFTVGEYWQNDLGALNNYLAKVNYNQSLFDAPLHYNFYAASTGGGYYDMRNILNNTLVASNPTKAVTLVENHDTQPGQSLESTVQPWFKPLAYAFILTRSGGYPSVFYGDMYGTKGTTTREIPALKSKIEPLLKARKDYAYGTQRDYIDNPDVIGWTREGDSTKEKSGLATVITDGPGGSKRMYVGTSNAGEIWYDLTGNRTDKITIGSDGYATFPVNGGSVSVWVQQ

SEQ ID NO: 35741 - protein, 480 aa, Cytophaga sp.
NGTMMQYFEWYVPNDGQQWNRLRTDAPYLSSVGITAVWTPPAYKGTSQADVGYGPYDLYDLGEFNQKGTVRTKYGTKGELKSAVNTLHSNGIQVYGDVVMNHKAGADYTENVTAVEVNPSNRNQETSGEYNIQAWTGFNFPGRGTTYSNFKWQWFHFDGTDWDQSRSLSRIFKFTGKAWDWEVSSENGNYDYLMYADIDYDHPDVVNEMKKWGVWYANEVGLDGYRLDAVKHIKFSFLKDWVDNARAATGKEMFTVGEYWQNDLGALNNYLAKVNYNQSLFDAPLHYNFYRASTGGGYYDMRNILNNTLVASNPTKAVTLVENHDTQPGQSLESTVQPWFKPLAYAFILTRSGGYPSVFYGDMYGTKGTTTREIPALKSKIEPLLKARKDYAYGTQRDYIDNPDVIGWTREGDSTKAKSGLATVITDGPGGSKRMYVGTSNAGEIWYDLTGNRTDKITIGSDGYATFPVNGGSVSVWVQQ

SEQ ID NO: 35742 - protein, 480 aa, Cytophaga sp.
NGTMMQYFEWYVPNDGQQWNRLRTDAPYLSSVGITAVWTPPAYKGTSQADVGYGPYDLYDLGEFNQKGTVRTKYGTKGELKSAVNTLHSNGIQVYGDVVMNHKAGADYTENVTAVEVNPSNRNQETSGEYNIQAWTGFNFPGRGTTYSNFKWQWFHFDGTDWDQSRSLSRIFKFTGKAWDWEVSSENGNYDYLMYADIDYDHPDVVNEMKKWGVWYANEVGLDGYRLDAVKHIKFSFLKDWVDNARAATGKEMFTVGEYWQNDLGALNNYLAKVNYNQSLFDAPLHYNFYAASTGGGYYDMRNILNNTLVASNPTKAVTLVENHDTQPGQSLESTVQPWFKPLAYAFILTRSGGCPSVFYGDMYGTKGTTTREIPALKSKIEPLLKARKDYAYGTQRDYIDNPDVIGWTREGDSTKAKSGLATVITDGPGGSKRMYVGTSNAGEIWYDLTGNRTDKITIGSDGYATFPVNGGSVSVWVQQ

SEQ ID NO: 35743 - protein, 480 aa, Cytophaga sp.
NGTMMQYFEWYVPNDGQQWNRLRTDAPYLSSVGITAVWTPPAYKGTSQADVGYGPYDLYDLGEFNQKGTVRTKYGTKGELKSAVNTLHSNGIQVYGDVVMNHKAGADYTENVTAVEVNPSNRNQEKSGEYNIQAWTGFNFPGRGTTYSNFKWQWFHFDGTDWDQSRSLSRIFKFTGKAWDWEVSSENGNYDYLMYADIDYDHPDVVNEMKKWGVWYANEVGLDGYRLDAVKHIKFSFLKDWVDNARAATGKEMFTVGEYWQNDLGALNNYLAKVNYNQSLFDAPLHYNFYAASTGGGYYDMRNILNNTLVASNPTKAVTLVENHDTQPGQSLESTVQPWFKPLAYAFILTRSGGYPSVFYGDMYGTKGTTTREIPALKSKIEPLLKARKDYAYGTQRDYIDNPDVIGWTREGDSTKAKSGLATVITDGPGGSKRMYVGTSNAGEIWYDLTGNRTDKITIGSDGYATFPVNGGSVSVWVQQ

SEQ ID NO: 35744 - protein, 480 aa, Cytophaga sp.
NNTMMQYFEWYVPNDGQQWNRLRTDAPYLSSVGITAVWTPPAYKGTSQADVGYGPYDLYDLGEFNQKGTVRTKYGTKGELKSAVNTLHSNGIQVYGDVVMNHKAGADYTENVTAVEVNPSNRNQETSGEYNIQAWTGFNFPGRGTTYSNFKWQWFHFDGTDWDQSRSLSRIFKFTGKAWDWEVSSENGNYDYLMYADIDYDHPDVVNEMKKWGVWYANEVGLDGYRLDAVKHIKFSFLKDWVDNARAATGKEMFTVGEYWQNDLGALNNYLAKVNYNQSLFDAPLHYNFYAASTGGGYYDMRNILNNTLVASNPTKAVTLVENHDTQPGQSLESTVQPWFKPLAYAFILTRSGGYPSVFYGDMYGTKGTTTREIPALKSKIEPLLKARKDYAYGTQRDYIDNPDVIGWTREGDSTKAKSGLATVITDGPGGSKRMYVGTSNAGEIWYDLTGNRTDKITIGSDGYATFPVNGGSVSVWVQQ

SEQ ID NO: 35745 - protein, 480 aa, Cytophaga sp.
NGTMMQYFEWYVPNDGQQWNRLRTDAPYLSSVGITAVWTPPAYKGTSQADVGYGPYDLYDLGEFNQKGTVRTKYGTKGELKSAVNTLHSNGIQVYGDVVMNHKAGADYTENVTAVEVNPSNRNQETSGEYNIQAWTGFNFPGRGTTYSNFKWQWFHFDGTDWDQSRSLSRIFKFTGKAWDWEVSSENGNYDYLMYADIDYDHPDVVNEMKKWGVWYANEVGLDGYRLDAVKHIKFSFLKDWVDNARAATGKEMFTVGEYWQNDLGALNNYLAKVNYNQSLFDAPLHYNFYAASTGGGYYDMRNILNNTLVASNPTKAVTLVENHDTQPGQSLESTVQPWFKPLAYAFILTRSGGYPSVFYGDMYGTKGTTTREIPALKSKIEPLLKARKDYAYGTQRDYIDNPDVIGWTREGDSTKAKSGLATVITDGPGGSKRMLVGTSNAGEIWYDLTGNRTDKITIGSDGYATFPVNGGSVSVWVQQ

SEQ ID NO: 35746 - protein, 480 aa, Cytophaga sp.
NGTMMQYFEWYVPNDGQQWNRLRTDAPYLSSVGITAVWTPPAYKGTSQADVGYGPYDLYDLGEFNQKGTVRTKYGTKGELKSAVNTLHSNGIQVYGDVVMNHKAGADYTENVTAVEVNPSNRNQETSGEYNIQAWTGFNFNGRGTTYSNFKWQWFHFDGTDWDQSRSLSRIFKFTGKAWDWEVSSENGNYDYLMYADIDYDHPDVVNEMKKWGVWYANEVGLDGYRLDAVKHIKFSFLKDWVDNARAATGKEMFTVGEYWQNDLGALNNYLAKVNYNQSLFDAPLHYNFYAASTGGGYYDMRNILNNTLVASNPTKAVTLVENHDTQPGQSLESTVQPWFKPLAYAFILTRSGGYPSVFYGDMYGTKGTTTREIPALKSKIEPLLKARKDYAYGTQRDYIDNPDVIGWTREGDSTKAKSGLATVITDGPGGSKRMYVGTSNAGEIWYDLTGNRTDKITIGSDGYATFPVNGGSVSVWVQQ

SEQ ID NO: 35747 - protein, 480 aa, Cytophaga sp.
NGTMMQYFEWYVPNDGQQWNRLRTDAPYLSSVGITAVWTPPAYKGTSQADVGYGPYDLYDLGEFNQKGTVRTKYGTKGELKSAVNTLHSNGIQVYGDVVMNHKAGADYTENVTAVEVNPSNRNQETSGEYNIQAWTGFNFPGRGTTYSNFKWQWFHFDGTDWDQSRSLSRIFKFTGKAWDWEVSSENGNYDYLMYADIDYDHPDVVNEMKKWGVWYANEVGLDGYRLDAVKHIKFSFLKDWVDNARAATGKEMFTVGEYWQNDLGALNNYLAKVNYNQSLFDAPLHYNFYAASTGGGYYDMRNILNNTLVASNPTKAVTLVENHDTQPGQSLESTVQPWFKPLAYAFILTRSGGYPSVFYGDMYGTKGTTTREIPALKSKIEPLLKARKDYAYGTQRDYIDNPDVIGWTREGDSTKAKSGLATVITDGPGGSKRMNVGTSNAGEIWYDLTGNRTDKITIGSDGYATFPVNGGSVSVWVQQ

SEQ ID NO: 35748 - protein, 480 aa, Cytophaga sp.
NGTMMQYFEWYVPNDGQQWNRLRTDAPYLSSVGITAVWTPPAYKGTSQADVGYGPYDLYDLGEFNQKGTVRTKYGTKGELKSAVNTLHSNGIQVYGDVVMNHKAGADYTENVTAVEVNPSNRNQETSGEYNIQAWTGFNFPGRGTTYSNFKWQWFHFDGTDWDQSRSLSRIFKFTGKAWDWEVSSENGNYDYLMYADIDYDHPDVVNEMKKWGVWYANEVGLDGYRLDAVKHIKFSFLKDWVDNARAATGKEMFTVGEYWQNDLGALNNYLAKVNYNQSLFDAPLHYNFYAASTGGGYYDMRNILNNTLVASNPTKAVTLVENHDTQPGQSLESTVQPWFKPLAYAFILTRSGGYPSVFYGDMYGTKGTTTREIPALKSKIEPLLKARKDYAYGTQRDYIDNPDVIGWTREGDSTKAKSGLATVITDGPGGSKRMYVGTSNAGEIWYDLTGNRTDKITIGEDGYATFPVNGGSVSVWVQQ

SEQ ID NO: 35749 - protein, 480 aa, Cytophaga sp.
NGTMMQYFEWYVPNDGQQWNRLRTDAPYLSSVGITAVWTPPAYKGTSQADVGYGPYDLYDLGEFNQKGTVRTKYGTKGELKSAVNTLHSNGIQVYGDVVMNHKAGADYTENVTAVEVNPSNRNQETSGEYNIQAWTGFNFPGRGTTYSNFKWQWFHFDGTDWDQSRSLSRIFKFTGKAWDWEVSSENGNYDYLMYADIDYDHPDVVNEMKKWGVWYANEVGLDGYRLDAVKHIKFSFLKDWVDNARAATGKEMFTVGEYWQNDLGALNNYLAKVNYNQSLFDAPLHYNFYAASTGGGYYDMRNILNNTLVASNPTKAVTLVENHDTQPGQSLESTVQPWFKPLAYAFILTRSGGYPSVFYGDMYGTKGTTTREIPALKSKIEPLLKARKDYAYGTQRDYIDNPDVIGWTREGDSTKAKSGLATVITDGPGGSKRMYVGTSNAGEIWYDLTGNRTDKITIGCDGYATFPVNGGSVSVWVQQ

SEQ ID NO: 35750 - protein, 480 aa, Cytophaga sp.
NGTMMQYFEWYVPNDGQQWNRLRTDAPYLSSVGITAVWTPPAYKGTSQADVGYGPYDLYDLGEFNQKGTVRTKYGTKGELKSAVNTLHSNGIQVYGDVVMNHKAGADYTENVTAVEVNPSNRNQETSGEYNIQAWTGFNFPGRGTTYSNFKWQWFHFDGTDWDQGRSLSRIFKFTGKAWDWEVSSENGNYDYLMYADIDYDHPDVVNEMKKWGVWYANEVGLDGYRLDAVKHIKFSFLKDWVDNARAATGKEMFTVGEYWQNDLGALNNYLAKVNYNQSLFDAPLHYNFYAASTGGGYYDMRNILNNTLVASNPTKAVTLVENHDTQPGQSLESTVQPWFKPLAYAFILTRSGGYPSVFYGDMYGTKGTTTREIPALKSKIEPLLKARKDYAYGTQRDYIDNPDVIGWTREGDSTKAKSGLATVITDGPGGSKRMYVGTSNAGEIWYDLTGNRTDKITIGSDGYATFPVNGGSVSVWVQQ

SEQ ID NO: 35751 - protein, 480 aa, Cytophaga sp.
NGTMMQYFEWYVPNDGQQWNRLRTDAPYLSSVGITAVWTPPAYKGTSQADVGYGPYDLYDLGEFNQKGTTRTKYGTKGELKSAVNTLHSNGIQVYGDVVMNHKAGADYTENVTAVEVNPSNRNQETSGEYNIQAWTGFNFPGRGTTYSNFKWQWFHFDGTDWDQSRSLSRIFKFTGKAWDWEVSSENGNYDYLMYADIDYDHPDVVNEMKKWGVWYANEVGLDGYRLDAVKHIKFSFLKDWVDNARAATGKEMFTVGEYWQNDLGALNNYLAKVNYNQSLFDAPLHYNFYAASTGGGYYDMRNILNNTLVASNPTKAVTLVENHDTQPGQSLESTVQPWFKPLAYAFILTRSGGYPSVFYGDMYGTKGTTTREIPALKSKIEPLLKARKDYAYGTQRDYIDNPDVIGWTREGDSTKAKSGLATVITDGPGGSKRMYVGTSNAGEIWYDLTGNRTDKITIGSDGYATFPVNGGSVSVWVQQ

SEQ ID NO: 35752 - protein, 480 aa, Cytophaga sp.
NGTMMQYFEWYVPNDGQQWNRLRTDAPYLSSVGITAVWTPPAYKGTSQADVGYGPYDLYDLGEFNQKGTVRTKYGTKGELKSAVNTLHSNGIQVYGDVVMNHKAGADYTENVTAVEVNPSNRNQETSGEYNIQAWTGFNFPGRGTTYSNFKWQWFHFDGTDWDQSRSLSRIFKFTGKAWDWEVSSENGNYDYLMYADIDYDHPDVVNEMKKWGVWYANEVGLDGYRLDAVKHIKFSFLKDWVDNARAATGKEMFTVGEYWQNDLGALNNYLAKVNYNQSLFDAPLHYNFYAASTGGGYYDMRNILNNTLVASNPTKAVTLVENHDTQPGQSLESTVQPWFKPLAYAFILTRSGGYPSVFYGDMYGTKGATTREIPALKSKIEPLLKARKDYAYGTQRDYIDNPDVIGWTREGDSTKAKSGLATVITDGPGGSKRMYVGTSNAGEIWYDLTGNRTDKITIGSDGYATFPVNGGSVSVWVQQ

SEQ ID NO: 35753 - protein, 480 aa, Cytophaga sp.
NGTMMQYFEWYVPNDGQQWNRLRTDAPYLSSVGITAVWTPPAYKGTSQADVGYGPYDLYDLGEFNQKGTVRTKYGTKGELKSAVNTLHSNGIQVYGDVVMNHKAGADYTENVTAVEVNPSNRNQETRGEYNIQAWTGFNFPGRGTTYSNFKWQWFHFDGTDWDQSRSLSRIFKFTGKAWDWEVSSENGNYDYLMYADIDYDHPDVVNEMKKWGVWYANEVGLDGYRLDAVKHIKFSFLKDWVDNARAATGKEMFTVGEYWQNDLGALNNYLAKVNYNQSLFDAPLHYNFYAASTGGGYYDMRNILNNTLVASNPTKAVTLVENHDTQPGQSLESTVQPWFKPLAYAFILTRSGGYPSVFYGDMYGTKGTTTREIPALKSKIEPLLKARKDYAYGTQRDYIDNPDVIGWTREGDSTKAKSGLATVITDGPGGSKRMYVGTSNAGEIWYDLTGNRTDKITIGSDGYATFPVNGGSVSVWVQQ

SEQ ID NO: 35754 - protein, 480 aa, Cytophaga sp.
NGTMMQYFEWYVPNDGQQWNRLRTDAPYLSSVGITAVWTPPAYKGTSQADVGYGPYDLYDLGEFNQKGTVRTKYGTKGELKSAVNTLHSNGIQVYGDVVMNHKAGADYTENVTAVEVNPSNRNQETSGEYNIQAWTGFNFPGRGTTYSNFKWQWFHFDGTDWDQSRSLSRIFKFTGKAWDWEVSSENGNYDYLMYADIDYDHPDVVNEMKKWGVWYANEVGLDGYRLDAVKHIKFSFLKDWVDNARAATGKEMFTVGEYWQNDLGALNNYLAKVNYNQSLFDAPLHYNFYAASTGGGYYDMRNILNNTLVASNPTKAVTLVENHDTQPGQSLESTVQPWFKPLAYAFILTRSGGYPSVFYGDMYGTKGTTTREIPALKSKIEPLLKARKDYAYGTQRDYIDNPDVIGWTREGDSTKAKSGLATVITDGPGGSKRMRVGTSNAGEIWYDLTGNRTDKITIGSDGYATFPVNGGSVSVWVQQ

SEQ ID NO: 35755 - protein, 480 aa, Cytophaga sp.
NGTMMQYFEWYVPNDGQQWNRLRTDAPYLSSVGITAVWTPPAYKGTSQADVGYGPYDLYDLGEFNQKGTVRTKYGTKGELKSAVNTLHSNGIQVYGDVVMNHKAGADYTENVTAVEVNPSNRNQETSGEYNIQAWTGFNFPGRGTTYSNFKWQWFHFDGTDWDQSRSLSRIFKFTGKAWDWEVSSENGNYDYLMYADIDYDHPDVVNEMKKWGVWYANEVGLDGYRLDAVKHIKFSFLKDWVDNARAATGKEMFTVGEYWQNDLGALNNYLAKVNYNQSLFDAPLHYNFYDASTGGGYYDMRNILNNTLVASNPTKAVTLVENHDTQPGQSLESTVQPWFKPLAYAFILTRSGGYPSVFYGDMYGTKGTTTREIPALKSKIEPLLKARKDYAYGTQRDYIDNPDVIGWTREGDSTKAKSGLATVITDGPGGSKRMYVGTSNAGEIWYDLTGNRTDKITIGSDGYATFPVNGGSVSVWVQQ

SEQ ID NO: 35756 - protein, 480 aa, Cytophaga sp.
NGTMMQYFEWYVPNDGQQWNRLRTDAPYLSSVGITAVWTPPAYKGTSQADVGYGPYDLYDLGEFNQKGTVRTKYGTKGELKSAVNTLHSNGIQVYGDVVMNHKAGADYTENVTAVEVNPSNRNQETSGEYNIQAWTGFNFPGRGTTYSNFKWQWFHFDGTDWDQSRSLSRIFKFTGKAWDWEVSSENGNYDYLMYADIDYDHPDVVNEMKKWGVWYANEVGLDGYRLDAVKHIKFSFLKDWVDNARAATGKEMFTVGEYWQNDLGALNNYLAKVNYNQSLFDAPLHYNFYAASTGGGYYDMRNILNNTLVASNPTKAVTLVENHDTQPGQSLESTVQPWFKPLAYAFILTRSGGYPSVFYGDMYGTKGTTTREIPALKSKIEPLLKARKDYAYGTQRDYIDNPDVIGWTRDGDSTKAKSGLATVITDGPGGSKRMYVGTSNAGEIWYDLTGNRTDKITIGSDGYATFPVNGGSVSVWVQQ

SEQ ID NO: 35757 - protein, 480 aa, Cytophaga sp.
NGTMMQYFEWYVPNDGQQWNRLRTDAPYLSSVGITAVWTPPAYKGTSQADVGYGPYDLYDLGEFNQKGTVRTKYGTKGELKSAVNTLHSNGIQVYGDVVMNHKAGADYTENVTAVEVNPSNRNQETSGEYNIQAWTGFNFPGRGTTYSNFKWQWFHFDGTDWDQSRSLSRIFKFTGKAWDWEVSSENGNYDYLMYADIDYDHPDVVNEMKKWGVWYANEVGLDGYRLDAVKHIKFSFLKDWVDNARAATGKEMFTVGEYWQNDLGALNNYLAKVNYNQSLFDAPLHYNFYAASTGGGYYDMRNILNNTLVASNPTKAVTLVENHDTQPGQSLESTVQPWFKPLAYAFILTRSGGYPSVFYGDMYGTKGTTTREIPALKSKIEPLLKARKDYAYGTQRDYIDNPDVIGWTREGDSTKAKSGLATVITDGPGGSKRMYVGTSNAGEIWYDLTGNRTDKITVGSDGYATFPVNGGSVSVWVQQ

SEQ ID NO: 35758 - protein, 480 aa, Cytophaga sp.
NGTMMQYFEWYVPNDGQQWNRLRTDAPYLSSVGITAVWTPPAYKGTSQADVGYGPYDLYDLGEFNQKGTVRTKYGTKGELKSAVNTLHSNGIQVYGDVVMNHKAGADYTENVTAVEVNPSNRNQETSGEYNIQAWTGFNFPGRGTTYSNFKWQWFHFDGTDWDQSRSLSRIFKFTGKAWDWEVSSENGNYDYLMYADIDYDHPDVVNEMKKWGVWYANEVGLDGYRLDAVKHIKFSFLKDWVDNARAATGKEMFTVGEYWQNDLGALNNYLAKVNYNQSLFDAPLHYNFYAASTGGGYYDMRNILNNTLVASNPTKAVTLVENHDTQPGQSLESTVQPWFKPLAYAFILTRSGGLPSVFYGDMYGTKGTTTREIPALKSKIEPLLKARKDYAYGTQRDYIDNPDVIGWTREGDSTKAKSGLATVITDGPGGSKRMYVGTSNAGEIWYDLTGNRTDKITIGSDGYATFPVNGGSVSVWVQQ

SEQ ID NO: 35759 - protein, 480 aa, Cytophaga sp.
NGTMMQYFEWYVPNDGQQWNRLRTDAPYLSSVGITAVWTPPAYKGTSQADVGYGPYDLYDLGEFNQKGTVRTKYGTKGELKSAVNTLHSNGIQVYGDVVMNHKAGADYTENVTAVEVNPSNRNQETSGEYNIQAWTGFNFPGRGTTYSNFKWQWFHFDGTDWDQSRSLSRIFKFTGKAWDWEVSSENGNYDYLMYADIDYDHPDVVNEMKKWGVWYANEVGLDGYRLDAVKHIKFSFLKDWVDNARAATGKEMFTVGEYWQNDLGALNNYLAKVNYNQSLFDAPLHYNFYAASTGGGYYDMRNILNNTLVASNPTKAVTLVENHDTQPGQSLESTVQPWFKPLAYAFILTRSGGYPSVFYGDMYGTKGTTTREIPALKSKIEPLLKARKDYAYGTQRDYIDNPDVIGWTREGDSTKAQSGLATVITDGPGGSKRMYVGTSNAGEIWYDLTGNRTDKITIGSDGYATFPVNGGSVSVWVQQ

SEQ ID NO: 35760 - protein, 480 aa, Cytophaga sp.
NGTMMQYFEWYVPNDGQQWNRLRTDAPYLSSVGITAVWTPPAYKGTSQADVGYGPYDLYDLGEFNQKGTVRTKYGTKGELKSAVNTLHSNGIQVYGDVVMNHKAGADYTENVTAVEVNPSNRNQETSGEYNIQAWTGFNFPGRGTTYSNFKWQWFHFDGTDWDQSRSLSRIFKFTGKAWDWEVSSENGNYDYLMYADIDYDHPDVVNEMKKWGVWYANEVGLDGYRLDAVKHIKFSFLKDWVDNARACTGKEMFTVGEYWQNDLGALNNYLAKVNYNQSLFDAPLHYNFYAASTGGGYYDMRNILNNTLVASNPTKAVTLVENHDTQPGQSLESTVQPWFKPLAYAFILTRSGGYPSVFYGDMYGTKGTTTREIPALKSKIEPLLKARKDYAYGTQRDYIDNPDVIGWTREGDSTKAKSGLATVITDGPGGSKRMYVGTSNAGEIWYDLTGNRTDKITIGSDGYATFPVNGGSVSVWVQQ

SEQ ID NO: 35761 - protein, 480 aa, Cytophaga sp.
NGTMMQYFEWYVPNDGQQWNRLRTDAPYLSSVGITAVWTPPAYKGTSQADVGYGPYDLYDLGEFNQKGTVRTKYGTKGELKSAVNTLHSNGIQVYGDVVMNHKAGADYTENVTAVEVNPSNRNQETSGEYNIQAWTGFNFPGRGTTYSNFKWQWFHFDGTDWDQSRSLSRIFKFTGKAWDWEVSSENGNYDYLMYADIDYDHPDVVNEMKKWGVWYANEVGLDGYRLDAVKHIKFSFLKDWVDNARAATGKEMFTVGEYWQNDLGALNNYLAKVNYNQSLFDAPLHYNFYAASTGGGYYDMRNILNNTLVASNPTRAVTLVENHDTQPGQSLESTVQPWFKPLAYAFILTRSGGYPSVFYGDMYGTKGTTTREIPALKSKIEPLLKARKDYAYGTQRDYIDNPDVIGWTREGDSTKAKSGLATVITDGPGGSKRMYVGTSNAGEIWYDLTGNRTDKITIGSDGYATFPVNGGSVSVWVQQ

SEQ ID NO: 35762 - protein, 480 aa, Cytophaga sp.
NGTMMQYFEWYVPNDGQQWNRLRTDAPYLSSVGITAVWTPPAYKGTSQADVGYGPYDLYDLGEFNQKGTVRTKYGTKGELKSAVNTLHSNGIQVYGDVVMNHKAGADYTENVTAVEVNPSNRNQETSGEYNIQAWTGFNFPGRGTTYSNFKWQWFHFDGTDWDQSRSLSRIFKFTGKAWDWEVSSENGNYDYLMYADIDYDHPDVVNEMKKWGVWYANEVGLDGYRLDAVKHIKFSFLKDWVDNARAATGKEMFTVGEYWQNDLGALNNYLAKVNYNQSLFDAPLHYNFYAASTGGGYYDMRNILNNTLVASNPTKAVTLVENHDTQPGQSLESTVQPWFKPLAYAFILTRSGGYPSVFYGDMYGTKGTTTREIPALKSKIEPLLKARKDYAYGTQRDYIDNPDVIGWTREGCSTKAKSGLATVITDGPGGSKRMYVGTSNAGEIWYDLTGNRTDKITIGSDGYATFPVNGGSVSVWVQQ

SEQ ID NO: 35763 - protein, 480 aa, Cytophaga sp.
NGTMMQYFEWYVPNDGQQWNRLRTDAPYLSSVGITAVWTPPAYKGTSQADVGYGPYDLYDLGEFNQKGTVRTKYGTKGELKSAVNTLHSNGIQVYGDVVMNHKAGADYTENVTAVEVNPSNRNQETSGEYNIQAWTGFNFPGRGTTYSNFKWQWFHFDGTDWDQSRSLSRIFKFTGKAWDWEVSSENGNYDYLMYADIDYDHPDVVNEMKKWGVWYANEVGLDGYRLDAVKHIKFSFLKDWVDNARAATGKEMFTVGEYWQNDLGALNNYLAKVNYNQSLFDAPLHYNFYAASTGGGYYDMRNILNNTLVASNPTKAVTLVENHDTQPGQSLESTVQPWFKPLAYAFILTRSGGYPSVFYGDMYGTKGPTTREIPALKSKIEPLLKARKDYAYGTQRDYIDNPDVIGWTREGDSTKAKSGLATVITDGPGGSKRMYVGTSNAGEIWYDLTGNRTDKITIGSDGYATFPVNGGSVSVWVQQ

SEQ ID NO: 35764 - protein, 480 aa, Cytophaga sp.
NGTMMQYFEWYVPNDGQQWNRLRTDAPYLSSVGITAVWTPPAYKGTSQADVGYGPYDLYDLGEFNQKGTVRTKYGTKGELKSAVNTLHSNGIQVYGDVVMNHKAGADYTENVTAVEVNPSNRNQETSGEYNIQAWTGFNFPGRGTTYSNFKWQWFHFDGTDWDQSRSLERIFKFTGKAWDWEVSSENGNYDYLMYADIDYDHPDVVNEMKKWGVWYANEVGLDGYRLDAVKHIKFSFLKDWVDNARAATGKEMFTVGEYWQNDLGALNNYLAKVNYNQSLFDAPLHYNFYAASTGGGYYDMRNILNNTLVASNPTKAVTLVENHDTQPGQSLESTVQPWFKPLAYAFILTRSGGYPSVFYGDMYGTKGTTTREIPALKSKIEPLLKARKDYAYGTQRDYIDNPDVIGWTREGDSTKAKSGLATVITDGPGGSKRMYVGTSNAGEIWYDLTGNRTDKITIGSDGYATFPVNGGSVSVWVQQ

SEQ ID NO: 35765 - protein, 480 aa, Cytophaga sp.
NGTMMQYFEWYVPNDGQQWNRLRTDAPYLSSVGITAVWTPPAYKGTSQADVGYGPYDLYDLGEFNQKGTVRTKYGTKGELKSAVNTLHSNGIQVYGDVVMNHKAGADYTENVTAVEVNPSNRNQETSGEYNIQAWTGFNFPGRGTTFSNFKWQWFHFDGTDWDQSRSLSRIFKFTGKAWDWEVSSENGNYDYLMYADIDYDHPDVVNEMKKWGVWYANEVGLDGYRLDAVKHIKFSFLKDWVDNARAATGKEMFTVGEYWQNDLGALNNYLAKVNYNQSLFDAPLHYNFYAASTGGGYYDMRNILNNTLVASNPTKAVTLVENHDTQPGQSLESTVQPWFKPLAYAFILTRSGGYPSVFYGDMYGTKGTTTREIPALKSKIEPLLKARKDYAYGTQRDYIDNPDVIGWTREGDSTKAKSGLATVITDGPGGSKRMYVGTSNAGEIWYDLTGNRTDKITIGSDGYATFPVNGGSVSVWVQQ

SEQ ID NO: 35766 - protein, 480 aa, Cytophaga sp.
NGTMMQYFEWYVPNDGQQWNRLRTDAPYLSSVGITAVWTPPAYKGTSQADVGYGPYDLYDLGEFNQKGTVRTKYGTKGELKSAVNTLHSNGIQVYGDVVMDHKAGADYTENVTAVEVNPSNRNQETSGEYNIQAWTGFNFPGRGTTYSNFKWQWFHFDGTDWDQSRSLSRIFKFTGKAWDWEVSSENGNYDYLMYADIDYDHPDVVNEMKKWGVWYANEVGLDGYRLDAVKHIKFSFLKDWVDNARAATGKEMFTVGEYWQNDLGALNNYLAKVNYNQSLFDAPLHYNFYAASTGGGYYDMRNILNNTLVASNPTKAVTLVENHDTQPGQSLESTVQPWFKPLAYAFILTRSGGYPSVFYGDMYGTKGTTTREIPALKSKIEPLLKARKDYAYGTQRDYIDNPDVIGWTREGDSTKAKSGLATVITDGPGGSKRMYVGTSNAGEIWYDLTGNRTDKITIGSDGYATFPVNGGSVSVWVQQ

SEQ ID NO: 35767 - protein, 480 aa, Cytophaga sp.
NGTMMQYFEWYVPNDGQQWNRLRTDAPYLSSVGITAVWTPPAYKGTSQADVGYGPYDLYDLGEFNQKGTVRTKYGTKGELKSAVNTLHSNGIQVYGDVVMNHKAGADYTENVTAVEVNPSNRNQETSGSYNIQAWTGFNFPGRGTTYSNFKWQWFHFDGTDWDQSRSLSRIFKFTGKAWDWEVSSENGNYDYLMYADIDYDHPDVVNEMKKWGVWYANEVGLDGYRLDAVKHIKFSFLKDWVDNARAATGKEMFTVGEYWQNDLGALNNYLAKVNYNQSLFDAPLHYNFYAASTGGGYYDMRNILNNTLVASNPTKAVTLVENHDTQPGQSLESTVQPWFKPLAYAFILTRSGGYPSVFYGDMYGTKGTTTREIPALKSKIEPLLKARKDYAYGTQRDYIDNPDVIGWTREGDSTKAKSGLATVITDGPGGSKRMYVGTSNAGEIWYDLTGNRTDKITIGSDGYATFPVNGGSVSVWVQQ

SEQ ID NO: 35768 - protein, 480 aa, Cytophaga sp.
NGTMMQYFEWYVPNDGQQWNRLRTDAPYLSSVGITAVWTPPAYKGTSQADVGYGPYDLYDLGEFNQKGTVRTKYGTKGELKSAVNTLHSNGIQVYGDVVMNHKAGADYTENVTAVEVNPSNRNQETSGEYNIQAWTGFNFPGRGTTYSNFKWQWFHFDGTDWDQSRSLSRIFKFTGKAWDWEVSSENGNYDYLMYADIDYDHEDVVNEMKKWGVWYANEVGLDGYRLDAVKHIKFSFLKDWVDNARAATGKEMFTVGEYWQNDLGALNNYLAKVNYNQSLFDAPLHYNFYAASTGGGYYDMRNILNNTLVASNPTKAVTLVENHDTQPGQSLESTVQPWFKPLAYAFILTRSGGYPSVFYGDMYGTKGTTTREIPALKSKIEPLLKARKDYAYGTQRDYIDNPDVIGWTREGDSTKAKSGLATVITDGPGGSKRMYVGTSNAGEIWYDLTGNRTDKITIGSDGYATFPVNGGSVSVWVQQ

SEQ ID NO: 35769 - protein, 480 aa, Cytophaga sp.
NGTMMQYFEWYVPNDGQQWNRLRTDAPYLSSVGITAVWTPPAYKGTSQADVGYGPYDLYDLGEFNQKGTVRTKYGTKGELKSAVNTLHSNGIQVYGDVVMNHKAGADYTENVTAVEVNPSNRNQETSGEYNIQAWTGFNFPGRNTTYSNFKWQWFHFDGTDWDQSRSLSRIFKFTGKAWDWEVSSENGNYDYLMYADIDYDHPDVVNEMKKWGVWYANEVGLDGYRLDAVKHIKFSFLKDWVDNARAATGKEMFTVGEYWQNDLGALNNYLAKVNYNQSLFDAPLHYNFYAASTGGGYYDMRNILNNTLVASNPTKAVTLVENHDTQPGQSLESTVQPWFKPLAYAFILTRSGGYPSVFYGDMYGTKGTTTREIPALKSKIEPLLKARKDYAYGTQRDYIDNPDVIGWTREGDSTKAKSGLATVITDGPGGSKRMYVGTSNAGEIWYDLTGNRTDKITIGSDGYATFPVNGGSVSVWVQQ

SEQ ID NO: 35770 - protein, 480 aa, Cytophaga sp.
NGTMMQYFEWYVPNDGQQWNRLRTDAPYLSSVGITAVWTPPAYKGTSQADVGYGPYDLYDLGEFNQKGTVRTKYGTKGELKSAVNTLHSNGIQVYGDVVMNHKAGADYTENVTAVEVNPSNRNQETGGEYNIQAWTGFNFPGRGTTYSNFKWQWFHFDGTDWDQSRSLSRIFKFTGKAWDWEVSSENGNYDYLMYADIDYDHPDVVNEMKKWGVWYANEVGLDGYRLDAVKHIKFSFLKDWVDNARAATGKEMFTVGEYWQNDLGALNNYLAKVNYNQSLFDAPLHYNFYAASTGGGYYDMRNILNNTLVASNPTKAVTLVENHDTQPGQSLESTVQPWFKPLAYAFILTRSGGYPSVFYGDMYGTKGTTTREIPALKSKIEPLLKARKDYAYGTQRDYIDNPDVIGWTREGDSTKAKSGLATVITDGPGGSKRMYVGTSNAGEIWYDLTGNRTDKITIGSDGYATFPVNGGSVSVWVQQ

SEQ ID NO: 35771 - protein, 480 aa, Cytophaga sp.
NGTMMQYFEWYVPNDGQQWNRLRTDAPYLSSVGITAVWTPPAYKGTSQADVGYGPYDLYDLGEFNQKGTVRTKYGTKGELKSAVNTLHSNGIQVYGDVVMNHKAGADYTENVTAVEVNPSNRNQETSGEYNIQAWTGFNFPGRGTTYSNFKWQWFHFDGTDWDQSRSLSRIFKFTGKAWDWEVSSENGNYDYLMYADIDYDHPDVVNEMKKWGVWYANEVGLDGYRLDAVKHIKFSFLKDWVDNARAATGKEMFTVGEYWQNDLGALNNYLAKVNYNQSLFDAPLHYNFYAASTGGGYYDMRNILNNTLVASNPTKAVTLVENHDTQPGQSLESTVQPWFKPLAYAFILTRSGGYPSVFYGDMYGTKGTTTREIPALKSKIEPLLKARKDYAYGTQRDYIDNPDVIGWTREGDSTKAKSGLATVITDGPYGSKRMYVGTSNAGEIWYDLTGNRTDKITIGSDGYATFPVNGGSVSVWVQQ

SEQ ID NO: 35772 - protein, 480 aa, Cytophaga sp.
NGTMMQYFEWYVPNDGQQWNRLRTDAPYLSSVGITAVWTPPAYKGTSQADVGYGPYDLYDLGEFNQKGTVRTKYGTKGELKSAVNTLHSNGIQVYGDVVMNHKAGADYTENVTAVEVNPSNRNQETSGEYNIQAWTGFNFPGRGTTYSNFKWQWFHFDGTDWDQSRSLSRIFKFTGKAWDWEVSSENGNYDYLMYADIDYDHPDVVNEMKKWGVWYANEVGLDGYRLDAVKHIKFSFLKDWVDNARAATGKEMFTVGEYWQNDLGALNNYLAKVNYNQSLFDAPLHYNFYAASTGGGYYDMRNILNNTLVASNPTKAVTLVENHDTQPGQSLESTVQPWFKPLAYAFILTRSGGYPSVFYGDMYGTKGTTTREIPALKSKIEPLLKARKDYAYGTQRDYIDNPDVIGWTREGDSTKAKSGLATVITDGPGGSKRMYVGTSNAGEIWYDLTGNETDKITIGSDGYATFPVNGGSVSVWVQQ

SEQ ID NO: 35773 - protein, 480 aa, Cytophaga sp.
NGTMMQYFEWYVPNDGQQWNRLRTDAPYLSSVGITAVWTPPAYKGTSQADVGYGPYDLYDLGEFNQKGTVRTKYGTKGELKSAVNTLHSNGIQVYGDVVMNHKAGADYTENVTAVEVNPSNRNQETSGEYNIQAWTGFNFPGRGTTYSNFKWQWFHFDGTDWDQSRSLSRIFKFTGKAWDWEVSSENGNYDYLMYADIDYDHPDVVNEMKKWGVWYANEVGLDGYRLDAVKHIKFSFLKDWVDNARAATGKEMFTVGEYWQNDLGALNNYLAKVNYNQSLFDAPLHYNFYAASTGGGYYDMRNILNNTLVASNPTKAVTLVENHDTQPGQSLESTVQPWFKPLAYAFILTRSGGYPSVFYGDMYGTKGTTTREIPALKSKIEPLLKARKDYAYGTQRDYIDNPDVIGWTREGDSTKAKSGLATVITDGPGGKKRMYVGTSNAGEIWYDLTGNRTDKITIGSDGYATFPVNGGSVSVWVQQ

SEQ ID NO: 35774 - protein, 480 aa, Cytophaga sp.
NGTMMQYFEWYVPNDGQQWNRLRTDAPYLSSVGITAVWTPPAYKGTSQADVGYGPYDLYDLGEFNQKGTVRTKYGTKGELKSAVNTLHSNGIQVYGDVVMNHKAGADYTENVTAVEVNPSNRNQETSGEYNIQAWTGFNFPGRGTTYSNFKWQWFHFDGTDWDQSHSLSRIFKFTGKAWDWEVSSENGNYDYLMYADIDYDHPDVVNEMKKWGVWYANEVGLDGYRLDAVKHIKFSFLKDWVDNARAATGKEMFTVGEYWQNDLGALNNYLAKVNYNQSLFDAPLHYNFYAASTGGGYYDMRNILNNTLVASNPTKAVTLVENHDTQPGQSLESTVQPWFKPLAYAFILTRSGGYPSVFYGDMYGTKGTTTREIPALKSKIEPLLKARKDYAYGTQRDYIDNPDVIGWTREGDSTKAKSGLATVITDGPGGSKRMYVGTSNAGEIWYDLTGNRTDKITIGSDGYATFPVNGGSVSVWVQQ

SEQ ID NO: 35775 - protein, 480 aa, Cytophaga sp.
NGTMMQYFEWYVPNDGQQWNRLRTDAPYLSSVGITAVWTPPAYKGTSQADVGYGPYDLYDLGEFNQKGTVRTKYGTKGELKSAVNTLHSNGIQVYGDVVMNHKAGADYTENVTAVEVSPSNRNQETSGEYNIQAWTGFNFPGRGTTYSNFKWQWFHFDGTDWDQSRSLSRIFKFTGKAWDWEVSSENGNYDYLMYADIDYDHPDVVNEMKKWGVWYANEVGLDGYRLDAVKHIKFSFLKDWVDNARAATGKEMFTVGEYWQNDLGALNNYLAKVNYNQSLFDAPLHYNFYAASTGGGYYDMRNILNNTLVASNPTKAVTLVENHDTQPGQSLESTVQPWFKPLAYAFILTRSGGYPSVFYGDMYGTKGTTTREIPALKSKIEPLLKARKDYAYGTQRDYIDNPDVIGWTREGDSTKAKSGLATVITDGPGGSKRMYVGTSNAGEIWYDLTGNRTDKITIGSDGYATFPVNGGSVSVWVQQ

SEQ ID NO: 35776 - protein, 480 aa, Cytophaga sp.
NGTMMQYFEWYVPNDGQQWNRLRTDAPYLSSVGITAVWTPPAYKGTSQADVGYGPYDLYDLGEFNQKGTVRTKYGTKGELKSAVNTLHSNGIQVYGDVVMNHKAGADYTENVTALEVNPSNRNQETSGEYNIQAWTGFNFPGRGTTYSNFKWQWFHFDGTDWDQSRSLSRIFKFTGKAWDWEVSSENGNYDYLMYADIDYDHPDVVNEMKKWGVWYANEVGLDGYRLDAVKHIKFSFLKDWVDNARAATGKEMFTVGEYWQNDLGALNNYLAKVNYNQSLFDAPLHYNFYAASTGGGYYDMRNILNNTLVASNPTKAVTLVENHDTQPGQSLESTVQPWFKPLAYAFILTRSGGYPSVFYGDMYGTKGTTTREIPALKSKIEPLLKARKDYAYGTQRDYIDNPDVIGWTREGDSTKAKSGLATVITDGPGGSKRMYVGTSNAGEIWYDLTGNRTDKITIGSDGYATFPVNGGSVSVWVQQ

SEQ ID NO: 35777 - protein, 480 aa, Cytophaga sp.
NGTMMQYFEWYVPNDGQQWNRLRTDAPYLSSVGITAVWTPPAYKGTSQADVGYGPYDLYDLGEFNQKGTVRTKYGTKGELKSAVNTLHSNGIQVYGDVVMNHKAGADYTENVTAVEVNPSNRNQETSGEYNIQAWTGFNFPGRGTTYSNFKWQWFHFDGTDWDQSRSLSRIFKFTGKAWDWEVSSENGNYDYLMYADIDYDHPDVVNEMKKWGVWYANEVGLDGYRLDAVKHIKFSFLKDWVDNATAATGKEMFTVGEYWQNDLGALNNYLAKVNYNQSLFDAPLHYNFYAASTGGGYYDMRNILNNTLVASNPTKAVTLVENHDTQPGQSLESTVQPWFKPLAYAFILTRSGGYPSVFYGDMYGTKGTTTREIPALKSKIEPLLKARKDYAYGTQRDYIDNPDVIGWTREGDSTKAKSGLATVITDGPGGSKRMYVGTSNAGEIWYDLTGNRTDKITIGSDGYATFPVNGGSVSVWVQQ

SEQ ID NO: 35778 - protein, 480 aa, Cytophaga sp.
NGTMMQYFEWYVPNDGQQWNRLRTDAPYLSSVGITAVWTPPAYKGTSQADVGYGPYDLYDLGEFNQKGTVRTKYGTKGELKSAVNTLHSNGIQVYGDVVMNHKAGADYTENVTAVEVNPSNRNQETSGEYNIQAWTGFNFPGRGTTYSNFKWQWFHFDGTDWDQSRSLSRIFKFTGKAWDWEVSSENGNYDYLMYADIDYDHPDVVNEMKKWGVWYANEVGLDGYRLDAVKHIKFSFLKDWVDNARAATGKEMFTVGEYWQNDLGALNNYLAKVNYNQSLFDAPLHYNFYAASTGGGYYDMRNILNNTLVASNPTKAVTLVENHDTQPGQSLESTVQPWFKPLAYAFILTRSGGYPSVFYGDMYGTKGTTTREIPALKSKIEPLLKARKDYAYGTQRDYIDNPDVIGWTREGDSTKLKSGLATVITDGPGGSKRMYVGTSNAGEIWYDLTGNRTDKITIGSDGYATFPVNGGSVSVWVQQ

SEQ ID NO: 35779 - protein, 480 aa, Cytophaga sp.
NGTMMQYFEWYVPNDGQQWNRLRTDAPYLSSVGITAVWTPPAYKGTSQADVGYGPYDLYDLGEFNQKGTVRTKYGTKGELKSAVNTLHSNGIQVYGDVVMNHKAGADYTENVTAVEVNPSNRNQETSGEYNIQAWTGFNFPGRGTTYSNFKWQWFHFDGTDWDQSRSLSRIFKFTGKEWDWEVSSENGNYDYLMYADIDYDHPDVVNEMKKWGVWYANEVGLDGYRLDAVKHIKFSFLKDWVDNARAATGKEMFTVGEYWQNDLGALNNYLAKVNYNQSLFDAPLHYNFYAASTGGGYYDMRNILNNTLVASNPTKAVTLVENHDTQPGQSLESTVQPWFKPLAYAFILTRSGGYPSVFYGDMYGTKGTTTREIPALKSKIEPLLKARKDYAYGTQRDYIDNPDVIGWTREGDSTKAKSGLATVITDGPGGSKRMYVGTSNAGEIWYDLTGNRTDKITIGSDGYATFPVNGGSVSVWVQQ

SEQ ID NO: 35780 - protein, 480 aa, Cytophaga sp.
NGTMMQYFEWYVPNDGQQWNRLRTDAPYLSSVGITAVWTPPAYKGTSQADVGYGPYDLYDLGEFNQKGTVRTKYGTKGELKSAVNTLHSNGIQVYGDVVMNHKAGADYTENVTAVEVNPSNRNQETSGEYNIQAWTGFNFPGRGTTYSNFKWQWFHCDGTDWDQSRSLSRIFKFTGKAWDWEVSSENGNYDYLMYADIDYDHPDVVNEMKKWGVWYANEVGLDGYRLDAVKHIKFSFLKDWVDNARAATGKEMFTVGEYWQNDLGALNNYLAKVNYNQSLFDAPLHYNFYAASTGGGYYDMRNILNNTLVASNPTKAVTLVENHDTQPGQSLESTVQPWFKPLAYAFILTRSGGYPSVFYGDMYGTKGTTTREIPALKSKIEPLLKARKDYAYGTQRDYIDNPDVIGWTREGDSTKAKSGLATVITDGPGGSKRMYVGTSNAGEIWYDLTGNRTDKITIGSDGYATFPVNGGSVSVWVQQ

SEQ ID NO: 35781 - protein, 480 aa, Cytophaga sp.
NGTMMQYFEWYVPNDGQQWNRLRTDAPYLSSVGITAVWTPPAYKGTSQADVGYGPYDLYDLGEFNQKGTVRTKYGTKGELKSAVNTLHSNGIQVYGDVVMNHKAGADYTENVTAVEVNPSNRNQETSGEYNIQAWTGFNFPGRGTTYSNFKWQWFHFDGTDWDQSRSLSRIFKFTGKAWDWEVSSENGNYDYLMYADIDYDHPDVVNEMKKWGVWYANEVGLDGYRLDAVKHIKFSFLKDWVDNARAATGKEMFTVGEYWQNDLGALNNYLAKVNYNQSLFDAPLHYNFYAASTGGGYYDMRNILNNTLVASNPTKAVTLVENHDTQPGQSLESTVQPWFKPLAYAFILTRSGGYPSVFYGDMYGTKGTTTREIPALKSKIEPLLKARKDYAYGTQRDYIDNPDVIGWTREGMSTKAKSGLATVITDGPGGSKRMYVGTSNAGEIWYDLTGNRTDKITIGSDGYATFPVNGGSVSVWVQQ

SEQ ID NO: 35782 - protein, 480 aa, Cytophaga sp.
NGTMMQYFEWYVPNDGQQWNRLRTDAPYLSSVGITAVWTPPAYKGTSQADVGYGPYDLYDLGEFNQKGTVRTKYGTKGELKSAVNTLHSNGIQVYGDVVMNHKAGADYTENVTAVEVNPSNRNQETSGGYNIQAWTGFNFPGRGTTYSNFKWQWFHFDGTDWDQSRSLSRIFKFTGKAWDWEVSSENGNYDYLMYADIDYDHPDVVNEMKKWGVWYANEVGLDGYRLDAVKHIKFSFLKDWVDNARAATGKEMFTVGEYWQNDLGALNNYLAKVNYNQSLFDAPLHYNFYAASTGGGYYDMRNILNNTLVASNPTKAVTLVENHDTQPGQSLESTVQPWFKPLAYAFILTRSGGYPSVFYGDMYGTKGTTTREIPALKSKIEPLLKARKDYAYGTQRDYIDNPDVIGWTREGDSTKAKSGLATVITDGPGGSKRMYVGTSNAGEIWYDLTGNRTDKITIGSDGYATFPVNGGSVSVWVQQ

SEQ ID NO: 35783 - protein, 480 aa, Cytophaga sp.
NGTMMQYFEWYVPNDGQQWNRLRTDAPYLSSVGITAVWTPPAYKGTSQADVGYGPYDLYDLGEFNQKGTVRTKYGTKGELKSAVNTLHSNGIQVYGDVVMNHKAGADYTENVTAVEVNPSNRNQETSGEYNIQAWTGFNFPGRGTTYSNFKWQWFHFDGTDWDQSRSLSRIFKFTGKAWDWEVSSENGNYDYLMYADIDYDHPDVVNEMKKWGVWYANEVGLDGYRLDAVKHIQFSFLKDWVDNARAATGKEMFTVGEYWQNDLGALNNYLAKVNYNQSLFDAPLHYNFYAASTGGGYYDMRNILNNTLVASNPTKAVTLVENHDTQPGQSLESTVQPWFKPLAYAFILTRSGGYPSVFYGDMYGTKGTTTREIPALKSKIEPLLKARKDYAYGTQRDYIDNPDVIGWTREGDSTKAKSGLATVITDGPGGSKRMYVGTSNAGEIWYDLTGNRTDKITIGSDGYATFPVNGGSVSVWVQQ

SEQ ID NO: 35784 - protein, 480 aa, Cytophaga sp.
NGTMMQYFEWYVPNDGQQWNRLRTDAPYLSSVGITAVWTPPAYKGTSQADVGYGPYDLYDLGEFNQKGTVRTKYGTKGELKSAVNTLHSNGIQVYGDVVMNHKAGADYTENVTAVEVNPSNRNQETSGEYNIQAWTGFNFPGRGTTYSNFKWQWFHFDGTDWDQSRSLSRIFKFTGKAWDWEVSSENGNYDYLMYADIDYDHPDVVNEMKKWGVWYANEVGLDGYRLDAVKHIKFSFLKDWVDNARAATGKELFTVGEYWQNDLGALNNYLAKVNYNQSLFDAPLHYNFYAASTGGGYYDMRNILNNTLVASNPTKAVTLVENHDTQPGQSLESTVQPWFKPLAYAFILTRSGGYPSVFYGDMYGTKGTTTREIPALKSKIEPLLKARKDYAYGTQRDYIDNPDVIGWTREGDSTKAKSGLATVITDGPGGSKRMYVGTSNAGEIWYDLTGNRTDKITIGSDGYATFPVNGGSVSVWVQQ

SEQ ID NO: 35785 - protein, 480 aa, Cytophaga sp.
NGTMMQYFEWYVPNDGQQWNRLRTDAPYLSSVGITAVWTPPAYKGTSQADVGYGPYDLYDLGEFNQKGTVRTKYGTKGELKSAVNTLHSNGIQVYGDVVMNHKAGADYTENVTAVEVNPSNRNQETSGEYNIQAWTGFNFPGRGTTYSNFKWQWFHFDGTDWDQSRSLSRIFKFTGKAWDWEVSSENGNYDYLMYADIDYDHPDVVNEMKKWGVWYANEVGLDGYRLDAVKHIKFSFLKDWVDNARAATGKEMFTVGEYWQNDLGALNNYLAKVNYNQSLFDAPLHYNFYAASTGGGYYDMRNILNNTLVASNPTKAVTLVENHDTQPGQSLESTVQPWFKPLAYAFILTRSGGYPSVFYGDMYGTKGTTTREIPALKSKIEPLLKARKDYAYGTQRDYIDNPDVIGWTREGDSTKAKSGLATVITDGPGGSKRMYVGTSNAGEIWYDLTGNRTDKITIGSDGYATFPVNGSSVSVWVQQ

SEQ ID NO: 35786 - protein, 480 aa, Cytophaga sp.
NGTMMQYFEWYVPNDGQQWNRLRTDAPYLSSVGITAVWTPPAYKGTSQADVGYGPYDLYDLGEFNQKGTVRTKYGTKGELKSAVNTLHSNGIQVYGDVVMNHKAGADYTENVTAVEVNPSNRNQETSGEYNIQAWTGFNFPGRGTTYSNFKWQWFHFDGTDWDQSRSLSRIFKFTGKAWDWEVSSENGNYDYLMYADIDYDHPDVVNEMKKWGVWYANEVGLDGYRLDAVKHIKFSFLKDWVDNARAATGKEMFTVGEYWKNDLGALNNYLAKVNYNQSLFDAPLHYNFYAASTGGGYYDMRNILNNTLVASNPTKAVTLVENHDTQPGQSLESTVQPWFKPLAYAFILTRSGGYPSVFYGDMYGTKGTTTREIPALKSKIEPLLKARKDYAYGTQRDYIDNPDVIGWTREGDSTKAKSGLATVITDGPGGSKRMYVGTSNAGEIWYDLTGNRTDKITIGSDGYATFPVNGGSVSVWVQQ

SEQ ID NO: 35787 - protein, 480 aa, Cytophaga sp.
NGTMMQYFEWYVPNDGQQWNRLRTDAPYLSSVGITAVWTPPAYKGTSQADVGYGPYDLYDLGEFNQKGTVRTKYGTKGELKSAVNTLHSNGIQVYGDVVMNHKAGADYTENVTAVEVNPSNRNQETSGEYNIQAWTGFNFPGRGTTYSNFKWQWFHFDGTDWDQSRSLSRIFKFTGKAWDWEVSSENGNYDYLMYADIDYDHPDVVNEMKKWGVWYANEVGLDGYRLDAVKHIKFSFLKDWVDNARAATGKEMFTVGEYWQNDLGALNNYLAKVNYNQSLFDAPLHYNFYAASTGGGYYDMRNILNNTLVASNPTKAVTLVENHDTQPGQSLESTVQPWFKPLAYAFILTRSGGYPSVFYGDMYGTKGTTTREIPALKSKIEPLLKARKDYAYGTQRDYIDNPDVIGWTREGDSTKAKSGLATVITDGPGGSKRMYVGTSNAGEIWSDLTGNRTDKITIGSDGYATFPVNGGSVSVWVQQ

SEQ ID NO: 35788 - protein, 480 aa, Cytophaga sp.
NMTMMQYFEWYVPNDGQQWNRLRTDAPYLSSVGITAVWTPPAYKGTSQADVGYGPYDLYDLGEFNQKGTVRTKYGTKGELKSAVNTLHSNGIQVYGDVVMNHKAGADYTENVTAVEVNPSNRNQETSGEYNIQAWTGFNFPGRGTTYSNFKWQWFHFDGTDWDQSRSLSRIFKFTGKAWDWEVSSENGNYDYLMYADIDYDHPDVVNEMKKWGVWYANEVGLDGYRLDAVKHIKFSFLKDWVDNARAATGKEMFTVGEYWQNDLGALNNYLAKVNYNQSLFDAPLHYNFYAASTGGGYYDMRNILNNTLVASNPTKAVTLVENHDTQPGQSLESTVQPWFKPLAYAFILTRSGGYPSVFYGDMYGTKGTTTREIPALKSKIEPLLKARKDYAYGTQRDYIDNPDVIGWTREGDSTKAKSGLATVITDGPGGSKRMYVGTSNAGEIWYDLTGNRTDKITIGSDGYATFPVNGGSVSVWVQQ

SEQ ID NO: 35789 - protein, 480 aa, Cytophaga sp.
NGTMMQYFEWYVPNDGQQWNRLRTDAPYLSSVGITAVWTPPAYKGTSQADVGYGPYDLYDLGEFNQKGTVRTKYGTKGELKSAVNTLHSNGIQVYGDVVMNHKAGADYTENVTAVEVNPSNRNQETSGEYNIQAWTGFNFPGRGTTYSNFKWQWFHFDGTDWDQSRSLSRIFKFTGKAWDWEVSSENGNYDYLMYADIDYDHPDVVNEMKKWGVWYANEVGLDGYRLDAVKHIKFSFLKDWVDNARAATGKEMFTVGEYWQNDLGALNNYLAKVNYNQSLFDAPLHYNFYAASTGGGYYDMRNILNNTLVASNPTKAVTLVENHDTQPGQSLESTVQPWFKPLAYAFILTRSGGYPSVFYGDMYGTKGTTTREIPALKSKIEPLLKARKDYAYGTQRDYIDNPDVIGWTREGDSTKAKSGLATVITDGPGGSKRMYVGTSNAHEIWYDLTGNRTDKITIGSDGYATFPVNGGSVSVWVQQ

SEQ ID NO: 35790 - protein, 480 aa, Cytophaga sp.
NGTMMQYFEWYVPNDGQQWNRLRTDAPYLSSVGITAVWTPPAYKGTSQADVGYGPYDLYDLGEFNQKGTVRTKYGTKGELKSAVNTLHSNGIQVYGDVVMNHKAGADYTENVTAVEVNPSNRNQETSGEYNIQAWTGFNFPGRGTTYSNFKWQWFHFDGTDWDQSRSLSRIFKFTGKAWDWEVSSENGNYDYLMYADIDYDHPDVVNEMKKWGVWYANEVGLDGYRLDAVKHIKFSFLKDWVDNARAATGKEMFTVGEYWQNDLGALNNYLAKVNYNQSLFDAPLHYNFYAASTGGGYYDMRNILNNTLVASNPTKAVTLVENHDTQPGQSLESTVQPWFKPLAYAFILTRSGGYPSVFYGDMYGTKGTTTREIPALKSKIEPLLKARKDYAYGTQRDYIDNPDVIGWTREGDSTKAKSGLATVITDGPGGSKRMYVGTSNAGEIWYDLTGNRTDKITIGSDGYATFPVNGPSVSVWVQQ

SEQ ID NO: 35791 - protein, 480 aa, Cytophaga sp.
NGTMMQYFEWYVPNDGQQWNRLRTDAPYLSSVGITAVWTPPAYKGTSQADVGYGPYDLYDLGEFNQKGTVRTKYGTKGELKSAVNTLHSNGIQVYGDIVMNHKAGADYTENVTAVEVNPSNRNQETSGEYNIQAWTGFNFPGRGTTYSNFKWQWFHFDGTDWDQSRSLSRIFKFTGKAWDWEVSSENGNYDYLMYADIDYDHPDVVNEMKKWGVWYANEVGLDGYRLDAVKHIKFSFLKDWVDNARAATGKEMFTVGEYWQNDLGALNNYLAKVNYNQSLFDAPLHYNFYAASTGGGYYDMRNILNNTLVASNPTKAVTLVENHDTQPGQSLESTVQPWFKPLAYAFILTRSGGYPSVFYGDMYGTKGTTTREIPALKSKIEPLLKARKDYAYGTQRDYIDNPDVIGWTREGDSTKAKSGLATVITDGPGGSKRMYVGTSNAGEIWYDLTGNRTDKITIGSDGYATFPVNGGSVSVWVQQ

SEQ ID NO: 35792 - protein, 480 aa, Cytophaga sp.
NGTMMQYFEWYVPNDGQQWNRLRTDAPYLSSVGITAVWTPPAYKGTSQADVGYGPYDLYDLGEFNQKGTVRTKYGTKGELKSAVNTLHSNGIQVYGDVVMNHKAGADYTENVTAVEVNPSNRNQETSGEYNIQAWTGFNFPGRGTTYSNFFWQWFHFDGTDWDQSRSLSRIFKFTGKAWDWEVSSENGNYDYLMYADIDYDHPDVVNEMKKWGVWYANEVGLDGYRLDAVKHIKFSFLKDWVDNARAATGKEMFTVGEYWQNDLGALNNYLAKVNYNQSLFDAPLHYNFYAASTGGGYYDMRNILNNTLVASNPTKAVTLVENHDTQPGQSLESTVQPWFKPLAYAFILTRSGGYPSVFYGDMYGTKGTTTREIPALKSKIEPLLKARKDYAYGTQRDYIDNPDVIGWTREGDSTKAKSGLATVITDGPGGSKRMYVGTSNAGEIWYDLTGNRTDKITIGSDGYATFPVNGGSVSVWVQQ

SEQ ID NO: 35793 - protein, 480 aa, Cytophaga sp.
NTTMMQYFEWYVPNDGQQWNRLRTDAPYLSSVGITAVWTPPAYKGTSQADVGYGPYDLYDLGEFNQKGTVRTKYGTKGELKSAVNTLHSNGIQVYGDVVMNHKAGADYTENVTAVEVNPSNRNQETSGEYNIQAWTGFNFPGRGTTYSNFKWQWFHFDGTDWDQSRSLSRIFKFTGKAWDWEVSSENGNYDYLMYADIDYDHPDVVNEMKKWGVWYANEVGLDGYRLDAVKHIKFSFLKDWVDNARAATGKEMFTVGEYWQNDLGALNNYLAKVNYNQSLFDAPLHYNFYAASTGGGYYDMRNILNNTLVASNPTKAVTLVENHDTQPGQSLESTVQPWFKPLAYAFILTRSGGYPSVFYGDMYGTKGTTTREIPALKSKIEPLLKARKDYAYGTQRDYIDNPDVIGWTREGDSTKAKSGLATVITDGPGGSKRMYVGTSNAGEIWYDLTGNRTDKITIGSDGYATFPVNGGSVSVWVQQ

SEQ ID NO: 35794 - protein, 480 aa, Cytophaga sp.
NGTMMQYFEWYVPNDGQQWNRLRTDAPYLSSVGITAVWTPPAYKGTSQADVGYGPYDLYDLGEFNQKGTVRTKYGTKGELKSAVNTLHSNGIQVYGDVVMNHKAGADYTENVTAVEVNPSNRNQETSGEYNIQAWTGFNFPGRGTTYSNFKWQWFHFDGTDWDQSRSLSRIFKFTGKAWDWEVSSENGNYDYLMYADIDYDHPDVVNEMKKWGVWYANEVGLDGYRLDAVKHICFSFLKDWVDNARAATGKEMFTVGEYWQNDLGALNNYLAKVNYNQSLFDAPLHYNFYAASTGGGYYDMRNILNNTLVASNPTKAVTLVENHDTQPGQSLESTVQPWFKPLAYAFILTRSGGYPSVFYGDMYGTKGTTTREIPALKSKIEPLLKARKDYAYGTQRDYIDNPDVIGWTREGDSTKAKSGLATVITDGPGGSKRMYVGTSNAGEIWYDLTGNRTDKITIGSDGYATFPVNGGSVSVWVQQ

SEQ ID NO: 35795 - protein, 480 aa, Cytophaga sp.
NGTMMQYFEWYVPNDGQQWNRLRTDAPYLSSVGITAVWTPPAYKGTSQADVGYGPYDLYDLGEFNQKGTVRTKYGTKGELKSAVNTLHSNGIQVYGDVVMNHKAGADYTENVTAVEVNPSNRNQETSGEYNIQAWTGFNFPGRGTTYSNFKWQWFHFDGTDWDQSRSLSRIFKFTGKAWDWEVSSENGNYDYLMYADIDYDHPDVVNEMKKWGVWYANEVGLDGYRLDAVKHIKFSFLKDWVDNARAATGKECFTVGEYWQNDLGALNNYLAKVNYNQSLFDAPLHYNFYAASTGGGYYDMRNILNNTLVASNPTKAVTLVENHDTQPGQSLESTVQPWFKPLAYAFILTRSGGYPSVFYGDMYGTKGTTTREIPALKSKIEPLLKARKDYAYGTQRDYIDNPDVIGWTREGDSTKAKSGLATVITDGPGGSKRMYVGTSNAGEIWYDLTGNRTDKITIGSDGYATFPVNGGSVSVWVQQ

SEQ ID NO: 35796 - protein, 480 aa, Cytophaga sp.
NGTMMQYFEWYVPNDGQQWNRLRTDAPYLSSVGITAVWTPPAYKGTSQADVGYGPYDLYDLGEFNQKGTVRTKYGTKGELKSAVNTLHSNGIQVYGDVVMNHKAGADYTENVTAVEVNPSNRNQETSGEYNMQAWTGFNFPGRGTTYSNFKWQWFHFDGTDWDQSRSLSRIFKFTGKAWDWEVSSENGNYDYLMYADIDYDHPDVVNEMKKWGVWYANEVGLDGYRLDAVKHIKFSFLKDWVDNARAATGKEMFTVGEYWQNDLGALNNYLAKVNYNQSLFDAPLHYNFYAASTGGGYYDMRNILNNTLVASNPTKAVTLVENHDTQPGQSLESTVQPWFKPLAYAFILTRSGGYPSVFYGDMYGTKGTTTREIPALKSKIEPLLKARKDYAYGTQRDYIDNPDVIGWTREGDSTKAKSGLATVITDGPGGSKRMYVGTSNAGEIWYDLTGNRTDKITIGSDGYATFPVNGGSVSVWVQQ

SEQ ID NO: 35797 - protein, 480 aa, Cytophaga sp.
NGTMMQYFEWYVPNDGQQWNRLRTDAPYLSSVGITAVWTPPAYKGTSQADVGYGPYDLYDLGEFNQKGTVRTKYGTKGELKSAVNTLHSNGIQVYGDVVMNHKAGADYTENVTAVEVNPSNRNQETVGEYNIQAWTGFNFPGRGTTYSNFKWQWFHFDGTDWDQSRSLSRIFKFTGKAWDWEVSSENGNYDYLMYADIDYDHPDVVNEMKKWGVWYANEVGLDGYRLDAVKHIKFSFLKDWVDNARAATGKEMFTVGEYWQNDLGALNNYLAKVNYNQSLFDAPLHYNFYAASTGGGYYDMRNILNNTLVASNPTKAVTLVENHDTQPGQSLESTVQPWFKPLAYAFILTRSGGYPSVFYGDMYGTKGTTTREIPALKSKIEPLLKARKDYAYGTQRDYIDNPDVIGWTREGDSTKAKSGLATVITDGPGGSKRMYVGTSNAGEIWYDLTGNRTDKITIGSDGYATFPVNGGSVSVWVQQ

SEQ ID NO: 35798 - protein, 480 aa, Cytophaga sp.
NGTMMQYFEWYVPNDGQQWNRLRTDAPYLSSVGITAVWTPPAYKGTSQADVGYGPYDLYDLGEFNQKGTVRTKYGTKGELKSAVNTLHSNGIQVYGDVVMNHKAGADYTENVTAVEVNPSNRNQETSGEYNIQAWTGFNFPGRGTTYSNFKWQWFHFDGTDWDQSRSLSRIFKFTGKAWDWEVSSENGNYDYLMYADIDYDHPDVVNEMKKWGVWYANEVGLDGYRLDAVKHIKFSFLKDWVDNARAATGKEMFTVGEYWWNDLGALNNYLAKVNYNQSLFDAPLHYNFYAASTGGGYYDMRNILNNTLVASNPTKAVTLVENHDTQPGQSLESTVQPWFKPLAYAFILTRSGGYPSVFYGDMYGTKGTTTREIPALKSKIEPLLKARKDYAYGTQRDYIDNPDVIGWTREGDSTKAKSGLATVITDGPGGSKRMYVGTSNAGEIWYDLTGNRTDKITIGSDGYATFPVNGGSVSVWVQQ

SEQ ID NO: 35799 - protein, 480 aa, Cytophaga sp.
NGTMMQYFEWYVPNDGQQWNRLRTDAPYLSSVGITAVWTPPAYKGTSQADVGYGPYDLYDLGEFNQKGTVRTKYGTKGELKSAVNTLHSNGIQVYGDVVMNHKAGADYTENVTAVEVNPSNRNQETSGEYNIQAWTGFNFPGRGTTYSNFKWQWFHFDGTDWDQSRSLSRIFKFTGKAWDWEVSSENGNYDYLMYADIDYDHPDVVNEMKKWGVWYANEVGLDGYRLDAVKHIKFSFLKDWVDNARAATGKEMFTVGEYWQNDLGALNNYLAKVNYNQSLFDAPLHYNFYAASTGGGYYDMRNILNNTLVASNPTKAVTLVENHDTQPGQSLESTVQPWFKPLAYAFILTRSGGYPSVFYGDMYGTKGTTTREIPALKSKIEPLLKARKDYAYGTQRDYIDNPDVIGWTREGDSTKAKSGLATVITDGPGGSKRMYVGTSNAGEIWYDLTTNRTDKITIGSDGYATFPVNGGSVSVWVQQ

SEQ ID NO: 35800 - protein, 480 aa, Cytophaga sp.
NGTMMQYFEWYVPNDGQQWNRLRTDAPYLSSVGITAVWTPPAYKGTSQADVGYGPYDLYDLGEFNQKGTVRTKYGTKGELKSAVNTLHSNGIQVYGDVVMNHKAGADYTENVTAVEVNPSNRNQETSGEYNIQAWTGFNFPGRGTTYSNFKWQWFHFDGTDWDQSRSLSRIFKFTGKAWDWEVSSENGNYDYLMYADIDYDHPDVVNEMKKWGVWYANEVGLDGYRLDAVKHQKFSFLKDWVDNARAATGKEMFTVGEYWQNDLGALNNYLAKVNYNQSLFDAPLHYNFYAASTGGGYYDMRNILNNTLVASNPTKAVTLVENHDTQPGQSLESTVQPWFKPLAYAFILTRSGGYPSVFYGDMYGTKGTTTREIPALKSKIEPLLKARKDYAYGTQRDYIDNPDVIGWTREGDSTKAKSGLATVITDGPGGSKRMYVGTSNAGEIWYDLTGNRTDKITIGSDGYATFPVNGGSVSVWVQQ

SEQ ID NO: 35801 - protein, 480 aa, Cytophaga sp.
NRTMMQYFEWYVPNDGQQWNRLRTDAPYLSSVGITAVWTPPAYKGTSQADVGYGPYDLYDLGEFNQKGTVRTKYGTKGELKSAVNTLHSNGIQVYGDVVMNHKAGADYTENVTAVEVNPSNRNQETSGEYNIQAWTGFNFPGRGTTYSNFKWQWFHFDGTDWDQSRSLSRIFKFTGKAWDWEVSSENGNYDYLMYADIDYDHPDVVNEMKKWGVWYANEVGLDGYRLDAVKHIKFSFLKDWVDNARAATGKEMFTVGEYWQNDLGALNNYLAKVNYNQSLFDAPLHYNFYAASTGGGYYDMRNILNNTLVASNPTKAVTLVENHDTQPGQSLESTVQPWFKPLAYAFILTRSGGYPSVFYGDMYGTKGTTTREIPALKSKIEPLLKARKDYAYGTQRDYIDNPDVIGWTREGDSTKAKSGLATVITDGPGGSKRMYVGTSNAGEIWYDLTGNRTDKITIGSDGYATFPVNGGSVSVWVQQ

SEQ ID NO: 35802 - protein, 480 aa, Cytophaga sp.
NGTMMQYFEWYVPNDGQQWNRLRTDAPYLSSVGITAVWTPPAYKGTSQADVGYGPYDLYDLGEFNQKGTVRTKYGTKGELKSAVNTLHSNGIQVYGDVVMNHKAGADYTENVTAVEVNPSNRNQETSGEYNIQAWTGFNFPGRGTTYSNFKWQWFHFDGTDWDQSRSLSRIFKFTGKAWDWEVSSENGNYDYLMYADIDYDHPDVVNEMKKWGVWYANEVGLDGYRLDAVKHIKFSFLKDWVDNARAATGKEMFTVGEYWQNDLGALNNYLAKVNYNQSLFDAPLHYNFYAASTGGGYYDMRNILNNTLVASNPTKAVTLVENHDTQPGQSLESTVQPWFKPLAYAFILTRSGGYPSVFYGDMYGTKGTTTREIPALKSKIEPLLKARKDYAYGTQRDYIDNPDVIGWTREGDSTKAKSGLATVITDGPGGSKRMYVGTSNAGEIWYDLTGNRTDKITIGSDGYATFPVMGGSVSVWVQQ

SEQ ID NO: 35803 - protein, 480 aa, Cytophaga sp.
NGTMMQYFEWYVPNDGQQWNRLRTDAPYLSSVGITAVWTPPAYKGTSQADVGYGPYDLYDLGEFNQKGTVRTKYGTKGELKSAVNTLHSNGIQVYGDVVMNHKAGADYTENVTAVEVNPSNRNQETSGEYNIQAWTGFNFPGRGTTYSNFKWQWFHFDGTDWDQSRSLSRIFKFTGKAWDWEVSSENGNYDYLMYADIDYDHPDVVNEMKKWGVWYANEVGLDGYRLDAVKHIKFSFLKDWVDNARAATGKEMFTVGEYWQNDLGALNNYLAKVNYNQSLFDAPLHYNFYAASTGGGYYDMRNILNNTLVASNPTKAVTLVENHDTQPGQSLESTVQPWFKPLAYAFILTRSGGYPSVFYGDMYGTKGTTTREIPALKSKIEPLLKARKDYAYGTQRDYIDNPDVIGWTREGDSTKAKSGLATVITDGPGGSKRMYVGTSNAGEIWYDLTGNRTDKITIGSDGYATFPVSGGSVSVWVQQ

SEQ ID NO: 35804 - protein, 480 aa, Cytophaga sp.
NGTMMQYFEWYVPNDGQQWNRLRTDAPYLSSVGITAVWTPPAYKGTSQADVGYGPYDLYDLGEFNQKGTVRTKYGTKGELKSAVNTLHSNGIQVYGDVVMNHKAGADYTENVTAVEVNPSNRNQETSGEYNIQAWTGFNFPGRGTTYSNFKWQWFHFDGTDWDQSRSLSRIFKFTGKAWDWEVSSENGNYDYLMYADIDYDHPDVVNEMKKWGVWYANEVGLDGYRLDAVKHIKFSFLKDWVDNARAATGKEMFTVGEYWQNDLGALNNYLAKVNYNQSLFDAPLHYNFYAASTGGGYYDMRNILNNTLVASNPTKAVTLVENHDTQPGQSLESTVQPWFKPLAYAFILTRSGGYPSVFYGDMYGTKGTTTREIPALKSKIEPLLKARKDYAYGTQRDYIDNPDVIGWTREGDSTKAFSGLATVITDGPGGSKRMYVGTSNAGEIWYDLTGNRTDKITIGSDGYATFPVNGGSVSVWVQQ

SEQ ID NO: 35805 - protein, 480 aa, Cytophaga sp.
NGTMMQYFEWYVPNDGQQWNRLRTDAPYLSSVGITAVWTPPAYKGTSQADVGYGPYDLYDLGEFNQKGTVRTKYGTKGELKSAVNTLHSNGIQVYGDVVMNHKAGADYTENVTAVEVNPSNRNQETSGEYNIQAWTGFNFPGRGTTYSNFKWQWFHFDGTDWDQSRSLSRIFKFTGKAWDWEVSSENGNYDYLMYADIDYDHPDVVNEMKKWGVWYANEVGLDGYRLDAVKHIKFSFLKDWVDNARAATGKEMFTVGEYWQNDLGALNNYLAKVNYNQSLFDAPLHYNFYAASTGFGYYDMRNILNNTLVASNPTKAVTLVENHDTQPGQSLESTVQPWFKPLAYAFILTRSGGYPSVFYGDMYGTKGTTTREIPALKSKIEPLLKARKDYAYGTQRDYIDNPDVIGWTREGDSTKAKSGLATVITDGPGGSKRMYVGTSNAGEIWYDLTGNRTDKITIGSDGYATFPVNGGSVSVWVQQ

SEQ ID NO: 35806 - protein, 480 aa, Cytophaga sp.
NCTMMQYFEWYVPNDGQQWNRLRTDAPYLSSVGITAVWTPPAYKGTSQADVGYGPYDLYDLGEFNQKGTVRTKYGTKGELKSAVNTLHSNGIQVYGDVVMNHKAGADYTENVTAVEVNPSNRNQETSGEYNIQAWTGFNFPGRGTTYSNFKWQWFHFDGTDWDQSRSLSRIFKFTGKAWDWEVSSENGNYDYLMYADIDYDHPDVVNEMKKWGVWYANEVGLDGYRLDAVKHIKFSFLKDWVDNARAATGKEMFTVGEYWQNDLGALNNYLAKVNYNQSLFDAPLHYNFYAASTGGGYYDMRNILNNTLVASNPTKAVTLVENHDTQPGQSLESTVQPWFKPLAYAFILTRSGGYPSVFYGDMYGTKGTTTREIPALKSKIEPLLKARKDYAYGTQRDYIDNPDVIGWTREGDSTKAKSGLATVITDGPGGSKRMYVGTSNAGEIWYDLTGNRTDKITIGSDGYATFPVNGGSVSVWVQQ

SEQ ID NO: 35807 - protein, 480 aa, Cytophaga sp.
NGTMMQYFEWYVPNDGQQWNRLRTDAPYLSSVGITAVWTPPAYKGTSQADVGYGPYDLYDLGEFNQKGTVRTKYGTKGELKSAVNTLHSNGIQVYGDVVMNHKAGADYTENVTAVEVNPSNRNQETSGEYNIQAWTGFNFPGRGTTYSNFKWQWFHFDGTDWDQSRSLSRIFKFTGKAWDWEVSSENGNYDYLMYADIDYDHADVVNEMKKWGVWYANEVGLDGYRLDAVKHIKFSFLKDWVDNARAATGKEMFTVGEYWQNDLGALNNYLAKVNYNQSLFDAPLHYNFYAASTGGGYYDMRNILNNTLVASNPTKAVTLVENHDTQPGQSLESTVQPWFKPLAYAFILTRSGGYPSVFYGDMYGTKGTTTREIPALKSKIEPLLKARKDYAYGTQRDYIDNPDVIGWTREGDSTKAKSGLATVITDGPGGSKRMYVGTSNAGEIWYDLTGNRTDKITIGSDGYATFPVNGGSVSVWVQQ

SEQ ID NO: 35808 - protein, 480 aa, Cytophaga sp.
NGTMMQYFEWYVPNDGQQWNRLRTDAPYLSSVGITAVWTPPAYKGTSQADVGYGPYDLYDLGEFNQKGTVRTKYGTKGELKSAVNTLHSNGIQVYGDVVMNHKAGADYTENVTAVEVNPSNRNQETSGEYNIQAWTGFNFPGRGTTYSNFKWQWFHFDGTDWDQSRSLSRIFKFTGKAWDWEVSSENGNYDYLMYADIDYDHPDVVNEMKKWGVWYANEVGLDGYRLDAVKHIKFSFLKDWVDNARAATGKEMFTVGEYWQNDLGALNNYLAKVNYNQHLFDAPLHYNFYAASTGGGYYDMRNILNNTLVASNPTKAVTLVENHDTQPGQSLESTVQPWFKPLAYAFILTRSGGYPSVFYGDMYGTKGTTTREIPALKSKIEPLLKARKDYAYGTQRDYIDNPDVIGWTREGDSTKAKSGLATVITDGPGGSKRMYVGTSNAGEIWYDLTGNRTDKITIGSDGYATFPVNGGSVSVWVQQ

SEQ ID NO: 35809 - protein, 480 aa, Cytophaga sp.
NGTMMQYFEWYVPNDGQQWNRLRTDAPYLSSVGITAVWTPPAYKGTSQADVGYGPYDLYDLGEFNQKGTVRTKYGTKGELKSAVNTLHSNGIQVYGDVVMNHKAGADYTENVTAVEVNPSNRNQETSGEYNIQAWTGFNFPGRGTTYSNFKWQWFHFDGTDWDQSRSLSRIFKFTGKAWDWEVSSENGNYDYLMYADIDYDHPDVVNEMKKWGVWYANEVGLDGYRLDAVKHIKFSFLKDWVDNARAATGKEMFTVGEYWQNDLGALNNYLAKVNYNQSLFDAPLHYNFYAASTGGGYYDMRNILNNTLVASNPTKAVTLVENHDTQPGQSLESTVQPWFKPLAYAFILTRSGGYPSVFYGDMYGTKGTTTREIPALKSKIEPLLKARKDYAYGTQRDYIDNQDVIGWTREGDSTKAKSGLATVITDGPGGSKRMYVGTSNAGEIWYDLTGNRTDKITIGSDGYATFPVNGGSVSVWVQQ

SEQ ID NO: 35810 - protein, 480 aa, Cytophaga sp.
NGTMMQYFEWYVPNDGQQWNRLRTDAPYLSSVGITAVWTPPAYKGTSQADVGYGPYDLYDLGEFNQKGTVRTKYGTKGELKSAVNTLHSNGIQVYGDVVMNHKAGADYTENVTAVEVNPSNRNQETSGEYNIQAWTGFNFPGRGTTYSNFKWQWFHFDGTDWDQSRSLSRIFKFTGKAWDWEVSSENGNYDYLMYADIDYDHPDVVNEMKKWGVWYANEVGLDGYRLDAVKHIKFSFLKDWVDNARAATGKEMFTVGEYWQNDLGALNNYLAKVNYNQSLFDAPLHYNFYAASTGGGYYDMRNILNNTLVASNPTKAVTLVENHDTQPGQSLESTVQPWFKPLAYAFILTRSGGYPSVFYGDMYGTKGTTTREIPALKSKIEPLLKARKDYAYGTQRDYIDNPDVIGWTREGDSTKAKSGLATVITDGPGGSKRMYVGTSNAQEIWYDLTGNRTDKITIGSDGYATFPVNGGSVSVWVQQ

SEQ ID NO: 35811 - protein, 480 aa, Cytophaga sp.
NGTMMQYFEWYVPNDGQQWNRLRTDAPYLSSVGITAVWTPPAYKGTSQADVGYGPYDLYDLGEFNQKGTVRTKYGTKGELKSAVNTLHSNGIQVYGDVVMNHKAGADYTENVTAVEVNPSNRNQETSGEYNIQAWTGFNFPGRGTTYSNFKWQWFHFDGTDWDQSRSLSRIFKFTGKAWDWEVSSENGNYDYLMYADIDYDHPDVVNEMKKWGVWYANEVGLDGYRLDAVKHIKFSFLKDWVDNARAATGKEMFTVGEYWQNDLGALNNYLAKVNYNQSLFDAPLHYNFYAASTGGGYYDMRNILNNTLVASNPTKAVTLVENHDTQPGQSLESTVQPWFKPLAYAFILTRSGGYPSVFYGDMYGTKGTTTREIPALKSKIEPLLKARKDFAYGTQRDYIDNPDVIGWTREGDSTKAKSGLATVITDGPGGSKRMYVGTSNAGEIWYDLTGNRTDKITIGSDGYATFPVNGGSVSVWVQQ

SEQ ID NO: 35812 - protein, 480 aa, Cytophaga sp.
NGTMMQYFEWYVPNDGQQWNRLRTDAPYLSSVGITAVWTPPAYKGTSQADVGYGPYDLYDLGEFNQKGTVRTKYGTKGELKSAVNTLHSNGIQVYGDVVMNHKAGADYTENVTAVEVNPSNRNQETSGEYNIQAWTGFNFPGRGTTYSNFKWQWFHFDGTDWDQSRSLSRIFKFTGKAWDWEVSSENGNYDYLMYADIDYDHPDVVNEMKKWGVWYANEVGLDGYRLDAVKHIKFSFLKDWVDNARAATGKYMFTVGEYWQNDLGALNNYLAKVNYNQSLFDAPLHYNFYAASTGGGYYDMRNILNNTLVASNPTKAVTLVENHDTQPGQSLESTVQPWFKPLAYAFILTRSGGYPSVFYGDMYGTKGTTTREIPALKSKIEPLLKARKDYAYGTQRDYIDNPDVIGWTREGDSTKAKSGLATVITDGPGGSKRMYVGTSNAGEIWYDLTGNRTDKITIGSDGYATFPVNGGSVSVWVQQ

SEQ ID NO: 35813 - protein, 480 aa, Cytophaga sp.
NGTMMQYFEWYVPNDGQQWNRLRTDAPYLSSVGITAVWTPPAYKGTSQADVGYGPYDLYDLGEFNQKGTVRTKYGTKGELKSAVNTLHSNGIQVYGDVVMNHKAGADYTENVTAVEVNPSNRNQETSGEYNIQAWTGFNFPGRGTTYSNFKWQWFHFDGTDWDQSRSLSRIFKFTGKAWDWEVSSENGNYDYLMYADIDYDHPDVVNEMKKWGVWYANEVGLDGYRLDAVKHIKFSFLKDWVDNARAATGKEMFTVGEYWQNDLGALNNYLAKVNYNQSLFDAPLHYNFYAASTGGGYYDMRNILNNTLVASNPTKAVTLVENHDTQPGQSLESTVQPWFKPLAYAFILTRSGGYPSVFYGDMYGTKGTTTREIPALKSKIEPLLKARKDYAYGTQRDYIDNPDLIGWTREGDSTKAKSGLATVITDGPGGSKRMYVGTSNAGEIWYDLTGNRTDKITIGSDGYATFPVNGGSVSVWVQQ

SEQ ID NO: 35814 - protein, 480 aa, Cytophaga sp.
NGTMMQYFEWYVPNDGQQWNRLRTDAPYLSSVGITAVWTPPAYKGTSQADVGYGPYDLYDLGEFNQKGTVRTKYGTKGELKSAVNTLHSNGIQVYGDVVMNHKAGADYTENVTAVEVNPSNRNQETSGEYNIQAWTGFNFPGRGTTYSNFKWQWFHFDGTDWDQSRSLSRIFKFTGKAWDWEVSSENGNYDYLMYADIDYDHPDVVNEMKKWGVWYANEVGLDGYRLDAVKHIKFSFLKDWVDNARAATGKEMFTVGEYWQNDLGALNNYLAKVNYNQSLFDAPLHYNFYAASTGGGYYDMRNILNNTLVASNPTKAVTLVENHDTQPGQSLESTVQPWFKPLAYAFILTRSGGYPSVFYGDMYGTKGTTTREIPALKSKIEPLLKARKDYAYGTQRDYIDNPDVIGWTREGDSTKNKSGLATVITDGPGGSKRMYVGTSNAGEIWYDLTGNRTDKITIGSDGYATFPVNGGSVSVWVQQ

SEQ ID NO: 35815 - protein, 480 aa, Cytophaga sp.
NGTMMQYFEWYVPNDGQQWNRLRTDAPYLSSVGITAVWTPPAYKGTSQADVGYGPYDLYDLGEFNQKGTVRTKYGTKGELKSAVNTLHSNGIQVYGDVVMNHKAGADYTENVMAVEVNPSNRNQETSGEYNIQAWTGFNFPGRGTTYSNFKWQWFHFDGTDWDQSRSLSRIFKFTGKAWDWEVSSENGNYDYLMYADIDYDHPDVVNEMKKWGVWYANEVGLDGYRLDAVKHIKFSFLKDWVDNARAATGKEMFTVGEYWQNDLGALNNYLAKVNYNQSLFDAPLHYNFYAASTGGGYYDMRNILNNTLVASNPTKAVTLVENHDTQPGQSLESTVQPWFKPLAYAFILTRSGGYPSVFYGDMYGTKGTTTREIPALKSKIEPLLKARKDYAYGTQRDYIDNPDVIGWTREGDSTKAKSGLATVITDGPGGSKRMYVGTSNAGEIWYDLTGNRTDKITIGSDGYATFPVNGGSVSVWVQQ

SEQ ID NO: 35816 - protein, 480 aa, Cytophaga sp.
NGTMMQYFEWYVPNDGQQWNRLRTDAPYLSSVGITAVWTPPAYKGTSQADVGYGPYDLYDLGEFNQKGTVRTKYGTKGELKSAVNTLHSNGIQVYGDVVMNHKAGADYTENVTAVEVNPSNRNQETSGEYNIQAWTGFNFPGRGTTYSNFKWQWFHFDGTDWDQSRSLSRIFKFTGKAWDWEVSSENGNYDYLMYADIDYDHPDVVNEMKKWGVWYANEVGLDGYRLDAVKHIKFSFLKDWVDNARAATGKEMFTVGEYWQNDLGALNNYLAKVNYNQSLFDAPLHYNFYAASTGGGYYDMRNILNNTLVASNPTKAVTLVENHDTQPGQSLESTVQPWFKPLAYAFILTRSGGYPSVFYGDMYGTKGTTTREIPALKSKIEPLLKARKDYAYGTQRDYIDNPDVIGWTRHGDSTKAKSGLATVITDGPGGSKRMYVGTSNAGEIWYDLTGNRTDKITIGSDGYATFPVNGGSVSVWVQQ

SEQ ID NO: 35817 - protein, 480 aa, Cytophaga sp.
NGTMMQYFEWYVPNDGQQWNRLRTDAPYLSSVGITAVWTPPAYKGTSQADVGYGPYDLYDLGEFNQKGTVRTKYGTKGELKSAVNTLHSNGIQVYGDVVMNHKAGADYTENVTAVEVNPSNRNQETSGEYNIQAWTGFNFPGRGTTYSNFKWQWFHFDGTDWDQSRSLSRIFKFTGKAWDWEVSSENGNYDYLMYADIDYDHPDVSNEMKKWGVWYANEVGLDGYRLDAVKHIKFSFLKDWVDNARAATGKEMFTVGEYWQNDLGALNNYLAKVNYNQSLFDAPLHYNFYAASTGGGYYDMRNILNNTLVASNPTKAVTLVENHDTQPGQSLESTVQPWFKPLAYAFILTRSGGYPSVFYGDMYGTKGTTTREIPALKSKIEPLLKARKDYAYGTQRDYIDNPDVIGWTREGDSTKAKSGLATVITDGPGGSKRMYVGTSNAGEIWYDLTGNRTDKITIGSDGYATFPVNGGSVSVWVQQ

SEQ ID NO: 35818 - protein, 480 aa, Cytophaga sp.
NGTMMQYFEWYVPNDGQQWNRLRTDAPYLSSVGITAVWTPPAYKGTSQADVGYGPYDLYDLGEFNQKGTVRTKYGTKGELKSAVNTLHSNGIQVYGDVVMNHKAGADYTENVTAVEVNPSNRNQETSGEDNIQAWTGFNFPGRGTTYSNFKWQWFHFDGTDWDQSRSLSRIFKFTGKAWDWEVSSENGNYDYLMYADIDYDHPDVVNEMKKWGVWYANEVGLDGYRLDAVKHIKFSFLKDWVDNARAATGKEMFTVGEYWQNDLGALNNYLAKVNYNQSLFDAPLHYNFYAASTGGGYYDMRNILNNTLVASNPTKAVTLVENHDTQPGQSLESTVQPWFKPLAYAFILTRSGGYPSVFYGDMYGTKGTTTREIPALKSKIEPLLKARKDYAYGTQRDYIDNPDVIGWTREGDSTKAKSGLATVITDGPGGSKRMYVGTSNAGEIWYDLTGNRTDKITIGSDGYATFPVNGGSVSVWVQQ

SEQ ID NO: 35819 - protein, 480 aa, Cytophaga sp.
NGTMMQYFEWYVPNDGQQWNRLRTDAPYLSSVGITAVWTPPAYKGTSQADVGYGPYDLYDLGEFNQKGTVRTKYGTKGELKSAVNTLHSNGIQVYGDVVMNHKAGADYTENVTAVEVNPSNRNQETSGEYNIQAWTGFNFDGRGTTYSNFKWQWFHFDGTDWDQSRSLSRIFKFTGKAWDWEVSSENGNYDYLMYADIDYDHPDVVNEMKKWGVWYANEVGLDGYRLDAVKHIKFSFLKDWVDNARAATGKEMFTVGEYWQNDLGALNNYLAKVNYNQSLFDAPLHYNFYAASTGGGYYDMRNILNNTLVASNPTKAVTLVENHDTQPGQSLESTVQPWFKPLAYAFILTRSGGYPSVFYGDMYGTKGTTTREIPALKSKIEPLLKARKDYAYGTQRDYIDNPDVIGWTREGDSTKAKSGLATVITDGPGGSKRMYVGTSNAGEIWYDLTGNRTDKITIGSDGYATFPVNGGSVSVWVQQ

SEQ ID NO: 35820 - protein, 480 aa, Cytophaga sp.
NGTMMQYFEWYVPNDGQQWNRLRTDAPYLSSVGITAVWTPPAYKGTSQADVGYGPYDLYDLGEFNQKGTVRTKYGTKGELKSAVNTLHSNGIQVYGDVVMNHKAGADYTENVTAVEVNPSNRNQETSGEYNIQAWTGFNFPGRGTTYSNFKWQWFHFDGTDWDQSRSLSRIFKFTGKAWDWEVSSENGNYDYLMYADIDYDHPDVVNEMKKWGVWYANEVGLDGYRLDAVKHIKFSFLKDWVDNARAATGKEMFTVGEYWQNDLGALNNYLAKVNYNQSLFDAPLHYNFYAASTGGGYYDMRNILNNTLVASNPTKAVTLVENHDTQPGQSLESTVQPWFKPLAYAFILTRSGGYPSVFYGDMYGTKGTTTREIPALKSKIEPLLKARKDYAYGTQRDYIDNPDVIGWTREGDSTKAVSGLATVITDGPGGSKRMYVGTSNAGEIWYDLTGNRTDKITIGSDGYATFPVNGGSVSVWVQQ

SEQ ID NO: 35821 - protein, 480 aa, Cytophaga sp.
NGTMMQYFEWYVPNDGQQWNRLRTDAPYLSSVGITAVWTPPAYKGTSQADVGYGPYDLYDLGEFNQKGTVRTKYGTKGELKSAVNTLHSNGIQVYGDVVMNHKAGADYTENVTAVEVNPSNRNQETSGEYNIQAWTGFNFPGRGTTYSNFKWQWFHFDGTDWDQSRSLSRIFKFTGKAWDWEVSSENGNYDYLMYADIDYDHPDVVNEMKKWGVWYANEVGLDGYRLDAVKHIKFSFLKDWVDNARAATGKEMFTVGEYWQNDLGALNNYLAKVNYNQSLFDAPLHYNFYAASTGGGYYDMRNILNNTLVASNPTKAVTLVENHDTQPGQSLESTVQPWFKPLAYAFILTRSGGYPSVFYGDMYGTKGTTTREIPALKSKIEPLLKARKDYAYGTQRDYIDNPDVIGWTREGDSTKAKSGLATVITDGPGGSKRMWVGTSNAGEIWYDLTGNRTDKITIGSDGYATFPVNGGSVSVWVQQ

SEQ ID NO: 35822 - protein, 480 aa, Cytophaga sp.
NGTMMQYFEWYVPNDGQQWNRLRTDAPYLSSVGITAVWTPPAYKGTSQADVGYGPYDLYDLGEFNQKGTVRTKYGTKGELKSAVNTLHSNGIQVYGDVVMNHKAGADYTENVTAVEVNPSNRNQETSGEYNIQAWTGFNFPGRGTTMSNFKWQWFHFDGTDWDQSRSLSRIFKFTGKAWDWEVSSENGNYDYLMYADIDYDHPDVVNEMKKWGVWYANEVGLDGYRLDAVKHIKFSFLKDWVDNARAATGKEMFTVGEYWQNDLGALNNYLAKVNYNQSLFDAPLHYNFYAASTGGGYYDMRNILNNTLVASNPTKAVTLVENHDTQPGQSLESTVQPWFKPLAYAFILTRSGGYPSVFYGDMYGTKGTTTREIPALKSKIEPLLKARKDYAYGTQRDYIDNPDVIGWTREGDSTKAKSGLATVITDGPGGSKRMYVGTSNAGEIWYDLTGNRTDKITIGSDGYATFPVNGGSVSVWVQQ

SEQ ID NO: 35823 - protein, 480 aa, Cytophaga sp.
NGTMMQYFEWYVPNDGQQWNRLRTDAPYLSSVGITAVWTPPAYKGTSQADVGYGPYDLYDLGEFNQKGTVRTKYGTKGELKSAVNTLHSNGIQVYGDVVMNHKAGADYTENVTAVEVNPSNRNQETSGEYNIQAWTGFNFPGRGTTYSNFKWQWFHFDGTDWDQSRSLSRIFKFTGKAWDWEVSSENGNYDYLMYADIDYDHPDVVNEMKKWGVWYANEVGLDGYRLDAVKHIKFSFLKDWVDNARAATGKEMFTVGEYWQNDLGALNNYLAKVNYNQSLFDAPLHYNFYAASTGGGYYDMRNILNNTLVASNPTKAVTLVENHDTQPGQSLESTVQPWFKPLAYAFILTRSGGYPSVFYGDMYGTKGTTTREIPALKSKIEPLLKARKDYAYGTQRDYIDNPDVIGWTREGDSTKAKSGLATVITDGPGGSKRMYVGTSNGGEIWYDLTGNRTDKITIGSDGYATFPVNGGSVSVWVQQ

SEQ ID NO: 35824 - protein, 480 aa, Cytophaga sp.
NGTMMQYFEWYVPNDGQQWNRLRTDAPYLSSVGITAVWTPPAYKGTSQADVGYGPYDLYDLGEFNQKGTVRTKYGTKGELKSAVNTLHSNGIQVYGDVVMNHKAGADYTENVTAVEVNPSNRNQETSGEYNIQAWTGFNFPGRGTTYSNFKWQWFHFDGTDWDQSRSLSRIFKFTGKAWDWEVSSENGNYDYLMYADIDYDHPDVVNEMKKWGVWYANEVGLDGYRLDAVKHIKFSFLKDWVDNARAATGKEMFTVGEYWQNDLGALNNYLAKVNYNQSLFDAPLHYNFYAASTGGGYYDMRNILNNTLVASNPTKAVTLVENHDTQPGQSLESTVQPWFKPLAYAFILTRSGGYPSVFYGDMYGTKGTTTREIPALKSKIEPLLKARKDYAYGTQRDYIDNPDVIGWTREGDSTKAKSGLATVIADGPGGSKRMYVGTSNAGEIWYDLTGNRTDKITIGSDGYATFPVNGGSVSVWVQQ

SEQ ID NO: 35825 - protein, 480 aa, Cytophaga sp.
NGTMMQYFEWYVPNDGQQWNRLRTDAPYLSSVGITAVWTPPAYKGTSQADVGYGPYDLYDLGEFNQKGTVRTKYGTKGELKSAVNTLHSNGIQVYGDVVMNHKAGADYTENVTAVEVNPSNRNQETSGEYNIQAWTGFNFPGRGTTYSNFKWQWFHFDGTDWDQSRSLSRIFKFTGKAWDWEVSSENGNYDYLMYADIDYDHPDVVNEMKKWGVWYANEVGLDGYRLDAVKHIKFSFLKDWVDNARADTGKEMFTVGEYWQNDLGALNNYLAKVNYNQSLFDAPLHYNFYAASTGGGYYDMRNILNNTLVASNPTKAVTLVENHDTQPGQSLESTVQPWFKPLAYAFILTRSGGYPSVFYGDMYGTKGTTTREIPALKSKIEPLLKARKDYAYGTQRDYIDNPDVIGWTREGDSTKAKSGLATVITDGPGGSKRMYVGTSNAGEIWYDLTGNRTDKITIGSDGYATFPVNGGSVSVWVQQ

SEQ ID NO: 35826 - protein, 480 aa, Cytophaga sp.
NGTMMQYFEWYVPNDGQQWNRLRTDAPYLSSVGITAVWTPPAYKGTSQADVGYGPYDLYDLGEFNQKGTVRTKYGTKGELKSAVNTLHSNGIQVYGDVVMNHKAGADYTENVTAVEVNPSNRNQETSGEYNIQAWTGFNFPGRGTTYSNFSWQWFHFDGTDWDQSRSLSRIFKFTGKAWDWEVSSENGNYDYLMYADIDYDHPDVVNEMKKWGVWYANEVGLDGYRLDAVKHIKFSFLKDWVDNARAATGKEMFTVGEYWQNDLGALNNYLAKVNYNQSLFDAPLHYNFYAASTGGGYYDMRNILNNTLVASNPTKAVTLVENHDTQPGQSLESTVQPWFKPLAYAFILTRSGGYPSVFYGDMYGTKGTTTREIPALKSKIEPLLKARKDYAYGTQRDYIDNPDVIGWTREGDSTKAKSGLATVITDGPGGSKRMYVGTSNAGEIWYDLTGNRTDKITIGSDGYATFPVNGGSVSVWVQQ

SEQ ID NO: 35827 - protein, 480 aa, Cytophaga sp.
NGTMMQYFEWYVPNDGQQWNRLRTDAPYLSSVGITAVWTPPAYKGTSQADVGYGPYDLYDLGEFNQKGTVRTKYGTKGELKSAVNTLHSNGIQVYGDVVMNHKAGADYVENVTAVEVNPSNRNQETSGEYNIQAWTGFNFPGRGTTYSNFKWQWFHFDGTDWDQSRSLSRIFKFTGKAWDWEVSSENGNYDYLMYADIDYDHPDVVNEMKKWGVWYANEVGLDGYRLDAVKHIKFSFLKDWVDNARAATGKEMFTVGEYWQNDLGALNNYLAKVNYNQSLFDAPLHYNFYAASTGGGYYDMRNILNNTLVASNPTKAVTLVENHDTQPGQSLESTVQPWFKPLAYAFILTRSGGYPSVFYGDMYGTKGTTTREIPALKSKIEPLLKARKDYAYGTQRDYIDNPDVIGWTREGDSTKAKSGLATVITDGPGGSKRMYVGTSNAGEIWYDLTGNRTDKITIGSDGYATFPVNGGSVSVWVQQ

SEQ ID NO: 35828 - protein, 480 aa, Cytophaga sp.
NGTMMQYFEWYVPNDGQQWNRLRTDAPYLSSVGITAVWTPPAYKGTSQADVGYGPYDLYDLGEFNQKGTVRTKYGTKGELKSAVNTLHSNGIQVYGDVVMNHKAGADYTENVTAVEVNPSNRNQETSGEYNIQAWTGFNFPGRGTTYSNFKWQWFHFDGTDWDQSRSLSRIFKFTGKAWDWEVSSENGNYDYLMYADIDYDHPDVVNEMKKWGVWYANEVGLDGYRLDAVKHIKFSFLKDWVDNARAETGKEMFTVGEYWQNDLGALNNYLAKVNYNQSLFDAPLHYNFYAASTGGGYYDMRNILNNTLVASNPTKAVTLVENHDTQPGQSLESTVQPWFKPLAYAFILTRSGGYPSVFYGDMYGTKGTTTREIPALKSKIEPLLKARKDYAYGTQRDYIDNPDVIGWTREGDSTKAKSGLATVITDGPGGSKRMYVGTSNAGEIWYDLTGNRTDKITIGSDGYATFPVNGGSVSVWVQQ

SEQ ID NO: 35829 - protein, 480 aa, Cytophaga sp.
NGTMMQYFEWYVPNDGQQWNRLRTDAPYLSSVGITAVWTPPAYKGTSQADVGYGPYDLYDLGEFNQKGTVRTKYGTKGELKSAVNTLHSNGIQVYGDVVMNHKAGADYTENVTAVEVNPSNRNQETSGEYNIQAWTGFNFPMRGTTYSNFKWQWFHFDGTDWDQSRSLSRIFKFTGKAWDWEVSSENGNYDYLMYADIDYDHPDVVNEMKKWGVWYANEVGLDGYRLDAVKHIKFSFLKDWVDNARAATGKEMFTVGEYWQNDLGALNNYLAKVNYNQSLFDAPLHYNFYAASTGGGYYDMRNILNNTLVASNPTKAVTLVENHDTQPGQSLESTVQPWFKPLAYAFILTRSGGYPSVFYGDMYGTKGTTTREIPALKSKIEPLLKARKDYAYGTQRDYIDNPDVIGWTREGDSTKAKSGLATVITDGPGGSKRMYVGTSNAGEIWYDLTGNRTDKITIGSDGYATFPVNGGSVSVWVQQ

SEQ ID NO: 35830 - protein, 480 aa, Cytophaga sp.
NGTMMQYFEWYVPNDGQQWNRLRTDAPYLSSVGITAVWTPPAYKGTSQADVGYGPYDLYDLGEFNQKGTVRTKYGTKGELKSAVNTLHSNGIQVYGDVVMNHKAGADYLENVTAVEVNPSNRNQETSGEYNIQAWTGFNFPGRGTTYSNFKWQWFHFDGTDWDQSRSLSRIFKFTGKAWDWEVSSENGNYDYLMYADIDYDHPDVVNEMKKWGVWYANEVGLDGYRLDAVKHIKFSFLKDWVDNARAATGKEMFTVGEYWQNDLGALNNYLAKVNYNQSLFDAPLHYNFYAASTGGGYYDMRNILNNTLVASNPTKAVTLVENHDTQPGQSLESTVQPWFKPLAYAFILTRSGGYPSVFYGDMYGTKGTTTREIPALKSKIEPLLKARKDYAYGTQRDYIDNPDVIGWTREGDSTKAKSGLATVITDGPGGSKRMYVGTSNAGEIWYDLTGNRTDKITIGSDGYATFPVNGGSVSVWVQQ

SEQ ID NO: 35831 - protein, 480 aa, Cytophaga sp.
NGTMMQYFEWYVPNDGQQWNRLRTDAPYLSSVGIDAVWTPPAYKGTSQADVGYGPYDLYDLGEFNQKGTVRTKYGTKGELKSAVNTLHSNGIQVYGDVVMNHKAGADYTENVTAVEVNPSNRNQETSGEYNIQAWTGFNFPGRGTTYSNFKWQWFHFDGTDWDQSRSLSRIFKFTGKAWDWEVSSENGNYDYLMYADIDYDHPDVVNEMKKWGVWYANEVGLDGYRLDAVKHIKFSFLKDWVDNARAATGKEMFTVGEYWQNDLGALNNYLAKVNYNQSLFDAPLHYNFYAASTGGGYYDMRNILNNTLVASNPTKAVTLVENHDTQPGQSLESTVQPWFKPLAYAFILTRSGGYPSVFYGDMYGTKGTTTREIPALKSKIEPLLKARKDYAYGTQRDYIDNPDVIGWTREGDSTKAKSGLATVITDGPGGSKRMYVGTSNAGEIWYDLTGNRTDKITIGSDGYATFPVNGGSVSVWVQQ

SEQ ID NO: 35832 - protein, 480 aa, Cytophaga sp.
NGTMMQYFEWYVPNDGQQWNRLRTDAPYLSSVGITAVWTPPAYKGTSQADVGYGPYDLYDLGEFNQKGTVRTKYGTKGELKSAVNTLHSNGIQVYGDVVMNHKAGADYTENVTAVEVNPSNRNQETSGEYNIQAWTGFNFPGRGTTYSNFKWQWFHFDGTDWDQSRSLSRIFKFTGKAWDWEVSSENGNYDYLMYADIDYDHPDVVNEMKKWGVWYANEVGLDGYRLDAVKHIKFSFLKDWVDNARAATGKEMFTVGEYWQNDLGALNNYLAKVNYNQKLFDAPLHYNFYAASTGGGYYDMRNILNNTLVASNPTKAVTLVENHDTQPGQSLESTVQPWFKPLAYAFILTRSGGYPSVFYGDMYGTKGTTTREIPALKSKIEPLLKARKDYAYGTQRDYIDNPDVIGWTREGDSTKAKSGLATVITDGPGGSKRMYVGTSNAGEIWYDLTGNRTDKITIGSDGYATFPVNGGSVSVWVQQ

SEQ ID NO: 35833 - protein, 480 aa, Cytophaga sp.
NGTMMQYFEWYVPNDGQQWNRLRTDAPYLSSVGITAVWTPPAYKGTSQADVGYGPYDLYDLGEFNQKGTVRTKYGTKGELKSAVNTLHSNGIQVYGDVVMNHKAGADYTENVTAVEVNPSNRNQETSGEYNIQAWTGFNFPGRGTTYSNFKWQWFHFDGTDWDQSRSLSRIFKFTGKAWDWEVSSENGNYDYLMYADIDYDHPDVVNEMKKWGVWYANEVGLDGYRLDAVKHIKFSFLKDWVDNARAATGKEMFTVGEYWQNDLGALNNYLAKVNYNQSLFDAPLHYNFYAASTGGGYYDMRNILNNTLVASNPTKAVTLVENHDTQPGQSLESTVQPWFKPLAYAFILTRSGGYPSVFYGDMYGTKGTTTREIPALKSKIEPLLKARKDYAYGTQRDYIDNPDVIGWTREGDSTKAKSGLATVITDGPGGSKRMYVGTSNSGEIWYDLTGNRTDKITIGSDGYATFPVNGGSVSVWVQQ

SEQ ID NO: 35834 - protein, 480 aa, Cytophaga sp.
NGTMMQYFEWYVPNDGQQWNRLRTDAPYLSSVGITAVWTPPAYKGTSQADVGYGPYDLYDLGEFNQKGTVRTKYGTKGELKSAVNTLHSNGIQVYGDVVMNHKAGADYTENVTCVEVNPSNRNQETSGEYNIQAWTGFNFPGRGTTYSNFKWQWFHFDGTDWDQSRSLSRIFKFTGKAWDWEVSSENGNYDYLMYADIDYDHPDVVNEMKKWGVWYANEVGLDGYRLDAVKHIKFSFLKDWVDNARAATGKEMFTVGEYWQNDLGALNNYLAKVNYNQSLFDAPLHYNFYAASTGGGYYDMRNILNNTLVASNPTKAVTLVENHDTQPGQSLESTVQPWFKPLAYAFILTRSGGYPSVFYGDMYGTKGTTTREIPALKSKIEPLLKARKDYAYGTQRDYIDNPDVIGWTREGDSTKAKSGLATVITDGPGGSKRMYVGTSNAGEIWYDLTGNRTDKITIGSDGYATFPVNGGSVSVWVQQ

SEQ ID NO: 35835 - protein, 480 aa, Cytophaga sp.
NGTMMQYFEWYVPNDGQQWNRLRTDAPYLSSVGITAVWTPPAYKGTSQADVGYGPYDLYDLGEFNQKGTVRTKYGTKGELKSAVNTLHSNGIQVYGDVVMNHKAGADYTENVTAVEVNPSNRNEETSGEYNIQAWTGFNFPGRGTTYSNFKWQWFHFDGTDWDQSRSLSRIFKFTGKAWDWEVSSENGNYDYLMYADIDYDHPDVVNEMKKWGVWYANEVGLDGYRLDAVKHIKFSFLKDWVDNARAATGKEMFTVGEYWQNDLGALNNYLAKVNYNQSLFDAPLHYNFYAASTGGGYYDMRNILNNTLVASNPTKAVTLVENHDTQPGQSLESTVQPWFKPLAYAFILTRSGGYPSVFYGDMYGTKGTTTREIPALKSKIEPLLKARKDYAYGTQRDYIDNPDVIGWTREGDSTKAKSGLATVITDGPGGSKRMYVGTSNAGEIWYDLTGNRTDKITIGSDGYATFPVNGGSVSVWVQQ

SEQ ID NO: 35836 - protein, 480 aa, Cytophaga sp.
NGTMMQYFEWYVPNDGQQWNRLRTDAPYLSSVGITAVWTPPAYKGTSQADVGYGPYDLYDLGEFNQKGTVRTKYGTKGELKSAVNTLHSNGIQVYGDVVMNHVAGADYTENVTAVEVNPSNRNQETSGEYNIQAWTGFNFPGRGTTYSNFKWQWFHFDGTDWDQSRSLSRIFKFTGKAWDWEVSSENGNYDYLMYADIDYDHPDVVNEMKKWGVWYANEVGLDGYRLDAVKHIKFSFLKDWVDNARAATGKEMFTVGEYWQNDLGALNNYLAKVNYNQSLFDAPLHYNFYAASTGGGYYDMRNILNNTLVASNPTKAVTLVENHDTQPGQSLESTVQPWFKPLAYAFILTRSGGYPSVFYGDMYGTKGTTTREIPALKSKIEPLLKARKDYAYGTQRDYIDNPDVIGWTREGDSTKAKSGLATVITDGPGGSKRMYVGTSNAGEIWYDLTGNRTDKITIGSDGYATFPVNGGSVSVWVQQ

SEQ ID NO: 35837 - protein, 480 aa, Cytophaga sp.
NGTMMQYFEWYVPNDGQQWNRLRTDAPYLSSVGITAVWTPPAYKGTSQADVGYGPYDLYDLGEFNQKGTVRTKYGTKGELKSAVNTLHSNGIQVYGDVVMNHKAGADYTENVTAVEVNPSNRNQETSGEYNIQAWTGFNFPGRGTTYSNFKWQWFHFDGTDWDQSRSLSRIFKFTGKAWDWEVSSENGNYDYLMYADIDYDHPDVVNEMKKWGVWYANEVGLDGYRLDAVKHIKFSFLKDWVDNARAATGKEMFTVGEYWQNDLGALNNYLAKVNYNQSLFDAPLHYNFYAASTGGGYYDMRNILNNTLVASNPTKAVTLVENHDTQPGQSLESTVQPWFKPLAYAFILTRSGGYPSVFYGDMYGTKGTTTREIPALKSKIEPLLKARKDYAYGTQRDYIDNPDVIGWTREGDSTKAKSGLATVITDGPGGSKRMYVGTSNAGEIWYDLTGNFTDKITIGSDGYATFPVNGGSVSVWVQQ

SEQ ID NO: 35838 - protein, 480 aa, Cytophaga sp.
NGTMMQYFEWYVPNDGQQWNRLRTDAPYLSSVGITAVWTPPAYKGTSQADVGYGPYDLYDLGEFNQKGTVRTKYGTKGELKSAVNTLHSNGIQVYGDVVMNHAAGADYTENVTAVEVNPSNRNQETSGEYNIQAWTGFNFPGRGTTYSNFKWQWFHFDGTDWDQSRSLSRIFKFTGKAWDWEVSSENGNYDYLMYADIDYDHPDVVNEMKKWGVWYANEVGLDGYRLDAVKHIKFSFLKDWVDNARAATGKEMFTVGEYWQNDLGALNNYLAKVNYNQSLFDAPLHYNFYAASTGGGYYDMRNILNNTLVASNPTKAVTLVENHDTQPGQSLESTVQPWFKPLAYAFILTRSGGYPSVFYGDMYGTKGTTTREIPALKSKIEPLLKARKDYAYGTQRDYIDNPDVIGWTREGDSTKAKSGLATVITDGPGGSKRMYVGTSNAGEIWYDLTGNRTDKITIGSDGYATFPVNGGSVSVWVQQ

SEQ ID NO: 35839 - protein, 480 aa, Cytophaga sp.
NGTMMQYFEWYVPNDGQQWNRLRTDAPYLSSVGITAVWTPPAYKGTSQADVGYGPYDLYDLGEFNQKGTVRTKYGTKGELKSAVNTLHSNGIQVYGDVVMNHKAGADYTENVTAVEVNPSNRNQETSGEYNIQAWTGFNFPGRGTTYSNFKWQWFHFDGTDWDQSRSLSRIFKFTGKAWDWEVSSENGNYDYLMYADIDYDHPDVVNEMKKWGVWYANEVGLDGYRLDAVKHIKFSFLKDWVDNARAATGKEMFTVGEYWQNDLGALNNYLAKVNYNQSLFDAPLHYNFYAASTGGGYYDMRNILNNTLVASNPTKAVTLVENHDTQPGQSLESTVQPWFKPLAYAFILTRSGGYPSVFYGDMYGTKGTTTREIPALKSKIEPLLKARKDYAYGTQRDYIDNPDVIGWTREGDSTKAKSGLATVITDGPTGSKRMYVGTSNAGEIWYDLTGNRTDKITIGSDGYATFPVNGGSVSVWVQQ

SEQ ID NO: 35840 - protein, 480 aa, Cytophaga sp.
NGTMMQYFEWYVPNDGQQWNRLRTDAPYLSSVGITAVWTPPAYKGTSQADVGYGPYDLYDLGEFNQKGTVRTKYGTKGELKSAVNTLHSNGIQVYGDVVMNHKAGADYTENVTAVEVNPSNRNQETSGEYNIQAWTGFNFPGRGTTYSNFKWQWFHFDGTDWDQSRSLSRIFKFTGKAWDWEVSSENGNYDYLMYADIDYDHPDVVNEMKKWGVWYANEVGLDGYRLDAVKHIKFSFLKDWVDNARAATGKEMFTVGEYWQNDLGALNNYLAKVNYNQSLFDAPLHYNFYAASTGGGYYDMRNILNNTLVASNPTKAVTLVENHDTQPGQSLESTVQPWFKPLAYAFILTRSGGYPSVFYGDMYGTAGTTTREIPALKSKIEPLLKARKDYAYGTQRDYIDNPDVIGWTREGDSTKAKSGLATVITDGPGGSKRMYVGTSNAGEIWYDLTGNRTDKITIGSDGYATFPVNGGSVSVWVQQ

SEQ ID NO: 35841 - protein, 480 aa, Cytophaga sp.
NGTMMQYFEWYVPNDGQQWNRLRTDAPYLSSVGITAVWTPPAYKGTSQADVGYGPYDLYDLGEFNQKGTVRTKYGTKGELKSAVNTLHSNGIQVYGDVVMNHKAGADYTENVTAVEVNPSNRNQETSGEYNIQAWTGFNFPGRGTTYSNFKWQWFHFDGTDWDQSRSLSRIFKFTGKAWDWEVSSENGNYDYLMYADIDYDHPDVVNEMKKWGVWYANEVGLDGYRLDAVKHIMFSFLKDWVDNARAATGKEMFTVGEYWQNDLGALNNYLAKVNYNQSLFDAPLHYNFYAASTGGGYYDMRNILNNTLVASNPTKAVTLVENHDTQPGQSLESTVQPWFKPLAYAFILTRSGGYPSVFYGDMYGTKGTTTREIPALKSKIEPLLKARKDYAYGTQRDYIDNPDVIGWTREGDSTKAKSGLATVITDGPGGSKRMYVGTSNAGEIWYDLTGNRTDKITIGSDGYATFPVNGGSVSVWVQQ

SEQ ID NO: 35842 - protein, 480 aa, Cytophaga sp.
NGTMMQYFEWYVPNDGQQWNRLRTDAPYLSSVGITAVWTPPAYKGTSQADVGYGPYDLYDLGEFNQKGTVRTKYGTKGELKSAVNTLHSNGIQVYGDVVMNHKAGADYTENVTAVSVNPSNRNQETSGEYNIQAWTGFNFPGRGTTYSNFKWQWFHFDGTDWDQSRSLSRIFKFTGKAWDWEVSSENGNYDYLMYADIDYDHPDVVNEMKKWGVWYANEVGLDGYRLDAVKHIKFSFLKDWVDNARAATGKEMFTVGEYWQNDLGALNNYLAKVNYNQSLFDAPLHYNFYAASTGGGYYDMRNILNNTLVASNPTKAVTLVENHDTQPGQSLESTVQPWFKPLAYAFILTRSGGYPSVFYGDMYGTKGTTTREIPALKSKIEPLLKARKDYAYGTQRDYIDNPDVIGWTREGDSTKAKSGLATVITDGPGGSKRMYVGTSNAGEIWYDLTGNRTDKITIGSDGYATFPVNGGSVSVWVQQ

SEQ ID NO: 35843 - protein, 480 aa, Cytophaga sp.
NGTMMQYFEWYVPNDGQQWNRLRTDAPYLSSVGITAVWTPPAYKGTSQADVGYGPYDLYDLGEFNQKGTVRTKYGTKGELKSAVNTLHSNGIQVYGDVVMNHKAGADYTENVTAVEVNPSNRNQETSGEYNIQAWTGFNFPGRGTTYSNFKWQWFHFDGTDWDQSRSLSRIFKFTGKAWDWEVSSENGNYDYLMYADIDYDHPDVVNEMKKWGVWYANEVGLDGYRLDAVKHIKFSFLKDWVDNARAATGKEMFTVGEYWQNDLGALNNYLAKVNYNQSLFDAPLHYNFYAASTGGGYYDMRNILNNTLVASNPTKAVTLVENHDTQPGQSLESTVQPWFKPLAYAFILTRSGGYPSVFYGDMYGTKGTTTREIPALKSKIEPLLKARKDYAYGTQRDYIDNPDVIGWTREGDSTKAKSGLATVITDGPGGSKRMYVGTSNAGEIWYDLTGNRTDKITIGSDGYATFPVTGGSVSVWVQQ

SEQ ID NO: 35844 - protein, 480 aa, Cytophaga sp.
NGTMMQYFEWYVPNDGQQWNRLRTDAPYLSSVGITAVWTPPAYKGTSQADVGYGPYDLYDLGEFNQKGTVRTKYGTKGELKSAVNTLHSNGIQVYGDVVMNHKAGADYTENVTAVEVNPSNRNQETSGEYNIQAWTGFNFPIRGTTYSNFKWQWFHFDGTDWDQSRSLSRIFKFTGKAWDWEVSSENGNYDYLMYADIDYDHPDVVNEMKKWGVWYANEVGLDGYRLDAVKHIKFSFLKDWVDNARAATGKEMFTVGEYWQNDLGALNNYLAKVNYNQSLFDAPLHYNFYAASTGGGYYDMRNILNNTLVASNPTKAVTLVENHDTQPGQSLESTVQPWFKPLAYAFILTRSGGYPSVFYGDMYGTKGTTTREIPALKSKIEPLLKARKDYAYGTQRDYIDNPDVIGWTREGDSTKAKSGLATVITDGPGGSKRMYVGTSNAGEIWYDLTGNRTDKITIGSDGYATFPVNGGSVSVWVQQ

SEQ ID NO: 35845 - protein, 480 aa, Cytophaga sp.
NGTMMQYFEWYVPNDGQQWNRLRTDAPYLSSVGITAVWTPPAYKGTSQADVGYGPYDLYDLGEFNQKGTVRTKYGTKGELKSAVNTLHSNGIQVYGDVVMNHKAGADYTENVTAVEVNPSNRNQETSGEYNIQAWTGFNFPGRGTTYSNFKWQWFHFDGTDWDQSESLSRIFKFTGKAWDWEVSSENGNYDYLMYADIDYDHPDVVNEMKKWGVWYANEVGLDGYRLDAVKHIKFSFLKDWVDNARAATGKEMFTVGEYWQNDLGALNNYLAKVNYNQSLFDAPLHYNFYAASTGGGYYDMRNILNNTLVASNPTKAVTLVENHDTQPGQSLESTVQPWFKPLAYAFILTRSGGYPSVFYGDMYGTKGTTTREIPALKSKIEPLLKARKDYAYGTQRDYIDNPDVIGWTREGDSTKAKSGLATVITDGPGGSKRMYVGTSNAGEIWYDLTGNRTDKITIGSDGYATFPVNGGSVSVWVQQ

SEQ ID NO: 35846 - protein, 480 aa, Cytophaga sp.
NGTMMQYFEWYVPNDGQQWNRLRTDAPYLSSVGITAVWTPPAYKGTSQADVGYGPYDLYDLGEFNQKGTVRTKYGTKGELKSAVNTLHSNGIQVYGDVVMNHKAGADYTENVTAVEVNPSNRNQETSGEYNIQAWTGFNFPGRGTTYSNFKWQWFHFDGTDWDQSRSLSRIFKFTGKAWDWEVSSENGNYDYLMYADIDYDHPDVVNEMKKWGVWYANEVGLDGYRLDAVKHIKFSFLKDWVDNARAATGKEMFTVGEYWQNDLGALNNYLAKVNYNQSLFDAPLHYNFYAASTGGGYYDMRNILNNTLVASNPTKAVTLVENHDTQPGQSLESTVQPWFKPLAYAFILTRSGGYPSVFYGDMYGTKGTTTREIPALKSKIEPLLKARKDYAYGTQRDYIDNPDVIGWTREGDSTKAKSGLATVLTDGPGGSKRMYVGTSNAGEIWYDLTGNRTDKITIGSDGYATFPVNGGSVSVWVQQ

SEQ ID NO: 35847 - protein, 480 aa, Cytophaga sp.
NGTMMQYFEWYVPNDGQQWNRLRTDAPYLSSVGITAVWTPPAYKGTSQADVGYGPYDLYDLGEFNQKGTVRTKYGTKGELKSAVNTLHSNGIQVYGDVVMNHKAGADYTENVTAVEVNPSNRNQETSGEYNIQAWTGFNFPGRGTTYSNFKWQWFHFDGTDWDQSRSLSRIFKFTGKAWDWEVSSENGNYDYLMYADIDYDHPDVVNEMKKWGVWYANEVGLDGYRLDAVKHIKFSFLKDWVDNARAATGKEMFTVGEYWQNDLGALNNYLAKVNYNQSLFDAPLHYNFYAASTGGGYYDMRNILNNTLVASNPTKAVTLVENHDTQPGQSLESTVQPWFKPLGYAFILTRSGGYPSVFYGDMYGTKGTTTREIPALKSKIEPLLKARKDYAYGTQRDYIDNPDVIGWTREGDSTKAKSGLATVITDGPGGSKRMYVGTSNAGEIWYDLTGNRTDKITIGSDGYATFPVNGGSVSVWVQQ

SEQ ID NO: 35848 - protein, 480 aa, Cytophaga sp.
NGTMMQYFEWYVPNDGQQWNRLRTDAPYLSSVGITAVWTPPAYKGTSQADVGYGPYDLYDLGEFNQKGTVRTKYGTKGELKSAVNTLHSNGIQVYGDVVMNHKAGADYTENVTAVEVNPSNRNQETSGEYNIQAWTGFNFPGRHTTYSNFKWQWFHFDGTDWDQSRSLSRIFKFTGKAWDWEVSSENGNYDYLMYADIDYDHPDVVNEMKKWGVWYANEVGLDGYRLDAVKHIKFSFLKDWVDNARAATGKEMFTVGEYWQNDLGALNNYLAKVNYNQSLFDAPLHYNFYAASTGGGYYDMRNILNNTLVASNPTKAVTLVENHDTQPGQSLESTVQPWFKPLAYAFILTRSGGYPSVFYGDMYGTKGTTTREIPALKSKIEPLLKARKDYAYGTQRDYIDNPDVIGWTREGDSTKAKSGLATVITDGPGGSKRMYVGTSNAGEIWYDLTGNRTDKITIGSDGYATFPVNGGSVSVWVQQ

SEQ ID NO: 35849 - protein, 480 aa, Cytophaga sp.
NGTMMQYFEWYVPNDGQQWNRLRTDAPYLSSVGITAVWTPPAYKGTSQADVGYGPYDLYDLGEFNQKGTVRTKYGTKGELKSAVNTLHSNGIQVYGDVVMNHKAGADYTENVTAVEVNPSNRNQETSGEYNIQAWTGFNFPGRGTTYSNFKWQWFHFDGTDWDQSRSLSRIFKFTGKAWDWEVSSENGNYDYLMYADIDYDHPDVVNEMKKWGVWYANEVGLDGYRLDAVKHIKFSFLKDWVDNARAATGKEMFTVGEYWQNDLGALNNYLAKVNYNQSLFDAPLHYNFYAASTGGGYYDMRNILNNTLVASNPTKAVTLVENHDTQPGQSLESTVQPWFKPLAYAFILTRSGGYPSVFYGDMYGTKGTTTREIPALKSKIEPLLKARKDYAYGTQRDYIDNPDVIGWTREGDSTKAKSGLATVITDGPGGSKRMYVGTSNAGEIWYDLTGNSTDKITIGSDGYATFPVNGGSVSVWVQQ

SEQ ID NO: 35850 - protein, 480 aa, Cytophaga sp.
NGTMMQYFEWYVPNDGQQWNRLRTDAPYLSSVGITAVWTPPAYKGTSQADVGYGPYDLYDLGEFNQKGTVRTKYGTKGELKSAVNTLHSNGIQVYGDVVMNHKAGADYTENVTAVEVNPSNRNQETSGEYNIQAWTGFNFPGRGTTYSNFKWQWFHFDGTDWDQSRSLSRIFKFTGKAWDWEVSSENGNYDYLMYADIDYDHPDVVNEMKKWGVWYANEVGLDGYRLDAVKHIKFAFLKDWVDNARAATGKEMFTVGEYWQNDLGALNNYLAKVNYNQSLFDAPLHYNFYAASTGGGYYDMRNILNNTLVASNPTKAVTLVENHDTQPGQSLESTVQPWFKPLAYAFILTRSGGYPSVFYGDMYGTKGTTTREIPALKSKIEPLLKARKDYAYGTQRDYIDNPDVIGWTREGDSTKAKSGLATVITDGPGGSKRMYVGTSNAGEIWYDLTGNRTDKITIGSDGYATFPVNGGSVSVWVQQ

SEQ ID NO: 35851 - protein, 480 aa, Cytophaga sp.
NGTMMQYFEWYVPNDGQQWNRLRTDAPYLSSVGITAVWTPPAYKGTSQADVGYGPYDLYDLGEFNQKGTVRTKYGTKGELKSAVNTLHSNGIQVYGDVVMNHKAGADYTENVTAVEVNPSNRNQETSGEYNIQAWTGFNFPGRGTTYSNFKWQWFHFDGTDWDQSRSLSRIFKFTGKAWDWEVSSENGNYDYLMYADIDYDHPDVVNEMKKWGVWYANEVGLDGYRLDAVKHIKFSFLKDWVDNARAATGKEMFTVGEYWQNDLGALNNYLAKVNYNQSLFDAPLHYNFYAASTGGGYYDMRNILNNTLVASNPTKAVTLVENHDTQPGQSLESTVQPWFKPLAYAFILTRSGGYPSVFYGDMYGTKGTTTREIPALKSKIEPLIKARKDYAYGTQRDYIDNPDVIGWTREGDSTKAKSGLATVITDGPGGSKRMYVGTSNAGEIWYDLTGNRTDKITIGSDGYATFPVNGGSVSVWVQQ

SEQ ID NO: 35852 - protein, 480 aa, Cytophaga sp.
NGTMMQYFEWYVPNDGQQWNRLRTDAPYLSSVGITAVWTPPAYKGTSQADVGYGPYDLYDLGEFNQKGTVRTKYGTKGELKSAVNTLHSNGIQVYGDVVMNHKAGADYTENVTAVEVNPSNRNQETSGEYNIQAWTGFNFPGRGTTYSNFKWQWFHFDGTDWDQSRSLSRIFKFTGKAWDWEVSSENGNYDYLMYADIDYDHPDVVNEMKKWGVWYANEVGLDGYRLDAVKHIKFPFLKDWVDNARAATGKEMFTVGEYWQNDLGALNNYLAKVNYNQSLFDAPLHYNFYAASTGGGYYDMRNILNNTLVASNPTKAVTLVENHDTQPGQSLESTVQPWFKPLAYAFILTRSGGYPSVFYGDMYGTKGTTTREIPALKSKIEPLLKARKDYAYGTQRDYIDNPDVIGWTREGDSTKAKSGLATVITDGPGGSKRMYVGTSNAGEIWYDLTGNRTDKITIGSDGYATFPVNGGSVSVWVQQ

SEQ ID NO: 35853 - protein, 480 aa, Cytophaga sp.
NGTMMQYFEWYVPNDGQQWNRLRTDAPYLSSVGITAVWTPPAYKGTSQADVGYGPYDLYDLGEFNQKGTVRTKYGTKGELKSAVNTLHSNGIQVYGDVVMNHKAGADYTENVTAVEVNPSNRNQETSGEYNIQAWTGFNFPGRGTTYSNFKWQWFHFDGTDWDQSRSLSRIFKFTGKAWDWEVSSENGNYDYLMYADIDYDHPDVVNEMKKWGVWYANEVGLDGYRLDAVKHIKFSFLKDWVDNARAATGKEMFTVGEYWQNDLGALNNYLAKVNYNQSLFDAPLHYNFYAASTGGGYYDMRNILNNTLVASNPTKAVTLVENHDTQPGQSLESTVQPWFKPLAYAFILTRSGGYPSVFYGDWYGTKGTTTREIPALKSKIEPLLKARKDYAYGTQRDYIDNPDVIGWTREGDSTKAKSGLATVITDGPGGSKRMYVGTSNAGEIWYDLTGNRTDKITIGSDGYATFPVNGGSVSVWVQQ

SEQ ID NO: 35854 - protein, 480 aa, Cytophaga sp.
NGTMMQYFEWYVPNDGQQWNRLRTDAPYLSSVGITAVWTPPAYKGTSQADVGYGPYDLYDLGEFNQKGTVRTKYGTKGELKSAVNTLHSNGIQVYGDVVMNHKAGADYTENVTAVEVNPSNRNQETSGEYNIQAWTGFNFKGRGTTYSNFKWQWFHFDGTDWDQSRSLSRIFKFTGKAWDWEVSSENGNYDYLMYADIDYDHPDVVNEMKKWGVWYANEVGLDGYRLDAVKHIKFSFLKDWVDNARAATGKEMFTVGEYWQNDLGALNNYLAKVNYNQSLFDAPLHYNFYAASTGGGYYDMRNILNNTLVASNPTKAVTLVENHDTQPGQSLESTVQPWFKPLAYAFILTRSGGYPSVFYGDMYGTKGTTTREIPALKSKIEPLLKARKDYAYGTQRDYIDNPDVIGWTREGDSTKAKSGLATVITDGPGGSKRMYVGTSNAGEIWYDLTGNRTDKITIGSDGYATFPVNGGSVSVWVQQ

SEQ ID NO: 35855 - protein, 480 aa, Cytophaga sp.
NGTMMQYFEWYVPNDGQQWNRLRTDAPYLSSVGITAVWTPPAYKGTSQADVGYGPYDLYDLGEFNQKGTVRTKYGTKGELKSAVNTLHSNGIQVYGDVVMNHKAGADYTENVTAVEVNPSNRNQETSGEYNIQAWTGFNFPGRGTTYSNFKWQWFHFDGTDWDQSRSLSRIFKFTGKAWDWEVSSENGNYDYLMYADIDYDHPDVVNEMKKWGVWYANEVGLDGYRLDAVKHIKFSFLKDWVDNARAATGKEMFTVGEYWQNDLGALNNYLAKVNYNQSLFDAPLHYNFYAASTGGGYYDMRNILNNTLVASNPTKAVTLVENHDTQPGQSLESTVQPWFKPLAYAFILTRSGGYPSVFYGDMYGTKGTTTREIPALKSKIEPLLKARKDYAYGTQRDYIDNPDVIGWTREGDSTKAKSGLATVITDGPAGSKRMYVGTSNAGEIWYDLTGNRTDKITIGSDGYATFPVNGGSVSVWVQQ

SEQ ID NO: 35856 - protein, 480 aa, Cytophaga sp.
NGTMMQYFEWYVPNDGQQWNRLRTDAPYLSSVGITAVWTPPAYKGTSQADVGYGPYDLYDLGEFNQKGTVRTKYGTKGELKSAVNTLHSNGIQVYGDVVMNHKAGADYTENVTAVEVNPSNRNQEQSGEYNIQAWTGFNFPGRGTTYSNFKWQWFHFDGTDWDQSRSLSRIFKFTGKAWDWEVSSENGNYDYLMYADIDYDHPDVVNEMKKWGVWYANEVGLDGYRLDAVKHIKFSFLKDWVDNARAATGKEMFTVGEYWQNDLGALNNYLAKVNYNQSLFDAPLHYNFYAASTGGGYYDMRNILNNTLVASNPTKAVTLVENHDTQPGQSLESTVQPWFKPLAYAFILTRSGGYPSVFYGDMYGTKGTTTREIPALKSKIEPLLKARKDYAYGTQRDYIDNPDVIGWTREGDSTKAKSGLATVITDGPGGSKRMYVGTSNAGEIWYDLTGNRTDKITIGSDGYATFPVNGGSVSVWVQQ

SEQ ID NO: 35857 - protein, 480 aa, Cytophaga sp.
NGTMMQYFEWYVPNDGQQWNRLRTDAPYLSSVGITAVWTPPAYKGTSQADVGYGPYDLYDLGEFNQKGTVRTKYGTKGELKSAVNTLHSNGIQVYGDVVMNHKAGADYTENVTAVEVNPSNRNQETSGEYNIQAWTGFNFPGRGTTYSNFKWQWFHFDGTDWDQSRSLSRIFKFTGKAWDWEVSSENGNYDYLMYADIDYDHPDVVNEMKKWGVWYANEVGLDGYRLDAVKHIKFSFLKDWVDNARAATGKEMFTVGEYWQNDLGALNNYLAKVNYNQSLFDAPLHYNFYAASTGGGYYDMRNILNNTLVASNPTKAVTLVENHDTQPGQSLESTVQPWFKPLAYAFILTRSGGYPSVFYGDMYGTKGTTTREIPALKSKIEPLLKARKDYAYGTQRDYIDNPDVIGWTREGDTTKAKSGLATVITDGPGGSKRMYVGTSNAGEIWYDLTGNRTDKITIGSDGYATFPVNGGSVSVWVQQ

SEQ ID NO: 35858 - protein, 480 aa, Cytophaga sp.
NGTMMQYFEWYVPNDGQQWNRLRTDAPYLSSVGITAVWTPPAYKGTSQADVGYGPYDLYDLGEFNQKGTVRTKYGTKGELKSAVNTLHSNGIQVYGDVVMNHKAGADYTENVTAVEVNPSNRNQETSGEYNIQAWTGFNFPGRGTTYSNFKWQWFHFDGTDWDQSRSLSRIFKFTGKAWDWEVSSENGNYDYLMYADIDYDFPDVVNEMKKWGVWYANEVGLDGYRLDAVKHIKFSFLKDWVDNARAATGKEMFTVGEYWQNDLGALNNYLAKVNYNQSLFDAPLHYNFYAASTGGGYYDMRNILNNTLVASNPTKAVTLVENHDTQPGQSLESTVQPWFKPLAYAFILTRSGGYPSVFYGDMYGTKGTTTREIPALKSKIEPLLKARKDYAYGTQRDYIDNPDVIGWTREGDSTKAKSGLATVITDGPGGSKRMYVGTSNAGEIWYDLTGNRTDKITIGSDGYATFPVNGGSVSVWVQQ

SEQ ID NO: 35859 - protein, 480 aa, Cytophaga sp.
NGTMMQYFEWYVPNDGQQWNRLRTDAPYLSSVGITAVWTPPAYKGTSQADVGYGPYDLYDLGEFNQKGTVRTKYGTKGELKSAVNTLHSNGIQVYGDVVMNHKAGADYTENVTAVEVNPSNRNQETSGEYNIQAWTGFNFPGRGTTYSNFKWQWFHFDGTDWDQSRSLSRIFKFTGKAWDWEVSSENFNYDYLMYADIDYDHPDVVNEMKKWGVWYANEVGLDGYRLDAVKHIKFSFLKDWVDNARAATGKEMFTVGEYWQNDLGALNNYLAKVNYNQSLFDAPLHYNFYAASTGGGYYDMRNILNNTLVASNPTKAVTLVENHDTQPGQSLESTVQPWFKPLAYAFILTRSGGYPSVFYGDMYGTKGTTTREIPALKSKIEPLLKARKDYAYGTQRDYIDNPDVIGWTREGDSTKAKSGLATVITDGPGGSKRMYVGTSNAGEIWYDLTGNRTDKITIGSDGYATFPVNGGSVSVWVQQ

SEQ ID NO: 35860 - protein, 480 aa, Cytophaga sp.
NGTMMQYFEWYVPNDGQQWNRLRTDAPYLSSVGITAVWTPPAYKGTSQADVGYGPYDLYDLGEFNQKGTVRTKYGTKGELKSAVNTLHSNGIQVYGDVVMNHKAGADYTENVTAVEVNPSNRNQETSGEYNIQAWTGFNFPGRGTTYSNFKWQWFHFDGTDWDQSRSLSRIFKFTGKAWDWEVSSENGNYDYLMYADIDYDHPDVVNEMKKWGVWYANEVGLDGYRLDAVKHIKFSFLKDWVDNARAATGKEMFTVGEYWQNDLGALNNYLAKVNYNQSLFDAPLHYNFYAASTGGGYYDMRNILNNTLVASNPTKAVTLVENHDTQPGQSLESTVQPWFKPLAYAFILTRSGGYPSVFYGDMYGTKGTTTREIPALKSKIEPLLKARKDYAYGTQRDYIDNPDVIGWTREGDSTKAPSGLATVITDGPGGSKRMYVGTSNAGEIWYDLTGNRTDKITIGSDGYATFPVNGGSVSVWVQQ

SEQ ID NO: 35861 - protein, 480 aa, Cytophaga sp.
NGTMMQYFEWYVPNDGQQWNRLRTDAPYLSSVGITAVWTPPAYKGTSQADVGYGPYDLYDLGEFNQKGTVRTKYGTKGELKSAVNTLHSNGIQVYGDVVMNHKAGADYTENVTAVEVNPSNRNTETSGEYNIQAWTGFNFPGRGTTYSNFKWQWFHFDGTDWDQSRSLSRIFKFTGKAWDWEVSSENGNYDYLMYADIDYDHPDVVNEMKKWGVWYANEVGLDGYRLDAVKHIKFSFLKDWVDNARAATGKEMFTVGEYWQNDLGALNNYLAKVNYNQSLFDAPLHYNFYAASTGGGYYDMRNILNNTLVASNPTKAVTLVENHDTQPGQSLESTVQPWFKPLAYAFILTRSGGYPSVFYGDMYGTKGTTTREIPALKSKIEPLLKARKDYAYGTQRDYIDNPDVIGWTREGDSTKAKSGLATVITDGPGGSKRMYVGTSNAGEIWYDLTGNRTDKITIGSDGYATFPVNGGSVSVWVQQ

SEQ ID NO: 35862 - protein, 480 aa, Cytophaga sp.
NGTMMQYFEWYVPNDGQQWNRLRTDAPYLSSVGITAVWTPPAYKGTSQADVGYGPYDLYDLGEFNQKGTVRTKYGTKGELKSAVNTLHSNGIQVYGDVVMNHKAGADYTENVTAVEVNPSNRNQETSGEYNIQAWTGFNFPGRGTTYSNFKWQWFHFDGTDWDQSRSLSRIFKFTGKAWDWEVSSENGNYDYLMYADIDYDHPDVVNEMKKWGVWYANEVGLDGYRLDAVKHIKFSFLKDWVDNARAATGKLMFTVGEYWQNDLGALNNYLAKVNYNQSLFDAPLHYNFYAASTGGGYYDMRNILNNTLVASNPTKAVTLVENHDTQPGQSLESTVQPWFKPLAYAFILTRSGGYPSVFYGDMYGTKGTTTREIPALKSKIEPLLKARKDYAYGTQRDYIDNPDVIGWTREGDSTKAKSGLATVITDGPGGSKRMYVGTSNAGEIWYDLTGNRTDKITIGSDGYATFPVNGGSVSVWVQQ

SEQ ID NO: 35863 - protein, 480 aa, Cytophaga sp.
NGTMMQYFEWYVPNDGQQWNRLRTDAPYLSSVGITAVWTPPAYKGTSQADVGYGPYDLYDLGEFNQKGTVRTKYGTKGELKSAVNTLHSNGIQVYGDVVMNHKAGADYTENVTAVEVNPSNRNQETSGEYNIQAWTGFNFPGRGTTYSNFKWQWFHFDGTDWDQSRSLSRIFKFTGKAWDWEVSSENGNYDYLMYADIDYDHPDVVNEMKKWGVWYANEVGLDGYRLDAVKHIKFSFLKDWVDNARAATGKEMFTVGEYWQNDLGALNNYLAKVNYNQSLFDAPLHYNFYAASTGGGYYDMRNILNNTLVASNPTKAVTLVENHDTQPGQSLESTVQPWFKPLAYAFILTRSGGYPSVFYGDMYGTKGTTTREIPALKSKIEPLLKARKDYAYGTQRDWIDNPDVIGWTREGDSTKAKSGLATVITDGPGGSKRMYVGTSNAGEIWYDLTGNRTDKITIGSDGYATFPVNGGSVSVWVQQ

SEQ ID NO: 35864 - protein, 480 aa, Cytophaga sp.
NGTMMQYFEWYVPNDGQQWNRLRTDAPYLSSVGITAVWTPPAYKGTSQADVGYGPYDLYDLGEFNQKGTVRTKYGTKGELKSAVNTLHSNGIQVYGDVVMNHKAGADYTENVTAVEVNPSNRNQETSGEYNIQAWTGFNFPGRGTTYSNFKWQWFHFDGTDWDQSRSLSRIFKFTGKAWDWEVSSENGNYDYLMYADIDYDHPDVVNEMKKWGVWYANEVGLDGYRLDAVKHIKFSFLKDWVDNARAATGKEMFTVGEYWQNDLGALNNYLAKVNYNQSLFDAPLHYNFYAASTGGGYYDMRNILNNTLVASNPTKAVTLVENHDTQPGQSLESTVQPWFKPLAYAFILTRSGGYPSVFYGDMYGTKGNTTREIPALKSKIEPLLKARKDYAYGTQRDYIDNPDVIGWTREGDSTKAKSGLATVITDGPGGSKRMYVGTSNAGEIWYDLTGNRTDKITIGSDGYATFPVNGGSVSVWVQQ

SEQ ID NO: 35865 - protein, 480 aa, Cytophaga sp.
NGTMMQYFEWYVPNDGQQWNRLRTDAPYLSSVGITAVWTPPAYKGTSQADVGYGPYDLYDLGEFNQKGTVRTKYGTKGELKSAVNTLHSNGIQVYGDVVMNHKAGADYTENVTAVEVNPSNRNQETSGEYNIQAWTGFNFPGRGTTYSNFKWQWFHFDGTDWDQSRSLSRIFKFTGKAWDWEVSSENGNYDYLMYADIDYDHPDVDNEMKKWGVWYANEVGLDGYRLDAVKHIKFSFLKDWVDNARAATGKEMFTVGEYWQNDLGALNNYLAKVNYNQSLFDAPLHYNFYAASTGGGYYDMRNILNNTLVASNPTKAVTLVENHDTQPGQSLESTVQPWFKPLAYAFILTRSGGYPSVFYGDMYGTKGTTTREIPALKSKIEPLLKARKDYAYGTQRDYIDNPDVIGWTREGDSTKAKSGLATVITDGPGGSKRMYVGTSNAGEIWYDLTGNRTDKITIGSDGYATFPVNGGSVSVWVQQ

SEQ ID NO: 35866 - protein, 480 aa, Cytophaga sp.
NGTMMQYFEWYVPNDGQQWNRLRTDAPYLSSVGITAVWTPPAYKGTSQADVGYGPYDLYDLGEFNQKGTVRTKYGTKGELKSAVNTLHSNGIQVYGDVVMNHKAGADYTENVTAVEVNPSNRNQETSGEYNIQAWTGFNFPGRGTTYSNFKWQWFHFDGTDWDQSRSLSRIFKFTGKAWDWEVSSENGNYDYLMYADIDYDHPDVVNEMKKWGVWYANEVGLDGYRLDAVKHIKFSFLKDWVDNARAATGKEMFTVGEYWHNDLGALNNYLAKVNYNQSLFDAPLHYNFYAASTGGGYYDMRNILNNTLVASNPTKAVTLVENHDTQPGQSLESTVQPWFKPLAYAFILTRSGGYPSVFYGDMYGTKGTTTREIPALKSKIEPLLKARKDYAYGTQRDYIDNPDVIGWTREGDSTKAKSGLATVITDGPGGSKRMYVGTSNAGEIWYDLTGNRTDKITIGSDGYATFPVNGGSVSVWVQQ

SEQ ID NO: 35867 - protein, 480 aa, Cytophaga sp.
NGTMMQYFEWYVPNDGQQWNRLRTDAPYLSSVGITAVWTPPAYKGTEQADVGYGPYDLYDLGEFNQKGTVRTKYGTKGELKSAVNTLHSNGIQVYGDVVMNHKAGADYTENVTAVEVNPSNRNQETSGEYNIQAWTGFNFPGRGTTYSNFKWQWFHFDGTDWDQSRSLSRIFKFTGKAWDWEVSSENGNYDYLMYADIDYDHPDVVNEMKKWGVWYANEVGLDGYRLDAVKHIKFSFLKDWVDNARAATGKEMFTVGEYWQNDLGALNNYLAKVNYNQSLFDAPLHYNFYAASTGGGYYDMRNILNNTLVASNPTKAVTLVENHDTQPGQSLESTVQPWFKPLAYAFILTRSGGYPSVFYGDMYGTKGTTTREIPALKSKIEPLLKARKDYAYGTQRDYIDNPDVIGWTREGDSTKAKSGLATVITDGPGGSKRMYVGTSNAGEIWYDLTGNRTDKITIGSDGYATFPVNGGSVSVWVQQ

SEQ ID NO: 35868 - protein, 480 aa, Cytophaga sp.
NGTMMQYFEWYVPNDGQQWNRLRTDAPYLSSVGITAVWTPPAYKGTSQADVGYGPYDLYDLGEFNQKGTVRTKYGTKGELKSAVNTLHSNGIQVYGDVVMNHKAGADYTENVTAVEVNPSNRNQETSGEYNIQAWTGFNFPGRGTTYSNFKWQWFHFDGTDWDQSRSLSRIFKFTGKAWDWEVSSENGNYDYLMYADIDYDHPDVVNEMKKWGVWYANEVGLDGYRLDAVKHIKFSFLKDWVDNARAATGKEMFTVGEYWQNDLGALNNYLAKVNYNQSLLDAPLHYNFYAASTGGGYYDMRNILNNTLVASNPTKAVTLVENHDTQPGQSLESTVQPWFKPLAYAFILTRSGGYPSVFYGDMYGTKGTTTREIPALKSKIEPLLKARKDYAYGTQRDYIDNPDVIGWTREGDSTKAKSGLATVITDGPGGSKRMYVGTSNAGEIWYDLTGNRTDKITIGSDGYATFPVNGGSVSVWVQQ

SEQ ID NO: 35869 - protein, 480 aa, Cytophaga sp.
NGTMMQYFEWYVPNDGQQWNRLRTDAPYLSSVGITAVWTPPAYKGTSQADVGYGPYDLYDLGEFNQKGTVRTKYGTKGELKSAVNTLHSNGIQVYGDVVMNHKAGADYFENVTAVEVNPSNRNQETSGEYNIQAWTGFNFPGRGTTYSNFKWQWFHFDGTDWDQSRSLSRIFKFTGKAWDWEVSSENGNYDYLMYADIDYDHPDVVNEMKKWGVWYANEVGLDGYRLDAVKHIKFSFLKDWVDNARAATGKEMFTVGEYWQNDLGALNNYLAKVNYNQSLFDAPLHYNFYAASTGGGYYDMRNILNNTLVASNPTKAVTLVENHDTQPGQSLESTVQPWFKPLAYAFILTRSGGYPSVFYGDMYGTKGTTTREIPALKSKIEPLLKARKDYAYGTQRDYIDNPDVIGWTREGDSTKAKSGLATVITDGPGGSKRMYVGTSNAGEIWYDLTGNRTDKITIGSDGYATFPVNGGSVSVWVQQ

SEQ ID NO: 35870 - protein, 480 aa, Cytophaga sp.
NGTMMQYFEWYVPNDGQQWNRLRTDAPYLSSVGITAVWTPPAYKGTSQADVGYGPYDLYDLGEFNQKGTVRTKYGTKGELKSAVNTLHSNGIQVYGDVVMNHKAGADYTENVTAVEVNPSNRNQETSGEYNIQAWTGFNFPKRGTTYSNFKWQWFHFDGTDWDQSRSLSRIFKFTGKAWDWEVSSENGNYDYLMYADIDYDHPDVVNEMKKWGVWYANEVGLDGYRLDAVKHIKFSFLKDWVDNARAATGKEMFTVGEYWQNDLGALNNYLAKVNYNQSLFDAPLHYNFYAASTGGGYYDMRNILNNTLVASNPTKAVTLVENHDTQPGQSLESTVQPWFKPLAYAFILTRSGGYPSVFYGDMYGTKGTTTREIPALKSKIEPLLKARKDYAYGTQRDYIDNPDVIGWTREGDSTKAKSGLATVITDGPGGSKRMYVGTSNAGEIWYDLTGNRTDKITIGSDGYATFPVNGGSVSVWVQQ

SEQ ID NO: 35871 - protein, 480 aa, Cytophaga sp.
NGTMMQYFEWYVPNDGQQWNRLRTDAPYLSSVGITAVWTPPAYKGTSQADVGYGPYDLYDLGEFNQKGTVRTKYGTKGELKSAVNTLHSNGIQVYGDVVMNHKAGADYTENVTAVEVNPSNRNQETSGEYNIQAWTGFNFPGRGTTGSNFKWQWFHFDGTDWDQSRSLSRIFKFTGKAWDWEVSSENGNYDYLMYADIDYDHPDVVNEMKKWGVWYANEVGLDGYRLDAVKHIKFSFLKDWVDNARAATGKEMFTVGEYWQNDLGALNNYLAKVNYNQSLFDAPLHYNFYAASTGGGYYDMRNILNNTLVASNPTKAVTLVENHDTQPGQSLESTVQPWFKPLAYAFILTRSGGYPSVFYGDMYGTKGTTTREIPALKSKIEPLLKARKDYAYGTQRDYIDNPDVIGWTREGDSTKAKSGLATVITDGPGGSKRMYVGTSNAGEIWYDLTGNRTDKITIGSDGYATFPVNGGSVSVWVQQ

SEQ ID NO: 35872 - protein, 480 aa, Cytophaga sp.
NGTMMQYFEWYVPNDGQQWNRLRTDAPYLSSVGITAVWTPPAYKGTSQADVGYGPYDLYDLGEFNQKGTVRTKYGTKGELKSAVNTLHSNGIQVYGDVVMNHKAGADYTENVTAVEVNPSNRNQETAGEYNIQAWTGFNFPGRGTTYSNFKWQWFHFDGTDWDQSRSLSRIFKFTGKAWDWEVSSENGNYDYLMYADIDYDHPDVVNEMKKWGVWYANEVGLDGYRLDAVKHIKFSFLKDWVDNARAATGKEMFTVGEYWQNDLGALNNYLAKVNYNQSLFDAPLHYNFYAASTGGGYYDMRNILNNTLVASNPTKAVTLVENHDTQPGQSLESTVQPWFKPLAYAFILTRSGGYPSVFYGDMYGTKGTTTREIPALKSKIEPLLKARKDYAYGTQRDYIDNPDVIGWTREGDSTKAKSGLATVITDGPGGSKRMYVGTSNAGEIWYDLTGNRTDKITIGSDGYATFPVNGGSVSVWVQQ

SEQ ID NO: 35873 - protein, 480 aa, Cytophaga sp.
NATMMQYFEWYVPNDGQQWNRLRTDAPYLSSVGITAVWTPPAYKGTSQADVGYGPYDLYDLGEFNQKGTVRTKYGTKGELKSAVNTLHSNGIQVYGDVVMNHKAGADYTENVTAVEVNPSNRNQETSGEYNIQAWTGFNFPGRGTTYSNFKWQWFHFDGTDWDQSRSLSRIFKFTGKAWDWEVSSENGNYDYLMYADIDYDHPDVVNEMKKWGVWYANEVGLDGYRLDAVKHIKFSFLKDWVDNARAATGKEMFTVGEYWQNDLGALNNYLAKVNYNQSLFDAPLHYNFYAASTGGGYYDMRNILNNTLVASNPTKAVTLVENHDTQPGQSLESTVQPWFKPLAYAFILTRSGGYPSVFYGDMYGTKGTTTREIPALKSKIEPLLKARKDYAYGTQRDYIDNPDVIGWTREGDSTKAKSGLATVITDGPGGSKRMYVGTSNAGEIWYDLTGNRTDKITIGSDGYATFPVNGGSVSVWVQQ

SEQ ID NO: 35874 - protein, 480 aa, Cytophaga sp.
NGTMMQYFEWYVPNDGQQWNRLRTDAPYLSSVGITAVWTPPAYKGTSQADVGYGPYDLYDLGEFNQKGTVRTKYGTKGELKSAVNTLHSNGIQVYGDVVMNHKAGADYTENVTAVEVNPSNRNQETSGEYNIQAWTGFNFPGRGTTYSNFKWQWFHFDGTDWDQSRSLSRIFKFTGKAWDWEVSSENGNYDYLMYADIDYDHPDVVNEMKKWGVWYANEVGLDGYRLDAVKHRKFSFLKDWVDNARAATGKEMFTVGEYWQNDLGALNNYLAKVNYNQSLFDAPLHYNFYAASTGGGYYDMRNILNNTLVASNPTKAVTLVENHDTQPGQSLESTVQPWFKPLAYAFILTRSGGYPSVFYGDMYGTKGTTTREIPALKSKIEPLLKARKDYAYGTQRDYIDNPDVIGWTREGDSTKAKSGLATVITDGPGGSKRMYVGTSNAGEIWYDLTGNRTDKITIGSDGYATFPVNGGSVSVWVQQ

SEQ ID NO: 35875 - protein, 480 aa, Cytophaga sp.
NGTMMQYFEWYVPNDGQQWNRLRTDAPYLSSVGITAVWTPPAYKGTSQADVGYGPYDLYDLGEFNQKGTVRTKYGTKGELKSAVNTLHSNGIQVYGDVVMNHKAGADYTENVTAVEVNPSNRNQETSGEYNIQAWTGFNFPGRGTTYSNFKWQWFHFDGTDWDQSLSLSRIFKFTGKAWDWEVSSENGNYDYLMYADIDYDHPDVVNEMKKWGVWYANEVGLDGYRLDAVKHIKFSFLKDWVDNARAATGKEMFTVGEYWQNDLGALNNYLAKVNYNQSLFDAPLHYNFYAASTGGGYYDMRNILNNTLVASNPTKAVTLVENHDTQPGQSLESTVQPWFKPLAYAFILTRSGGYPSVFYGDMYGTKGTTTREIPALKSKIEPLLKARKDYAYGTQRDYIDNPDVIGWTREGDSTKAKSGLATVITDGPGGSKRMYVGTSNAGEIWYDLTGNRTDKITIGSDGYATFPVNGGSVSVWVQQ

SEQ ID NO: 35876 - protein, 480 aa, Cytophaga sp.
NGTMMQYFEWYVPNDGQQWNRLRTDAPYLSSVGITAVWTPPAYKGTSQADVGYGPYDLYDLGEFNQKGTVRTKYGTKGELKSAVNTLHSNGIQVYGDVVMNHKAGADYTENVTAVEVNPSNRNQETSGEYNIQAFTGFNFPGRGTTYSNFKWQWFHFDGTDWDQSRSLSRIFKFTGKAWDWEVSSENGNYDYLMYADIDYDHPDVVNEMKKWGVWYANEVGLDGYRLDAVKHIKFSFLKDWVDNARAATGKEMFTVGEYWQNDLGALNNYLAKVNYNQSLFDAPLHYNFYAASTGGGYYDMRNILNNTLVASNPTKAVTLVENHDTQPGQSLESTVQPWFKPLAYAFILTRSGGYPSVFYGDMYGTKGTTTREIPALKSKIEPLLKARKDYAYGTQRDYIDNPDVIGWTREGDSTKAKSGLATVITDGPGGSKRMYVGTSNAGEIWYDLTGNRTDKITIGSDGYATFPVNGGSVSVWVQQ

SEQ ID NO: 35877 - protein, 480 aa, Cytophaga sp.
NGTMMQYFEWYVPNDGQQWNRLRTDAPYLSSVGITAVWTPPAYKGTSQADVGYGPYDLYDLGEFNQKGTVRTKYGTKGELKSAVNTLHSNGIQVYGDVVMNHKAGADYTENVTAVEVNPSNRNQETSGEYNIQAWTGFNFPGRGTTYSNFKWQWFHFDGTDWDQSRSLSRIFKFTGKAWDWEVSSENVNYDYLMYADIDYDHPDVVNEMKKWGVWYANEVGLDGYRLDAVKHIKFSFLKDWVDNARAATGKEMFTVGEYWQNDLGALNNYLAKVNYNQSLFDAPLHYNFYAASTGGGYYDMRNILNNTLVASNPTKAVTLVENHDTQPGQSLESTVQPWFKPLAYAFILTRSGGYPSVFYGDMYGTKGTTTREIPALKSKIEPLLKARKDYAYGTQRDYIDNPDVIGWTREGDSTKAKSGLATVITDGPGGSKRMYVGTSNAGEIWYDLTGNRTDKITIGSDGYATFPVNGGSVSVWVQQ

SEQ ID NO: 35878 - protein, 480 aa, Cytophaga sp.
NGTMMQYFEWYVPNDGQQWNRLRTDAPYLSSVGITAVWTPPAYKGTSQADVGYGPYDLYDLGEFNQKGTVRTKYGTKGELKSAVNTLHSNGIQVYGDVVMNHKAGADYTENVTAVEVNPSNRNQETSGEYNIQAWTGFNFPGRGTTYSNFKWQWFHFDGTDWDQSRSLSRIFKFTGKAWDWEVSSENGNYDYLMYADIDYDHPDVVNEMKKWGVWYANEVGLDGYRLDAVKHIKFSFLKDWVDNAKAATGKEMFTVGEYWQNDLGALNNYLAKVNYNQSLFDAPLHYNFYAASTGGGYYDMRNILNNTLVASNPTKAVTLVENHDTQPGQSLESTVQPWFKPLAYAFILTRSGGYPSVFYGDMYGTKGTTTREIPALKSKIEPLLKARKDYAYGTQRDYIDNPDVIGWTREGDSTKAKSGLATVITDGPGGSKRMYVGTSNAGEIWYDLTGNRTDKITIGSDGYATFPVNGGSVSVWVQQ

SEQ ID NO: 35879 - protein, 480 aa, Cytophaga sp.
NGTMMQYFEWYVPNDGQQWNRLRTDAPYLSSVGITAVWTPPAYKGTSQADVGYGPYDLYDLGEFNQKGTVRTKYGTKGELKSAVNTLHSNGIQVYGDVVMNHKAGADYTENVTAVEVNPSNRNQETSGEYNIQAWTGFNFPGRGTTYSNFKWQWFHFDGTDWDQSCSLSRIFKFTGKAWDWEVSSENGNYDYLMYADIDYDHPDVVNEMKKWGVWYANEVGLDGYRLDAVKHIKFSFLKDWVDNARAATGKEMFTVGEYWQNDLGALNNYLAKVNYNQSLFDAPLHYNFYAASTGGGYYDMRNILNNTLVASNPTKAVTLVENHDTQPGQSLESTVQPWFKPLAYAFILTRSGGYPSVFYGDMYGTKGTTTREIPALKSKIEPLLKARKDYAYGTQRDYIDNPDVIGWTREGDSTKAKSGLATVITDGPGGSKRMYVGTSNAGEIWYDLTGNRTDKITIGSDGYATFPVNGGSVSVWVQQ

SEQ ID NO: 35880 - protein, 480 aa, Cytophaga sp.
NGTMMQYFEWYVPNDGQQWNRLRTDAPYLSSVGITAVWTPPAYKGTSQADVGYGPYDLYDLGEFNQKGTVRTKYGTKGELKSAVNTLHSNGIQVYGDVVMNHKAGADYTENVTAVEVNPSNRNQETSGEYNIQAWTGFNFPGRGTTYSNFKWQWFHFDGTDWDQSRSLSRIFKFTGKAWDWEVSSENGNYDYLMYADIDYDHPDVVNEMKKWGVWYANEVGLDGYRLDAVKHIKFSFLKDWVDNARAAMGKEMFTVGEYWQNDLGALNNYLAKVNYNQSLFDAPLHYNFYAASTGGGYYDMRNILNNTLVASNPTKAVTLVENHDTQPGQSLESTVQPWFKPLAYAFILTRSGGYPSVFYGDMYGTKGTTTREIPALKSKIEPLLKARKDYAYGTQRDYIDNPDVIGWTREGDSTKAKSGLATVITDGPGGSKRMYVGTSNAGEIWYDLTGNRTDKITIGSDGYATFPVNGGSVSVWVQQ

SEQ ID NO: 35881 - protein, 480 aa, Cytophaga sp.
NGTMMQYFEWYVPNDGQQWNRLRTDAPYLSSVGITAVWTPPAYKGTSQADVGYGPYDLYDLGEFNQKGTVRTKYGTKGELKSAVNTLHSNGIQVYGDVVMNHKAGADYTENVTAVEVNPSNRNQETSGEYNIQAWTGFNFPGRGTTYSNFKWQWFHFDGTDWDQSRSLSRIFKFTGKAWDWEVSSENGNYDYLMYADIDYDHPDVVNEMKKWGVWYANEVGLDGYRLDAVKHIKFSFLKDWVDNARAATGKEMFTVGEYWQNDLGALNNYLAKVNYNQSLFDAPLHYNFYAASTGGGYYDMRNILNNTLVASNPTKAVTLVENHDTQPGQSLESTVQPWFKPLAYAFILTRSGGYPSVFYGDMYGTKGTTTREIPALKSKIEPLLKARKDYAYGTQRDYIDNPDVIGWTREGDSTKAKSGLATVITDGPGGSKRMYVGTSNAEEIWYDLTGNRTDKITIGSDGYATFPVNGGSVSVWVQQ

SEQ ID NO: 35882 - protein, 480 aa, Cytophaga sp.
NGTMMQYFEWYVPNDGQQWNRLRTDAPYLSSVGITAVWTPPAYKGTSQADVGYGPYDLYDLGEFNQKGTVRTKYGTKGELKSAVNTLHSNGIQVYGDVVMNHKAGADYTENVTAVEVNPSNRNQETSGEYNIQAWTGFNFPGRGTTYSNFKWQWFHFDGTDWDQSRSLSRIFKFTGKAWDWEVSSENGNYDYLMYADIDYDHPDVVNEMKKWGVWYANEVGLDGYRLDAVKHIKFSFLKDWVDNARAATGKEMFTVGEYWQNDLGALNNYLAKVNYNQSLFDAPLHYNFYAASTGTGYYDMRNILNNTLVASNPTKAVTLVENHDTQPGQSLESTVQPWFKPLAYAFILTRSGGYPSVFYGDMYGTKGTTTREIPALKSKIEPLLKARKDYAYGTQRDYIDNPDVIGWTREGDSTKAKSGLATVITDGPGGSKRMYVGTSNAGEIWYDLTGNRTDKITIGSDGYATFPVNGGSVSVWVQQ

SEQ ID NO: 35883 - protein, 480 aa, Cytophaga sp.
NGTMMQYFEWYVPNDGQQWNRLRTDAPYLSSVGITAVWTPPAYKGTSQADVGYGPYDLYDLGEFNQKGTVRTKYGTKGELKSAVNTLHSNGIQVYGDVVMNHKAGADYTENVTAVEVNPSNRNQETSGEYNIQAWTGFNFPGRGTTYSNFKWQWFHFDGTDWDQSRSLSRIFKFTGKAWDWEVSSENGNYDYLMYADIDYDHPDVVNEMKKWGVWYANEVGLDGYRLDAVKHIKFSFLKDWVDNARAATGKEMFTVGEYWQNDLGALNNYLAKVNYNQSLFDAPLHYNFYAASTGGGYYDMRNILNNTLVASNPTKAVTLVENHDTQPGQSLESTVQPWFKPLAYAFILTRSGGYPSVFYGDMYGTKGTTTREIPALKSKIEPLLKARKDYAYGTQRDYIDNPDVIGWTREGDSTKAKSGLATVITDGPGGSKRMYVGTSNAGEIWYDLTGNRTDKITIGSDGYATFPVNGDSVSVWVQQ

SEQ ID NO: 35884 - protein, 480 aa, Cytophaga sp.
NGTMMQYFEWYVPNDGQQWNRLRTDAPYLSSVGITAVWTPPAYKGTSQADVGYGPYDLYDLGEFNQKGTVRTKYGTKGELKSAVNTLHSNGIQVYGDVVMNHKAGADYTENVTAVEVNPSNRNQETSGEYNIQAWTGFNFPGRGTTYSNFKWQWFHFDGTDWDQSRSLSRIFKFTGKAWDWEVSSENGNYDYLMYADIDYDHPDVVNEMKKWGVWYANEVGLDGYRLDAVKHIKFSFLKDWVDNARAATGKEMFTVGEYWQNDLGALNNYLAKVNYNQSLFDAPLHYNFYAASTGGGYYDMRNILNNTLVASNPTKAVTLVENHDTQPGQSLESTVQPWFKPLAYAFILTRSGGYPSVFYGDMYGTKGTTTREIPALKSKIEPLLKARKDYAYGTQRDYIDNPNVIGWTREGDSTKAKSGLATVITDGPGGSKRMYVGTSNAGEIWYDLTGNRTDKITIGSDGYATFPVNGGSVSVWVQQ

SEQ ID NO: 35885 - protein, 480 aa, Cytophaga sp.
NGTMMQYFEWYVPNDGQQWNRLRTDAPYLSSVGITAVWTPPAYKGTSQADVGYGPYDLYDLGEFNQKGTVRTKYGTKGELKSAVNTLHSNGIQVYGDVVMNHKAGADYTENVTAVEVNPSNRNQETSGEYNIQAWTGFNFPGRGTTYSNFKWQWFHFDGTDWDQSRSLSRIFKFTGKAWDWEVSSENGNYDYLMYADIDYDHPDVVNEMKKWGVWYANEVGLDGYRLDAVKHIKFHFLKDWVDNARAATGKEMFTVGEYWQNDLGALNNYLAKVNYNQSLFDAPLHYNFYAASTGGGYYDMRNILNNTLVASNPTKAVTLVENHDTQPGQSLESTVQPWFKPLAYAFILTRSGGYPSVFYGDMYGTKGTTTREIPALKSKIEPLLKARKDYAYGTQRDYIDNPDVIGWTREGDSTKAKSGLATVITDGPGGSKRMYVGTSNAGEIWYDLTGNRTDKITIGSDGYATFPVNGGSVSVWVQQ

SEQ ID NO: 35886 - protein, 480 aa, Cytophaga sp.
NGTMMQYFEWYVPNDGQQWNRLRTDAPYLSSVGITAVWTPPAYKGTSQADVGYGPYDLYDLGEFNQKGTVRTKYGTKGELKSAVNTLHSNGIQVYGDVVMNHKAGADYTENVTAVEVNPSNRNQETSGEYNIQAWTGFNFPGRGTTYSNFKWQWFHFDGTDWDQSRSLSRIFKFTGKAWDWEVSSENGNYDYLMYADIDYDHPDVVNEMKKWGVWYANEVGLDGYRLDAVKHPKFSFLKDWVDNARAATGKEMFTVGEYWQNDLGALNNYLAKVNYNQSLFDAPLHYNFYAASTGGGYYDMRNILNNTLVASNPTKAVTLVENHDTQPGQSLESTVQPWFKPLAYAFILTRSGGYPSVFYGDMYGTKGTTTREIPALKSKIEPLLKARKDYAYGTQRDYIDNPDVIGWTREGDSTKAKSGLATVITDGPGGSKRMYVGTSNAGEIWYDLTGNRTDKITIGSDGYATFPVNGGSVSVWVQQ

SEQ ID NO: 35887 - protein, 480 aa, Cytophaga sp.
NGTMMQYFEWYVPNDGQQWNRLRTDAPYLSSVGITAVWTPPAYKGTSQADVGYGPYDLYDLGEFNQKGTVRTKYGTKGELKSAVNTLHSNGIQVYGDVVMNHKAGADYTENVTAVEVNPSNRNQETSGEYNIQAWTGFNFPGRGTWYSNFKWQWFHFDGTDWDQSRSLSRIFKFTGKAWDWEVSSENGNYDYLMYADIDYDHPDVVNEMKKWGVWYANEVGLDGYRLDAVKHIKFSFLKDWVDNARAATGKEMFTVGEYWQNDLGALNNYLAKVNYNQSLFDAPLHYNFYAASTGGGYYDMRNILNNTLVASNPTKAVTLVENHDTQPGQSLESTVQPWFKPLAYAFILTRSGGYPSVFYGDMYGTKGTTTREIPALKSKIEPLLKARKDYAYGTQRDYIDNPDVIGWTREGDSTKAKSGLATVITDGPGGSKRMYVGTSNAGEIWYDLTGNRTDKITIGSDGYATFPVNGGSVSVWVQQ

SEQ ID NO: 35888 - protein, 480 aa, Cytophaga sp.
NGTMMQYFEWYVPNDGQQWNRLRTDAPYLSSVGITAVWTPPAYKGTSQADVGYGPYDLYDLGEFNQKGTVRTKYGTKGELKSAVNTLHSNGIQVYGDVVMNHKAGADYTENVTAVEVNPSNRNQETSGEYNIQAWTGFNFPGRGTTYSNFKWQWFHFDGTDWDQSRSLSRIFKFTGKAWDWEVSSENGNYDYLMYADIDYDHPDVVNEMKKWGVWYANEVGLDGYRLDAVKHIKFSFLKDWVDNARAATGKEMFTVGEYWQNDLGALNNYLAKVNYNQSLFDAPLHYNFYAASTGGGYYDMRNILNNTLVASNPTKAVTLVENHDTQPGQSLESTVQPWFKPLAYAFILTRSGGYPSVFYGDMYGTKGTTTREIPALKSKIEPLLKARKDYAYGTQRDYIDNPDVIGWTREGDSTKAKSGLATVITDGPGGSKRMYVGTSNAYEIWYDLTGNRTDKITIGSDGYATFPVNGGSVSVWVQQ

SEQ ID NO: 35889 - protein, 480 aa, Cytophaga sp.
NGTMMQYFEWYVPNDGQQWNRLRTDAPYLSSVGITAVWTPPAYKGTSQADVGYGPYDLYDLGEFNQKGTVRTKYGTKGELKSAVNTLHSNGIQVYGDVVMNHKAGADYTENVTAVEVNPSNRNQETSGEYNIQAWTGFNFPGRGTTYSNFKWQWFHFDGTDWDQSRSLSRIFKFTGKAWDWEVSSENGNYDYLMYADIDYDHPDVVNEMKKWGVWYANEVGLDGYRLDAVKHIKFSFLKDWVDNARAATGKEMFTVGEYWQNDLGALNNYLAKVNYNQSLFDAPLHYNFYAASTGGGYYDMRNILNNTLVASNPTKAVTLVENHDTQPGQSLESTVQPWFKPLAYAFILTRSGGYPSVFYGDMYGTKGTTTREIPALKSKIEPLLKARKDYAYGTQRDYIDNSDVIGWTREGDSTKAKSGLATVITDGPGGSKRMYVGTSNAGEIWYDLTGNRTDKITIGSDGYATFPVNGGSVSVWVQQ

SEQ ID NO: 35890 - protein, 480 aa, Cytophaga sp.
NGTMMQYFEWYVPNDGQQWNRLRTDAPYLSSVGITAVWTPPAYKGTSQADVGYGPYDLYDLGEFNQKGTVRTKYGTKGELKSAVNTLHSNGIQVYGDVVMNHKAGADYTENVTAVEVNPSNRNQETSGEYNIQAWTGFNFPGRITTYSNFKWQWFHFDGTDWDQSRSLSRIFKFTGKAWDWEVSSENGNYDYLMYADIDYDHPDVVNEMKKWGVWYANEVGLDGYRLDAVKHIKFSFLKDWVDNARAATGKEMFTVGEYWQNDLGALNNYLAKVNYNQSLFDAPLHYNFYAASTGGGYYDMRNILNNTLVASNPTKAVTLVENHDTQPGQSLESTVQPWFKPLAYAFILTRSGGYPSVFYGDMYGTKGTTTREIPALKSKIEPLLKARKDYAYGTQRDYIDNPDVIGWTREGDSTKAKSGLATVITDGPGGSKRMYVGTSNAGEIWYDLTGNRTDKITIGSDGYATFPVNGGSVSVWVQQ

SEQ ID NO: 35891 - protein, 480 aa, Cytophaga sp.
NGTMMQYFEWYVPNDGQQWNRLRTDAPYLSSVGITAVWTPPAYKGTSQADVGYGPYDLYDLGEFNQKGTVRTKYGTKGELKSAVNTLHSNGIQVYGDVVMNHKAGADYTENVTAVEVNPSNRNQETSGEYNIQAWTGFNFPSRGTTYSNFKWQWFHFDGTDWDQSRSLSRIFKFTGKAWDWEVSSENGNYDYLMYADIDYDHPDVVNEMKKWGVWYANEVGLDGYRLDAVKHIKFSFLKDWVDNARAATGKEMFTVGEYWQNDLGALNNYLAKVNYNQSLFDAPLHYNFYAASTGGGYYDMRNILNNTLVASNPTKAVTLVENHDTQPGQSLESTVQPWFKPLAYAFILTRSGGYPSVFYGDMYGTKGTTTREIPALKSKIEPLLKARKDYAYGTQRDYIDNPDVIGWTREGDSTKAKSGLATVITDGPGGSKRMYVGTSNAGEIWYDLTGNRTDKITIGSDGYATFPVNGGSVSVWVQQ

SEQ ID NO: 35892 - protein, 480 aa, Cytophaga sp.
NGTMMQYFEWYVPNDGQQWNRLRTDAPYLSSVGITAVWTPPAYKGTSQADVGYGPYDLYDLGEFNQKGTVRTKYGTKGELKSAVNTLHSNGIQVYGDVVMNHKAGADYTENVTAVEVNPSNRNQETSGEYNIQAWTGFNFPGRGTTYSNFKWQWFHFDGTDWDQSRSLSRIFKFTGKAWDWEVSPENGNYDYLMYADIDYDHPDVVNEMKKWGVWYANEVGLDGYRLDAVKHIKFSFLKDWVDNARAATGKEMFTVGEYWQNDLGALNNYLAKVNYNQSLFDAPLHYNFYAASTGGGYYDMRNILNNTLVASNPTKAVTLVENHDTQPGQSLESTVQPWFKPLAYAFILTRSGGYPSVFYGDMYGTKGTTTREIPALKSKIEPLLKARKDYAYGTQRDYIDNPDVIGWTREGDSTKAKSGLATVITDGPGGSKRMYVGTSNAGEIWYDLTGNRTDKITIGSDGYATFPVNGGSVSVWVQQ

SEQ ID NO: 35893 - protein, 480 aa, Cytophaga sp.
NGTMMQYFEWYVPNDGQQWNRLRTDAPYLSSVGITAVWTPPAYKGTSQADVGYGPYDLYDLGEFNQKGTVRTKYGTKGELKSAVNTLHSNGIQVYGDVVMNHKAGADYTENVTAVEVNPSNRNQETSGEYNIQAWTGFNFPGRGTTYSNFKWQWFHFDGTDWDQSRSLSRIFKFTGKAWDWEVSSENGNYDYLMYADIDYDHPDVVNEMKKWGVWYANEVGLDGYRLDAVKHIKFSFLKDWVDNARAATGKEMFTVGEYWQNDLGALNNYLAKVNYNQSLFDAPLHYNFYAASTGGGYYDMRNILNNTLVASNPTKAVTLVENHDTQPGQSLESTVQPWFKPLAYAFILTRSGGYPSVFYGDMYGTKGTTTREIPALKSKIEPLLKARKDYAYGTQRDYIDNPDVIGWTREGDSTKAKSGLATVITDGPGGFKRMYVGTSNAGEIWYDLTGNRTDKITIGSDGYATFPVNGGSVSVWVQQ

SEQ ID NO: 35894 - protein, 480 aa, Cytophaga sp.
NLTMMQYFEWYVPNDGQQWNRLRTDAPYLSSVGITAVWTPPAYKGTSQADVGYGPYDLYDLGEFNQKGTVRTKYGTKGELKSAVNTLHSNGIQVYGDVVMNHKAGADYTENVTAVEVNPSNRNQETSGEYNIQAWTGFNFPGRGTTYSNFKWQWFHFDGTDWDQSRSLSRIFKFTGKAWDWEVSSENGNYDYLMYADIDYDHPDVVNEMKKWGVWYANEVGLDGYRLDAVKHIKFSFLKDWVDNARAATGKEMFTVGEYWQNDLGALNNYLAKVNYNQSLFDAPLHYNFYAASTGGGYYDMRNILNNTLVASNPTKAVTLVENHDTQPGQSLESTVQPWFKPLAYAFILTRSGGYPSVFYGDMYGTKGTTTREIPALKSKIEPLLKARKDYAYGTQRDYIDNPDVIGWTREGDSTKAKSGLATVITDGPGGSKRMYVGTSNAGEIWYDLTGNRTDKITIGSDGYATFPVNGGSVSVWVQQ

SEQ ID NO: 35895 - protein, 480 aa, Cytophaga sp.
NGTMMQYFEWYVPNDGQQWNRLRTDAPYLSSVGITAVWTPPAYKGTSQADVGYGPYDLYDLGEFNQKGTVRTKYGTKGELKSAVNTLHSNGIQVYGDVVMNHKAGADYTENVTAVEVNPSNRNQETSGEYNIQAWTGFNFPGRGTTYSNFKWQWFHFDGTDWDQSRSLSRIFKFTGKAWDWEVSSENGNYDYLMYADIDYDHPDVVNEMKKWGVWYANEVGLDGYRLDAVKHIKFSFLKDWVDNARAATGKEMFTVGEYWQNDLGALNNYLAKVNYNQSLFDAPLHYNFYAASTGGGYYDMRNILNNTLVASNPTKAVTLVENHDTQPGQSLESTVQPWFKPLAYAFILTRSGGYPSVFYGDMYGTKGTTTREIPALKSKIEPLLKARKDKAYGTQRDYIDNPDVIGWTREGDSTKAKSGLATVITDGPGGSKRMYVGTSNAGEIWYDLTGNRTDKITIGSDGYATFPVNGGSVSVWVQQ

SEQ ID NO: 35896 - protein, 480 aa, Cytophaga sp.
NGTMMQYFEWYVPNDGQQWNRLRTDAPYLSSVGITAVWTPPAYKGTSQADVGYGPYDLYDLGEFNQKGTVRTKYGTKGELKSAVNTLHSNGIQVYGDVVMNHKAGADYTENVTAVEVNPSNRNQETSGEYNIQAWTGFNFPGRGTTYSNFKWQWFHFDGTDWDQSRSLSRIFKFTGKAWDWEVSSENGNYDYLMYADIDYDHPIVVNEMKKWGVWYANEVGLDGYRLDAVKHIKFSFLKDWVDNARAATGKEMFTVGEYWQNDLGALNNYLAKVNYNQSLFDAPLHYNFYAASTGGGYYDMRNILNNTLVASNPTKAVTLVENHDTQPGQSLESTVQPWFKPLAYAFILTRSGGYPSVFYGDMYGTKGTTTREIPALKSKIEPLLKARKDYAYGTQRDYIDNPDVIGWTREGDSTKAKSGLATVITDGPGGSKRMYVGTSNAGEIWYDLTGNRTDKITIGSDGYATFPVNGGSVSVWVQQ

SEQ ID NO: 35897 - protein, 480 aa, Cytophaga sp.
NGTMMQYFEWYVPNDGQQWNRLRTDAPYLSSVGITAVWTPPAYKGTSQADVGYGPYDLYDLGEFNQKGTVRTKYGTKGELKSAVNTLHVNGIQVYGDVVMNHKAGADYTENVTAVEVNPSNRNQETSGEYNIQAWTGFNFPGRGTTYSNFKWQWFHFDGTDWDQSRSLSRIFKFTGKAWDWEVSSENGNYDYLMYADIDYDHPDVVNEMKKWGVWYANEVGLDGYRLDAVKHIKFSFLKDWVDNARAATGKEMFTVGEYWQNDLGALNNYLAKVNYNQSLFDAPLHYNFYAASTGGGYYDMRNILNNTLVASNPTKAVTLVENHDTQPGQSLESTVQPWFKPLAYAFILTRSGGYPSVFYGDMYGTKGTTTREIPALKSKIEPLLKARKDYAYGTQRDYIDNPDVIGWTREGDSTKAKSGLATVITDGPGGSKRMYVGTSNAGEIWYDLTGNRTDKITIGSDGYATFPVNGGSVSVWVQQ

SEQ ID NO: 35898 - protein, 480 aa, Cytophaga sp.
NGTMMQYFEWYVPNDGQQWNRLRTDAPYLSSVGITAVWTPPAYKGTSQADVGYGPYDLYDLGEFNQKGTVRTKYGTKGELKSAVNTLHSNGIQVYGDVVMNHKAGADYTENVTAVEVNPSNRNQETSGEYNIQAWTGFNFPGRGTTYSNFKWQWFHFDGTDWDQSRSLSRIFKFTGKAWDWEVSSENGNYDYLMYADIDYDHPDVVNEMKKWGVWYANEVGLDGYRLDAVKHIKFSFLKDWVDNARAATGKEMFTVGEYWQNDLGALNNYLAKVNYNQSLFDAPLHYNFYAASTGGGYYDMRNILNNTLVASNPTKAVTLVENHDTQPGQSLESTVQPWFKPLAYAFILTRSGGYPSVFYGDMYGTKGTTTREIPALKSKIEPLLKARKDYAYGTQRDYIDNPDVIGWTREGDSTKAKSGLATVITDGPGGSKRMYVGTSNAGEIWYDLTANRTDKITIGSDGYATFPVNGGSVSVWVQQ

SEQ ID NO: 35899 - protein, 480 aa, Cytophaga sp.
NGTMMQYFEWYVPNDGQQWNRLRTDAPYLSSVGITAVWTPPAYKGTSQADVGYGPYDLYDLGEFNQKGTVRTKYGTKGELKSAVNTLHSNGIQVYGDVVMNHKAGADYTENVTAVEVNPSNRNQETSGEYNIQAWTGFNFPGRGTTYSNFKWQWFHFDGTDWDQSRSLSRIFKFTGKAWDWEVSSEMGNYDYLMYADIDYDHPDVVNEMKKWGVWYANEVGLDGYRLDAVKHIKFSFLKDWVDNARAATGKEMFTVGEYWQNDLGALNNYLAKVNYNQSLFDAPLHYNFYAASTGGGYYDMRNILNNTLVASNPTKAVTLVENHDTQPGQSLESTVQPWFKPLAYAFILTRSGGYPSVFYGDMYGTKGTTTREIPALKSKIEPLLKARKDYAYGTQRDYIDNPDVIGWTREGDSTKAKSGLATVITDGPGGSKRMYVGTSNAGEIWYDLTGNRTDKITIGSDGYATFPVNGGSVSVWVQQ

SEQ ID NO: 35900 - protein, 480 aa, Cytophaga sp.
NGTMMQYFEWYVPNDGQQWNRLRTDAPYLSSVGITAVWTPPAYKGTSQADVGYGPYDLYDLGEFNQKGTVRTKYGTKGELKSAVNTLHSNGIQVYGDVVMNHKAGADYTENVTAVEVNPSNRNQETSGEYNIQAWTGFNFPGRGTTYSNFKWQWFHFDGTDWDQSRSLSRIFKFTGKAWDWEVSSENGNYDYLMYADIDYDHPDVVNEMKKWGVWYANEVGLDGYRLDAVKHIKFSFLKDWVDNARAATGKEMFTVGEYWQNDLGALNNYLAKVNYNQSLFDAPLHYNFYAASTGGGYYDMRNILNNTLVASNPTKAVTLVENHDTQPGQSLESTVQPWFKPLAYAFILTRSGGYPSVFYGDMYGTKGTTTREIPALKSKIEPLLKARKDYAYGTQRDYIDNPDVIGWTRGGDSTKAKSGLATVITDGPGGSKRMYVGTSNAGEIWYDLTGNRTDKITIGSDGYATFPVNGGSVSVWVQQ

SEQ ID NO: 35901 - protein, 480 aa, Cytophaga sp.
NGTMMQYFEWYVPNDGQQWNRLRTDAPYLSSVGITAVWTPPAYKGTSQADVGYGPYDLYDLGEFNQKGTVRTKYGTKGELKSAVNTLHSNGIQVYGDVVMNHKAGADYTENVTAVEVNPSNRNQEGSGEYNIQAWTGFNFPGRGTTYSNFKWQWFHFDGTDWDQSRSLSRIFKFTGKAWDWEVSSENGNYDYLMYADIDYDHPDVVNEMKKWGVWYANEVGLDGYRLDAVKHIKFSFLKDWVDNARAATGKEMFTVGEYWQNDLGALNNYLAKVNYNQSLFDAPLHYNFYAASTGGGYYDMRNILNNTLVASNPTKAVTLVENHDTQPGQSLESTVQPWFKPLAYAFILTRSGGYPSVFYGDMYGTKGTTTREIPALKSKIEPLLKARKDYAYGTQRDYIDNPDVIGWTREGDSTKAKSGLATVITDGPGGSKRMYVGTSNAGEIWYDLTGNRTDKITIGSDGYATFPVNGGSVSVWVQQ

SEQ ID NO: 35902 - protein, 480 aa, Cytophaga sp.
NGTMMQYFEWYVPNDGQQWNRLRTDAPYLSSVGITAVWTPPAYKGTSQADVGYGPYDLYDLGEFNQKGTVRTKYGTKGELKSAVNTLHSNGIQVYGDVVMNHKAGADYTENVTAVEVNPSNRNQETSGEYNIQAWTGFNFPGRGTTYSNFKWQWFHFDGTDWDQSRSLSRIFKFTGKAWDWEVSSENGNYDYLMYADIDYDHPDVVNEMKKWGVWYANEVGLDGYRLDAVKHIKFSFLKDWVDNARAATGKEMFTVGEYWQNDLGALNNYLAKVNYNQSLFDAPLHYNFYAASTGGGYYDMRNILNNTLVASNPTKAVTLVENHDTQPGQSLESTVQPWFKPLAYAFILTRSGGYPSVFYGDMYGTKGTTTREIPALKSKIEPLLKARKDYAYGTQRDYIDNPDVIGWTREGDSTKAKSGLATVITDGPGGSKRMYVGTSNAGEIWYDLTGNRTDKITIGSDGYATFPVNGGSVSVWIQQ

SEQ ID NO: 35903 - protein, 480 aa, Cytophaga sp.
NGTMMQYFEWYVPNDGQQWNRLRTDAPYLSSVGITAVWTPPAYKGTSQADVGYGPYDLYDLGEFNQKGTVRTKYGTKGELKSAVNTLHSNGIQVYGDVVMNHKAGADYTENVTAVEVNPSNRNQETSGEYNIQAWTGFNFPGRGTTYSNFKWQWFHFDGTDWDQSRSLSRIFKFTGKAWDWEVSSENGNYDYLMYADIDYDHPDVVNEMKKWGVWYANEVGLDGYRLDAVKHIKFSFLKDWVDNARAATGKEMFTVGEYWQNDLGALNNYLAKVNYNQSLFDAPLHYNFYAASTGGGYYDMRNILNNTLVASNPTKAVTLVENHDTQPGQSLESTVQPWFKPLAYAFILTRSGGYPSVFYGDMYGTKGTTTREIPALKSKIEPLLKAREDYAYGTQRDYIDNPDVIGWTREGDSTKAKSGLATVITDGPGGSKRMYVGTSNAGEIWYDLTGNRTDKITIGSDGYATFPVNGGSVSVWVQQ

SEQ ID NO: 35904 - protein, 480 aa, Cytophaga sp.
NGTMMQYFEWYVPNDGQQWNRLRTDAPYLSSVGITAVWTPPAYKGTSQADVGYGPYDLYDLGEFNQKGTVRTKYGTKGELKSAVNTLHSNGIQVYGDVVMNHKAGADYTENVTAVEVNPSNRNQETSGEYNIQAWTGFNFPGRGTTYSNFKWQWFHFDGTDWDQSQSLSRIFKFTGKAWDWEVSSENGNYDYLMYADIDYDHPDVVNEMKKWGVWYANEVGLDGYRLDAVKHIKFSFLKDWVDNARAATGKEMFTVGEYWQNDLGALNNYLAKVNYNQSLFDAPLHYNFYAASTGGGYYDMRNILNNTLVASNPTKAVTLVENHDTQPGQSLESTVQPWFKPLAYAFILTRSGGYPSVFYGDMYGTKGTTTREIPALKSKIEPLLKARKDYAYGTQRDYIDNPDVIGWTREGDSTKAKSGLATVITDGPGGSKRMYVGTSNAGEIWYDLTGNRTDKITIGSDGYATFPVNGGSVSVWVQQ

SEQ ID NO: 35905 - protein, 480 aa, Cytophaga sp.
NGTMMQYFEWYVPNDGQQWNRLRTDAPYLSSVGITAVWTPPAYKGTSQADVGYGPYDLYDLGEFNQKGTVRTKYGTKGELKSAVNTLHSNGIQVYGDVVMNHKAGADYTENVTAVEVNPSNRNQETSGEYNIQAWTGFNFPGRGTTYSNFKWQWFHFDGTDWDQSRSLSRIFKFTGKAWDWEVSSENGNYDYLMYADIDYDHPDVVNEMKKWGVWYANEVGLDGYRLDAVKHIKFSFLKDWVDNARAATGKEMFTVGEYWQNDLGALNNYLAKVNYNQSLFDAPLHYNFYAASTGGGYYDMRNILNNTLVASNPTKAVTLVENHDTQPGQSLESTVQPWFKPLAYAFILTRSGGYPSVFYGDMYGTKGTTTREIPALKSKIEPLLKARKDYAYGTQRDYIDNPDVIGWTREGDSTKAKSGLATVITDGPGGSKRMYVGTSNAGEIWYDLTGNRTDKITIGKDGYATFPVNGGSVSVWVQQ

SEQ ID NO: 35906 - protein, 480 aa, Cytophaga sp.
NGTMMQYFEWYVPNDGQQWNRLRTDAPYLSSVGITAVWTPPAYKGTSQADVGYGPYDLYDLGEFNQKGTVRTKYGTKGELKSAVNTLHSNGIQVYGDVVMNHKAGADYTENVTAVEVNPSNRNQETSGEYNIQAWTGFNFPGRGTTYSNFKWQWFHFDGTDWDQSRSLDRIFKFTGKAWDWEVSSENGNYDYLMYADIDYDHPDVVNEMKKWGVWYANEVGLDGYRLDAVKHIKFSFLKDWVDNARAATGKEMFTVGEYWQNDLGALNNYLAKVNYNQSLFDAPLHYNFYAASTGGGYYDMRNILNNTLVASNPTKAVTLVENHDTQPGQSLESTVQPWFKPLAYAFILTRSGGYPSVFYGDMYGTKGTTTREIPALKSKIEPLLKARKDYAYGTQRDYIDNPDVIGWTREGDSTKAKSGLATVITDGPGGSKRMYVGTSNAGEIWYDLTGNRTDKITIGSDGYATFPVNGGSVSVWVQQ

SEQ ID NO: 35907 - protein, 480 aa, Cytophaga sp.
NGTMMQYFEWYVPNDGQQWNRLRTDAPYLSSVGITAVWTPPAYKGTSQADVGYGPYDLYDLGEFNQKGTVRTKYGTKGELKSAVNTLHSNGIQVYGDVVMNHKAGADYTENVTAVEVNPSNRNQETSGEYNIQAWTGFNFPGRGTTYSNFKWQWFHFDGTDWDQSRSLSRIFKFTGKAWDWEVSSENGNYDYLMYADIDYDHPDVVNEMKKWGVWYANEVGLDGYRLDAVKHIKFSFLKDWVDNARAATGKEMFTVGEYWQNDLGALNNFLAKVNYNQSLFDAPLHYNFYAASTGGGYYDMRNILNNTLVASNPTKAVTLVENHDTQPGQSLESTVQPWFKPLAYAFILTRSGGYPSVFYGDMYGTKGTTTREIPALKSKIEPLLKARKDYAYGTQRDYIDNPDVIGWTREGDSTKAKSGLATVITDGPGGSKRMYVGTSNAGEIWYDLTGNRTDKITIGSDGYATFPVNGGSVSVWVQQ

SEQ ID NO: 35908 - protein, 480 aa, Cytophaga sp.
NGTMMQYFEWYVPNDGQQWNRLRTDAPYLSSVGITAVWTPPAYKGTSQADVGYGPYDLYDLGEFNQKGTVRTKYGTKGELKSAVNTLHSNGIQVYGDVVMNHKAGADYTENVTAVEVNPSNRNQETSGEYNIQAWTGFNFPGRGTTYSNFKWQWFHFDGTDWDQSRSLSRIFKFTGKAWDWEVSSENGNYDYLMYADIDYDHPDVVNEMKKWGVWYANEVGLDGYRLDAVKHIKFSFLKDWVDNARAATGKEMFTVGEYWQNDLGALNNYLAKVNYNQSLFDAPLHYNFYAASTGGGYYDMRNILNNTLVASNPTKAVTLVENHDTQPGQSLESTVQPWFKPLAYAFILTRSGGYPSVFYGDMYGTKGTTTREIPALKSKIEPLLKARKDYAYGTQRDYIDNPDVIGWTREGDSTKAKSGLATVITDGPGGSKRMYVGTSNAGEIWYDLTGNNTDKITIGSDGYATFPVNGGSVSVWVQQ

SEQ ID NO: 35909 - protein, 480 aa, Cytophaga sp.
NGTMMQYFEWYVPNDGQQWNRLRTDAPYLSSVGITAVWTPPAYKGTSQADVGYGPYDLYDLGEFNQKGTVRTKYGTKGELKSAVNTLHSNGIQVYGDVVMNHKAGADYTENVTAVEVNPSNRNQETSGEYNIQAWTGFNFPGRGTTYSNFKWQWFHFDGTDWDQSRSLSRIFKFTGKAWDWEVSSENGNYDYLMYADIDYDHPDVVNEMKKWGVWYANEVGLDGYRLDAVKHIKFSFLKDWVDNARAATGKEMFTVGEYWQNDLGALNNYLAKVNYNQSLFDAPLHYNFYAASTGGGYYDMRNILNNTLVASNPTKAVTLVENHDTQPGQSLESTVQPWFKPLAYAFILTRSGGYPSVFYGDMYGTKGTTTREIPALKSKIEPLLKARKDYAYGTQRDYIDNPDVIGWTREGDSTKASSGLATVITDGPGGSKRMYVGTSNAGEIWYDLTGNRTDKITIGSDGYATFPVNGGSVSVWVQQ

SEQ ID NO: 35910 - protein, 480 aa, Cytophaga sp.
NGTMMQYFEWYVPNDGQQWNRLRTDAPYLSSVGITAVWTPPAYKGTSQADVGYGPYDLYDLGEFNQKGTVRTKYGTKGELKSAVNTLHSNGIQVYGDVVMNHKAGADYTENVTAVEVNPSNRNQETSGEYNIQAWTGFNFPGRGTTYSNFKWQWFHFDGTDWDQSRSLSRIFKFTGKAWDWEVSSENGNYDYLMYADIDYDHPDVVNEMKKWGVWYANEVGLDGYRLDAVKHIKFSFLKDWVDNARAATGKEMFTVGEYWQNDLGALNNYLAKVNYNQSLFDAPLHYNFYAASTGGGYYDMRNILNNTLVASNPTKAVTLVENHDTQPGQSLESTVQPWFKPLAYAFILTRSGGYPSVFYGDMYGTKGTTTREIPALKSKIEPLLKARKDYAYGTQRDYIDNPDVIGWTREGDSTKAKSGLATVITDGPGGSKRMYVGTSNAGEIWYDLTGNRTDKITIGSDGYATFPCNGGSVSVWVQQ

SEQ ID NO: 35911 - protein, 480 aa, Cytophaga sp.
NGTMMQYFEWYVPNDGQQWNRLRTDAPYLSSVGITAVWTPPAYKGTSQADVGYGPYDLYDLGEFNQKGTVRTKYGTKGELKSAVNTLHSNGIQVYGDVVMNHKAGADYTENVTAVEVNPSNRNQETSGEYNIQAWTGFNFPGRGTTYSNFKWQWFHFDGTDWDQSRSLSRIFKFTGKAWDWEVSSENGNYDYLMYADIDYDHPDVVNEMKKWGVWYANEVGLDGYRLDAVKHIKFSFLKDWVDNARAATGKEMFTVGEYWQNDLGALNNYLAKVNYNVSLFDAPLHYNFYAASTGGGYYDMRNILNNTLVASNPTKAVTLVENHDTQPGQSLESTVQPWFKPLAYAFILTRSGGYPSVFYGDMYGTKGTTTREIPALKSKIEPLLKARKDYAYGTQRDYIDNPDVIGWTREGDSTKAKSGLATVITDGPGGSKRMYVGTSNAGEIWYDLTGNRTDKITIGSDGYATFPVNGGSVSVWVQQ

SEQ ID NO: 35912 - protein, 480 aa, Cytophaga sp.
NGTMMQYFEWYVPNDGQQWNRLRTDAPYLSSVGITAVWTPPAYKGTSQADVGYGPYDLYDLGEFNQKGTVRTKYGTKGELKSAVNTLHSNGIQVYGDVVMNHKAGADYTENVTAVEVNPSNRNQETSGEYNIQAWTGFNFPGRGTTYSNFKWQWFHFDGTDWDQSRSLSRIFKFTGKAWDWEVSSENGNYDYLMYADIDYDHPDVVNEMKKWGVWYANEVGLDGYRLDAVKHIKFSFLKDWVDNARAATGKEMFTVGEYWQNDLGALNNYLAKVNYNQSLFDAPLHYNFYAASTGGGYYDMRNILNNTLVASNPTKAVTLVENHDTQPGQSLESTVQPWFKPLAYAFILTRSGGYPSVFYGDMYGTKGTTTREIPALKSKIEPLLKARKDYAYGTQRDYIDNPDVIGWTREGDSTKAKSGLATVITDGPGGSKRMYVGTSNAGEIWYDLTMNRTDKITIGSDGYATFPVNGGSVSVWVQQ

SEQ ID NO: 35913 - protein, 480 aa, Cytophaga sp.
NGTMMQYFEWYVPNDGQQWNRLRTDAPYLSSVGITAVWTPPAYKGTSQADVGYGPYDLYDLGEFNQKGTVRTKYGTKGELKSAVNTLHSNGIQVYGDVVMNHKAGADYTENVTAVEVNPSNRNQETSGEYNIQAWTGFNFPGRGTTYSNFKWQWFHFDGTDWDQSRSLSRIFKFTGKAWDWEVSSENGNYDYLMYADIDYDHPDVTNEMKKWGVWYANEVGLDGYRLDAVKHIKFSFLKDWVDNARAATGKEMFTVGEYWQNDLGALNNYLAKVNYNQSLFDAPLHYNFYAASTGGGYYDMRNILNNTLVASNPTKAVTLVENHDTQPGQSLESTVQPWFKPLAYAFILTRSGGYPSVFYGDMYGTKGTTTREIPALKSKIEPLLKARKDYAYGTQRDYIDNPDVIGWTREGDSTKAKSGLATVITDGPGGSKRMYVGTSNAGEIWYDLTGNRTDKITIGSDGYATFPVNGGSVSVWVQQ

SEQ ID NO: 35914 - protein, 480 aa, Cytophaga sp.
NGTMMQYFEWYVPNDGQQWNRLRTDAPYLSSVGITAVWTPPAYKGTSQADVGYGPYDLYDLGEFNQKGTVRTKYGTKGELKSAVNTLHSNGIQVYGDVVMNHKAGADYTENVTAVEVNPSNRNQETSGEYNIQAWTGFNFPGRGTTYSNFKWQWFHFDGTDWDQSRSLSRIFKFTGKAWDWEVSSENGNYDYLMYADIDYDHPDVVNEMKKWGVWYANEVGLDGYRLDAVKHIKFSFLKDWVDNARAATGKEMFTVGEYWQNDLGALNNYLAKVNYNQSLFDAPLHYNFYAASTGGGYYDMRNILNNTLVASNPTKAVTLVENHDTQPGQSLESTVQPWFKPLAYAFILTRSGGYPSVFYGDMYGTKGTTTREIPALKSKIEPLLKARKDYAYGTQRDYLDNPDVIGWTREGDSTKAKSGLATVITDGPGGSKRMYVGTSNAGEIWYDLTGNRTDKITIGSDGYATFPVNGGSVSVWVQQ

SEQ ID NO: 35915 - protein, 480 aa, Cytophaga sp.
NGTMMQYFEWYVPNDGQQWNRLRTDAPYLSSVGITAVWTPPAYKGTSQADVGYGPYDLYDLGEFNQKGTVRTKYGTKGELKSAVNTLHSNGIQVYGDVVMNHKAGADYTENVTAVEVNPSNRNQETSGEYNIQAWTGFNFPGRETTYSNFKWQWFHFDGTDWDQSRSLSRIFKFTGKAWDWEVSSENGNYDYLMYADIDYDHPDVVNEMKKWGVWYANEVGLDGYRLDAVKHIKFSFLKDWVDNARAATGKEMFTVGEYWQNDLGALNNYLAKVNYNQSLFDAPLHYNFYAASTGGGYYDMRNILNNTLVASNPTKAVTLVENHDTQPGQSLESTVQPWFKPLAYAFILTRSGGYPSVFYGDMYGTKGTTTREIPALKSKIEPLLKARKDYAYGTQRDYIDNPDVIGWTREGDSTKAKSGLATVITDGPGGSKRMYVGTSNAGEIWYDLTGNRTDKITIGSDGYATFPVNGGSVSVWVQQ

SEQ ID NO: 35916 - protein, 480 aa, Cytophaga sp.
NGTMMQYFEWYVPNDGQQWNRLRTDAPYLSSVGITAVWTPPAYKGTSQADVGYGPYDLYDLGEFNQKGTVRTKYGTKGELKSAVNTLHSNGIQVYGDVVMNHKAGADYTENVTAVEVNPSNRNQETSGEYNIQAWTGFNFPGRGTTYSNFKWQWFHFDGTDWDQSRSLSRIFKFTGKAWDWEVSSENGNYDYLMYADIDYDHPDVVNEMKKWGVWYANEVGLDGYRLDAVKHIKFSFLKDWVDNARAATGKEMFTVGEYWQNDLGALNNYLAKVNYNQSLMDAPLHYNFYAASTGGGYYDMRNILNNTLVASNPTKAVTLVENHDTQPGQSLESTVQPWFKPLAYAFILTRSGGYPSVFYGDMYGTKGTTTREIPALKSKIEPLLKARKDYAYGTQRDYIDNPDVIGWTREGDSTKAKSGLATVITDGPGGSKRMYVGTSNAGEIWYDLTGNRTDKITIGSDGYATFPVNGGSVSVWVQQ

SEQ ID NO: 35917 - protein, 480 aa, Cytophaga sp.
NGTMMQYFEWYVPNDGQQWNRLRTDAPYLSSVGITAVWTPPAYKGTSQADVGYGPYDLYDLGEFNQKGTVRTKYGTKGELKSAVNTLHSNGIQVYGDVVMNHKAGADYTENVTAVEVNPSNRNQETSGEYNIQAWTGFNFPGRGTTYSNFKWQWFHFDGTDWDQSRSLSRIFKFTGKAWDWEVSSENGNYDYLMYADIDYDHPDVVNEMKKWGVWYANEVGLDGYRLDAVKHIKFSFLKDWVDNARAATGKEMFTVGEYWQNDLGALNNYLAKVNYNQSLFDAPLHYNFYAASTGGGYYDMRNILNNTLVASNPTKAVTLVENHDTQPGQSLESTVQPWFKPLAYAFILTRSGGYPSVFYGDMYGTKGTTTREIPALKSKIEPLLKARKDYAYGTQRDYIDNPDVIGWTREGDSTKAKSGLATVITDGPGGSKRMYVGTSNAGEIWYDLLGNRTDKITIGSDGYATFPVNGGSVSVWVQQ

SEQ ID NO: 35918 - protein, 480 aa, Cytophaga sp.
NGTMMQYFEWYVPNDGQQWNRLRTDAPYLSSVGITAVWTPPAYKGTSQADVGYGPYDLYDLGEFNQKGTVRTKYGTKGELKSAVNTLHSNGIQVYGDVVMNHKAGADYTENVTAVEVNPSNRNQETSGEYNIQAWTGFNFPGRGTTYSNFHWQWFHFDGTDWDQSRSLSRIFKFTGKAWDWEVSSENGNYDYLMYADIDYDHPDVVNEMKKWGVWYANEVGLDGYRLDAVKHIKFSFLKDWVDNARAATGKEMFTVGEYWQNDLGALNNYLAKVNYNQSLFDAPLHYNFYAASTGGGYYDMRNILNNTLVASNPTKAVTLVENHDTQPGQSLESTVQPWFKPLAYAFILTRSGGYPSVFYGDMYGTKGTTTREIPALKSKIEPLLKARKDYAYGTQRDYIDNPDVIGWTREGDSTKAKSGLATVITDGPGGSKRMYVGTSNAGEIWYDLTGNRTDKITIGSDGYATFPVNGGSVSVWVQQ

SEQ ID NO: 35919 - protein, 480 aa, Cytophaga sp.
NGTMMQYFEWYVPNDGQQWNRLRTDAPYLSSVGITAVWTPPAYKGTSQADVGYGPYDLYDLGEFNQKGTVRTKYGTKGELKSAVNTLHSNGIQVYGDVVMNHKAGADYTENVTAVEVNPSNRNQETSGEYNIQAWTGFNFPGRGTTYSNFKWQWFHFDGTDWDQSRSLSRIFKFTGKAWDWEVSSENGNYDYLMYADIDYDHPDVVNEMKKWGVWYANEVGLDGYRLDAVKHIKFSFLKDWVDNARAATGKEMFTVGEYWQNDLGALNNYLAKVNYNQSLFDAPLHYNFYAASTGGGYYDMRNILNNTLVASNPTKAVTLVENHDTQPGQSLESTVQPWFKPLAYAFILTRSGGYPSVFYGDMYGTKGTTTREIPALKSKIEPLLKARKDYAYGTQRDYIDNPDVIGWTRVGDSTKAKSGLATVITDGPGGSKRMYVGTSNAGEIWYDLTGNRTDKITIGSDGYATFPVNGGSVSVWVQQ

SEQ ID NO: 35920 - protein, 480 aa, Cytophaga sp.
NGTMMQYFEWYVPNDGQQWNRLRTDAPYLSSVGITAVWTPPAYKGTSQADVGYGPYDLYDLGEFNQKGTVRTKYGTKGELKSAVNTLHSNGIQVYGDVVMNHKAGADYTENVTAVEVNPSNRNQETSGEYNIQATTGFNFPGRGTTYSNFKWQWFHFDGTDWDQSRSLSRIFKFTGKAWDWEVSSENGNYDYLMYADIDYDHPDVVNEMKKWGVWYANEVGLDGYRLDAVKHIKFSFLKDWVDNARAATGKEMFTVGEYWQNDLGALNNYLAKVNYNQSLFDAPLHYNFYAASTGGGYYDMRNILNNTLVASNPTKAVTLVENHDTQPGQSLESTVQPWFKPLAYAFILTRSGGYPSVFYGDMYGTKGTTTREIPALKSKIEPLLKARKDYAYGTQRDYIDNPDVIGWTREGDSTKAKSGLATVITDGPGGSKRMYVGTSNAGEIWYDLTGNRTDKITIGSDGYATFPVNGGSVSVWVQQ

SEQ ID NO: 35921 - protein, 480 aa, Cytophaga sp.
NGTMMQYFEWYVPNDGQQWNRLRTDAPYLSSVGITAVWTPPAYKGTSQADVGYGPYDLYDLGEFNQKGTVRTKYGTKGELKSAVNTLHSNGIQVYGDVVMNHKAGADYTENVTAVEVNPSNRNQETSGEYNIQAWTGFNFPGRGTTYSNFRWQWFHFDGTDWDQSRSLSRIFKFTGKAWDWEVSSENGNYDYLMYADIDYDHPDVVNEMKKWGVWYANEVGLDGYRLDAVKHIKFSFLKDWVDNARAATGKEMFTVGEYWQNDLGALNNYLAKVNYNQSLFDAPLHYNFYAASTGGGYYDMRNILNNTLVASNPTKAVTLVENHDTQPGQSLESTVQPWFKPLAYAFILTRSGGYPSVFYGDMYGTKGTTTREIPALKSKIEPLLKARKDYAYGTQRDYIDNPDVIGWTREGDSTKAKSGLATVITDGPGGSKRMYVGTSNAGEIWYDLTGNRTDKITIGSDGYATFPVNGGSVSVWVQQ

SEQ ID NO: 35922 - protein, 480 aa, Cytophaga sp.
NGTMMQYFEWYVPNDGQQWNRLRTDAPYLSSVGITAVWTPPAYKGTSQADVGYGPYDLYDLGEFNQKGTVRTKYGTKGELKSAVNTLHSNGIQVYGDVVMNHKAGADYTENVTAVEVNPSNRNQETSGEYNIQAWTGFNFPGRGTTYSNFKWQWFHFDGTFWDQSRSLSRIFKFTGKAWDWEVSSENGNYDYLMYADIDYDHPDVVNEMKKWGVWYANEVGLDGYRLDAVKHIKFSFLKDWVDNARAATGKEMFTVGEYWQNDLGALNNYLAKVNYNQSLFDAPLHYNFYAASTGGGYYDMRNILNNTLVASNPTKAVTLVENHDTQPGQSLESTVQPWFKPLAYAFILTRSGGYPSVFYGDMYGTKGTTTREIPALKSKIEPLLKARKDYAYGTQRDYIDNPDVIGWTREGDSTKAKSGLATVITDGPGGSKRMYVGTSNAGEIWYDLTGNRTDKITIGSDGYATFPVNGGSVSVWVQQ

SEQ ID NO: 35923 - protein, 480 aa, Cytophaga sp.
NGTMMQYFEWYVPNDGQQWNRLRTDAPYLSSVGITAVWTPPAYKGTSQADVGYGPYDLYDLGEFNQKGTVRTKYGTKGELKSAVNTLHSNGIQVYGDVVMNHKAGADYTENVTAVEVNPSNRNQETSGEYNIQAWTGFNFPGRGTTYSNFKWQWFHFDGTDWDQSRSLSRIFKFTGKAWDWEVSSENGNYDYLMYADIDYAHPDVVNEMKKWGVWYANEVGLDGYRLDAVKHIKFSFLKDWVDNARAATGKEMFTVGEYWQNDLGALNNYLAKVNYNQSLFDAPLHYNFYAASTGGGYYDMRNILNNTLVASNPTKAVTLVENHDTQPGQSLESTVQPWFKPLAYAFILTRSGGYPSVFYGDMYGTKGTTTREIPALKSKIEPLLKARKDYAYGTQRDYIDNPDVIGWTREGDSTKAKSGLATVITDGPGGSKRMYVGTSNAGEIWYDLTGNRTDKITIGSDGYATFPVNGGSVSVWVQQ

SEQ ID NO: 35924 - protein, 480 aa, Cytophaga sp.
NGTMMQYFEWYVPNDGQQWNRLRTDAPYLSSVGITAVWTPPAYKGTSQADVGYGPYDLYDLGEFNQKGTVRTKYGTKGELKSAVNTLHSNGIQVYGDVVMNHKAGADYTENVTAVEVNPSNRNQETSGEYNIQAWTGFNFPGRGTTISNFKWQWFHFDGTDWDQSRSLSRIFKFTGKAWDWEVSSENGNYDYLMYADIDYDHPDVVNEMKKWGVWYANEVGLDGYRLDAVKHIKFSFLKDWVDNARAATGKEMFTVGEYWQNDLGALNNYLAKVNYNQSLFDAPLHYNFYAASTGGGYYDMRNILNNTLVASNPTKAVTLVENHDTQPGQSLESTVQPWFKPLAYAFILTRSGGYPSVFYGDMYGTKGTTTREIPALKSKIEPLLKARKDYAYGTQRDYIDNPDVIGWTREGDSTKAKSGLATVITDGPGGSKRMYVGTSNAGEIWYDLTGNRTDKITIGSDGYATFPVNGGSVSVWVQQ

SEQ ID NO: 35925 - protein, 480 aa, Cytophaga sp.
NGTMMQYFEWYVPNDGQQWNRLRTDAPYLSSVGITAVWTPPAYKGTSQADVGYGPYDLYDLGEFNQKGTVRTKYGTKGELKSAVNTLHSNGIQVYGDVVMNHKAGADYTENVTAVEVNPSNRNQETSGEYNIQAWTGFNFPGRRTTYSNFKWQWFHFDGTDWDQSRSLSRIFKFTGKAWDWEVSSENGNYDYLMYADIDYDHPDVVNEMKKWGVWYANEVGLDGYRLDAVKHIKFSFLKDWVDNARAATGKEMFTVGEYWQNDLGALNNYLAKVNYNQSLFDAPLHYNFYAASTGGGYYDMRNILNNTLVASNPTKAVTLVENHDTQPGQSLESTVQPWFKPLAYAFILTRSGGYPSVFYGDMYGTKGTTTREIPALKSKIEPLLKARKDYAYGTQRDYIDNPDVIGWTREGDSTKAKSGLATVITDGPGGSKRMYVGTSNAGEIWYDLTGNRTDKITIGSDGYATFPVNGGSVSVWVQQ

SEQ ID NO: 35926 - protein, 480 aa, Cytophaga sp.
NGTMMQYFEWYVPNDGQQWNRLRTDAPYLSSVGITAVWTPPAYKGTSQADVGYGPYDLYDLGEFNQKGTVRTKYGTKGELKSAVNTLHSNGIQVYGDVVMNHKAGADYTENVTAVEVNPSNRNQETSGEYNIQAWTGFNFPGRGTTDSNFKWQWFHFDGTDWDQSRSLSRIFKFTGKAWDWEVSSENGNYDYLMYADIDYDHPDVVNEMKKWGVWYANEVGLDGYRLDAVKHIKFSFLKDWVDNARAATGKEMFTVGEYWQNDLGALNNYLAKVNYNQSLFDAPLHYNFYAASTGGGYYDMRNILNNTLVASNPTKAVTLVENHDTQPGQSLESTVQPWFKPLAYAFILTRSGGYPSVFYGDMYGTKGTTTREIPALKSKIEPLLKARKDYAYGTQRDYIDNPDVIGWTREGDSTKAKSGLATVITDGPGGSKRMYVGTSNAGEIWYDLTGNRTDKITIGSDGYATFPVNGGSVSVWVQQ

SEQ ID NO: 35927 - protein, 480 aa, Cytophaga sp.
NGTMMQYFEWYVPNDGQQWNRLRTDAPYLSSVGITAVWTPPAYKGTSQADVGYGPYDLYDLGEFNQKGTVRTKYGTKGELKSAVNTLHSNGIQVYGDVVMNHKAGADYTENVTAVEVNPSNRNQETSGEYNIQAWTGWNFPGRGTTYSNFKWQWFHFDGTDWDQSRSLSRIFKFTGKAWDWEVSSENGNYDYLMYADIDYDHPDVVNEMKKWGVWYANEVGLDGYRLDAVKHIKFSFLKDWVDNARAATGKEMFTVGEYWQNDLGALNNYLAKVNYNQSLFDAPLHYNFYAASTGGGYYDMRNILNNTLVASNPTKAVTLVENHDTQPGQSLESTVQPWFKPLAYAFILTRSGGYPSVFYGDMYGTKGTTTREIPALKSKIEPLLKARKDYAYGTQRDYIDNPDVIGWTREGDSTKAKSGLATVITDGPGGSKRMYVGTSNAGEIWYDLTGNRTDKITIGSDGYATFPVNGGSVSVWVQQ

SEQ ID NO: 35928 - protein, 480 aa, Cytophaga sp.
NGTMMQYFEWYVPNDGQQWNRLRTDAPYLSSVGITAVWTPPAYKGTSQADVGYGPYDLYDLGEFNQKGTVRTKYGTKGELKSAVNTLHSNGIQVYGDVVMNHKAGADYTENVTAVEVNPSNRNQETSGEYNIQAWTGFNFPGRGTTYSNFKWQWFHFDGTDWDQSRSLSRIFKFTGKAWDWEVSSENGNYDYLMYADIDYDHPDVVNEMKKWGVWYANEVGLDGYRLDAVKHIKFSFLKDWVDNARAATGKEMFTVGEYWQNDLGALNNYLAKVNYNQSLFDAPLHYNFYAASTGGGYYDMRNILNNTLVASNPTKAVTLVENHDTQPGQSLESTVQPWFKPLAYAFILTRSGGYPSVFYGDMYGTKGTTTREIPALKSKIEPLLKARKDYAYGTQRDYIDNPDVIGWTREGDSTKCKSGLATVITDGPGGSKRMYVGTSNAGEIWYDLTGNRTDKITIGSDGYATFPVNGGSVSVWVQQ

SEQ ID NO: 35929 - protein, 480 aa, Cytophaga sp.
NGTMMQYFEWYVPNDGQQWNRLRTDAPYLSSVGITAVWTPPAYKGTSQADVGYGPYDLYDLGEFNQKGTVRTKYGTKGELKSAVNTLHSNGIQVYGDVVMNHKAGADYTENVTAVEVNPSNRNQETSGEYNIQAWTGFNFPGRGTTYSNFKWQWFHFDGTDWDQSRSLSRIFKFTGKAWDWEVSSENGNYDYLMYADIDYDHPDVVNEMKKWGVWYANEVGLDGYRLDAVKHIKFSFLKDWVDNARAATGKEMFTVGEYWQNDLGALNNYLAKVNYNQSLFDAPLHYNFYAASTGGGYYDMRNILNNTLVASNPTKAVTLVENHDTQPGQSLESTVQPWFKPLAYAFILTRSGGYPSVFYGDMYGTKGTTTREIPALKSKIEPLLKARKDYAYGTQRDYIDNPDVIGWTREGDSTKAKSGLATVITDGPGGSKRMYVGTSNATEIWYDLTGNRTDKITIGSDGYATFPVNGGSVSVWVQQ

SEQ ID NO: 35930 - protein, 480 aa, Cytophaga sp.
NGTMMQYFEWYVPNDGQQWNRLRTDAPYLSSVGITAVWTPPAYKGTSQADVGYGPYDLYDLGEFNQKGTVRTKYGTKGELKSAVNTLHSNGIQVYGDVVMNHKAGADYTENVTAVEVNPSNRNIETSGEYNIQAWTGFNFPGRGTTYSNFKWQWFHFDGTDWDQSRSLSRIFKFTGKAWDWEVSSENGNYDYLMYADIDYDHPDVVNEMKKWGVWYANEVGLDGYRLDAVKHIKFSFLKDWVDNARAATGKEMFTVGEYWQNDLGALNNYLAKVNYNQSLFDAPLHYNFYAASTGGGYYDMRNILNNTLVASNPTKAVTLVENHDTQPGQSLESTVQPWFKPLAYAFILTRSGGYPSVFYGDMYGTKGTTTREIPALKSKIEPLLKARKDYAYGTQRDYIDNPDVIGWTREGDSTKAKSGLATVITDGPGGSKRMYVGTSNAGEIWYDLTGNRTDKITIGSDGYATFPVNGGSVSVWVQQ

SEQ ID NO: 35931 - protein, 480 aa, Cytophaga sp.
NGTMMQYFEWYVPNDGQQWNRLRTDAPYLSSVGITAVWTPPAYKGTSQADVGYGPYDLYDLGEFNQKGTVRTKYGTKGELKSAVNTLHSNGIQVYGDVVMNHKAGADYTENVTAVEVNPSNRNQETSGEYNIQAWTGFNFPGRGTTYSNFKWQWFHFDGTDWDQSRSLSRIFKFTGKAWDWEVSSENGNYDYLMYADIDYDHPDVVNEMKKWGVWYANEVGLDGYRLDAVKHIKFSFLKDWVDNARAATGKEMFTVGEYWQNDLGALNNYLAKVNYNQSLFDAPLHYNFYAASTGGGYYDMRNILNNTLVASNPTKAVTLVENHDTQPGQSLESTVQPWFKPLAYAFILTRSGGYPSVFYGDMYGTKGTTTREIPALKSKIEPLLKARKDYAYGTQRDYIDNPDVIGWTRMGDSTKAKSGLATVITDGPGGSKRMYVGTSNAGEIWYDLTGNRTDKITIGSDGYATFPVNGGSVSVWVQQ

SEQ ID NO: 35932 - protein, 480 aa, Cytophaga sp.
NGTMMQYFEWYVPNDGQQWNRLRTDAPYLSSVGITAVWTPPAYKGTSQADVGYGPYDLYDLGEFNQKGTVRTKYGTKGELKSAVNTLHSNGIQVYGDVVMNHKAGADYTENVTAVEVRPSNRNQETSGEYNIQAWTGFNFPGRGTTYSNFKWQWFHFDGTDWDQSRSLSRIFKFTGKAWDWEVSSENGNYDYLMYADIDYDHPDVVNEMKKWGVWYANEVGLDGYRLDAVKHIKFSFLKDWVDNARAATGKEMFTVGEYWQNDLGALNNYLAKVNYNQSLFDAPLHYNFYAASTGGGYYDMRNILNNTLVASNPTKAVTLVENHDTQPGQSLESTVQPWFKPLAYAFILTRSGGYPSVFYGDMYGTKGTTTREIPALKSKIEPLLKARKDYAYGTQRDYIDNPDVIGWTREGDSTKAKSGLATVITDGPGGSKRMYVGTSNAGEIWYDLTGNRTDKITIGSDGYATFPVNGGSVSVWVQQ

SEQ ID NO: 35933 - protein, 480 aa, Cytophaga sp.
NGTMMQYFEWYVPNDGQQWNRLRTDAPYLSSVGITAVWTPPAYKGTSQADVGYGPYDLYDLGEFNQKGTVRTKYGTKGELKSAVNTLHSNGIQVYGDVVMNHKAGADYTENVTAVEVNPSNRNQETSGETNIQAWTGFNFPGRGTTYSNFKWQWFHFDGTDWDQSRSLSRIFKFTGKAWDWEVSSENGNYDYLMYADIDYDHPDVVNEMKKWGVWYANEVGLDGYRLDAVKHIKFSFLKDWVDNARAATGKEMFTVGEYWQNDLGALNNYLAKVNYNQSLFDAPLHYNFYAASTGGGYYDMRNILNNTLVASNPTKAVTLVENHDTQPGQSLESTVQPWFKPLAYAFILTRSGGYPSVFYGDMYGTKGTTTREIPALKSKIEPLLKARKDYAYGTQRDYIDNPDVIGWTREGDSTKAKSGLATVITDGPGGSKRMYVGTSNAGEIWYDLTGNRTDKITIGSDGYATFPVNGGSVSVWVQQ

SEQ ID NO: 35934 - protein, 480 aa, Cytophaga sp.
NGTMMQYFEWYVPNDGQQWNRLRTDAPYLSSVGITAVWTPPAYKGTSQADVGYGPYDLYDLGEFNQKGTVRTKYGTKGELKSAVNTLHSNGIQVYGDVVMNHKAGADYTENVTAVEVNPSNRNQETSGEYNIQAWTGFNFPGRGTDYSNFKWQWFHFDGTDWDQSRSLSRIFKFTGKAWDWEVSSENGNYDYLMYADIDYDHPDVVNEMKKWGVWYANEVGLDGYRLDAVKHIKFSFLKDWVDNARAATGKEMFTVGEYWQNDLGALNNYLAKVNYNQSLFDAPLHYNFYAASTGGGYYDMRNILNNTLVASNPTKAVTLVENHDTQPGQSLESTVQPWFKPLAYAFILTRSGGYPSVFYGDMYGTKGTTTREIPALKSKIEPLLKARKDYAYGTQRDYIDNPDVIGWTREGDSTKAKSGLATVITDGPGGSKRMYVGTSNAGEIWYDLTGNRTDKITIGSDGYATFPVNGGSVSVWVQQ

SEQ ID NO: 35935 - protein, 480 aa, Cytophaga sp.
NGTMMQYFEWYVPNDGQQWNRLRTDAPYLSSVGITAVWTPPAYKGTSQADVGYGPYDLYDLGEFNQKGTVRTKYGTKGELKSAVNTLHSNGIQVYGDVVMNHKAGADYTENVTAVEVNPSNRNQETSGEYNIQAWTGFNFPGRGTTYSNFKWQWFHFDGTDWDQSRSLSRIFKFTGKAWDWEVSSENGNYDYLMYADIDYDHPDVVNEMKKWGVWYANEVGLDGYRLDAVKHIKFSFLKDWVDNARAATGKEMFTVGEYWQNDLGALNNYLAKVNYNQSLFDAPLHYNFYAASTGGGYYDMRNILNNTLVASNPTKAVTLVENHDTQPGQSLESTVQPWFKPLAYAFILTRSGGYPSVFYGDMYGTKGTTTREIPALKSKIEPLLKARKDYAYGTQRDYIDNPDVIGWTREGDSTKAKSGLATVITDGPGGYKRMYVGTSNAGEIWYDLTGNRTDKITIGSDGYATFPVNGGSVSVWVQQ

SEQ ID NO: 35936 - protein, 480 aa, Cytophaga sp.
NGTMMQYFEWYVPNDGQQWNRLRTDAPYLSSVGITAVWTPPAYKGTSQADVGYGPYDLYDLGEFNQKGTVRTKYGTKGELKSAVNTLHSNGIQVYGDVVMNHKAGADYTENVTAVEVNPSNRNQETSGEYNIQAWTGFNFPGRGTTYSNFKWQWFHFDGTDWDQSRSLSRIFKFTGKAWDWEVSSENGNYDYLMYADIDYDHPDVVNEMKKWGVWYANEVGLDGYRLDAVKHIKFSFLKDWVDNARAATGKEMFTVGEYWQNDLGALNNYLAKVNYNQSLFDAPLHYNFYAASTGGGYYDMRNILNNTLVASNPTKAVTLVENHDTQPGQSLESTVQPWFKPLAYAFILTRSGGYPSVFYGDMYGTKGTTTREIPALKSKIEPLLKARKDYAYGTQRDYIDNPDVIGWTREGDSTKAKSGLATVITDGPGGSKRMYVGTSNAGEIWYDLCGNRTDKITIGSDGYATFPVNGGSVSVWVQQ

SEQ ID NO: 35937 - protein, 480 aa, Cytophaga sp.
NGTMMQYFEWYVPNDGQQWNRLRTDAPYLSSVGITAVWTPPAYKGTSQADVGYGPYDLYDLGEFNQKGTVRTKYGTKGELKSAVNTLHSNGIQVYGDVVMNHKAGADYTENVTAVEVNPSNRNQETSGEYNIQAWTGFNFPGRGTTYSNHKWQWFHFDGTDWDQSRSLSRIFKFTGKAWDWEVSSENGNYDYLMYADIDYDHPDVVNEMKKWGVWYANEVGLDGYRLDAVKHIKFSFLKDWVDNARAATGKEMFTVGEYWQNDLGALNNYLAKVNYNQSLFDAPLHYNFYAASTGGGYYDMRNILNNTLVASNPTKAVTLVENHDTQPGQSLESTVQPWFKPLAYAFILTRSGGYPSVFYGDMYGTKGTTTREIPALKSKIEPLLKARKDYAYGTQRDYIDNPDVIGWTREGDSTKAKSGLATVITDGPGGSKRMYVGTSNAGEIWYDLTGNRTDKITIGSDGYATFPVNGGSVSVWVQQ

SEQ ID NO: 35938 - protein, 480 aa, Cytophaga sp.
NGTMMQYFEWYVPNDGQQWNRLRTDAPYLSSVGITAVWTPPAYKGTSQADVGYGPYDLYDLGEFNQKGTVRTKYGTKGELKSAVNTLHSNGIQVYGDVVMNHKAGADYTENVTAVEVNPSNRNQETSGEYNIQAWTGFNFPGRGTTYSNFKWQWFHFDGTDWDQSRSLSRIFKFTGKAWDWEVSSENGNYDYLMYADIDYDHPDVVNEMKKWGVWYANEVGLDGYRLDAVKHIKFSFLKDWVDNARAATGKEMFTVGEYWQNDLGALNNYLAKVNYNQSLFDAPLHYNFYAASTGGGYYDMRNILNNTLVASNPTKAVTLVENHDTQPGQSLESTVQPWFKPLAYAFILTRSGGYPSVFYGDMYGTKGTTTREIPALKSKIEPLLKARKDYAYGTQRDYIDNPDVIGWTREGDSTKAKSGLATVITDGPGGSKRMYVGTSNAGEIWADLTGNRTDKITIGSDGYATFPVNGGSVSVWVQQ

SEQ ID NO: 35939 - protein, 480 aa, Cytophaga sp.
NGTMMQYFEWYVPNDGQQWNRLRTDAPYLSSVGITAVWTPPAYKGTKQADVGYGPYDLYDLGEFNQKGTVRTKYGTKGELKSAVNTLHSNGIQVYGDVVMNHKAGADYTENVTAVEVNPSNRNQETSGEYNIQAWTGFNFPGRGTTYSNFKWQWFHFDGTDWDQSRSLSRIFKFTGKAWDWEVSSENGNYDYLMYADIDYDHPDVVNEMKKWGVWYANEVGLDGYRLDAVKHIKFSFLKDWVDNARAATGKEMFTVGEYWQNDLGALNNYLAKVNYNQSLFDAPLHYNFYAASTGGGYYDMRNILNNTLVASNPTKAVTLVENHDTQPGQSLESTVQPWFKPLAYAFILTRSGGYPSVFYGDMYGTKGTTTREIPALKSKIEPLLKARKDYAYGTQRDYIDNPDVIGWTREGDSTKAKSGLATVITDGPGGSKRMYVGTSNAGEIWYDLTGNRTDKITIGSDGYATFPVNGGSVSVWVQQ

SEQ ID NO: 35940 - protein, 480 aa, Cytophaga sp.
NGTMMQYFEWYVPNDGQQWNRLRTDAPYLSSVGITAVWTPPAYKGTSQADVGYGPYDLYDLGEFNQKGTVRTKYGTKGELKSAVNTLHSNGIQVYGDVVMNHKAGADYTENVTAVEVNPSNRNQETSGEYNIQAWTGFNFPGRGTTYSNFKWQWFHFDGTDWDQSRSLSRIFKFTGKAWDWEVSSENGNYDYLMYADIDYDHPDVVNEMKKWGVWYANEVGLDGYRLDAVKHIKFSFLKDWVDNARAATGKEMFTVGEYWQNDLGALNNYLAKVNYNQSLFDAPLHYNFYAASTGGGYYDMRNILNNTLVASNPTKAVTLVENHDTQPGQSLESTVQPWFKPLAYAFILTRSGGYPSVFYGDMYGTKGTTTREIPALKSKIEPLLKARKDYAYGTQRDYIDNPDVIGWTREGDSTKAKSGLATVITDGPGGEKRMYVGTSNAGEIWYDLTGNRTDKITIGSDGYATFPVNGGSVSVWVQQ

SEQ ID NO: 35941 - protein, 480 aa, Cytophaga sp.
NGTMMQYFEWYVPNDGQQWNRLRTDAPYLSSVGITAVWTPPAYKGTSQADVGYGPYDLYDLGEFNQKGTVRTKYGTKGELKSAVNTLHSNGIQVYGDVVMNHKAGADYTENVTAVEVNPSNRNQETSGEYNIQAWTGFNFPGRGTTYSNFKWQWFHFDGTDWDQSRSLSRIFKFTGKAWDWEVSSENGNYDYLMYADIDYDHPDVVNEMKKWGVWYANEVGLDGYRLDAVKHIKFSFLKDWVDNARAAIGKEMFTVGEYWQNDLGALNNYLAKVNYNQSLFDAPLHYNFYAASTGGGYYDMRNILNNTLVASNPTKAVTLVENHDTQPGQSLESTVQPWFKPLAYAFILTRSGGYPSVFYGDMYGTKGTTTREIPALKSKIEPLLKARKDYAYGTQRDYIDNPDVIGWTREGDSTKAKSGLATVITDGPGGSKRMYVGTSNAGEIWYDLTGNRTDKITIGSDGYATFPVNGGSVSVWVQQ

SEQ ID NO: 35942 - protein, 480 aa, Cytophaga sp.
NGTMMQYFEWYVPNDGQQWNRLRTDAPYLSSVGITAVWTPPAYKGTSQADVGYGPYDLYDLGEFNQKGTVRTKYGTKGELKSAVNTLHSNGIQVYGDVVMNHKAGADYTENVTAVEVNPSNRNQETSGEYNIQAWTGFNFPGRGTTYSNFKWQWFHFDGTDWDQSRSLSRIFKFTGKAWDWEVSSENGNYDYLMYADIDYDHPDVVNEMKKWGVWYANEVGLDGYRLDAVKHIKFSFLKDWVDNARAATGKEMFYVGEYWQNDLGALNNYLAKVNYNQSLFDAPLHYNFYAASTGGGYYDMRNILNNTLVASNPTKAVTLVENHDTQPGQSLESTVQPWFKPLAYAFILTRSGGYPSVFYGDMYGTKGTTTREIPALKSKIEPLLKARKDYAYGTQRDYIDNPDVIGWTREGDSTKAKSGLATVITDGPGGSKRMYVGTSNAGEIWYDLTGNRTDKITIGSDGYATFPVNGGSVSVWVQQ

SEQ ID NO: 35943 - protein, 480 aa, Cytophaga sp.
NGTMMQYFEWYVPNDGQQWNRLRTDAPYLSSVGITAVWTPPAYKGTSQADVGYGPYDLYDLGEFNQKGTVRTKYGTKGELKSAVNTLHSNGIQVYGDVVMNHKAGADYTENVTAVEVNPSNRNQETSGEYNIQAWTGFNFPGRGTTYSNFKWQWFHFDGTDWDQSRSLSRIFKFTGKAWDWEVSSENGNYDYLMYADIDYDHPDVVNEMKKWGVWYANEVGLDGYRLDAVKHIKFSFLKDWVDNARAATGKEMFTVGEYWQNDLGALNNYLAKVNYNQSLFDAPLHYNFYAASTGGGYYDMRNILNNTLVASNPTKAVTLVENHDTQPGQSLESTVQPWFKPLAYAFILTRSGGYPSVFYGDMYGTKGTTTREIPALKSKIEPLLKARKDYAYGTQRDYIDNPDSIGWTREGDSTKAKSGLATVITDGPGGSKRMYVGTSNAGEIWYDLTGNRTDKITIGSDGYATFPVNGGSVSVWVQQ

SEQ ID NO: 35944 - protein, 480 aa, Cytophaga sp.
NGTMMQYFEWYVPNDGQQWNRLRTDAPYLSSVGITAVWTPPAYKGTSQADVGYGPYDLYDLGEFNQKGTVRTKYGTKGELKSAVNTLHSNGIQVYGDVVMNHKAGADYTENVTAVEVNPSNRNQETSGEYNIQAWTGFNFPGRGTTYSNFKWQWFHFDGTDWDQSRSLSWIFKFTGKAWDWEVSSENGNYDYLMYADIDYDHPDVVNEMKKWGVWYANEVGLDGYRLDAVKHIKFSFLKDWVDNARAATGKEMFTVGEYWQNDLGALNNYLAKVNYNQSLFDAPLHYNFYAASTGGGYYDMRNILNNTLVASNPTKAVTLVENHDTQPGQSLESTVQPWFKPLAYAFILTRSGGYPSVFYGDMYGTKGTTTREIPALKSKIEPLLKARKDYAYGTQRDYIDNPDVIGWTREGDSTKAKSGLATVITDGPGGSKRMYVGTSNAGEIWYDLTGNRTDKITIGSDGYATFPVNGGSVSVWVQQ

SEQ ID NO: 35945 - protein, 480 aa, Cytophaga sp.
NGTMMQYFEWYVPNDGQQWNRLRTDAPYLSSVGITAVWTPPAYKGTSQADVGYGPYDLYDLGEFNQKGTVRTKYGTKGELKSAVNTLHSNGIQVYGDVVMNHKAGADYTENVTAVEVNPSNRNQETSGEYNIQAWTGFNFPGRGTTYSNFKWQWFHFDGTDWDQSRSLSRIFKFTGKAWDWEVSSERGNYDYLMYADIDYDHPDVVNEMKKWGVWYANEVGLDGYRLDAVKHIKFSFLKDWVDNARAATGKEMFTVGEYWQNDLGALNNYLAKVNYNQSLFDAPLHYNFYAASTGGGYYDMRNILNNTLVASNPTKAVTLVENHDTQPGQSLESTVQPWFKPLAYAFILTRSGGYPSVFYGDMYGTKGTTTREIPALKSKIEPLLKARKDYAYGTQRDYIDNPDVIGWTREGDSTKAKSGLATVITDGPGGSKRMYVGTSNAGEIWYDLTGNRTDKITIGSDGYATFPVNGGSVSVWVQQ

SEQ ID NO: 35946 - protein, 480 aa, Cytophaga sp.
NGTMMQYFEWYVPNDGQQWNRLRTDAPYLSSVGITAVWTPPAYKGTSQADVGYGPYDLYDLGEFNQKGTVRTKYGTKGELKSAVNTLHSNGIQVYGDVVMNHKAGADYTENVTAVEVNPSNRNQETSGEYNIQAWTGFNFPGRGTTYSNFKWQWFHFDGTDWDQSRSLSRIFKFTGKAWDWEVSSENGNYDYLMYADIDYDHPDVVNEMKKWGVWYANEVGLDGYRLDAVKHIKFSFLKDWVDNARAATGKEMFSVGEYWQNDLGALNNYLAKVNYNQSLFDAPLHYNFYAASTGGGYYDMRNILNNTLVASNPTKAVTLVENHDTQPGQSLESTVQPWFKPLAYAFILTRSGGYPSVFYGDMYGTKGTTTREIPALKSKIEPLLKARKDYAYGTQRDYIDNPDVIGWTREGDSTKAKSGLATVITDGPGGSKRMYVGTSNAGEIWYDLTGNRTDKITIGSDGYATFPVNGGSVSVWVQQ

SEQ ID NO: 35947 - protein, 480 aa, Cytophaga sp.
NGTMMQYFEWYVPNDGQQWNRLRTDAPYLSSVGITAVWTPPAYKGTSQADVGYGPYDLYDLGEFNQKGTVRTKYGTKGELKSAVNTLHSNGIQVYGDVVMNHKAGADYTENVTAVEVNPSNRNQETSGEYNIQAWTGFNFPGRGTTYSNFKWQWFHFDGTDWDQSRSLSRIFKFTGKAWDWEVSSENGNYDYLMYADIDYDHPDVVNEMKKWGVWYANEVGLDGYRLDAVKHIKFSFLKDWVDNARAATGKEMFTVGEYWQNDLGALNNYLAKVNYNQSLFDAPLHYNFYAASTGGGYYDMRNILNNTLVASNPTKAVTLVENHDTQPGQSLESTVQPWFKPLAYAFILTRSGGYPSVFYGDMYGTKGTTTREIPALKSKIEPLLKARKDYAYGTQRDYIDNPDVIGWTREGDSTKAKSGLATVITDNPGGSKRMYVGTSNAGEIWYDLTGNRTDKITIGSDGYATFPVNGGSVSVWVQQ

SEQ ID NO: 35948 - protein, 480 aa, Cytophaga sp.
NGTMMQYFEWYVPNDGQQWNRLRTDAPYLSSVGITAVWTPPAYKGTSQADVGYGPYDLYDLGEFNQKGTVRTKYGTKGELKSAVNTLHSNGIQVYGDVVMNHKAGADYTENVTAVEVNPSNRNQETSGEYNIQAWTGFNFPGRGTTYSNFKWQWFHFDGTDWDQSASLSRIFKFTGKAWDWEVSSENGNYDYLMYADIDYDHPDVVNEMKKWGVWYANEVGLDGYRLDAVKHIKFSFLKDWVDNARAATGKEMFTVGEYWQNDLGALNNYLAKVNYNQSLFDAPLHYNFYAASTGGGYYDMRNILNNTLVASNPTKAVTLVENHDTQPGQSLESTVQPWFKPLAYAFILTRSGGYPSVFYGDMYGTKGTTTREIPALKSKIEPLLKARKDYAYGTQRDYIDNPDVIGWTREGDSTKAKSGLATVITDGPGGSKRMYVGTSNAGEIWYDLTGNRTDKITIGSDGYATFPVNGGSVSVWVQQ

SEQ ID NO: 35949 - protein, 480 aa, Cytophaga sp.
NGTMMQYFEWYVPNDGQQWNRLRTDAPYLSSVGITAVWTPPAYKGTSQADVGYGPYDLYDLGEFNQKGTVRTKYGTKGELKSAVNTLHSNGIQVYGDVVMNHKAGADYTENVTAVEVNPSNRNQETSGEYNIQAWTGFNFPGRGTTYSNFKWQWFHFDGTDWDQSRSLSRIFKFTGKAWDWEVSSENGNYDYLMYADIDYDHPDVVNEMKKWGVWYANEVGLDGYRLDAVKHIKFSELKDWVDNARAATGKEMFTVGEYWQNDLGALNNYLAKVNYNQSLFDAPLHYNFYAASTGGGYYDMRNILNNTLVASNPTKAVTLVENHDTQPGQSLESTVQPWFKPLAYAFILTRSGGYPSVFYGDMYGTKGTTTREIPALKSKIEPLLKARKDYAYGTQRDYIDNPDVIGWTREGDSTKAKSGLATVITDGPGGSKRMYVGTSNAGEIWYDLTGNRTDKITIGSDGYATFPVNGGSVSVWVQQ

SEQ ID NO: 35950 - protein, 480 aa, Cytophaga sp.
NGTMMQYFEWYVPNDGQQWNRLRTDAPYLSSVGITAVWTPPAYKGTSQADVGYGPYDLYDLGEFNQKGTVRTKYGTKGELKSAVNTLHSNGIQVYGDVVMNHKAGADYTENVTAVEVNPSNRNQETSGQYNIQAWTGFNFPGRGTTYSNFKWQWFHFDGTDWDQSRSLSRIFKFTGKAWDWEVSSENGNYDYLMYADIDYDHPDVVNEMKKWGVWYANEVGLDGYRLDAVKHIKFSFLKDWVDNARAATGKEMFTVGEYWQNDLGALNNYLAKVNYNQSLFDAPLHYNFYAASTGGGYYDMRNILNNTLVASNPTKAVTLVENHDTQPGQSLESTVQPWFKPLAYAFILTRSGGYPSVFYGDMYGTKGTTTREIPALKSKIEPLLKARKDYAYGTQRDYIDNPDVIGWTREGDSTKAKSGLATVITDGPGGSKRMYVGTSNAGEIWYDLTGNRTDKITIGSDGYATFPVNGGSVSVWVQQ

SEQ ID NO: 35951 - protein, 480 aa, Cytophaga sp.
NGTMMQYFEWYVPNDGQQWNRLRTDAPYLSSVGITAVWTPPAYKGTSQADVGYGPYDLYDLGEFNQKGTVRTKYGTKGELKSAVNTLHSNGIQVYGDVVMNHKAGADYTENVTAVEVNPSNRNQETSGEYNIQAWTGFNFPGRGTTYSNFKWQWFHFDGTDWDQSRSLSRIFKFTGKAWDWEVSSENGNYDYLMYADIDYDHPDVVNEMKKWGVWYANEVGLDGYRLDAVKHIKFSFLKDWVDNARAATGKEMFTVGEYWQNDLGALNNYLAKVNYNQSLFDAPLHYNFYAASTGGGYYDMRNILNNTLVASNPTKAVTLVENHDTQPGQSLESTVQPWFKPLAYAFILTRSGGYPSVFYGDMYGTKGTTTREIPALKSKIEPLLKARKDYAYGTQRDYIDNPDVIGWTREGDSTKAKSGLATVITDGPGGSKRMYVGTSNAGEIWYDLTGNITDKITIGSDGYATFPVNGGSVSVWVQQ

SEQ ID NO: 35952 - protein, 480 aa, Cytophaga sp.
NGTMMQYFEWYVPNDGQQWNRLRTDAPYLSSVGITAVWTPPAYKGTSQADVGYGPYDLYDLGEFNQKGTVRTKYGTKGELKSAVNTLHSNGIQVYGDVVMNHKAGADYTENVTAVEVNPSNRNQETSGEYNIQAWTGFNFPGRGTTYSNFKWQWFHFDGTDWDQSRSLSRIFKFTGKAWDWEVSSENGNYDYLMYADIDYDHPDVVNEMKKWGVWYANEVGLDGYRLDAVKHIKFSFLKDWVDNARAATGKEMFTVGEYWQNDLGALNNYLAKVNYNQSLFDAPLHYNFYAASTGGGYYDMRNILNNTLVASNPTKAVTLVENHDTQPGQSLESTVQPWFKPLAYAFILTRSGGYPSIFYGDMYGTKGTTTREIPALKSKIEPLLKARKDYAYGTQRDYIDNPDVIGWTREGDSTKAKSGLATVITDGPGGSKRMYVGTSNAGEIWYDLTGNRTDKITIGSDGYATFPVNGGSVSVWVQQ

SEQ ID NO: 35953 - protein, 480 aa, Cytophaga sp.
NGTMMQYFEWYVPNDGQQWNRLRTDAPYLSSVGITAVWTPPAYKGTSQADVGYGPYDLYDLGEFNQKGTVRTKYGTKGELKSAVNTLHSNGIQVYGDVVMNHKAGADYTENVTAVEVNPSNRNQKTSGEYNIQAWTGFNFPGRGTTYSNFKWQWFHFDGTDWDQSRSLSRIFKFTGKAWDWEVSSENGNYDYLMYADIDYDHPDVVNEMKKWGVWYANEVGLDGYRLDAVKHIKFSFLKDWVDNARAATGKEMFTVGEYWQNDLGALNNYLAKVNYNQSLFDAPLHYNFYAASTGGGYYDMRNILNNTLVASNPTKAVTLVENHDTQPGQSLESTVQPWFKPLAYAFILTRSGGYPSVFYGDMYGTKGTTTREIPALKSKIEPLLKARKDYAYGTQRDYIDNPDVIGWTREGDSTKAKSGLATVITDGPGGSKRMYVGTSNAGEIWYDLTGNRTDKITIGSDGYATFPVNGGSVSVWVQQ

SEQ ID NO: 35954 - protein, 480 aa, Cytophaga sp.
NGTMMQYFEWYVPNDGQQWNRLRTDAPYLSSVGITAVWTPPAYKGTSQADVGYGPYDLYDLGEFNQKGTVRTKYGTKGELKSAVNTLHSNGIQVYGDVVMNHKAGADYTENVTAVEVNPSNRNQEHSGEYNIQAWTGFNFPGRGTTYSNFKWQWFHFDGTDWDQSRSLSRIFKFTGKAWDWEVSSENGNYDYLMYADIDYDHPDVVNEMKKWGVWYANEVGLDGYRLDAVKHIKFSFLKDWVDNARAATGKEMFTVGEYWQNDLGALNNYLAKVNYNQSLFDAPLHYNFYAASTGGGYYDMRNILNNTLVASNPTKAVTLVENHDTQPGQSLESTVQPWFKPLAYAFILTRSGGYPSVFYGDMYGTKGTTTREIPALKSKIEPLLKARKDYAYGTQRDYIDNPDVIGWTREGDSTKAKSGLATVITDGPGGSKRMYVGTSNAGEIWYDLTGNRTDKITIGSDGYATFPVNGGSVSVWVQQ

SEQ ID NO: 35955 - protein, 480 aa, Cytophaga sp.
NGTMMQYFEWYVPNDGQQWNRLRTDAPYLSSVGITAVWTPPAYKGTSQADVGYGPYDLYDLGEFNQKGTVRTKYGTKGELKSAVNTLHMNGIQVYGDVVMNHKAGADYTENVTAVEVNPSNRNQETSGEYNIQAWTGFNFPGRGTTYSNFKWQWFHFDGTDWDQSRSLSRIFKFTGKAWDWEVSSENGNYDYLMYADIDYDHPDVVNEMKKWGVWYANEVGLDGYRLDAVKHIKFSFLKDWVDNARAATGKEMFTVGEYWQNDLGALNNYLAKVNYNQSLFDAPLHYNFYAASTGGGYYDMRNILNNTLVASNPTKAVTLVENHDTQPGQSLESTVQPWFKPLAYAFILTRSGGYPSVFYGDMYGTKGTTTREIPALKSKIEPLLKARKDYAYGTQRDYIDNPDVIGWTREGDSTKAKSGLATVITDGPGGSKRMYVGTSNAGEIWYDLTGNRTDKITIGSDGYATFPVNGGSVSVWVQQ

SEQ ID NO: 35956 - protein, 480 aa, Cytophaga sp.
NGTMMQYFEWYVPNDGQQWNRLRTDAPYLSSVGITAVWTPPAYKGTSQADVGYGPYDLYDLGEFNQKGTVRTKYGTKGELKSAVNTLHSNGIQVYGDVVMNHKAGADYTENVTAVEVNPSNRNQETSGEYNIQAWTGFNFPGRGTTYSNFKWQWFHFDGTDWDQSRSLSRIFKFTGKAWDWEVSSENGNYDYLMYADIDYDHPDVVNEMKKWGVWYANEVGLDGYRLDAVKHIKFSFLKDWVDNARAATGKEMFTVGEYWQNDLGALNNYLAKVNYNQSLFDAPLHYNFYAASTGGGYYDMRNILNNTLVASNPTKAVTLVENHDTQPGQSLESTVQPWFKPLAYAFILTRSGGYPSVFYGDMYGTKGTTTREIPALKSKIEPLLKARKDYAYGTQRDYIDNPDVIGWTREGDSTKAKSGLATVITDGPGGSKRMYVGTSNAGEIWYDLTGNDTDKITIGSDGYATFPVNGGSVSVWVQQ

SEQ ID NO: 35957 - protein, 480 aa, Cytophaga sp.
NGTMMQYFEWYVPNDGQQWNRLRTDAPYLSSVGITAVWTPPAYKGTSQADVGYGPYDLYDLGEFNQKGTVRTKYGTKGELKSAVNTLHSNGIQVYGDVVMNHKAGADYTENVTAVEVNPSNRNQETSGEYNIQAWTGFNFPGRGTTYSNFKWQWFHFDGTDWDQSRSLSRIFKFTGKAWDWEVSSENGNYDYLMYADIDYDHPDVVNEMKKWGVWYANEVGLDGYRLDAVKHIKFSFLKDWVDNARAATGKEMFTVGEYWQNDLGALNNYLAKVNYNQSLFDAPLHYNFYAASTGGGYYDMRNILNNTLVASNPTHAVTLVENHDTQPGQSLESTVQPWFKPLAYAFILTRSGGYPSVFYGDMYGTKGTTTREIPALKSKIEPLLKARKDYAYGTQRDYIDNPDVIGWTREGDSTKAKSGLATVITDGPGGSKRMYVGTSNAGEIWYDLTGNRTDKITIGSDGYATFPVNGGSVSVWVQQ

SEQ ID NO: 35958 - protein, 480 aa, Cytophaga sp.
NGTMMQYFEWYVPNDGQQWNRLRTDAPYLSSVGITAVWTPPAYKGTSQADVGYGPYDLYDLGEFNQKGTVRTKYGTKGELKSAVNTLHSNGIQVYGDVVMNHKAGADYTENVTAVEVNPSNRNQETSGEYNIQAWTGFNFPGRGTTYSNFKWQWFHFDGTDWDQSRSLSRIFKFTGKAWDWEVSSENGNYDYLMYADIDYDHPDVVNEMKKWGVWYANEVGLDGYRLDAVKHIKFSFLKDWVDNARAATGKEMFTVGEYWQNDLGALNNYLAKVNYNQSLFDAPLHYNFYAASTGGGYYDMRNILNNTLVASNPTKAVTLVENHDTQPGQSLESTVQPWFKPLAYAFILTRSGGYPSVFYGDMYGTKGTTTREIPALKSKIEPLLKARKDYAYGTQRDYIDNPDVIGWTREGDSTKAKSGLATVITDGPGGSKRMYVGTSNAGEIWYDLTDNRTDKITIGSDGYATFPVNGGSVSVWVQQ

SEQ ID NO: 35959 - protein, 480 aa, Cytophaga sp.
NGTMMQYFEWYVPNDGQQWNRLRTDAPYLSSVGITAVWTPPAYKGTSQADVGYGPYDLYDLGEFNQKGTVRTKYGTKGELKSAVNTLHSNGIQVYGDVVMNHKAGADYTENVTAVEVNPSNRNQETSGEYNIQAWTGFNFPGRGTTYSNFKWQWFHFDGTDWDQSRSLSRIFKFTGKAWDWPVSSENGNYDYLMYADYDYDHPDVVNEMKKWGVWYANEVGLDGYRLDAVKHIKFSFLKDWVDNARAATGKEMFTVGEYWQNDLGALNNYLAKVNYNQSLFDAPLHYNFYAASTGGGYYDMRNILNNTLVASNPTKAVTLVENHDTQPGQSLESTVQPWFKPLAYAFILTRSGGYPSVFYGDMYGTKGTTTREIPALKSKIEPLLKARKDYAYGTQRDYIDNPDVIGWTREGDSTKAKSGLATVITDGPGGSKRMYVGTSNAGEIWYDLTGNRTDKITIGSDGYATFPVNKGSVSVWVQQ

SEQ ID NO: 35960 - protein, 480 aa, Cytophaga sp.
NGTMMQYFEWYVPNDGQQWNRLRTDAPYLSSVGITAVWTPPAYKGTSQADVGYGPYDLYDLGEFNQKGTVRTKYGTKGELKSAVNTLHSNGIQVYGDVVMNHKAGADYTENVTAVEVNPSNRNQETSGEYNIQAWTGFNFPGRGTTYSNFKWQWFHFDGTDWDQSRSLSRIFKFTGKAWDWEVSSENGNYDYLMYADIDYDHPDVVNEMKKWGVWYANEVGLDGYRLDAVKHIKFSFLKDWVDNARAATGKEMFTVGEYWQNDLPALNNYLAKVNYNQSLFDAPLHYNFYAASTGGGYYDMRNILNNTLVASNPTKAVTLVENHDTQPGQSLESTVQPWFKPLAYAFILTRSGGYPSVFYGDMYGTKGTTTREIPALKSKIEPLLKARKDYAYGTQRDYIDNPDVIGWTREGDSTKAKSGLATVITDGPGGSKRMYVGTSNAGEIWYDLTGNRTDKITIGSDGYATFPVNGGSVSVWVQQ

SEQ ID NO: 35961 - protein, 480 aa, Cytophaga sp.
NGTMMQYFEWYVPNDGQQWNRLRTDAPYLSSVGITAVWTPPAYKGTSQADVGYGPYDLYDLGEFNQKGTVRTKYGTKGELKSAVNTLHSNGIQVYGDVVMNHKAGADYIENVTAVEVNPSNRNQETSGEYNIQAWTGFNFPGRGTTYSNFKWQWFHFDGTDWDQSRSLSRIFKFTGKAWDWEVSSENGNYDYLMYADIDYDHPDVVNEMKKWGVWYANEVGLDGYRLDAVKHIKFSFLKDWVDNARAATGKEMFTVGEYWQNDLGALNNYLAKVNYNQSLFDAPLHYNFYAASTGGGYYDMRNILNNTLVASNPTKAVTLVENHDTQPGQSLESTVQPWFKPLAYAFILTRSGGYPSVFYGDMYGTKGTTTREIPALKSKIEPLLKARKDYAYGTQRDYIDNPDVIGWTREGDSTKAKSGLATVITDGPGGSKRMYVGTSNAGEIWYDLTGNRTDKITIGSDGYATFPVNGGSVSVWVQQ

SEQ ID NO: 35962 - protein, 480 aa, Cytophaga sp.
NGTMMQYFEWYVPNDGQQWNRLRTDAPYLSSVGITAVWTPPAYKGTSQADVGYGPYDLYDLGEFNQKGTVRTKYGTKGELKSAVNTLHSNGIQVYGDVVMNHKAGADYTENVTAVEVNPSNRNQETSGEYNIQAWTGFNFPGRGTTYSNFKWQWFHFDGTDWDQSRSLSRIFKFTGKAWDWEVSSENGNYDYLMYADIDYDHPDVVNEMKKWGVWYANEVGLDGYRLDAVKHIKFSFLKDWVDNARAATGKEMFTVGEYWQNDLGALNNYLAKVNYNQSLFDAPLHYNFYAASTGGGYYDMRNILNNTLVASNPTKAVTLVENHDTQPGQSLESTVQPWFKPLAYAFILTRSGGYPSVFYGDMYGTKGTTTREIPALKSKIEPLLKARKDYAYGTQRDYIDNPDVIGWTREGDSTKIKSGLATVITDGPGGSKRMYVGTSNAGEIWYDLTGNRTDKITIGSDGYATFPVNGGSVSVWVQQ

SEQ ID NO: 35963 - protein, 480 aa, Cytophaga sp.
NGTMMQYFEWYVPNDGQQWNRLRTDAPYLSSVGITAVWTPPAYKGTSQADVGYGPYDLYDLGEFNQKGTVRTKYGTKGELKSAVNTLHSNGIQVYGDVVMNHKAGADYTENVTAVEVNPSNRNQETSGEYNIQAWTGFNFPGRGTTYSNFKWQWFHFDGTDWDQSRSLSRIFKFTGKAWDWEVSSENGNYDYLMYADIDYDHPDVVNEMKKWGVWYANEVGLDGYRLDAVKHIKFSFLKDWVDNARAATGKEMFTVGEYWQNDLGALNNYLAKVNYNQSLFDAPLHYNFYAASTGGGYYDMRNILNNTLVASNPTKAVTLVENHDTQPGQSLESTVQPWFKPLAYAFILTRSGGYPSVFYGDMYGTKGTTTREIPALKSKIEPLLKARKDYAYGTQRDYIDNPDVIGWTRNGDSTKAKSGLATVITDGPGGSKRMYVGTSNAGEIWYDLTGNRTDKITIGSDGYATFPVNGGSVSVWVQQ

SEQ ID NO: 35964 - protein, 480 aa, Cytophaga sp.
NGTMMQYFEWYVPNDGQQWNRLRTDAPYLSSVGITAVWTPPAYKGTSQADVGYGPYDLYDLGEFNQKGTVRTKYGTKGELKSAVNTLHSNGIQVYGDVVMNHKAGADYTENVTAVEVNPSNRNQETSGEYNIQAWTGFNFPGRGTTYSNFKWQWFHFDGTDWDQSRSLSRIFKFTGKAWDWEVSSENGNYDYLMYADIDYDHPDVVNEMKKWGVWYANEVGLDGYRLDAVKHIKFSFLKDWVDNARAATGKEMFTVGEYWANDLGALNNYLAKVNYNQSLFDAPLHYNFYAASTGGGYYDMRNILNNTLVASNPTKAVTLVENHDTQPGQSLESTVQPWFKPLAYAFILTRSGGYPSVFYGDMYGTKGTTTREIPALKSKIEPLLKARKDYAYGTQRDYIDNPDVIGWTREGDSTKAKSGLATVITDGPGGSKRMYVGTSNAGEIWYDLTGNRTDKITIGSDGYATFPVNGGSVSVWVQQ

SEQ ID NO: 35965 - protein, 480 aa, Cytophaga sp.
NGTMMQYFEWYVPNDGQQWNRLRTDAPYLRSVGITAVWTPPAYKGTSQADVGYGPYDLYDLGEFNQKGTVRTKYGTKGELKSAVNTLHSNGIQVYGDVVMNHKAGADYTENVTAVEVNPSNRNQETSGEYNIQAWTGFNFPGRGTTYSNFKWQWFHFDGTDWDQSRSLSRIFKFTGKAWDWEVSSENGNYDYLMYADIDYDHPDVVNEMKKWGVWYANEVGLDGYRLDAVKHIKFSFLKDWVDNARAATGKEMFTVGEYWQNDLGALNNYLAKVNYNQSLFDAPLHYNFYAASTGGGYYDMRNILNNTLVASNPTKAVTLVENHDTQPGQSLESTVQPWFKPLAYAFILTRSGGYPSVFYGDMYGTKGTTTREIPALKSKIEPLLKARKDYAYGTQRDYIDNPDVIGWTREGDSTKAKSGLATVITDGPGGSKRMYVGTSNAGEIWYDLTGNRTDKITIGSDGYATFPVNGGSVSVWVQQ

SEQ ID NO: 35966 - protein, 480 aa, Cytophaga sp.
NGTMMQYFEWYVPNDGQQWNRLRTDAPYLSSVGITAVWTPPAYKGTSQADVGYGPYDLYDLGEFNQKGTVRTKYGTKGELKSAVNTLHSNGIQVYGDVVMNHKAGADYTENVTAVEVNPSNRNVETSGEYNIQAWTGFNFPGRGTTYSNFKWQWFHFDGTDWDQSRSLSRIFKFTGKAWDWEVSSENGNYDYLMYADIDYDHPDVVNEMKKWGVWYANEVGLDGYRLDAVKHIKFSFLKDWVDNARAATGKEMFTVGEYWQNDLGALNNYLAKVNYNQSLFDAPLHYNFYAASTGGGYYDMRNILNNTLVASNPTKAVTLVENHDTQPGQSLESTVQPWFKPLAYAFILTRSGGYPSVFYGDMYGTKGTTTREIPALKSKIEPLLKARKDYAYGTQRDYIDNPDVIGWTREGDSTKAKSGLATVITDGPGGSKRMYVGTSNAGEIWYDLTGNRTDKITIGSDGYATFPVNGGSVSVWVQQ

SEQ ID NO: 35967 - protein, 480 aa, Cytophaga sp.
NGTMMQYFEWYVPNDGQQWNRLRTDAPYLSSVGITAVWTPPAYKGTSQADVGYGPYDLYDLGEFNQKGTVRTKYGTKGELKSAVNTLHSNGIQVYGDVVMNHKAGADYTENVTAVEVNPSNRNQETSGEYNIQAWTGFNFRGRGTTYSNFKWQWFHFDGTDWDQSRSLSRIFKFTGKAWDWEVSSENGNYDYLMYADIDYDHPDVVNEMKKWGVWYANEVGLDGYRLDAVKHIKFSFLKDWVDNARAATGKEMFTVGEYWQNDLGALNNYLAKVNYNQSLFDAPLHYNFYAASTGGGYYDMRNILNNTLVASNPTKAVTLVENHDTQPGQSLESTVQPWFKPLAYAFILTRSGGYPSVFYGDMYGTKGTTTREIPALKSKIEPLLKARKDYAYGTQRDYIDNPDVIGWTREGDSTKAKSGLATVITDGPGGSKRMYVGTSNAGEIWYDLTGNRTDKITIGSDGYATFPVNGGSVSVWVQQ

SEQ ID NO: 35968 - protein, 480 aa, Cytophaga sp.
NGTMMQYFEWYVPNDGQQWNRLRTDAPYLSSVGITAVWTPPAYKGTSQADVGYGPYDLYDLGEFNQKGTVRTKYGTKGELKSAVNTLHSNGIQVYGDVVMNHKAGADYTENVTAVEVNPSNRNQETSGEYNIQAWTGFNFPGRGTTYSNFKWQWFHFDGTDWDQSRSLSRIFKFTGKAWDWEVSSENGNYDYLMYADIDYDHPDVVNEMKKWGVWYANEVGLDGYRLDAVKHIKFSFLKDWVDNARAATGKEMFTVGEYWQNDLGALNNYLAKVNYNQSLFDAPLHYNFYAASTGGGYYDMRNILNNTLVASNPTKAVTLVENHDTQPGQSLESTVQPWFKPLAYAFILTRSGGYPSVFYGDMYGTKGTTTREIPALKSKIEPLLKARKDYAYGTQRDYIDNPDVIGWTREGDSTKAKSGLATVITDGPGGSKRMYVGTSNAGEIWIDLTGNRTDKITIGSDGYATFPVNGGSVSVWVQQ

SEQ ID NO: 35969 - protein, 480 aa, Cytophaga sp.
NGTMMQYFEWYVPNDGQQWNRLRTDAPYLSSVGITAVWTPPAYKGTSQADVGYGPYDLYDLGEFNQKGTVRTKYGTKGELKSAVNTLHSNGIQVYGDVVMNHKAGADYTENVTAVEVNPSNRNQETSGEYNIQAWTGFNFPGRGTTYSNFKWQWFHFDGTDWDQSRSLSRIFKFTGKAWDWEVSSENGNYDYLMYADIDYDHPDVVNEMKKWGVWYANEVGLDGYRLDAVKHIKFSFLKDWVDNARAATGKEMFTVGEYWQNDLGALNNYLAKVNYNQSLFDAPLHYNFYAASTGGGYYDMRNILNNTLVASNPTKAVTLVENHDTQPGQSLESTVQPWFKPLAYAFILTRSGGYPSVFYGDMYGTMGTTTREIPALKSKIEPLLKARKDYAYGTQRDYIDNPDVIGWTREGDSTKAKSGLATVITDGPGGSKRMYVGTSNAGEIWYDLTGNRTDKITIGSDGYATFPVNGGSVSVWVQQ

SEQ ID NO: 35970 - protein, 480 aa, Cytophaga sp.
NGTMMQYFEWYVPNDGQQWNRLRTDAPYLSSVGITAVWTPPAYKGTSQADVGYGPYDLYDLGEFNQKGTVRTKYGTKGELKSAVNTLHSNGIQVYGDVVMNHKAGADYTENVTAVEVNPSNRNQETSGEYNIQAWTGFNFPGRGTTYSNFKWQWFHFDGTDWDQSMSLSRIFKFTGKAWDWEVSSENGNYDYLMYADIDYDHPDVVNEMKKWGVWYANEVGLDGYRLDAVKHIKFSFLKDWVDNARAATGKEMFTVGEYWQNDLGALNNYLAKVNYNQSLFDAPLHYNFYAASTGGGYYDMRNILNNTLVASNPTKAVTLVENHDTQPGQSLESTVQPWFKPLAYAFILTRSGGYPSVFYGDMYGTKGTTTREIPALKSKIEPLLKARKDYAYGTQRDYIDNPDVIGWTREGDSTKAKSGLATVITDGPGGSKRMYVGTSNAGEIWYDLTGNRTDKITIGSDGYATFPVNGGSVSVWVQQ

SEQ ID NO: 35971 - protein, 480 aa, Cytophaga sp.
NGTMMQYFEWYVPNDGQQWNRLRTDAPYLSSVGITAVWTPPAYKGTSQADVGYGPYDLYDLGEFNQKGTVRTKYGTKGELKSAVNTLHSNGIQVYGDVVMNHKAGADYTENVTAVEVNPSNRNQETSGEYNIQAWTGFNFQGRGTTYSNFKWQWFHFDGTDWDQSRSLSRIFKFTGKAWDWEVSSENGNYDYLMYADIDYDHPDVVNEMKKWGVWYANEVGLDGYRLDAVKHIKFSFLKDWVDNARAATGKEMFTVGEYWQNDLGALNNYLAKVNYNQSLFDAPLHYNFYAASTGGGYYDMRNILNNTLVASNPTKAVTLVENHDTQPGQSLESTVQPWFKPLAYAFILTRSGGYPSVFYGDMYGTKGTTTREIPALKSKIEPLLKARKDYAYGTQRDYIDNPDVIGWTREGDSTKAKSGLATVITDGPGGSKRMYVGTSNAGEIWYDLTGNRTDKITIGSDGYATFPVNGGSVSVWVQQ

SEQ ID NO: 35972 - protein, 480 aa, Cytophaga sp.
NGTMMQYFEWYVPNDGQQWNRLRTDAPYLSSVGITAVWTPPAYKGTSQADVGYGPYDLYDLGEFNQKGTVRTKYGTKGELKSAVNTLHSNGIQVYGDVVMNHKAGADYTENVTAVEVNPSNRNQETSGEYNIQAWTGFNFPGRGTTYSNFKWQWFHFDGTDWDQSRSLSRIFKFTGKAWDWEVSSENGNYDYLMYADIDYDHPDVVNEMKKWGVWYANEVGLDGYRLDAVKHIKFSFLKDWVDNARAATGKEMFTVGEYWQNDLGALNNYLAKVNYNQSLFDAPLHYNFYAASTGGGYYDMRNILNNTLVASNPTKAVTLVENHDTQPGQSLESTVQPWFKPLAYAFILTRSGGYPSVFYGDMYGTKGTTTREIPALKSKIEPLLKARKDYAYGTQRDYIDNPDVIGWTREGDSTKAKAGLATVITDGPGGSKRMYVGTSNAGEIWYDLTGNRTDKITIGSDGYATFPVNGGSVSVWVQQ

SEQ ID NO: 35973 - protein, 480 aa, Cytophaga sp.
NGTMMQYFEWYVPNDGQQWNRLRTDAPYLSSVGITAVWTPPAYKGTSQADVGYGPYDLYDLGEFNQKGTVRTKYGTKGELKSAVNTLHSNGIQVYGDVVMNHKAGADYTENVTAVEVNPSNRNQETSGEYNIQAWTGFNFPGRGTTYSNFKWQWFHFDGTDWDQSRSLSRIFKFTGKAWDWEVSSENGNYDYLMYADIDYIHPDVVNEMKKWGVWYANEVGLDGYRLDAVKHIKFSFLKDWVDNARAATGKEMFTVGEYWQNDLGALNNYLAKVNYNQSLFDAPLHYNFYAASTGGGYYDMRNILNNTLVASNPTKAVTLVENHDTQPGQSLESTVQPWFKPLAYAFILTRSGGYPSVFYGDMYGTKGTTTREIPALKSKIEPLLKARKDYAYGTQRDYIDNPDVIGWTREGDSTKAKSGLATVITDGPGGSKRMYVGTSNAGEIWYDLTGNRTDKITIGSDGYATFPVNGGSVSVWVQQ

SEQ ID NO: 35974 - protein, 480 aa, Cytophaga sp.
NGTMMQYFEWYVPNDGQQWNRLRTDAPYLSSVGITAVWTPPAYKGTSQADVGYGPYDLYDLGEFNQKGTVRTKYGTKGELKSAVNTLHSNGIQVYGDVVMNHKAGADYTENVTAVEVNPSNRNQETSGEYNIQAWTGFNFPGRGTTYSNFKWQWFHFDGTDWDQSRSLSRIDKFTGKAWDWEVSSENGNYDYLMYADIDYDHPDVVNEMKKWGVWYANEVGLDGYRLDAVKHIKFSFLKDWVDNARAATGKEMFTVGEYWQNDLGALNNYLAKVNYNQSLFDAPLHYNFYAASTGGGYYDMRNILNNTLVASNPTKAVTLVENHDTQPGQSLESTVQPWFKPLAYAFILTRSGGYPSVFYGDMYGTKGTTTREIPALKSKIEPLLKARKDYAYGTQRDYIDNPDVIGWTREGDSTKAKSGLATVITDGPGGSKRMYVGTSNAGEIWYDLTGNRTDKITIGSDGYATFPVNGGSVSVWVQQ

SEQ ID NO: 35975 - protein, 480 aa, Cytophaga sp.
NGTMMQYFEWYVPNDGQQWNRLRTDAPYLSSVGITAVWTPPAYKGTSQADVGYGPYDLYDLGEFNQKGTVRTKYGTKGELKSAVNTLHSNGIQVYGDVVMNHKAGADYTENVTAVEVNPSNRNQETSGEYNIQAWTGFNFPGRGTTYSNFKWQWFHFDGTDWAQSRSLSRIFKFTGKAWDWEVSSENGNYDYLMYADIDYDHPDVVNEMKKWGVWYANEVGLDGYRLDAVKHIKFSFLKDWVDNARAATGKEMFTVGEYWQNDLGALNNYLAKVNYNQSLFDAPLHYNFYAASTGGGYYDMRNILNNTLVASNPTKAVTLVENHDTQPGQSLESTVQPWFKPLAYAFILTRSGGYPSVFYGDMYGTKGTTTREIPALKSKIEPLLKARKDYAYGTQRDYIDNPDVIGWTREGDSTKAKSGLATVITDGPGGSKRMYVGTSNAGEIWYDLTGNRTDKITIGSDGYATFPVNGGSVSVWVQQ

SEQ ID NO: 35976 - protein, 480 aa, Cytophaga sp.
NGTMMQYFEWYVPNDGQQWNRLRTDAPYLSSVGITAVWTPPAYKGTSQADVGYGPYDLYDLGEFNQKGTVRTKYGTKGELKSAVNTLHSNGIQVYGDVVMNHKAGADYTENVTAVEVNPSNRNQETSGEYNHQAWTGFNFPGRGTTYSNFKWQWFHFDGTDWDQSRSLSRIFKFTGKAWDWEVSSENGNYDYLMYADIDYDHPDVVNEMKKWGVWYANEVGLDGYRLDAVKHIKFSFLKDWVDNARAATGKEMFTVGEYWQNDLGALNNYLAKVNYNQSLFDAPLHYNFYAASTGGGYYDMRNILNNTLVASNPTKAVTLVENHDTQPGQSLESTVQPWFKPLAYAFILTRSGGYPSVFYGDMYGTKGTTTREIPALKSKIEPLLKARKDYAYGTQRDYIDNPDVIGWTREGDSTKAKSGLATVITDGPGGSKRMYVGTSNAGEIWYDLTGNRTDKITIGSDGYATFPVNGGSVSVWVQQ

SEQ ID NO: 35977 - protein, 480 aa, Cytophaga sp.
NGTMMQYFEWYVPNDGQQWNRLRTDAPYLSSVGITAVWTPPAYKGTSQADVGYGPYDLYDLGEFNQKGTVRTKYGTKGELKSAVNTLHSNGIQVYGDVVMNHKAGADYTENVTAVEVNPSNRNQETSGEYNIQAWTGFNFPGRGTTYSNFKWQWFHFDGTDWDQSRSLSRIFKFTGKAWDWEVSSENGNYDYLMYADIDYDHPDVVNEMKKWGVWYANEVGLDGYRLDAVKHIKFSFLKDWVDNARAATGKEMFTVGEYWQNDLGALNNYLAKVNYNQSLFDAPLHYNFYAASTGGGYYDMRNILNNTLVASNPTKAVTLVENHDTQPGQSLESTVQPWFKPLAYAFILTRSGGYPSVFYGDMYGTKGTTTREIPALKSKIEPLLKARKDYAYGTQRDYIDNPDRIGWTREGDSTKAKSGLATVITDGPGGSKRMYVGTSNAGEIWYDLTGNRTDKITIGSDGYATFPVNGGSVSVWVQQ

SEQ ID NO: 35978 - protein, 480 aa, Cytophaga sp.
NGTMMQYFEWYVPNDGQQWNRLRTDAPYLSSVGITAVWTPPAYKGTSQADVGYGPYDLYDLGEFNQKGTVRTKYGTKGELKSAVNTLHSNGIQVYGDVVMNHKAGADYTENVTAVEVNPSNRNQETSGEYNIQAWTGFNFPGRGTTYSNFKWQWFHFDGTDWDQSRSLSRIFKFTGKAWDWEVSSENGNYDYLMYADIDYDHPDVINEMKKWGVWYANEVGLDGYRLDAVKHIKFSFLKDWVDNARAATGKEMFTVGEYWQNDLGALNNYLAKVNYNQSLFDAPLHYNFYAASTGGGYYDMRNILNNTLVASNPTKAVTLVENHDTQPGQSLESTVQPWFKPLAYAFILTRSGGYPSVFYGDMYGTKGTTTREIPALKSKIEPLLKARKDYAYGTQRDYIDNPDVIGWTREGDSTKAKSGLATVITDGPGGSKRMYVGTSNAGEIWYDLTGNRTDKITIGSDGYATFPVNGGSVSVWVQQ

SEQ ID NO: 35979 - protein, 480 aa, Cytophaga sp.
NGTMMQYFEWYVPNDGQQWNRLRTEAPYLSSVGITAVWTPPAYKGTSQADVGYGPYDLYDLGEFNQKGTVRTKYGTKGELKSAVNTLHSNGIQVYGDVVMNHKAGADYTENVTAVEVNPSNRNQETSGEYNIQAWTGFNFPGRGTTYSNFKWQWFHFDGTDWDQSRSLSRIFKFTGKAWDWEVSSENGNYDYLMYADIDYDHPDVVNEMKKWGVWYANEVGLDGYRLDAVKHIKFSFLKDWVDNARAATGKEMFTVGEYWQNDLGALNNYLAKVNYNQSLFDAPLHYNFYAASTGGGYYDMRNILNNTLVASNPTKAVTLVENHDTQPGQSLESTVQPWFKPLAYAFILTRSGGYPSVFYGDMYGTKGTTTREIPALKSKIEPLLKARKDYAYGTQRDYIDNPDVIGWTREGDSTKAKSGLATVITDGPGGSKRMYVGTSNAGEIWYDLTGNRTDKITIGSDGYATFPVNGGSVSVWVQQ

SEQ ID NO: 35980 - protein, 480 aa, Cytophaga sp.
NGTMMQYFEWYVPNDGQQWNRLRTDAPYLSSVGITAVWTPPAYKGTSQADVGYGPYDLYDLGEFNQKGTVRTKYGTKGELKSAVNTLHSNGIQVYGDVVMNHKAGADYTENVCAVEVNPSNRNQETSGEYNIQAWTGFNFPGRGTTYSNFKWQWFHFDGTDWDQSRSLSRIFKFTGKAWDWEVSSENGNYDYLMYADIDYDHPDVVNEMKKWGVWYANEVGLDGYRLDAVKHIKFSFLKDWVDNARAATGKEMFTVGEYWQNDLGALNNYLAKVNYNQSLFDAPLHYNFYAASTGGGYYDMRNILNNTLVASNPTKAVTLVENHDTQPGQSLESTVQPWFKPLAYAFILTRSGGYPSVFYGDMYGTKGTTTREIPALKSKIEPLLKARKDYAYGTQRDYIDNPDVIGWTREGDSTKAKSGLATVITDGPGGSKRMYVGTSNAGEIWYDLTGNRTDKITIGSDGYATFPVNGGSVSVWVQQ

SEQ ID NO: 35981 - protein, 480 aa, Cytophaga sp.
NGTMMQYFEWYVPNDGQQWNRLRTDAPYLSSVGITAVWTPPAYKGTSQADVGYGPYDLYDLGEFNQKGTVRTKYGTKGELKSAVNTLHSNGIQVYGDVVMNHKAGADYTENVTAVEVNPSNRNQETSGEYNIQAWTGFNFPGRGTTYSNFKWQWFHFDGTDWDQSRSLSRIFKFTGKAWDWEVSSENGNYDYLMYADIDYDHPDVVNEMKKWGVWYANEVGLDGYRLDAVKHIKFSFLKDWVDNARAATGKEMFTVGEYWQNDLGALNNYLAKVNYNQSLFDAPLHYNFYAASTGGGYYDMRNILNNTLVASNPTKAVTLVENHDTQPGQSLESTVQPWFKPLAYAFILTRSGGYPSVFYGDMYGTKGTTTREIPALKSKIEPLLKARKDYAYGTQRDYIDNPDVIGWTREGDSTKAKSGLATVITDGPGGSKRMYVGTSNAGEIWYDLTGNRTDKITIPSDGYATFPVNGGSVSVWVQQ

SEQ ID NO: 35982 - protein, 480 aa, Cytophaga sp.
NGTMMQYFEWYVPNDGQQWNRLRTDAPYLSSVGITAVWTPPAYKGTSQADVGYGPYDLYDLGEFNQKGTVRTKYGTKGELKSAVNTLHSNGIQVYGDVVMNHKAGADYTENVTAQEVNPSNRNQETSGEYNIQAWTGFNFPGRGTTYSNFKWQWFHFDGTDWDQSRSLSRIFKFTGKAWDWEVSSENGNYDYLMYADIDYDHPDVVNEMKKWGVWYANEVGLDGYRLDAVKHIKFSFLKDWVDNARAATGKEMFTVGEYWQNDLGALNNYLAKVNYNQSLFDAPLHYNFYAASTGGGYYDMRNILNNTLVASNPTKAVTLVENHDTQPGQSLESTVQPWFKPLAYAFILTRSGGYPSVFYGDMYGTKGTTTREIPALKSKIEPLLKARKDYAYGTQRDYIDNPDVIGWTREGDSTKAKSGLATVITDGPGGSKRMYVGTSNAGEIWYDLTGNRTDKITIGSDGYATFPVNGGSVSVWVQQ

SEQ ID NO: 35983 - protein, 480 aa, Cytophaga sp.
NGTMMQYFEWYVPNDGQQWNRLRTDAPYLSSVGITAVWTPPAYKGTSQADVGYGPYDLYDLGEFNQKGTVRTKYGTKGELKSAVNTLHSNGIQVYGDVVMNHKAGADYTENVTAVEVNPSNRNQETSGEYNIQAWTGFNFPGRVTTYSNFKWQWFHFDGTDWDQSRSLSRIFKFTGKAWDWEVSSENGNYDYLMYADIDYDHPDVVNEMKKWGVWYANEVGLDGYRLDAVKHIKFSFLKDWVDNARAATGKEMFTVGEYWQNDLGALNNYLAKVNYNQSLFDAPLHYNFYAASTGGGYYDMRNILNNTLVASNPTKAVTLVENHDTQPGQSLESTVQPWFKPLAYAFILTRSGGYPSVFYGDMYGTKGTTTREIPALKSKIEPLLKARKDYAYGTQRDYIDNPDVIGWTREGDSTKAKSGLATVITDGPGGSKRMYVGTSNAGEIWYDLTGNRTDKITIGSDGYATFPVNGGSVSVWVQQ

SEQ ID NO: 35984 - protein, 480 aa, Cytophaga sp.
NGTMMQYFEWYVPNDGQQWNRLRTDAPYLSSVGITAVWTPPAYKGTSQADVGYGPYDLYDLGEFNQKGTVRTKYGTKGELKSAVNTLHSNGIQVYGDVVMNHKAGADYTENVTAVEVNPSNRNQETSGEYNIQAWTGFNFPGRGTTYSNFKWQWFHFDGTDWDQSRSLSRIFKFTGKAWDWEVSSENGNYDYLMYADIDYDHPDVVNEMKKWGVWYANEVGLDGYRLDAVKHIKFSFLKDWVDNARAATGKEMFTVGEYWQNDLGALNNYLAKVNYNQWLFDAPLHYNFYAASTGGGYYDMRNILNNTLVASNPTKAVTLVENHDTQPGQSLESTVQPWFKPLAYAFILTRSGGYPSVFYGDMYGTKGTTTREIPALKSKIEPLLKARKDYAYGTQRDYIDNPDVIGWTREGDSTKAKSGLATVITDGPGGSKRMYVGTSNAGEIWYDLTGNRTDKITIGSDGYATFPVNGGSVSVWVQQ

SEQ ID NO: 35985 - protein, 480 aa, Cytophaga sp.
NGTMMQYFEWYVPNDGQQWNRLRTDAPYLSSVGITAVWTPPAYKGTSQADVGYGPYDLYDLGEFNQKGTVRTKYGTKGELKSAVNTLHLNGIQVYGDVVMNHKAGADYTENVTAVEVNPSNRNQETSGEYNIQAWTGFNFPGRGTTYSNFKWQWFHFDGTDWDQSRSLSRIFKFTGKAWDWEVSSENGNYDYLMYADIDYDHPDVVNEMKKWGVWYANEVGLDGYRLDAVKHIKFSFLKDWVDNARAATGKEMFTVGEYWQNDLGALNNYLAKVNYNQSLFDAPLHYNFYAASTGGGYYDMRNILNNTLVASNPTKAVTLVENHDTQPGQSLESTVQPWFKPLAYAFILTRSGGYPSVFYGDMYGTKGTTTREIPALKSKIEPLLKARKDYAYGTQRDYIDNPDVIGWTREGDSTKAKSGLATVITDGPGGSKRMYVGTSNAGEIWYDLTGNRTDKITIGSDGYATFPVNGGSVSVWVQQ

SEQ ID NO: 35986 - protein, 480 aa, Cytophaga sp.
NGTMMQYFEWYVPNDGQQWNRLRTDAPYLSSVGITAVWTPPAYKGTSQADVGYGPYDLYDLGEFNQKGTVRTKYGTKGELKSAVNTLHSNGIQVYGDVVMNHKAGADYTENVTAVEVNPSNRNQETSGEYNIQAWTGFNFPGRGTTYSNFKWQWFHFDGTDWDQSRSLSRIFKFTGKAWDWEVSSENGNYDYLMYADIDYDHPDVVNEMKKWGVWYANEVGLDGYRLDAVKHIKFSFLKDWVDNARAATGKSMFTVGEYWQNDLGALNNYLAKVNYNQSLFDAPLHYNFYAASTGGGYYDMRNILNNTLVASNPTKAVTLVENHDTQPGQSLESTVQPWFKPLAYAFILTRSGGYPSVFYGDMYGTKGTTTREIPALKSKIEPLLKARKDYAYGTQRDYIDNPDVIGWTREGDSTKAKSGLATVITDGPGGSKRMYVGTSNAGEIWYDLTGNRTDKITIGSDGYATFPVNGGSVSVWVQQ

SEQ ID NO: 35987 - protein, 480 aa, Cytophaga sp.
NGTMMQYFEWYVPNDGQQWNRLRTDAPYLSSVGITAVWTPPAYKGTSQADVGYGPYDLYDLGEFNQKGTVRTKYGTKGELKSAVNTLHSNGIQVYGDVVMNHKAGADYTENVTAVEVNPSNRNQETSGEYNIQAWTGFNFPGRGTTYSNFKWQWFHFDGTDWDQSRSLSRIFKFTGKAWDWEVSSENGNYDYLMYADIDYDHPDVVNEMKKWGVWYANEVGLDGYRLDAVKHIKFSFLKDWVDNARAATGKEMFTVGEYWQNDLGALNNYLAKVNYNQSLFDAPLHYNFYAASTGGGYYDMRNILNNTLVASNPTKAVTLVENHDTQPGQSLESTVQPWFKPLAYAFILTRSGGYPSVFYGDMYGTKGTTTREIPALKSKIEPLLKARKDYAYGTQRDYIDNPDVIGWTREGDSTKAKSGLATVITDGPGGSKRMYVGTSNAGEIWYDLTGNRTDKITIGSDGYATFPVNGASVSVWVQQ

SEQ ID NO: 35988 - protein, 480 aa, Cytophaga sp.
NGTMMQYFEWYVPNDGQQWNRLRTDAPYLSSVGITAVWTPPAYKGTSQADVGYGPYDLYDLGEFNQKGTVRTKYGTKGELKSAVNTLHSNGIQVYGDVVMNHKAGADYTENVTAVEVNPSNRNQETSGEYNIQADTGFNFPGRGTTYSNFKWQWFHFDGTDWDQSRSLSRIFKFTGKAWDWEVSSENGNYDYLMYADIDYDHPDVVNEMKKWGVWYANEVGLDGYRLDAVKHIKFSFLKDWVDNARAATGKEMFTVGEYWQNDLGALNNYLAKVNYNQSLFDAPLHYNFYAASTGGGYYDMRNILNNTLVASNPTKAVTLVENHDTQPGQSLESTVQPWFKPLAYAFILTRSGGYPSVFYGDMYGTKGTTTREIPALKSKIEPLLKARKDYAYGTQRDYIDNPDVIGWTREGDSTKAKSGLATVITDGPGGSKRMYVGTSNAGEIWYDLTGNRTDKITIGSDGYATFPVNGGSVSVWVQQ

SEQ ID NO: 35989 - protein, 480 aa, Cytophaga sp.
NGTMMQYFEWYVPNDGQQWNRLRTDAPYLSSVGITAVWTPPAYKGTSQADVGYGPYDLYDLGEFNQKGTVRTKYGTKGELKSAVNTLHSNGIQVYGDVVMNHKAGADYTENVTAVEVNPSNRNQETSGEYNIQAWTGFNFPGRGTTYSNFKWQWFHFDGTDWDQSRSLSRIFKFTGKAWDWEVSSENGNYDYLMYADIDYDHPDVVNEMKKWGVWYANEVGLDGYRLDAVKHIKFSFLKDWVDNARAATGKEMFTVGEYWQNDLGALNNYLAKVNYNQSLFDAPLHYNFYAASTGGGYYDMRNILNNTLVASNPTKAVTLVENHDTQPGQSLESTVQPWFKPLAYAFILTRSGGYPSVFYGDMYGTKGTTTREIPALKSKIEPLLKARKDYAYGTQRDYIDNPDVIGWTREGDSTKAKSGLATVITDGPGGSKRMYVGTSNALEIWYDLTGNRTDKITIGSDGYATFPVNGGSVSVWVQQ

SEQ ID NO: 35990 - protein, 480 aa, Cytophaga sp.
NGTMMQYFEWYVPNDGQQWNRLRTDAPYLSSVGITAVWTPPAYKGTSQADVGYGPYDLYDLGEFNQKGTVRTKYGTKGELKSAVNTLHSNGIQVYGDVVMNHKAGADYTENVTAVEVNPSNRNQETSGEANIQAWTGFNFPGRGTTYSNFKWQWFHFDGTDWDQSRSLSRIFKFTGKAWDWEVSSENGNYDYLMYADIDYDHPDVVNEMKKWGVWYANEVGLDGYRLDAVKHIKFSFLKDWVDNARAATGKEMFTVGEYWQNDLGALNNYLAKVNYNQSLFDAPLHYNFYAASTGGGYYDMRNILNNTLVASNPTKAVTLVENHDTQPGQSLESTVQPWFKPLAYAFILTRSGGYPSVFYGDMYGTKGTTTREIPALKSKIEPLLKARKDYAYGTQRDYIDNPDVIGWTREGDSTKAKSGLATVITDGPGGSKRMYVGTSNAGEIWYDLTGNRTDKITIGSDGYATFPVNGGSVSVWVQQ

SEQ ID NO: 35991 - protein, 480 aa, Cytophaga sp.
NGTMMQYFEWYVPNDGQQWNRLRTDAPYLSSVGITAVWTPPAYKGTSQADVGYGPYDLYDLGEFNQKGTVRTKYGTKGELKSAVNTLHSNGIQVYGDVVMNHKAGADYTENVTAVEVNPSNRNQETSGEYNIQAWTGFNFPGRGTTYSNFKWQWFHFDGTDWDQSRSLSRIFKFTGKAWDWEVSSENGNYDYLMYADIDYDHPDVVNEMKKWGVWYANEVGLDGYRLDAVKHIKFSFLKDWVDNARAATGKEMFTVGEYWSNDLGALNNYLAKVNYNQSLFDAPLHYNFYAASTGGGYYDMRNILNNTLVASNPTKAVTLVENHDTQPGQSLESTVQPWFKPLAYAFILTRSGGYPSVFYGDMYGTKGTTTREIPALKSKIEPLLKARKDYAYGTQRDYIDNPDVIGWTREGDSTKAKSGLATVITDGPGGSKRMYVGTSNAGEIWYDLTGNRTDKITIGSDGYATFPVNGGSVSVWVQQ

SEQ ID NO: 35992 - protein, 480 aa, Cytophaga sp.
NGTMMQYFEWYVPNDGQQWNRLRTDAPYLSSVGITAVWTPPAYKGTSQADVGYGPYDLYDLGEFNQKGTVRTKYGTKGELKSAVNTLHSNGIQVYGDVVMNHKAGADYTENVTAVECNPSNRNQETSGEYNIQAWTGFNFPGRGTTYSNFKWQWFHFDGTDWDQSRSLSRIFKFTGKAWDWEVSSENGNYDYLMYADIDYDHPDVVNEMKKWGVWYANEVGLDGYRLDAVKHIKFSFLKDWVDNARAATGKEMFTVGEYWQNDLGALNNYLAKVNYNQSLFDAPLHYNFYAASTGGGYYDMRNILNNTLVASNPTKAVTLVENHDTQPGQSLESTVQPWFKPLAYAFILTRSGGYPSVFYGDMYGTKGTTTREIPALKSKIEPLLKARKDYAYGTQRDYIDNPDVIGWTREGDSTKAKSGLATVITDGPGGSKRMYVGTSNAGEIWYDLTGNRTDKITIGSDGYATFPVNGGSVSVWVQQ

SEQ ID NO: 35993 - protein, 480 aa, Cytophaga sp.
NGTMMQYFEWYVPNDGQQWNRLRTDAPYLSSVGITAVWTPPAYKGTSQADVGYGPYDLYDLGEFNQKGTVRTKYGTKGELKSAVNTLHSNGIQVYGDVVMNHKAGADYTENVTAVEVNPSNRNQETSGEYNIQAWTGFNFPGRGTTYSNFKWQWFHFDGTDWDQSRSLSRIFKFTGKAWDWEVSSENGNYDYLMYADIDYDHPDVVNEMKKWGVWYANEVGLDGYRLDAVKHIKFSFLKDWVDNARAATGKEMFTVGEYWQNDLGALNNYLAKVNYNQSLFDAPLHYNFYAASTGGGYYDMRNILNNSLVASNPTKAVTLVENHDTQPGQSLESTVQPWFKPLAYAFILTRSGGYPSVFYGDMYGTKGTTTREIPALKSKIEPLLKARKDYAYGTQRDYIDNPDVIGWTREGDSTKAKSGLATVITDGPGGSKRMYVGTSNAGEIWYDLTGNRTDKITIGSDGYATFPVNGGSVSVWVQQ

SEQ ID NO: 35994 - protein, 480 aa, Cytophaga sp.
NGTMMQYFEWYVPNDGQQWNRLRTDAPYLSSVGITAVWTPPAYKGTSQADVGYGPYDLYDLGEFNQKGTVRTKYGTKGELKSAVNTLHSNGIQVYGDVVMNHKAGADYTENVTAVEVNPSNRNQETSGEYNIQAWTGFNFPGRGTTYSNFKWQWFHFDGTDWDQSRSLSRIFKFTGKAWDWEVSSENGNYDYLMYADIDYDHPDVVNEMKKWGVWYANEVGLDGYRLDAVKHIKFSFLKDWVDNARAATGKEMFTVGEYWQNDLGALNNYLAKVNYNQSLFDAPLHYNFYAASTGGGYYDMRNILNNTLVASNPTKAVTLVENHDTQPGQSLESTVQPWFKPLAYAFILTRSGGYPSVFYGDMYGTKGTTTREIPALKSKIEPLLKARKDYAYGTQRDYIDNPDVIGWTREGDSTKAKSGLATVITDGPGGSKRMYVGTSNAGEIWYDLMGNRTDKITIGSDGYATFPVNGGSVSVWVQQ

SEQ ID NO: 35995 - protein, 480 aa, Cytophaga sp.
NGTMMQYFEWYVPNDGQQWNRLRTDAPYLSSVGITAVWTPPAMKGTSQADVGYGPYDLYDLGEFNQKGTVRTKYGTKGELKSAVNTLHSNGIQVYGDVVMNHKAGADYTENVTAVEVNPSNRNQETSGEYNIQAWTGFNFPGRGTTYSNFKWQWFHFDGTDWDQSRSLSRIFKFTGKAWDWEVSSENGNYDYLMYADIDYDHPDVVNEMKKWGVWYANEVGLDGYRLDAVKHIKFSFLKDWVDNARAATGKEMFTVGEYWQNDLGALNNYLAKVNYNQSLFDAPLHYNFYAASTGGGYYDMRNILNNTLVASNPTKAVTLVENHDTQPGQSLESTVQPWFKPLAYAFILTRSGGYPSVFYGDMYGTKGTTTREIPALKSKIEPLLKARKDYAYGTQRDYIDNPDVIGWTREGDSTKAKSGLATVITDGPGGSKRMYVGTSNAGEIWYDLTGNRTDKITIGSDGYATFPVNGGSVSVWVQQ

SEQ ID NO: 35996 - protein, 480 aa, Cytophaga sp.
NGTMMQYFEWYVPNDGQQWNRLRTDAPYLSSVGITAVWTPPAYKGTSQADVGYGPYDLYDLGEFNQKGTVRTKYGTKGELKSAVNTLHSNGIQVYGDVVMNHKAGADYTENVTAVEVNPSNRNQETSGEYNIQAWTGFNFPGRGTTYSNFKWQWFHFDGTDWDQSRSLSRIFKFTGKAWDWEVSSENGNYDYLMYADIDYDHQDVVNEMKKWGVWYANEVGLDGYRLDAVKHIKFSFLKDWVDNARAATGKEMFTVGEYWQNDLGALNNYLAKVNYNQSLFDAPLHYNFYAASTGGGYYDMRNILNNTLVASNPTKAVTLVENHDTQPGQSLESTVQPWFKPLAYAFILTRSGGYPSVFYGDMYGTKGTTTREIPALKSKIEPLLKARKDYAYGTQRDYIDNPDVIGWTREGDSTKAKSGLATVITDGPGGSKRMYVGTSNAGEIWYDLTGNRTDKITIGSDGYATFPVNGGSVSVWVQQ

SEQ ID NO: 35997 - protein, 480 aa, Cytophaga sp.
NGTMMQYFEWYVPNDGQQWNRLRTDAPYLSSVGITAVWTPPAYKGTSQADVGYGPYDLYDLGEFNQKGTVRTKYGTKGELKSAVNTLHSNGIQVYGDVVMNHKAGADYTENVTAVEVNPSNRNQETSGEYNIQAWTGFNFPGRGTTYSNFKWQWFHFDGTDWDQSRSLSRIFKFTGKAWDWEVSSENGNYDYLMYADIDYDHPDVVNEMKKWGVWYANEVGLDGYRLDAVKHIKFSFLKDWVDNARAATGKEMFTVGEYWQNDLGALNNYLAKVNYNQSLFDAPLHYNFYAASTGGGYYDMRNILNNTLVASNPTKAVTLVENHDTQPGQSLESTVQPWFKPLAYAFILTRSGGYPSVFYGDMYGTKGTTTREIPALKSKIEPLLKARKDYAYGTQRDYIDNPDVIGWSREGDSTKAKSGLATVITDGPGGSKRMYVGTSNAGEIWYDLTGNRTDKITIGSDGYATFPVNGGSVSVWVQQ

SEQ ID NO: 35998 - protein, 480 aa, Cytophaga sp.
NGTMMQYFEWYVPNDGQQWNRLRTDAPYLSSVGITAVWTPPAYKGTSQADVGYGPYDLYDLGEFNQKGTVRTKYGTKGELKSAVNTLHSNGIQVYGDVVMNHKAGADYTENVTAVEVNPSNRNQETSGEYNIQAWTGFNFPGRGTTYSNFKWQWFHFDGTDWDQSRSLSKIFKFTGKAWDWEVSSENGNYDYLMYADIDYDHPDVVNEMKKWGVWYANEVGLDGYRLDAVKHIKFSFLKDWVDNARAATGKEMFTVGEYWQNDLGALNNYLAKVNYNQSLFDAPLHYNFYAASTGGGYYDMRNILNNTLVASNPTKAVTLVENHDTQPGQSLESTVQPWFKPLAYAFILTRSGGYPSVFYGDMYGTKGTTTREIPALKSKIEPLLKARKDYAYGTQRDYIDNPDVIGWTREGDSTKAKSGLATVITDGPGGSKRMYVGTSNAGEIWYDLTGNRTDKITIGSDGYATFPVNGGSVSVWVQQ

SEQ ID NO: 35999 - protein, 480 aa, Cytophaga sp.
NGTMMQYFEWYVPNDGQQWNRLRTDAPYLSSVGITAVWTPPAYKGTSQADVGYGPYDLYDLGEFNQKGTVRTKYGTKGELKSAVNTLHSNGIQVYGDVVMNHKAGADYTENVTAVEVNPSNRNQETSGEYNIQAWTGFNFPGRGTTYSNFKWQWFHFDGTDWDQSRSLSRIFKFTGKAWDWEVSSENGNYDYLMYADIDYDHPDVVNEMKKWGVWYANEVGLDGYRLDAVKHIKFSFLKDWVDNARAATGKEMPTVGEYWQNDLGALNNYLAKVNYNQSLFDAPLHYNFYAASTGGGYYDMRNILNNTLVASNPTKAVTLVENHDTQPGQSLESTVQPWFKPLAYAFILTRSGGYPSVFYGDMYGTKGTTTREIPALKSKIEPLLKARKDYAYGTQRDYIDNPDVIGWTREGDSTKAKSGLATVITDGPGGSKRMYVGTSNAGEIWYDLTGNRTDKITIGSDGYATFPVNGGSVSVWVQQ

SEQ ID NO: 36000 - protein, 480 aa, Cytophaga sp.
NGTMMQYFEWYVPNDGQQWNRLRTDAPYLSSVGITAVWTPPAYKGTSQADVGYGPYDLYDLGEFNQKGTVRTKYGTKGELKSAVNTLHSNGIQVYGDVVMNHKAGADYTENVEAVEVNPSNRNQETSGEYNIQAWTGFNFPGRGTTYSNFKWQWFHFDGTDWDQSRSLSRIFKFTGKAWDWEVSSENGNYDYLMYADIDYDHPDVVNEMKKWGVWYANEVGLDGYRLDAVKHIKFSFLKDWVDNARAATGKEMFTVGEYWQNDLGALNNYLAKVNYNQSLFDAPLHYNFYAASTGGGYYDMRNILNNTLVASNPTKAVTLVENHDTQPGQSLESTVQPWFKPLAYAFILTRSGGYPSVFYGDMYGTKGTTTREIPALKSKIEPLLKARKDYAYGTQRDYIDNPDVIGWTREGDSTKAKSGLATVITDGPGGSKRMYVGTSNAGEIWYDLTGNRTDKITIGSDGYATFPVNGGSVSVWVQQ

SEQ ID NO: 36001 - protein, 480 aa, Cytophaga sp.
NGTMMQYFEWYVPNDGQQWNRLRTDAPYLSSVGITAVWTPPAYKGTSQADVGYGPYDLYDLGEFNQKGTVRTKYGTKGELKSAVNTLHSNGIQVYGDVVMNHKAGADYTENVTAVEVNPSNRNQETSGEYNIQAWTGFNFPGRGTTYSNFKWQWFHFDGTDWDQSRSLSRIFKFTGKAWDWEVSSENGNYDYLMYADIDYDHPDVVNEMKKWGVWYANEVGLDGYRLDAVKHIKFSFLKDWVDNARAATGKEMFTVGEYWQNDLGALNNYLAKVNYNQSLFDAPLHYNFYAASTGGGYYDMRNILNNTLVASNPTKAVTLVENHDTQPGQSLESTVQPWFKPLAYAFILTRSGGYPSVFYGDMYGTKGTTTREIPALKSKIELLLKARKDYAYGTQRDYIDNPDVIGWTREGDSTKAKSGLATVITDGPGGSKRMYVGTSNAGEIWYDLTGNRTDKITIGSDGYATFPVNGGSVSVWVQQ

SEQ ID NO: 36002 - protein, 480 aa, Cytophaga sp.
NGTMMQYFEWYVPNDGQQWNRLRTDAPYLSSVGITAVWTPPAYKGTSQADVGYGPYDLYDLGEFNQKGTVRTKYGTKGELKSAVNTLHSNGIQVYGDVVMNHKAGADYTENVTAVEVNPSNRNQETSGEYNIQAWTGFNFPGRGTTYSNFKWQWFHFDGTDWDQSRSLSRIFKFTGKAWDWEVSSENGNYDYLMYADIDYDHPDVVNEMKKWGVWYANEVGLDGYRLDAVKHIKFSFLKDWVDNARAATGKEMFTVGEYWQNDLGALNNYLAKVNYNQSLFDAPLHYNFYAASTGGGYYDMRNILNNTLVASNPTKAVTLVENHDTQPGQSLESTVQPWFKPLAYAFILTRSGGYPSVFYGDMYGTKGTTTREIPALKSKIEPLLKARKDYAYGTQRDYIDNPDVIGWTREGDSTKAKSGLATVITDGPGGSKRMYVGTSNAGEIWYDLTGNRTDKITIGSDGYATFPVNGTSVSVWVQQ

SEQ ID NO: 36003 - protein, 480 aa, Cytophaga sp.
NGTMMQYFEWYVPNDGQQWNRLRTDAPYLSSVGITAVWTPPAYKGTSQADVGYGPYDLYDLGEFNQKGTVRTKYGTKGELKSAVNTLHSNGIQVYGDVVMNHKAGADYTENVTAVEVNPSNRNQETSGEYNIQAWTGFNFPGRGTTYSNFKWQWFHFDGTDWDQSRSLSRIFKFTGKAWDWEVSSENGNYDYLMYADIDYDHPDVVNEMKKWGVWYANEVGLDGYRLDAVKHIKFSFLKDWVDNARAATGKEMFTVGEYWQNDLGALNNYLAKVNYNQSLFDAPLHYNFYAASTGGGYYDMRNILNNTLVASNPTKAVTLVENHDTQPGQSLESTVQPWFKPLAYAFILTRSGGYPSVFYGDMYGTKGTTTREIPALKSKIEPLLTARKDYAYGTQRDYIDNPDVIGWTREGDSTKAKSGLATVITDGPGGSKRMYVGTSNAGEIWYDLTGNRTDKITIGSDGYATFPVNGGSVSVWVQQ

SEQ ID NO: 36004 - protein, 480 aa, Cytophaga sp.
NGTMMQYFEWYVPNDGQQWNRLRTDAPYLSSVGITAVWTPPAYKGTSQADVGYGPYDLYDLGEFNQRGTVRTKYGTKGELKSAVNTLHSNGIQVYGDVVMNHKAGADYTENVTAVEVNPSNRNQETSGEYNIQAWTGFNFPGRGTTYSNFKWQWFHFDGTDWDQSRSLSRIFKFTGKAWDWEVSSENGNYDYLMYADIDYDHPDVVNEMKKWGVWYANEVGLDGYRLDAVKHIKFSFLKDWVDNARAATGKEMFTVGEYWQNDLGALNNYLAKVNYNQSLFDAPLHYNFYAASTGGGYYDMRNILNNTLVASNPTKAVTLVENHDTQPGQSLESTVQPWFKPLAYAFILTRSGGYPSVFYGDMYGTKGTTTREIPALKSKIEPLLKARKDYAYGTQRDYIDNPDVIGWTREGDSTKAKSGLATVITDGPGGSKRMYVGTSNAGEIWYDLTGNRTDKITIGSDGYATFPVNGGSVSVWVQQ

SEQ ID NO: 36005 - protein, 480 aa, Cytophaga sp.
NGTMMQYFEWYVPNDGQQWNRLRTDAPYLSSVGITAVWTPPAYKGTSSADVGYGPYDLYDLGEFNQKGTVRTKYGTKGELKSAVNTLHSNGIQVYGDVVMNHKAGADYTENVTAVEVNPSNRNQETSGEYNIQAWTGFNFPGRGTTYSNFKWQWFHFDGTDWDQSRSLSRIFKFTGKAWDWEVSSENGNYDYLMYADIDYDHPDVVNEMKKWGVWYANEVGLDGYRLDAVKHIKFSFLKDWVDNARAATGKEMFTVGEYWQNDLGALNNYLAKVNYNQSLFDAPLHYNFYAASTGGGYYDMRNILNNTLVASNPTKAVTLVENHDTQPGQSLESTVQPWFKPLAYAFILTRSGGYPSVFYGDMYGTKGTTTREIPALKSKIEPLLKARKDYAYGTQRDYIDNPDVIGWTREGDSTKAKSGLATVITDGPGGSKRMYVGTSNAGEIWYDLTGNRTDKITIGSDGYATFPVNGGSVSVWVQQ

SEQ ID NO: 36006 - protein, 480 aa, Cytophaga sp.
NGTMMQYFEWYVPNDGQQWNRLRTDAPYLSSVGITAVWTPPAYKGTSQADVGYGPYDLYDLGEFNQKGTVRTKYGTKGELKSAVNTLHSNGIQVYGDVVMNHKAGADYTENVTAVEVNPSNRNQETSGEYNIQAWTGFNFPGRGTTYSNFKWQWFHFDGTDWDQSRSLSRIFKFTGKAWDWEVSSENGNYDYLMYADIDYDHPDVVNEMKKWGVWYANEVGLDGYRLDAVKHIKFSFLKDWVDNARAATGKEMFTVGEYWQNDLGALNNYLAKVNYNQSLFDAPLHYNFYAASTGGGYYDMRNILNNTLVASNPTKAVTLVENHDTQPGQSLESTVQPWFKPLAYAFILTRSGGYPSVFYGDMYGTKGTTTREIPALKSKIEPLLKARKDYAYGTQRDYIDNPDVIGWTREGDSTKAKSGLATVITDGPGGSKRMYVGTSNAGEIWYDLTGNRTDKITIGSDGYATFPVNGYSVSVWVQQ

SEQ ID NO: 36007 - protein, 480 aa, Cytophaga sp.
NGTMMQYFEWYVPNDGQQWNRLRTDAPYLSSVGITAVWTPPAYKGTSQADVGYGPYDLYDLGEFNQKGTVRTKYGTKGELKSAVNTLHSNGIQVYGDVVMNHKAGADYTENVTAVEVNPSNRNQETSGEYNIQAWTGFNFPGRGTTYSNFKWQWFHFDGTDWDQSRSLSRIFKFTGKAWDWEVSSENGNYDYLMYADIDYDHPDVVNEMKKWGVWYANEVGLDGYRLDAVKHIKFSFLKDWVDNARAATGKEMFTVGEYWQNDLGALNNYLAKVNYNQSLFDAPLHYNFYAASTGGGYYDMRNILNNTLVASNPTKAVTLVENHDTQPGQSLESTVQPWFKPLAYAFILTRSGGYPSVFYGDMYGTKGTTTREIPALKSKIEPLLKARKDYAYGTQRDYIDNPDVIGWTREGDKTKAKSGLATVITDGPGGSKRMYVGTSNAGEIWYDLTGNRTDKITIGSDGYATFPVNGGSVSVWVQQ

SEQ ID NO: 36008 - protein, 480 aa, Cytophaga sp.
NGTMMQYFEWYVPNDGQQWNRLRTDAPYLSSVGITAVWTPPAYKGTSQADVGYGPYDLYDLGEFNQKGTVRTKYGTKGELKSAVNTLHSNGIQVYGDVVMNHKAGADYTENVTAVEVNPSNRNQETSGEYNIQAWTGFNFPGRGTTYSNFKWQWFHFDGTDWDQSRSLSRIFKFTGKAWDWEVSSENGNYDYLMYADIDYDHPDVVNEMKKWGVWYANEVGLDGYRLDAVKHIKFSFLKDWVDNARAATGKEMFTVGEYWQNDLGALNNYLAKVNYNQSLFDAPLHYNFYAASTGYGYYDMRNILNNTLVASNPTKAVTLVENHDTQPGQSLESTVQPWFKPLAYAFILTRSGGYPSVFYGDMYGTKGTTTREIPALKSKIEPLLKARKDYAYGTQRDYIDNPDVIGWTREGDSTKAKSGLATVITDGPGGSKRMYVGTSNAGEIWYDLTGNRTDKITIGSDGYATFPVNGGSVSVWVQQ

SEQ ID NO: 36009 - protein, 480 aa, Cytophaga sp.
NGTMMQYFEWYVPNDGQQWNRLRTDAPYLSSVGITAVWTPPAYKGTSQADVGYGPYDLYDLGEFNQKGTVRTKYGTKGELKSAVNTLHSNGIQVYGDVVMNHKAGADYTENVTAVEVNPSNRNQETSGEYNIQAWTGFNFPGRGTTYSNFKWQWFHFDGTDWDQSYSLSRIFKFTGKAWDWEVSSENGNYDYLMYADIDYDHPDVVNEMKKWGVWYANEVGLDGYRLDAVKHIKFSFLKDWVDNARAATGKEMFTVGEYWQNDLGALNNYLAKVNYNQSLFDAPLHYNFYAASTGGGYYDMRNILNNTLVASNPTKAVTLVENHDTQPGQSLESTVQPWFKPLAYAFILTRSGGYPSVFYGDMYGTKGTTTREIPALKSKIEPLLKARKDYAYGTQRDYIDNPDVIGWTREGDSTKAKSGLATVITDGPGGSKRMYVGTSNAGEIWYDLTGNRTDKITIGSDGYATFPVNGGSVSVWVQQ

SEQ ID NO: 36010 - protein, 480 aa, Cytophaga sp.
NGTMMQYFEWYVPNDGQQWNRLRTDAPYLSSVGITAVWTPPAYKGTSQADVGYGPYDLYDLGEFNQKGTVRTKYGTKGELKSAVNTLHSNGIQVYGDVVMNHKAGADYTENVTAVEVNPSNRNQETSGEYNIQAWTGFNFPGRGTTYSNFKWQWFHFDGTDWDQSRSLSRIFKFTGKAWDWEVSSENGNYDYLMYADIDYDHPDVVNEMKKWGVWYANEVGLDGYRLDAVKHIKFSFLKDWVDNARAATGKEMFTVGEYWQNDLGALNNYLAKVNYNQSLFDAPLHYNFYAASTGGGYYDMRNILNNTLVASNPTKAVTLVENHDTQPGQSLESTVQPWFKPLAYAFILTRSGGYPSVFYGDMYGTKGTTTREIPALKSKIEPLLKARKDYAYGTQRDYIDNPDVIGWTREGDSTKANSGLATVITDGPGGSKRMYVGTSNAGEIWYDLTGNRTDKITIGSDGYATFPVNGGSVSVWVQQ

SEQ ID NO: 36011 - protein, 480 aa, Cytophaga sp.
NGTMMQYFEWYVPNDGQQWNRLRTDAPYLSSVGITAVWTPPAYKGTSQADVGYGPYDLYDLGEFNQKGTVRTKYGTKGELKSAVNTLHSNGIQVYGDVVMNHKAGADYTENVTAVEVNPSNRNQETSGEYNIQAWTGFNFPGRGTTYSNFKWQWFHFDGTDWDQSRSLSRIFKFTGKAWDWEVSSENGNYDYLMYADIDYDHPDVVNEMKKWGVWYANEVGLDGYRLDAVKHIKFSFLKDWVDNARAATGKEMFTVGEYWQNDLGALNNYLAKVNYNQSLFDAPLHYNFYAASTGGGYYDMRNILNNTLVASNPTKAVTLVENHDTQPGQSLESTVQPWFKPLAYAFILTRSGGYPSVFYGDMYGTKGTTTREIPALKSKIEPLLKARKDYAYGTQRDYIDNPDVIGWTREGDSTKAKSGLATVITDGPGGSKRMYVGTSNAGEIWYDLTGNRTDKITIGIDGYATFPVNGGSVSVWVQQ

SEQ ID NO: 36012 - protein, 480 aa, Cytophaga sp.
NGTMMQYFEWYVPNDGQQWNRLRTDAPYLSSVGITAVWTPPAYKGTSQADVGYGPYDLYDLGEFNQKGTVRTKYGTKGELKSAVNTLHSNGIQVYGDVVMNHKAGADYTENVTAVEVNPSNRNQETSGEYNIQAWTGFNFPGRGTTYSNFKWQWFHFDGTDWDQSRSLSRIFKFTGKAWDWEVSSENGNYDYLMYADIDYDHPDVVNEMKKWGVWYANEVGLDGYRLDAVKHIKFSFLKDWVDNARAATGKEMFTVGEYWQNDLGALNNYLAKVNYNQSLFDAPLHYNFYAASTGGGYYDMRNILNNTLVASNPTKAVTLVENHDTQPGQSLESTVQPWFKPLAYAFILTRSGGYPSVFYGDMYGTKGTTTRQIPALKSKIEPLLKARKDYAYGTQRDYIDNPDVIGWTREGDSTKAKSGLATVITDGPGGSKRMYVGTSNAGEIWYDLTGNRTDKITIGSDGYATFPVNGGSVSVWVQQ

SEQ ID NO: 36013 - protein, 480 aa, Cytophaga sp.
NGTMMQYFEWYVPNDGQQWNRLRTDAPYLSSVGITAVWTPPAYKGTSQADVGYGPYDLYDLGEFNQKGTVRTKYGTKGELKSAVNTLHSNGIQVYGDVVMNHKAGADYTENVTAVEVNPSNRNQETSGEYNIQAWTGFNFPGRGTTYSNFKWQWFHFDGTDWDQSRSLSRIFKFTGKAWDWEVSSENGNYDYLMYADIDYDHPDVVNEMKKWGVWYANEVGLDGYRLDAVKHIKFSFLKDWVDNARAATGKEMFTVGEYWQNDLGALNNYLAKVNYNQSLFDAPLHYNFYAASTGGGYYDMRNILNNTLVASNPTKAVTLVENHDTQPGQSLESTVQPWFKPLAYAFILTRSGGYPSVFYGDMYGTKGTTTREIPALKSKIEPLLKARKDYAYGTQRDYIDNPDVIGWTREGDSTKAKSGLATVITDGPGGSKRMYVGTSNAGEIWYDLVGNRTDKITIGSDGYATFPVNGGSVSVWVQQ

SEQ ID NO: 36014 - protein, 480 aa, Cytophaga sp.
NGTMMQYFEWYVPNDGQQWNRLRTDAPYLSSVGITAVWTPPAYKGTSQADVGYGPYDLYDLGEFNQKGTVRTKYGTKGELKSAVNTLHSNGIQVYGDVVMNHKAGADYTENVTAVEVNPSNRNQETSGEYNIQAWTGFNFPGRGTTYSNFKWQWFHFDGTDWDQSRSLSRIFKFTGKAWDWEVSSENGNYDYLMYADIDYDHPDVVNEMKKWGVWYANEVGLDGYRLDAVKHIKFSFLKDWVDNARAATGKEMFTVGEYWQNDLGALNNYLAKVNYNQSLFDAPLHYNFYAASTGGGYYDMRNILNNTLVASNPTKAVTLVENHDTQPGQSLESTVQPWFKPLAYAFILTRSGGYPSVFYGDMYGTKGKTTREIPALKSKIEPLLKARKDYAYGTQRDYIDNPDVIGWTREGDSTKAKSGLATVITDGPGGSKRMYVGTSNAGEIWYDLTGNRTDKITIGSDGYATFPVNGGSVSVWVQQ

SEQ ID NO: 36015 - protein, 480 aa, Cytophaga sp.
NGTMMQYFEWYVPNDGQQWNRLRTDAPYLSSVGITAVWTPPAYKGTSQADVGYGPYDLYDLGEFNQKGTVRTKYGTKGELKSAVNTLHSNGIQVYGDVVMNHKAGADYTENVTAVEVNPSNRNQETSGEYNIQAWTGFNFPGRGTTYSNFKWQWFHFDGTDWDQSRSLSRIFKFTGKAWDWEVSSENGNYDYLMYADIDYDHPDVVNEMKKWGVWYANEVGLDGYRLDAVKHIKFSFLKDWVDNARAATGKEMFTVGEYWQNDLGALNNYLAKVNYNQSLFDAPLHYNFYAASTGGGYYDMRNILNNTLVASNPTKAVTLVENHDTQPGQSLESTVQPWFKPLAYAFILTRSGGYPSVFYGDMYGTKGTTTREIPALKSKIEPLLKARKDYAYGTQRDYIDNPDVIGWTREGDSTKAKSGLATVITDGPGGSKRMYVGTSNAGEIWYDLTGNRTDKITIGYDGYATFPVNGGSVSVWVQQ

SEQ ID NO: 36016 - protein, 480 aa, Cytophaga sp.
NGTMMQYFEWYVPNDGQQWNRLRTDAPYLSSVGITAVWTPPAYKGTSQADVGYGPYDLYDLGEFNQKGTVRTKYGTKGELKSAVNTLHSNGIQVYGDVVMNHKAKADYTENVTAVEVNPSNRNQETSGEYNIQAWTGFNFPGRGTTYSNFKWQWFHFDGTDWDQSRSLSRIFKFTGKAWDWEVSSENGNYDYLMYADIDYDHPDVVNEMKKWGVWYANEVGLDGYRLDAVKHIKFSFLKDWVDNARAATGKEMFTVGEYWQNDLGALNNYLAKVNYNQSLFDAPLHYNFYAASTGGGYYDMRNILNNTLVASNPTKAVTLVENHDTQPGQSLESTVQPWFKPLAYAFILTRSGGYPSVFYGDMYGTKGTTTREIPALKSKIEPLLKARKDYAYGTQRDYIDNPDVIGWTREGDSTKAKSGLATVITDGPGGSKRMYVGTSNAGEIWYDLTGNRTDKITIGSDGYATFPVNGGSVSVWVQQ

SEQ ID NO: 36017 - protein, 480 aa, Cytophaga sp.
NGTMMQYFEWYVPNDGQQWNRLRTDAPYLSSVGITAVWTPPAYKGTSQADVGYGPYDLYDLGEFNQKGTVRTKYGTKGELKSAVNTLHSNGIQVYGDVVMNHKAGADYTENVTAVEVNPSNRNQETSGEYNIQAWTGFNFPGRGTTYSNFKWQWFHFDGTDWDQSRSLSRIFKFTGKAWDWEVSSENGNYDYLMYADIDYDHPDVVNEMKKWGVWYANEVGLDGYRLDAVKHIKFSFLKDFVDNARAATGKEMFTVGEYWQNDLGALNNYLAKVNYNQSLFDAPLHYNFYAASTGGGYYDMRNILNNTLVASNPTKAVTLVENHDTQPGQSLESTVQPWFKPLAYAFILTRSGGYPSVFYGDMYGTKGTTTREIPALKSKIEPLLKARKDYAYGTQRDYIDNPDVIGWTREGDSTKAKSGLATVITDGPGGSKRMYVGTSNAGEIWYDLTGNRTDKITIGSDGYATFPVNGGSVSVWVQQ

SEQ ID NO: 36018 - protein, 480 aa, Cytophaga sp.
NGTMMQYFEWYVPNDGQQWNRLRTDAPYLSSVGITAVWTPPAYKGTSQADVGYGPYDLYDLGEFNQKGTVRTKYGTKGELKSAVNTLHSNGIQVYGDVVMNHKAGADYTENVTAVEVNPSNRNQETSGEYNIQAWTGFNFPGRGTTYSNFKWQWFHFDGTDWDQSRSLSRIFKFTGKAWDWEVSSENGNYDYLMYADIDYDHPDVVNEMKKWGVWYANEVGLDGYRLDAVKHIKFSFLKDWVDNARAATGKEMFTVGEYWQNDLGALNNYLAKVNYNQSLFDAPLHYNFYAASTGGGYYDMRNILNNTLVASNPTKAVTLVENHDTQPGQSLESTVQPWFKPLAYAFILTRSGGYPSVFYGDMYGTKGTTTREIPALKSKIEPLLKARKDYSYGTQRDYIDNPDVIGWTREGDSTKAKSGLATVITDGPGGSKRMYVGTSNAGEIWYDLTGNRTDKITIGSDGYATFPVNGGSVSVWVQQ

SEQ ID NO: 36019 - protein, 480 aa, Cytophaga sp.
NGTMMQYFEWYVPNDGQQWNRLRTDAPYLSSVGITAVWTPPAYKGTSQADVGYGPYDLYDLGEFNQKGTVRTKYGTKGELKSAVNTLHSNGIQVYGDVVMNHKAGADYTENVTAVEVNPSNRNQETSGEYNIQAWTGFNFPGRGTTYSNFKWQWFHFDGTDWDQSRSLSRIFKFTGKAWDWEVSSENGNYDYLMYADIDYDHPDVVNEMKKWGVWYANEVGLDGYRLDAVKHIKFSFLKDWVDNAAAATGKEMFTVGEYWQNDLGALNNYLAKVNYNQSLFDAPLHYNFYAASTGGGYYDMRNILNNTLVASNPTKAVTLVENHDTQPGQSLESTVQPWFKPLAYAFILTRSGGYPSVFYGDMYGTKGTTTREIPALKSKIEPLLKARKDYAYGTQRDYIDNPDVIGWTREGDSTKAKSGLATVITDGPGGSKRMYVGTSNAGEIWYDLTGNRTDKITIGSDGYATFPVNGGSVSVWVQQ

SEQ ID NO: 36020 - protein, 480 aa, Cytophaga sp.
NGTMMQYFEWYVPNDGQQWNRLRTDAPYLSSVGITAVWTPPAYKGTSQADVGYGPYDLYDLGEFNQKGTVRTKYGTKGELKSAVNTLHSNGIQVYGDVVMNHKAGADYTENVTAVEVNPSNRNQETSGEYNIQAWTGFNFPGRGTTYSNFKWQWFHFDGTDWDQSRSLSRIFKFTGKAWDWEVSSENGNYDYLMYADIDYDHPDVVNEMKKWGVWYANEVGLDGYRLDAVKHIKFSFLKDWVDNARAATGKVMFTVGEYWQNDLGALNNYLAKVNYNQSLFDAPLHYNFYAASTGGGYYDMRNILNNTLVASNPTKAVTLVENHDTQPGQSLESTVQPWFKPLAYAFILTRSGGYPSVFYGDMYGTKGTTTREIPALKSKIEPLLKARKDYAYGTQRDYIDNPDVIGWTREGDSTKAKSGLATVITDGPGGSKRMYVGTSNAGEIWYDLTGNRTDKITIGSDGYATFPVNGGSVSVWVQQ

SEQ ID NO: 36021 - protein, 480 aa, Cytophaga sp.
NGTMMQYFEWYVPNDGQQWNRLRTDAPYLSSVGITAVWTPPAYKGTSQADVGYGPYDLYDLGEFNQKGTVRTKYGTKGELKSAVNTLHSNGIQVYGDVVMNHKAGADYTENVTAVEVNPSNRNQETSGEYNIQAWTGFNFPGRGTTYSNFKWQWFHFDGTDWDQSRSLSRIFKFTGKAWDWEVSSENKNYDYLMYADIDYDHPDVVNEMKKWGVWYANEVGLDGYRLDAVKHIKFSFLKDWVDNARAATGKEMFTVGEYWQNDLGALNNYLAKVNYNQSLFDAPLHYNFYAASTGGGYYDMRNILNNTLVASNPTKAVTLVENHDTQPGQSLESTVQPWFKPLAYAFILTRSGGYPSVFYGDMYGTKGTTTREIPALKSKIEPLLKARKDYAYGTQRDYIDNPDVIGWTREGDSTKAKSGLATVITDGPGGSKRMYVGTSNAGEIWYDLTGNRTDKITIGSDGYATFPVNGGSVSVWVQQ

SEQ ID NO: 36022 - protein, 480 aa, Cytophaga sp.
NGTMMQYFEWYVPNDGQQWNRLRTDAPYLSSVGITAVWTPPAYKGTSQADVGYGPYDLYDLGEFNQKGTVRTKYGTKGELKSAVNTLHSNGIQVYGDVVMNHKAGADYTENVTAVEVNPSNRNQETSGEYNIQAWTGFNFPGRGTTYSNFKWQWFHFDGTDWDQSRSLSRIFKFTGKAWDWEVSSENGNYDYLMYADIDYDHPDVVNEMKKWGVWYANEVGLDGYRLDAVKHIKFSFLKDWVDNARAATGKEMFTVGEYWQNDLGALNNYLAKVNYNQSLFDAPLHYNFYAASTGGGYYDMRNILNNTLVASNPTKAVTLVENHDTQPGQSLESTVQPWFKPLAYAFILTRSGGYPSVFYGDMYGTKGTTTREIPALKSKIEPLLKARKDYAYGTQRDYIDNPDVIGWTREGDSTKAKSGLATVITDGPGGDKRMYVGTSNAGEIWYDLTGNRTDKITIGSDGYATFPVNGGSVSVWVQQ

SEQ ID NO: 36023 - protein, 480 aa, Cytophaga sp.
NGTMMQYFEWYVPNDGQQWNRLRTDAPYLSSVGITAVWTPPAYKGTSQADVGYGPYDLYDLGEFNQKGTVRTKYGTKGELKSAVNTLHSNGIQVYGDVVMNHKASADYTENVTAVEVNPSNRNQETSGEYNIQAWTGFNFPGRGTTYSNFKWQWFHFDGTDWDQSRSLSRIFKFTGKAWDWEVSSENGNYDYLMYADIDYDHPDVVNEMKKWGVWYANEVGLDGYRLDAVKHIKFSFLKDWVDNARAATGKEMFTVGEYWQNDLGALNNYLAKVNYNQSLFDAPLHYNFYAASTGGGYYDMRNILNNTLVASNPTKAVTLVENHDTQPGQSLESTVQPWFKPLAYAFILTRSGGYPSVFYGDMYGTKGTTTREIPALKSKIEPLLKARKDYAYGTQRDYIDNPDVIGWTREGDSTKAKSGLATVITDGPGGSKRMYVGTSNAGEIWYDLTGNRTDKITIGSDGYATFPVNGGSVSVWVQQ

SEQ ID NO: 36024 - protein, 480 aa, Cytophaga sp.
NGTMMQYFEWYVPNDGQQWNRLRTDAPYLSSVGITAVWTPPAYKGTSQADVGYGPYDLYDLGEFNQKGTVRTKYGTKGELKSAVNTLHSNGIQVYGDVVMNHKAGADYTENVTAVEVNPSNRNQEASGEYNIQAWTGFNFPGRGTTYSNFKWQWFHFDGTDWDQSRSLSRIFKFTGKAWDWEVSSENGNYDYLMYADIDYDHPDVVNEMKKWGVWYANEVGLDGYRLDAVKHIKFSFLKDWVDNARAATGKEMFTVGEYWQNDLGALNNYLAKVNYNQSLFDAPLHYNFYAASTGGGYYDMRNILNNTLVASNPTKAVTLVENHDTQPGQSLESTVQPWFKPLAYAFILTRSGGYPSVFYGDMYGTKGTTTREIPALKSKIEPLLKARKDYAYGTQRDYIDNPDVIGWTREGDSTKAKSGLATVITDGPGGSKRMYVGTSNAGEIWYDLTGNRTDKITIGSDGYATFPVNGGSVSVWVQQ

SEQ ID NO: 36025 - protein, 480 aa, Cytophaga sp.
NGTMMQYFEWYVPNDGQQWNRLRTDAPYLSSVGITAVWTPPAYKGTSQADVGYGPYDLYDLGEFNQKGTVRTKYGTKGELKSAVNTLHSNGIQVYGDVVMNHKAGADYTENVTAVEVNPSNRNQETSGEYNIQAWTGFNFPGRGTTYSNFKWQWFHFDGTDWDQSRSLSRIFKFTGKAWDWEVSSENGNYDYLMYADIDYDHPDVVNEMKKWGVWYANEVGLDGYRLDAVKHIKFSFLKDWVDNARAATGKEMFTVGEYWQNDLGALNNYLAKVNYNQSLFDAPLHYNFYAASTGGGYYDMRNILNNTLVASNPTKAVTLVENHDTQPGQSLESTVQPWFKPLAYAFILTRSGGYPSVFYGDMYGTKGTTTREIPALKSKIEPLLKARKDYAYGTQRDYIDNPDVIGWTREGDSTKAKSGLATVITDGPGGSKRMYVGTSNAGEIWYDLTGNRTDKITIGSDGYATFPVIGGSVSVWVQQ

SEQ ID NO: 36026 - protein, 480 aa, Cytophaga sp.
NGTMMQYFEWYVPNDGQQWNRLRTDAPYLSSVGITAVWTPPAYKGTSQADVGYGPYDLYDLGEFNQKGTVRTKYGTKGELKSAVNTLHSNGIQVYGDVVMNHKAGADYTENVTAVEVNPSNRNQETSGEYNIQAWTGFNFPGRGTTYSNFKWQWFHFDGTDWDQSRSLSRIFKFTGKAWDWEVSSENGNYDYLMYADIDYDHPDVVNEMKKWGVWYANEVGLDGYRLDAVKHIKFSFLKDWVDNARAATGKEMFTVGEYWQNDLGALNNYLAKVNYNQSLFDAPLHYNFYAASTGGGYYDMRNILNNTLVASNPTKAVTLVENHDTQPGQSLESTVQPWFKPLAYAFILTRSGGYPSVFYGDMYGTKGTTTREIPALKSKIEPLLKARKDYAYGTQRDYIDNPDVIGWTRQGDSTKAKSGLATVITDGPGGSKRMYVGTSNAGEIWYDLTGNRTDKITIGSDGYATFPVNGGSVSVWVQQ

SEQ ID NO: 36027 - protein, 480 aa, Cytophaga sp.
NGTMMQYFEWYVPNDGQQWNRLRTDAPYLSSVGITAVWTPPAYKGTSQADVGYGPYDLYDLGEFNQKGTVRTKYGTKGELKSAVNTLHSNGIQVYGDVVMNHKAGADYTENVTAVEVNPSNRNQETSGEYNIQAWTGFNFPGRGTTYSNFKWQWFHFDGTDWDQSRSLSRIFKFTGKAWDWEVSSENGNYDYLMYADIDYDHPDVVNEMKKWGVWYANEVGLDGYRLDAVKHIKFSFLKDWVDNARAATGKEMFTVGEYWQNDLGALNNYLAKVNYNQSLFDAPLHYNFYAASTGGGYYDMQNILNNTLVASNPTKAVTLVENHDTQPGQSLESTVQPWFKPLAYAFILTRSGGYPSVFYGDMYGTKGTTTREIPALKSKIEPLLKARKDYAYGTQRDYIDNPDVIGWTREGDSTKAKSGLATVITDGPGGSKRMYVGTSNAGEIWYDLTGNRTDKITIGSDGYATFPVNGGSVSVWVQQ

SEQ ID NO: 36028 - protein, 480 aa, Cytophaga sp.
NGTMMQYFEWYVPNDGQQWNRLRTDAPYLSSVGITAVWTPPAYKGTSQADVGYGPYDLYDLGEFNQKGTVRTKYGTKGELKSAVNTLHSNGIQVYGDVVMNHKAGADYTENVTAVEVNPSNRNQETSGEYNIQAWTGFNFPGRGTTYSNFKWQWFHFDGTDWDQSRSLSRIFKFTGKAWDWEVSSENGNYDYLMYADIDYDHPDVVNEMKKWGVWYANEVGLDGYRLDAVKHIKFSFLKDWVDNARAATGKRMFTVGEYWQNDLGALNNYLAKVNYNQSLFDAPLHYNFYAASTGGGYYDMRNILNNTLVASNPTKAVTLVENHDTQPGQSLESTVQPWFKPLAYAFILTRSGGYPSVFYGDMYGTKGTTTREIPALKSKIEPLLKARKDYAYGTQRDYIDNPDVIGWTREGDSTKAKSGLATVITDGPGGSKRMYVGTSNAGEIWYDLTGNRTDKITIGSDGYATFPVNGGSVSVWVQQ

SEQ ID NO: 36029 - protein, 480 aa, Cytophaga sp.
NGTMMQYFEWYVPNDGQQWNRLRTDAPYLSSVGITAVWTPPAYKGTSQADVGYGPYDLYDLGEFNQKGTVRTKYGTKGELKSAVNTLHSNGIQVYGDVVMNHKAGADYTENVTAVEVNPSNRNQETSGEYNIQAWTGFNFPGRGTTYSNFKWQWFHFDGTDWDQCRSLSRIFKFTGKAWDWEVSSENGNYDYLMYADIDYDHPDVVNEMKKWGVWYANEVGLDGYRLDAVKHIKFSFLKDWVDNARAATGKEMFTVGEYWQNDLGALNNYLAKVNYNQSLFDAPLHYNFYAASTGGGYYDMRNILNNTLVASNPTKAVTLVENHDTQPGQSLESTVQPWFKPLAYAFILTRSGGYPSVFYGDMYGTKGTTTREIPALKSKIEPLLKARKDYAYGTQRDYIDNPDVIGWTREGDSTKAKSGLATVITDGPGGSKRMYVGTSNAGEIWYDLTGNRTDKITIGSDGYATFPVNGGSVSVWVQQ

SEQ ID NO: 36030 - protein, 480 aa, Cytophaga sp.
NGTMMQYFEWYVPNDGQQWNRLRTDAPYLSSVGITAVWTPPAYKGTSQADVGYGPYDLYDLGEFNQKGTVRTKYGTKGELKSAVNTLHSNGIQVYGDVVMNHKAGADYTENVTAVEVNPSNRNQETSGEYNIQAWTGFNFPGRGTTYSNFKWQWFHFDGTDWDQSRSLSRIYKFTGKAWDWEVSSENGNYDYLMYADIDYDHPDVVNEMKKWGVWYANEVGLDGYRLDAVKHIKFSFLKDWVDNARAATGKEMFTVGEYWQNDLGALNNYLAKVNYNQSLFDAPLHYNFYAASTGGGYYDMRNILNNTLVASNPTKAVTLVENHDTQPGQSLESTVQPWFKPLAYAFILTRSGGYPSVFYGDMYGTKGTTTREIPALKSKIEPLLKARKDYAYGTQRDYIDNPDVIGWTREGDSTKAKSGLATVITDGPGGSKRMYVGTSNAGEIWYDLTGNRTDKITIGSDGYATFPVNGGSVSVWVQQ

SEQ ID NO: 36031 - protein, 480 aa, Cytophaga sp.
NGTMMQYFEWYVPNDGQQWNRLRTDAPYLSSVGITAVWTPPAYKGTSQADVGYGPYDLYDLGEFNQKGTVRTKYGTKGELKSAVNTLHSNGIQVYGDVVMNHKAGADYTENVTAVEVNPSNRNQETSGEYNIQAWTGFNFPGRGTTYSNFKWQWFHFDGTDWDQSKSLSRIFKFTGKAWDWEVSSENGNYDYLMYADIDYDHPDVVNEMKKWGVWYANEVGLDGYRLDAVKHIKFSFLKDWVDNARAATGKEMFTVGEYWQNDLGALNNYLAKVNYNQSLFDAPLHYNFYAASTGGGYYDMRNILNNTLVASNPTKAVTLVENHDTQPGQSLESTVQPWFKPLAYAFILTRSGGYPSVFYGDMYGTKGTTTREIPALKSKIEPLLKARKDYAYGTQRDYIDNPDVIGWTREGDSTKAKSGLATVITDGPGGSKRMYVGTSNAGEIWYDLTGNRTDKITIGSDGYATFPVNGGSVSVWVQQ

SEQ ID NO: 36032 - protein, 480 aa, Cytophaga sp.
NGTMMQYFEWYVPNDGQQWNRLRTDAPYLSSVGITAVWTPPAYKGTSQADVGYGPYDLYDLGEFNQKGTVRTKYGTKGELKSAVNTLHSNGIQVYGDVVMNHKAGADYTENVTAVEVNPSNRNQETSGEYNIQAWTGFNFPGRGTTYSNFKWQWFHFDGTDWDQSRSLSRIFKFTGKAWDWEVSSENGNYDYLMYADIDYDHPDVVNEMKKWGVWYANEVGLDGYRLDAVKHIKFSFLKDWVDNARAATGKEMFTVGEYWQNDLGALNNYLAKVNYNQSLFDAPLHYNFYAASTGGGYYDMRNILNNTLVASNPTKAVTLVENHDTQPGQSLESTVQPWFKPLAYAFILTRSGGYPSVFYGDMYGTKGTTTREIPALKSKIEPLLKARKDYAYGTQRDYIDNPDVIGWTREGDSTKAKSGLATVITDGPGGSKRMYVGTSNAGEIWYDLTGNCTDKITIGSDGYATFPVNGGSVSVWVQQ

SEQ ID NO: 36033 - protein, 480 aa, Cytophaga sp.
NGTMMQYYEWYVPNDGQQWNRLRTDAPYLSSVGITAVWTPPAYKGTSQADVGYGPYDLYDLGEFNQKGTVRTKYGTKGELKSAVNTLHSNGIQVYGDVVMNHKAGADYTENVTAVEVNPSNRNQETSGEYNIQAWTGFNFPGRGTTYSNFKWQWFHFDGTDWDQSRSLSRIFKFTGKAWDWEVSSENGNYDYLMYADIDYDHPDVVNEMKKWGVWYANEVGLDGYRLDAVKHIKFSFLKDWVDNARAATGKEMFTVGEYWQNDLGALNNYLAKVNYNQSLFDAPLHYNFYAASTGGGYYDMRNILNNTLVASNPTKAVTLVENHDTQPGQSLESTVQPWFKPLAYAFILTRSGGYPSVFYGDMYGTKGTTTREIPALKSKIEPLLKARKDYAYGTQRDYIDNPDVIGWTREGDSTKAKSGLATVITDGPGGSKRMYVGTSNAGEIWYDLTGNRTDKITIGSDGYATFPVNGGSVSVWVQQ

SEQ ID NO: 36034 - protein, 480 aa, Cytophaga sp.
NGTMMQYFEWYVPNDGQQWNRLRTDAPYLSSVGITAVWTPPAYKGTSQADVGYGPYDLYDLGEFNQKGTVRTKYGTKGELKSAVNTLHSNGIQVYGDVVMNHKAGADYTENVTAVEVNPSNRNQETSGEYNIQAWTGFNFPGRGTTYSNFKWQWFHFDGTDWDQSRSLSRIFKFTGKAWDWEVSSENGNYDYLMYADIDYDHPDVVNEMKKWGVWYANEVGLDGYRLDAVKHIKFSFLKDWVDNARAATGKEMFTVGEYWQNDLGALNNYLAKVNYNQSLFDAPLHYNFYAASTGGGYYDMRNILNNTLVASNPTKAVTLVENHDTQPGQSLESTVQPWFKPLAYAFILTRSGGYPSVFYGDMYGTKGTTTREIPALKSKIEPLLKARKDYAYGTQRDYIDNPDVIGWTREGDSTKAKSGLATVITDGPGGSKRMYVGTSNAGEIWYDLTENRTDKITIGSDGYATFPVNGGSVSVWVQQ

SEQ ID NO: 36035 - protein, 480 aa, Cytophaga sp.
NGTMMQYFEWYVPNDGQQWNRLRTDAPYLSSVGITAVWTPPAYKGTSQADVGYGPYDLYDLGEFNQKGTVRTKYGTKGELKSAVNTLHSNGIQVYGDVVMNHKAGADYTENVTAVEVNPSNRNQETSGEYNIQAWTGFNFPGRGTTYSNFKWQWFHFDGTDWDQSRSLSRIFKFTGKAWDWEVSSENGNYDYLMYADIDYDNPDVVNEMKKWGVWYANEVGLDGYRLDAVKHIKFSFLKDWVDNARAATGKEMFTVGEYWQNDLGALNNYLAKVNYNQSLFDAPLHYNFYAASTGGGYYDMRNILNNTLVASNPTKAVTLVENHDTQPGQSLESTVQPWFKPLAYAFILTRSGGYPSVFYGDMYGTKGTTTREIPALKSKIEPLLKARKDYAYGTQRDYIDNPDVIGWTREGDSTKAKSGLATVITDGPGGSKRMYVGTSNAGEIWYDLTGNRTDKITIGSDGYATFPVNGGSVSVWVQQ

SEQ ID NO: 36036 - protein, 480 aa, Cytophaga sp.
NGTMMQYFEWYVPNDGQQWNRLRTDAPYLSSVGITAVWTPPAYKGTSQADVGYGPYDLYDLGEFNQKGTVRTKYGTKGELKSAVNTLHSNGIQVYGDVVMNHKAGADYTENVTAVEVNPSNRNQETSGEYNIQAWTGFNFPGRGTTYSNFKWQWFHFDGTDWDQSRSLSRIFKFTGKAWDWEVSSENRNYDYLMYADIDYDHPDVVNEMKKWGVWYANEVGLDGYRLDAVKHIKFSFLKDWVDNARAATGKEMFTVGEYWQNDLGALNNYLAKVNYNQSLFDAPLHYNFYAASTGGGYYDMRNILNNTLVASNPTKAVTLVENHDTQPGQSLESTVQPWFKPLAYAFILTRSGGYPSVFYGDMYGTKGTTTREIPALKSKIEPLLKARKDYAYGTQRDYIDNPDVIGWTREGDSTKAKSGLATVITDGPGGSKRMYVGTSNAGEIWYDLTGNRTDKITIGSDGYATFPVNGGSVSVWVQQ

SEQ ID NO: 36037 - protein, 480 aa, Cytophaga sp.
NGTMMQYFEWYVPNDGQQWNRLRTDAPYLSSVGITAVWTPPAYKGTSQADVGYGPYDLYDLGEFNQKGTVRTKYGTKGELKSAVNTLHSNGIQVYGDVVMNHKAGADYTENVTAVEVNPSNRNQETSGEYNIQAWTGFNFPGRGTTYSNFKWQWFHFDGTDFDQSRSLSRIFKFTGKAWDWEVSSENGNYDYLMYADIDYDHPDVVNEMKKWGVWYANEVGLDGYRLDAVKHIKFSFLKDWVDNARAATGKEMFTVGEYWQNDLGALNNYLAKVNYNQSLFDAPLHYNFYAASTGGGYYDMRNILNNTLVASNPTKAVTLVENHDTQPGQSLESTVQPWFKPLAYAFILTRSGGYPSVFYGDMYGTKGTTTREIPALKSKIEPLLKARKDYAYGTQRDYIDNPDVIGWTREGDSTKAKSGLATVITDGPGGSKRMYVGTSNAGEIWYDLTGNRTDKITIGSDGYATFPVNGGSVSVWVQQ

SEQ ID NO: 36038 - protein, 480 aa, Cytophaga sp.
NGTMMQYFEWYVPNDGQQWNRLRTDAPYLSSVGITAVWTPPAYKGTSQADVGYGPYDLYDLGEFNQKGTVRTKYGTKGELKSAVNTLHSNGIQVYGDVVMNHKAGADYTENVTAVEVNPSNRNQETSGEYNIQAWTGFNFPGRGTTYSNFKWQWFHFDGTDWDQSRSLSRIFKFTGKAWDWEVSSENGNYDYLMYADIDYDHPDVVNEMKKWGVWYANEVGLDGYRLDAVKHIKFSFLKDWVDNARAATGKEMFTVGEYWQNDLGALNNYLAKVNYNQSLFDAPLHYNFYAASTGGGYYDMRNILNNTLVASNPTKAVTLVENHDTQPGQSLESTVQPWFKPLAYAFILTRSGGYPSVFYGDMYGTKGTTTREIPALKSKIEPLLKARKDYAYGTQRDYIDNPDVIGWTREGDSTKAKSGLATVITDGPGGSKRMYVGTSNAWEIWYDLTGNRTDKITIGSDGYATFPVNGGSVSVWVQQ

SEQ ID NO: 36039 - protein, 480 aa, Cytophaga sp.
NGTMMQYFEWYVPNDGQQWNRLRTDAPYLSSVGITAVWTPPAYKGTSQADVGYGPYDLYDLGEFNQKGTVRTKYGTKGELKSAVNTLHSNGIQVYGDVVMNHKAGADYTENVTAVEVNPSNRNQETSGEYNIQAWTGFNFPGRGTTYSNFKWQWFHFDGTDWDQSRSLSRIFKFTGKAWDWEVSSENGNYDYLMYADIDYDHPDVVNEMKKWGVWYANEVGLDGYRLDAVKHIKFWFLKDWVDNARAATGKEMFTVGEYWQNDLGALNNYLAKVNYNQSLFDAPLHYNFYAASTGGGYYDMRNILNNTLVASNPTKAVTLVENHDTQPGQSLESTVQPWFKPLAYAFILTRSGGYPSVFYGDMYGTKGTTTREIPALKSKIEPLLKARKDYAYGTQRDYIDNPDVIGWTREGDSTKAKSGLATVITDGPGGSKRMYVGTSNAGEIWYDLTGNRTDKITIGSDGYATFPVNGGSVSVWVQQ

SEQ ID NO: 36040 - protein, 480 aa, Cytophaga sp.
NGTMMQYFEWYVPNDGQQWNRLRTDAPYLSSVGITAVWTPPAYKGTSQADVGYGPYDLYDLGEFNQKGTVRTKYGTKGELKSAVNTLHSNGIQVYGDVVMNHKAGADYTENVTAVEVNPSNRNQETSGEYNIQAWTGFNFPGRGTTYSNFKWQWFHFDGTDWDQSRSLSRIFKFTGKAWDWEVDSENGNYDYLMYADIDYDHPDVVNEMKKWGVWYANEVGLDGYRLDAVKHIKFSFLKDWVDNARAATGKEMFTVGEYWQNDLGALNNYLAKVNYNQSLFDAPLHYNFYAASTGGGYYDMRNILNNTLVASNPTKAVTLVENHDTQPGQSLESTVQPWFKPLAYAFILTRSGGYPSVFYGDMYGTKGTTTREIPALKSKIEPLLKARKDYAYGTQRDYIDNPDVIGWTREGDSTKAKSGLATVITDGPGGSKRMYVGTSNAGEIWYDLTGNRTDKITIGSDGYATFPVNGGSVSVWVQQ

SEQ ID NO: 36041 - protein, 480 aa, Cytophaga sp.
NGTMMQYFEWYVPNDGQQWNRLRTDAPYLSSVGITAVWTPPAYKGTSQADVGYGPYDLYDLGEFNQKGTVRTKYGTKGELKSAVNTLHSNGIQVYGDVVMNHKAGADYTENVTAVEVNPSNRNQETSGEYNIQAWTGFNFPGRGTTYSNFNWQWFHFDGTDWDQSRSLSRIFKFTGKAWDWEVSSENGNYDYLMYADIDYDHPDVVNEMKKWGVWYANEVGLDGYRLDAVKHIKFSFLKDWVDNARAATGKEMFTVGEYWQNDLGALNNYLAKVNYNQSLFDAPLHYNFYAASTGGGYYDMRNILNNTLVASNPTKAVTLVENHDTQPGQSLESTVQPWFKPLAYAFILTRSGGYPSVFYGDMYGTKGTTTREIPALKSKIEPLLKARKDYAYGTQRDYIDNPDVIGWTREGDSTKAKSGLATVITDGPGGSKRMYVGTSNAGEIWYDLTGNRTDKITIGSDGYATFPVNGGSVSVWVQQ

SEQ ID NO: 36042 - protein, 480 aa, Cytophaga sp.
NGTMMQYFEWYVPNDGQQWNRLRTDAPYLSSVGITAVWTPPAYKGTSQADVGYGPYDLYDLGEFNQKGTVRTKYGTKGELKSAVNTLHSNGIQVYGDVVMNHKAGADYTENVTAVEVNPSNRNQETSGEYNIQAWTGFNFPGRGTTYSNFKWQWFHFDGTDWDQWRSLSRIFKFTGKAWDWEVSSENGNYDYLMYADIDYDHPDVVNEMKKWGVWYANEVGLDGYRLDAVKHIKFSFLKDWVDNARAATGKEMFTVGEYWQNDLGALNNYLAKVNYNQSLFDAPLHYNFYAASTGGGYYDMRNILNNTLVASNPTKAVTLVENHDTQPGQSLESTVQPWFKPLAYAFILTRSGGYPSVFYGDMYGTKGTTTREIPALKSKIEPLLKARKDYAYGTQRDYIDNPDVIGWTREGDSTKAKSGLATVITDGPGGSKRMYVGTSNAGEIWYDLTGNRTDKITIGSDGYATFPVNGGSVSVWVQQ

SEQ ID NO: 36043 - protein, 480 aa, Cytophaga sp.
NGTMMQYFEWYVPNDGQQWNRLRTDAPYLSSVGITAVWTPPAYKGTSQADVGYGPYDLYDLGEFNQKGTVRTKYGTKGELKSAVNTLHSNGIQVYGDVVMNHKAGADYTENVTAVEVNPSNRNQETSGEYNIQAWTGFNFPGRGTTYSNFKWQWFHFDGTDWDQRRSLSRIFKFTGKAWDWEVSSENGNYDYLMYADIDYDHPDVVNEMKKWGVWYANEVGLDGYRLDAVKHIKFSFLKDWVDNARAATGKEMFTVGEYWQNDLGALNNYLAKVNYNQSLFDAPLHYNFYAASTGGGYYDMRNILNNTLVASNPTKAVTLVENHDTQPGQSLESTVQPWFKPLAYAFILTRSGGYPSVFYGDMYGTKGTTTREIPALKSKIEPLLKARKDYAYGTQRDYIDNPDVIGWTREGDSTKAKSGLATVITDGPGGSKRMYVGTSNAGEIWYDLTGNRTDKITIGSDGYATFPVNGGSVSVWVQQ

SEQ ID NO: 36044 - protein, 480 aa, Cytophaga sp.
NGTMMQYFEWYVPNDGQQWNRLRTDAPYLSSVGITAVWTPPAYKGTSQADVGYGPYDLYDLGEFNQKGTVRTKYGTKGELKSAVNTLHSNGIQVYGDVVMNHKAGADYTENVTAVEVNPSNRNQETSGEYNIQAWTGFNFPGRGTTYSNFKWQWFHFDGTDWDQSRSLSRIFKFTGKAWDWEVSSENGNYDYLMYADIDYDHPDVVNEMKKWGVWYANEVGLDGYRLDAVKHIKFSFLKDWVDNARAATGKEMFTVGEYWQNDLGALNNYLAKVNYNQSLFDAPLHYNFYAASTGGGYYDMRNILNNTLVASNPTKAVTLVENHDTQPGQSLESTVQPWFKPLAYAFILTRSGGYPSVFYGDMYGTKGTTTREIPALKSKIEPLLKARKDYAYGTQRDYIDNPDVIGWTREGDSTKAKSGLATVITDGPGGSKRMYVGTSNAGEIWYDLTKNRTDKITIGSDGYATFPVNGGSVSVWVQQ

SEQ ID NO: 36045 - protein, 480 aa, Cytophaga sp.
NGTMMQYFEWYVPNDGQQWNRLRTDAPYLSSVGITAVWTPPAYKGTSQADVGYGPYDLYDLGEFNQKGTVRTKYGTKGELKSAVNTLHSNGIQVYGDVVMNHKAGADYTENVTAVEVNPSNRNQETSGEYNIQAWTGFNFPGRGTTYSNFKWQWFHFDGTDWDQSRSLSRIFKFTGKAWDWEVSSENGNYDYLMYADIDYDKPDVVNEMKKWGVWYANEVGLDGYRLDAVKHIKFSFLKDWVDNARAATGKEMFTVGEYWQNDLGALNNYLAKVNYNQSLFDAPLHYNFYAASTGGGYYDMRNILNNTLVASNPTKAVTLVENHDTQPGQSLESTVQPWFKPLAYAFILTRSGGYPSVFYGDMYGTKGTTTREIPALKSKIEPLLKARKDYAYGTQRDYIDNPDVIGWTREGDSTKAKSGLATVITDGPGGSKRMYVGTSNAGEIWYDLTGNRTDKITIGSDGYATFPVNGGSVSVWVQQ

SEQ ID NO: 36046 - protein, 480 aa, Cytophaga sp.
NGTMMQYFEWYVPNDGQQWNRLRTDAPYLSSVGITAVWTPPAYKGTSQADVGYGPYDLYDLGEFNQKGTVRTKYGTKGELKSAVNTLHSNGIQVYGDVVMNHKAGADYTENVTAVEVNPSNRNQETSGEYNIQAWTGFNFPGRGTTYSNFKWQWFHFDGTDWDQSRSLSRIFKFTGKAWDWEVSSENGNYDYLMYADIDYDHPDVVNEMKKWGVWYANEVGLDGYRLDAVKHIKFSFLKDWVDNARAATGKEMFTVGEYWQNDLGALNNYLAKVNYNQSLFDAPLHYNFYAASTGKGYYDMRNILNNTLVASNPTKAVTLVENHDTQPGQSLESTVQPWFKPLAYAFILTRSGGYPSVFYGDMYGTKGTTTREIPALKSKIEPLLKARKDYAYGTQRDYIDNPDVIGWTREGDSTKAKSGLATVITDGPGGSKRMYVGTSNAGEIWYDLTGNRTDKITIGSDGYATFPVNGGSVSVWVQQ

SEQ ID NO: 36047 - protein, 480 aa, Cytophaga sp.
NGTMMQYFEWYVPNDGQQWNRLRTDAPYLSSVGITAVWTPPAYKGTSQADVGYGPYDLYDLGEFNQKGTVRTKYGTKGELKSAVNTLHSNGIQVYGDVVMNHKAGADYTENVTAVEVNPSNRNQETSGEYNIQAWTGFNFPGRGTTYSNFKWQWFHFDGTDWDQSRSLSRIFKFTGKAWDWEVSSENGNYDYLMYADIDYDHPDVVNEMKKWGVWYANEVGLDGYRLDAVKHIKFSFLKDWVDNARAATGKEMFTVGEYWQNDLGALNNYLAKVNYNQSLFDAPLHYNFYAASTGGGYYDMRNILNNTLVASNPTKAVTLVENHDTQPGQSLESTVQPWFKPLAYAFILTRSGGYPSVFYGDMYGTKGTTTREIPALKSKIEPLLKARKDYAYGTQRDYIDNPDVIGWTREGLSTKAKSGLATVITDGPGGSKRMYVGTSNAGEIWYDLTGNRTDKITIGSDGYATFPVNGGSVSVWVQQ

SEQ ID NO: 36048 - protein, 480 aa, Cytophaga sp.
NGTMMQYFEWYVPNDGQQWNRLRTDAPYLSSVGITAVWTPPAYKGTSQADVGYGPYDLYDLGEFNQKGTVRTKYGTKGELKSAVNTLHSNGIQVYGDVVMNHKAGADYTENVTAVEVNPSNRNQETSGEYNIQAWTGFNFPGRGTTYSNFKWQWFHFDGTDWDQSRSLSRIFKFTGKAWDWEVSSENGNYDYLMYADIDYDHPDVVNEMKKWGVWYANEVGLDGYRLDAVKHIKFSFLKDWVDNARAATGKEMFTVGEYWQNDLGALNNYLAKVNYNQSLFDAPLHYNFYAASTGGGYYDMRNILNNTLVASNPTKAVTLVENHDTQPGQSLEQTVQPWFKPLAYAFILTRSGGYPSVFYGDMYGTKGTTTREIPALKSKIEPLLKARKDYAYGTQRDYIDNPDVIGWTREGDSTKAKSGLATVITDGPGGSKRMYVGTSNAGEIWYDLTGNRTDKITIGSDGYATFPVNGGSVSVWVQQ

SEQ ID NO: 36049 - protein, 480 aa, Cytophaga sp.
NGTMMQYFEWYVPNDGQQWNRLRTDAPYLSSVGITAVWTPPAYKGTSQADVGYGPYDLYDLGEFNQKGTVRTKYGTKGELKSAVNTLHSNGIQVYGDVVMNHKAGADYTENVTSVEVNPSNRNQETSGEYNIQAWTGFNFPGRGTTYSNFKWQWFHFDGTDWDQSRSLSRIFKFTGKAWDWEVSSENGNYDYLMYADIDYDHPDVVNEMKKWGVWYANEVGLDGYRLDAVKHIKFSFLKDWVDNARAATGKEMFTVGEYWQNDLGALNNYLAKVNYNQSLFDAPLHYNFYAASTGGGYYDMRNILNNTLVASNPTKAVTLVENHDTQPGQSLESTVQPWFKPLAYAFILTRSGGYPSVFYGDMYGTKGTTTREIPALKSKIEPLLKARKDYAYGTQRDYIDNPDVIGWTREGDSTKAKSGLATVITDGPGGSKRMYVGTSNAGEIWYDLTGNRTDKITIGSDGYATFPVNGGSVSVWVQQ

SEQ ID NO: 36050 - protein, 480 aa, Cytophaga sp.
NGTMMQYFEWYVPNDGQQWNRLRTDAPYLSSVGITAVWTPPAYKGTSQADVGYGPYDLYDLGEFNQKGTVRTKYGTKGELKSAVNTLHSNGIQVYGDVVMNHKAGADYTENVTAVEVNPSNRNYETSGEYNIQAWTGFNFPGRGTTYSNFKWQWFHFDGTDWDQSRSLSRIFKFTGKAWDWEVSSENGNYDYLMYADIDYDHPDVVNEMKKWGVWYANEVGLDGYRLDAVKHIKFSFLKDWVDNARAATGKEMFTVGEYWQNDLGALNNYLAKVNYNQSLFDAPLHYNFYAASTGGGYYDMRNILNNTLVASNPTKAVTLVENHDTQPGQSLESTVQPWFKPLAYAFILTRSGGYPSVFYGDMYGTKGTTTREIPALKSKIEPLLKARKDYAYGTQRDYIDNPDVIGWTREGDSTKAKSGLATVITDGPGGSKRMYVGTSNAGEIWYDLTGNRTDKITIGSDGYATFPVNGGSVSVWVQQ

SEQ ID NO: 36051 - protein, 480 aa, Cytophaga sp.
NGTMMQYFEWYVPNDGQQWNRLRTDAPYLSSVGITAVWTPPAYKGTSQADVGYGPYDLYDLGEFNQKGTVRTKYGTKGELKSAVNTLHSNGIQVYGDVVMNHKAGADYTENVTAVEVNPSNRNQETSGEYNIQAWTGFNFPGRGTTYSNFKWQWFHFDGTDWDQSRSLSRIFKFTGKAWDWEVSSENGNYDYLMYADIDYDHPDVVNEMKKWGVWYANEVGLDGYRLDAVKHIKFSFLKDWVDNARAATGKEMFTVGEYWQNDLGALNNYLAKVNYNQSLFDAPLHYNFYAASTGGGYYDMRNILNNTLVASNPTKAVTLVENHDTQPGQSLESTVQPWFKPLAYAFILTRSGGYPSVFYGDMYGTKGTTTREIPALKSKIEPLLKARKDYAYGTQRDYIDNPDVIGWTREGDGTKAKSGLATVITDGPGGSKRMYVGTSNAGEIWYDLTGNRTDKITIGSDGYATFPVNGGSVSVWVQQ

SEQ ID NO: 36052 - protein, 480 aa, Cytophaga sp.
NGTMMQYFEWYVPNDGQQWNRLRTDAPYLSSVGITAVWTPPAYKGTSQADVGYGPYDLYDLGEFNQKGTVRTKYGTKGELKSAVNTLHSNGIQVYGDVVMNHKAGADYTENVTAVEVNPSNRNQETSGEYNIQAWTGFNFPGRGTTYSNFKWQWFHFDGTDWDQSRSLSRIFKFTGKAWDWEVSSENGNYDYLMYADIDYDHPDVVNEMKKWGVWYANEVGLDGYRLDAVKHIKFSFLKDWVDNARAATGKEMFTVGEYWQNDLGALNNYLAKVNYNQSLFDAPLHYNFYAASTGGGYYDMRNILNNTLVASNPTKAVTLVENHDTQPGQSLESTVQPWFKPLAYAFILTRSGGYPSVFYGDMYGTKGTTTREIPALKSKIEPLLKARKDYAYGTQRDYIDNPDVIGWTREGDVTKAKSGLATVITDGPGGSKRMYVGTSNAGEIWYDLTGNRTDKITIGSDGYATFPVNGGSVSVWVQQ

SEQ ID NO: 36053 - protein, 480 aa, Cytophaga sp.
NGTMMQYFEWYVPNDGQQWNRLRTDAPYLSSVGITAVWTPPAYKGTSQADVGYGPYDLYDLGEFNQKGTVRTKYGTKGELKSAVNTLHSNGIQVYGDVVMNHKAGADYTENVTAVEVNPSNRNQETSGEYNIQAWTGFNFPGRGTTYSNFKWQWFHFDGTDWDQVRSLSRIFKFTGKAWDWEVSSENGNYDYLMYADIDYDHPDVVNEMKKWGVWYANEVGLDGYRLDAVKHIKFSFLKDWVDNARAATGKEMFTVGEYWQNDLGALNNYLAKVNYNQSLFDAPLHYNFYAASTGGGYYDMRNILNNTLVASNPTKAVTLVENHDTQPGQSLESTVQPWFKPLAYAFILTRSGGYPSVFYGDMYGTKGTTTREIPALKSKIEPLLKARKDYAYGTQRDYIDNPDVIGWTREGDSTKAKSGLATVITDGPGGSKRMYVGTSNAGEIWYDLTGNRTDKITIGSDGYATFPVNGGSVSVWVQQ

SEQ ID NO: 36054 - protein, 480 aa, Cytophaga sp.
NGTMMQYFEWYVPNDGQQWNRLRTDAPYLSSVGITAVWTPPAYKGTSQADVGYGPYDLYDLGEFNQKGTVRTKYGTKGELKSAVNTLHSNGIQVYGDVVMNHKAGADYTENVTAVEVNPSNRNQETSGEYNIQAWTGFNFPGRGTTYSNFTWQWFHFDGTDWDQSRSLSRIFKFTGKAWDWEVSSENGNYDYLMYADIDYDHPDVVNEMKKWGVWYANEVGLDGYRLDAVKHIKFSFLKDWVDNARAATGKEMFTVGEYWQNDLGALNNYLAKVNYNQSLFDAPLHYNFYAASTGGGYYDMRNILNNTLVASNPTKAVTLVENHDTQPGQSLESTVQPWFKPLAYAFILTRSGGYPSVFYGDMYGTKGTTTREIPALKSKIEPLLKARKDYAYGTQRDYIDNPDVIGWTREGDSTKAKSGLATVITDGPGGSKRMYVGTSNAGEIWYDLTGNRTDKITIGSDGYATFPVNGGSVSVWVQQ

SEQ ID NO: 36055 - protein, 480 aa, Cytophaga sp.
NGTMMQYFEWYVPNDGQQWNRLRTDAPYLSSVGITAVWTPPAYKGTSQADVGYGPYDLYDLGEFNQKGTVRTKYGTKGELKSAVNTLHSNGIQVYGDVVMNHKAGADYTENVTAVEVNPSNRNQETSGEYNIQAWTGFNFPGRGTTYSNFKWQWFHFDGTDWDQSRSLSRIFKFTGKAWDWEVSSINGNYDYLMYADIDYDHPDVVNEMKKWGVWYANEVGLDGYRLDAVKHIKFSFLKDWVDNARAATGKEMFTVGEYWQNDLGALNNYLAKVNYNQSLFDAPLHYNFYAASTGGGYYDMRNILNNTLVASNPTKAVTLVENHDTQPGQSLESTVQPWFKPLAYAFILTRSGGYPSVFYGDMYGTKGTTTREIPALKSKIEPLLKARKDYAYGTQRDYIDNPDVIGWTREGDSTKAKSGLATVITDGPGGSKRMYVGTSNAGEIWYDLTGNRTDKITIGSDGYATFPVNGGSVSVWVQQ

SEQ ID NO: 36056 - protein, 480 aa, Cytophaga sp.
NGTMMQYFEWYVPNDGQQWNRLRTDAPYLSSVGITAVWTPPAYKGTSQADVGYGPYDLYDLGEFNQKGTVRTKYGTKGELKSAVNTLHSNGIQVYGDVVMNHKAGADYTENVTAVEVNPSNRNQETSGEYNIQAWTGFNFPGRGTTYSNFKWQWFHFDGTDWDQSRSLSRIFKFTGKRWDWEVSSENGNYDYLMYADIDYDHPDVVNEMKKWGVWYANEVGLDGYRLDAVKHIKFSFLKDWVDNARAATGKEMFTVGEYWQNDLGALNNYLAKVNYNQSLFDAPLHYNFYAASTGGGYYDMRNILNNTLVASNPTKAVTLVENHDTQPGQSLESTVQPWFKPLAYAFILTRSGGYPSVFYGDMYGTKGTTTREIPALKSKIEPLLKARKDYAYGTQRDYIDNPDVIGWTREGDSTKAKSGLATVITDGPGGSKRMYVGTSNAGEIWYDLTGNRTDKITIGSDGYATFPVNGGSVSVWVQQ

SEQ ID NO: 36057 - protein, 480 aa, Cytophaga sp.
NGTMMQYFEWYVPNDGQQWNRLRTDAPYLSSVGITAVWTPPAYKGTSQADVGYGPYDLYDLGEFNQKGTVRTKYGTKGELKSAVNTLHSNGIQVYGDVVMNHKAGADYTENVTAVEVNPSNRNQETSGEYNIQAWTGFNFPGRGTTYSNFKWQWFHFDGTDWDQSRSLSRIFKFTGKAWDWEVSSENGNYDYLMYADIDYDHPDVVNEMKKWGVWYANEVGLDGYRLDAVKHIKFSFLKDWVDNARAATGKEMFTVGEYWQNDLGALNNYLAKVNYNQSLFDAPLHYNFYAASTGGGYYDMRNILNNTLVASNPTKAVTLVENHDTQPGQSLESTVQPWFKPLAYAFILTRSGGYPSVFYGDMYGTKGTTTREIPALKSKIEPLLKARKDYAYGTQRDYIDNPDVIGWTREGDSTKAKSGLATVITDGPGGSKRMYVGTSNAGEIWYDLTGNRTDKITIGHDGYATFPVNGGSVSVWVQQ

SEQ ID NO: 36058 - protein, 480 aa, Cytophaga sp.
NGTMMQYFEWYVPNDGQQWNRLRTDAPYLSSVGITAVWTPPAYKGTSQADVGYGPYDLYDLGEFNQKGTVRTKYGTKGELKSAVNTLHSNGIQVYGDVVMNHKAGADYTENVTAVEVNPSNRNQETSGEYNIQAWTGFNFPGRGTTYSNFKWQWFHFDGTDWDQSRSLSRIFKFTGKAWDWEVSSENGNYDYLMYADIDYDHPDVVNEMKKWGVWYANEVGLDGYRLDAVKHIKFSFLKDWVDNARAATGKEMFTVGEYWQNDLGALNNYLAKVNYNQSLFDAPLHYNFYAASTGGGYYDMRNILNNTLVASNPTKAVTLVENHDTQPGQSLESTVQPWFKPLAYAFILTRSGGYPSVFYGDMYGTKGTTTREIPALKSKIEPLLKARKDYAYGTQRDYIDNPDVIGWTREGDSTKAKSGLATVMTDGPGGSKRMYVGTSNAGEIWYDLTGNRTDKITIGSDGYATFPVNGGSVSVWVQQ

SEQ ID NO: 36059 - protein, 480 aa, Cytophaga sp.
NGTMMQYFEWYVPNDGQQWNRLRTDAPYLSSVGITAVWTPPAYKGTSQADVGYGPYDLYDLGEFNQKGTVRTKYGTKGELKSAVNTLHSNGIQVYGDVVMNHKAGADYTENVTAVEVNPSNRNQETSGEYNIQAWTGFNFPGRGTTYSNFKWQWFHFDGTDWDQSRSLARIFKFTGKAWDWEVSSENGNYDYLMYADIDYDHPDVVNEMKKWGVWYANEVGLDGYRLDAVKHIKFSFLKDWVDNARAATGKEMFTVGEYWQNDLGALNNYLAKVNYNQSLFDAPLHYNFYAASTGGGYYDMRNILNNTLVASNPTKAVTLVENHDTQPGQSLESTVQPWFKPLAYAFILTRSGGYPSVFYGDMYGTKGTTTREIPALKSKIEPLLKARKDYAYGTQRDYIDNPDVIGWTREGDSTKAKSGLATVITDGPGGSKRMYVGTSNAGEIWYDLTGNRTDKITIGSDGYATFPVNGGSVSVWVQQ

SEQ ID NO: 36060 - protein, 480 aa, Cytophaga sp.
NGTMMQYFEWYVPNDGQQWNRLRTDAPYLSSVGITAVWTPPAYKGTSQADVGYGPYDLYDLGEFNQKGTVRTKYGTKGELKSAVNTLHSNGIQVYGDVVMNHKAGADYTENVTAREVNPSNRNQETSGEYNIQAWTGFNFPGRGTTYSNFKWQWFHFDGTDWDQSRSLSRIFKFTGKAWDWEVSSENGNYDYLMYADIDYDHPDVVNEMKKWGVWYANEVGLDGYRLDAVKHIKFSFLKDWVDNARAATGKEMFTVGEYWQNDLGALNNYLAKVNYNQSLFDAPLHYNFYAASTGGGYYDMRNILNNTLVASNPTKAVTLVENHDTQPGQSLESTVQPWFKPLAYAFILTRSGGYPSVFYGDMYGTKGTTTREIPALKSKIEPLLKARKDYAYGTQRDYIDNPDVIGWTREGDSTKAKSGLATVITDGPGGSKRMYVGTSNAGEIWYDLTGNRTDKITIGSDGYATFPVNGGSVSVWVQQ

SEQ ID NO: 36061 - protein, 480 aa, Cytophaga sp.
NGTMMQYFEWYVPNDGQQWNRLRTDAPYLSSVGITAVWTPPAYKGTSQADVGYGPYDLYDLGEFNQKGTVRTKYGTKGELKSAVNTLHSNGIQVYGDVVMNHKAGADYTENVSAVEVNPSNRNQETSGEYNIQAWTGFNFPGRGTTYSNFKWQWFHFDGTDWDQSRSLSRIFKFTGKAWDWEVSSENGNYDYLMYADIDYDHPDVVNEMKKWGVWYANEVGLDGYRLDAVKHIKFSFLKDWVDNARAATGKEMFTVGEYWQNDLGALNNYLAKVNYNQSLFDAPLHYNFYAASTGGGYYDMRNILNNTLVASNPTKAVTLVENHDTQPGQSLESTVQPWFKPLAYAFILTRSGGYPSVFYGDMYGTKGTTTREIPALKSKIEPLLKARKDYAYGTQRDYIDNPDVIGWTREGDSTKAKSGLATVITDGPGGSKRMYVGTSNAGEIWYDLTGNRTDKITIGSDGYATFPVNGGSVSVWVQQ

SEQ ID NO: 36062 - protein, 480 aa, Cytophaga sp.
NGTMMQYFEWYVPNDGQQWNRLRTDAPYLSSVGITAVWTPPAYKGTSQADVGYGPYDLYDLGEFNQKGTVRTKYGTKGELKSAVNTLHSNGIQVYGDVVMNHKAGADYTENVTAVEVNPSNRNQETSGEYNIQAWTGFNFPGRGTTYSNFKWQWFHFDGTDWDQSRSLSRIFKFTGKAWDWEVSSENGNYDYLMYADIDYDHPDVENEMKKWGVWYANEVGLDGYRLDAVKHIKFSFLKDWVDNARAATGKEMFTVGEYWQNDLGALNNYLAKVNYNQSLFDAPLHYNFYAASTGGGYYDMRNILNNTLVASNPTKAVTLVENHDTQPGQSLESTVQPWFKPLAYAFILTRSGGYPSVFYGDMYGTKGTTTREIPALKSKIEPLLKARKDYAYGTQRDYIDNPDVIGWTREGDSTKAKSGLATVITDGPGGSKRMYVGTSNAGEIWYDLTGNRTDKITIGSDGYATFPVNGGSVSVWVQQ

SEQ ID NO: 36063 - protein, 480 aa, Cytophaga sp.
NGTMMQYFEWYVPNDGQQWNRLRTDAPYLSSVGITAVWTPPAYKGTSQADVGYGPYDLYDLGEFNQKGTVRTKYGTKGELKSAVNTLHSNGIQVYGDVVMNHKAGADYTENVTAVEVNPSNRNQETSGEYNIQAWTGFNFPGRGTTYSNFKWQWFHFDGTDWDQSRSLSRIFKFTGKAWDWEVSSENGNYDYLMYADIDYDHPDVVNEMKKWGVWYANEVGLDGYRLDAVKHIKFSFLKDWVDNARAATGKEMFTVGEYWQNDLGALNNYLAKVNYNQSLFDAPLHYNFYAASTGGGYYDMRNILNNTLVASNPTKAVTLVENHDTQPGQSLESTVQPWFKPLAYAFILTRSGGYPSVFYGDMYGTKGTTTREIPALKSKIEPLLKARKDYAYGTQRDYIDNPDVIGWTREGDSTKAKSGLATVITDGPGGSKRMYVGTSNQGEIWYDLTGNRTDKITIGSDGYATFPVNGGSVSVWVQQ

SEQ ID NO: 36064 - protein, 480 aa, Cytophaga sp.
NGTMMQYFEWYVPNDGQQWNRLRTDAPYLSSVGITAVWTPPPYKGTSQADVGYGPYDLYDLGEFNQKGTVRTKYGTKGELKSAVNTLHSNGIQVYGDVVMNHKAGADYTENVTAVEVNPSNRNQETSGEYNIQAWTGFNFPGRGTTYSNFKWQWFHFDGTDWDQSRSLSRIFKFTGKAWDWEVSSENGNYDYLMYADIDYDHPDVVNEMKKWGVWYANEVGLDGYRLDAVKHIKFSFLKDWVDNARAATGKEMFTVGEYWQNDLGALNNYLAKVNYNQSLFDAPLHYNFYAASTGGGYYDMRNILNNTLVASNPTKAVTLVENHDTQPGQSLESTVQPWFKPLAYAFILTRSGGYPSVFYGDMYGTKGTTTREIPALKSKIEPLLKARKDYAYGTQRDYIDNPDVIGWTREGDSTKAKSGLATVITDGPGGSKRMYVGTSNAGEIWYDLTGNRTDKITIGSDGYATFPVNGGSVSVWVQQ

SEQ ID NO: 36065 - protein, 480 aa, Cytophaga sp.
NGTMMQYFEWYVPNDGQQWNRLRTDAPYLSSVGITAVWTPPAYKGTSQADVGYGPYDLYDLGEFNQKGTVRTKYGTKGELKSAVNTLHSNGIQVYGDVVMNHKAGADYTENVTAVEVNPSNRNQETSGEYNIQAWTGFNFHGRGTTYSNFKWQWFHFDGTDWDQSRSLSRIFKFTGKAWDWEVSSENGNYDYLMYADIDYDHPDVVNEMKKWGVWYANEVGLDGYRLDAVKHIKFSFLKDWVDNARAATGKEMFTVGEYWQNDLGALNNYLAKVNYNQSLFDAPLHYNFYAASTGGGYYDMRNILNNTLVASNPTKAVTLVENHDTQPGQSLESTVQPWFKPLAYAFILTRSGGYPSVFYGDMYGTKGTTTREIPALKSKIEPLLKARKDYAYGTQRDYIDNPDVIGWTREGDSTKAKSGLATVITDGPGGSKRMYVGTSNAGEIWYDLTGNRTDKITIGSDGYATFPVNGGSVSVWVQQ

SEQ ID NO: 36066 - protein, 480 aa, Cytophaga sp.
NGTMMQYFEWYVPNDGQQWNRLRTDAPYLSSVGITAVWTPPAYKGTSQADVGYGPYDLYDLGEFNQKGTVRTKYGTKGELKSAVNTLHSNGIQVYGDVVMNHKAGADYTENVTAVEVNPSNRNQETSGEYNIQAWTGFNFPGRGTTYSNFKWQWFHFDGTDWDQSRSLSRIFKFTGKAWDWEVSSENGNYDYLMYADIDYDHPDVVNEMKKWGVWYANEVGLDGYRLDAVKHIKFSFLKDWVDNARAATGKEMFTVGEYWQNDLGALNNYLAKVNYNQSLFDAPLHYNFYAASTGGGYYDMRNILNNTLVASNPTKAVTLVENHDTQPGQSLESTVQPWFKPLAYAFILTRSGGYPSVFYGDMYGTKGTTTREIPALKSKIEPLLKARKDYAYGTQRDYIDNPDVIGWTREGDSTKAKSGLATVITDGPRGSKRMYVGTSNAGEIWYDLTGNRTDKITIGSDGYATFPVNGGSVSVWVQQ

SEQ ID NO: 36067 - protein, 480 aa, Cytophaga sp.
NITMMQYFEWYVPNDGQQWNRLRTDAPYLSSVGITAVWTPPAYKGTSQADVGYGPYDLYDLGEFNQKGTVRTKYGTKGELKSAVNTLHSNGIQVYGDVVMNHKAGADYTENVTAVEVNPSNRNQETSGEYNIQAWTGFNFPGRGTTYSNFKWQWFHFDGTDWDQSRSLSRIFKFTGKAWDWEVSSENGNYDYLMYADIDYDHPDVVNEMKKWGVWYANEVGLDGYRLDAVKHIKFSFLKDWVDNARAATGKEMFTVGEYWQNDLGALNNYLAKVNYNQSLFDAPLHYNFYAASTGGGYYDMRNILNNTLVASNPTKAVTLVENHDTQPGQSLESTVQPWFKPLAYAFILTRSGGYPSVFYGDMYGTKGTTTREIPALKSKIEPLLKARKDYAYGTQRDYIDNPDVIGWTREGDSTKAKSGLATVITDGPGGSKRMYVGTSNAGEIWYDLTGNRTDKITIGSDGYATFPVNGGSVSVWVQQ

SEQ ID NO: 36068 - protein, 480 aa, Cytophaga sp.
NGTMMQYFEWYVPNDGQQWNRLRTDAPYLSSVGITAVWTPPAYKGTSQADVGYGPYDLYDLGEFNQKGTVRTKYGTKGELKSAVNTLHSNGIQVYGDVVMNHKAGADYTENVTAVEVNPSNRNQETSGEYNIQAWTGFNFPGRGTTYSNFKWQWFHFDGTDWDQSRSLSRIFKFTGKAWDWEVSSENGNYDYLMYADIDYDHPDVVNEMKKWGVWYANEVGLDGYRLDAVKHIKFSFLKDWVDNARAATGKEMFTVGEYWQNDLGALNNYLAKVNYNQSLFDAPLHYNFYAASTGGGYYDMRNILNNTLVASNPTKAVTLVENHDTQPGQSLESTVQPWFKPLAYAFILTRSGGYPSVFYGDMYGTKGTTTREIPALKSKIEILLKARKDYAYGTQRDYIDNPDVIGWTREGDSTKAKSGLATVITDGPGGSKRMYVGTSNAGEIWYDLTGNRTDKITIGSDGYATFPVNGGSVSVWVQQ

SEQ ID NO: 36069 - protein, 480 aa, Cytophaga sp.
NGTMMQYFEWYVPNDGQQWNRLRTDAPYLSSVGITAVWTPPAYKGTSQADVGYGPYDLYDLGEFNQKGTVRTKYGTKGELKSAVNTLHSNGIQVYGDVVMNHKAGADYTENVTAVEVNPSNRNQETSGEYNIQAWTGFNFPGRGTTYSNFKWQWFHFDGTDWDQSRSLSRIFKFTGKAWDWEVSSENGNYDYLMYADIDYDHPDVVNEMKKWGVWYANEVGLDGYRLDAVKHIKFSFLKDWVDNARAATGKEMFTVGEYWQNDLGALNNYLAKVNYNQSLFDAPLHYNFYAASTGGGYYDMRNILNNTLVASNPTKAVTLVENHDTQPGQSLESTVQPWFKPLAYAFILTRSGGYPSVFYGDMYGTKGTTTREIPALKSKIEPLLKARKDYAYGTQRDYIDNPDVIGWTREGDSTKWKSGLATVITDGPGGSKRMYVGTSNAGEIWYDLTGNRTDKITIGSDGYATFPVNGGSVSVWVQQ

SEQ ID NO: 36070 - protein, 480 aa, Cytophaga sp.
NGTMMQYFEWYVPNDGQQWNRLRTDAPYLSSVGITAVWTPPAYKGTSQADVGYGPYDLYDLGEFNQKGTVRTKYGTKGELKSAVNTLHSNGIQVYGDVVMNHKAGADYTENVTAVEVNPSNRNQETSGEYNIQAWTGFNFPGRGTTYSNFKWQWFHFDGTDWDQSRSLSRIFKFTGKAWDWEVSSENGNYDYLMYADIDYDHPDVVNEMKKWGVWYANEVGLDGYRLDAVKHIKFSFLKDWVDNARAATGKEMFTVGEYWQNDLGALNNYLAKVNYNQSLFDAPLHYNFYAASTGGGYYDMRNILNNTLVASNPTKAVTLVENHDTQPGQSLESTVQPWFKPLAYAFILTRSGGYPSVFYGDMYGTKGTTTREIPALKSKIEPLLKARKDYAYGTQRDYIDNPDVIGWTREGDSTKAKSGLATVITDGPGGSKRMYVGTSNAGEIWYDLTGNRTDKITIGSDGYATFPVNGESVSVWVQQ

SEQ ID NO: 36071 - protein, 480 aa, Cytophaga sp.
NGTMMQYFEWYVPNDGQQWNRLRTDAPYLSSVGITAVWTPPAYKGTSQADVGYGPYDLYDLGEFNQKGTVRTKYGTKGELKSAVNTLHSNGIQVYGDVVMNHKAGADYTENVTAVEVNPSNRNQETSGEYNIQAWTGFNFPQRGTTYSNFKWQWFHFDGTDWDQSRSLSRIFKFTGKAWDWEVSSENGNYDYLMYADIDYDHPDVVNEMKKWGVWYANEVGLDGYRLDAVKHIKFSFLKDWVDNARAATGKEMFTVGEYWQNDLGALNNYLAKVNYNQSLFDAPLHYNFYAASTGGGYYDMRNILNNTLVASNPTKAVTLVENHDTQPGQSLESTVQPWFKPLAYAFILTRSGGYPSVFYGDMYGTKGTTTREIPALKSKIEPLLKARKDYAYGTQRDYIDNPDVIGWTREGDSTKAKSGLATVITDGPGGSKRMYVGTSNAGEIWYDLTGNRTDKITIGSDGYATFPVNGGSVSVWVQQ

SEQ ID NO: 36072 - protein, 480 aa, Cytophaga sp.
NGTMMQYFEWYVPNDGQQWNRLRTDAPYLSSVGITAVWTPPAYKGTSQADVGYGPYDLYDLGEFNQKGTVRTKYGTKGELKSAVNTLHSNGIQVYGDVVMNHKAGADYTENVTAVEVNPSNRNQETSGEYNIQAWTGFNFPGRGTTYSNFKWQWFHFDGTDWDQSRSLSRIFKFTGKAWDWEVSSENGNYDYLMYADIDYDHPDVVNEMKKWGVWYANEVGLDGYRLDAVKHIKFSFLKDWVDNARAATGKEMFTVGEYWQNDLGALNNYLAKVNYNQSLFDAPLHYNFYAASTGGGYYDMRNILNNTLVASNPTKAVTLVENHDTQPGQSLESTVQPWFKPLAYAFILTRSGGYPSVFYGDMYGTKGTTTREIPALKSKIEPLCKARKDYAYGTQRDYIDNPDVIGWTREGDSTKAKSGLATVITDGPGGSKRMYVGTSNAGEIWYDLTGNRTDKITIGSDGYATFPVNGGSVSVWVQQ

SEQ ID NO: 36073 - protein, 480 aa, Cytophaga sp.
NGTMMQYFEWYVPNDGQQWNRLRTDAPYLSSVGITAVWTPPAYKGTSQADVGYGPYDLYDLGEFNQKGTVRTKYGTKGELKSAVNTLHSNGIQVYGDVVMNHKAGADYTENVTAVEVNPSNRNQETSGEYNIQAWTGFNFPGRGTTYSNFKWQWFHFDGTDHDQSRSLSRIFKFTGKAWDWEVSSENGNYDYLMYADIDYDHPDVVNEMKKWGVWYANEVGLDGYRLDAVKHIKFSFLKDWVDNARAATGKEMFTVGEYWQNDLGALNNYLAKVNYNQSLFDAPLHYNFYAASTGGGYYDMRNILNNTLVASNPTKAVTLVENHDTQPGQSLESTVQPWFKPLAYAFILTRSGGYPSVFYGDMYGTKGTTTREIPALKSKIEPLLKARKDYAYGTQRDYIDNPDVIGWTREGDSTKAKSGLATVITDGPGGSKRMYVGTSNAGEIWYDLTGNRTDKITIGSDGYATFPVNGGSVSVWVQQ

SEQ ID NO: 36074 - protein, 480 aa, Cytophaga sp.
NGTMMQYFEWYVPNDGQQWNRLRTDAPYLSSVGITAVWTPPAYKGTSQADVGYGPYDLYDLGEFNQKGTVRTKYGTKGELKSAVNTLHSNGIQVYGDVVMNHKAGADYTENVTAVEVNPSNRNQETSGEYNIQAWTGFNFPGRGTTPSNFKWQWFHFDGTDWDQSRSLSRIFKFTGKAWDWEVSSENGNYDYLMYADIDYDHPDVVNEMKKWGVWYANEVGLDGYRLDAVKHIKFSFLKDWVDNARAATGKEMFTVGEYWQNDLGALNNYLAKVNYNQSLFDAPLHYNFYAASTGGGYYDMRNILNNTLVASNPTKAVTLVENHDTQPGQSLESTVQPWFKPLAYAFILTRSGGYPSVFYGDMYGTKGTTTREIPALKSKIEPLLKARKDYAYGTQRDYIDNPDVIGWTREGDSTKAKSGLATVITDGPGGSKRMYVGTSNAGEIWYDLTGNRTDKITIGSDGYATFPVNGGSVSVWVQQ

SEQ ID NO: 36075 - protein, 480 aa, Cytophaga sp.
NGTMMQYFEWYVPNDGQQWNRLRTDAPYLSSVGITAVWTPPAYKGTSQADVGYGPYDLYDLGEFNQKGTVRTKYGTKGELKSAVNTLHSNGIQVYGDVVMNHKAGADYTENVTAVEVNPSNRNQETSGEYNIQAWTGFNFPGRGTTYSNFKWQWFHFDGTDWDQSRSLSRIFKFTGKAWDWEVSSENGNYDYLMYADIDYDHPDVVNEMKKWGVWYANEVGLDGYRLDAVKHIKFSFLKDWVDNARAATGKEMFTVGEYWQNDLGALNNYLAKVNYNQSLFDAPLHYNFYAASTGGGYYDMRNILNNTLVASNPTKAVTLVENHDTQPGQSLESTVQPWFKPLAYAFILTRSGGHPSVFYGDMYGTKGTTTREIPALKSKIEPLLKARKDYAYGTQRDYIDNPDVIGWTREGDSTKAKSGLATVITDGPGGSKRMYVGTSNAGEIWYDLTGNRTDKITIGSDGYATFPVNGGSVSVWVQQ

SEQ ID NO: 36076 - protein, 480 aa, Cytophaga sp.
NGTMMQYFEWYVPNDGQQWNRLRTDAPYLSSVGITAVWTPPAYKGTSQADVGYGPYDLYDLGEFNQKGTVRTKYGTKGELKSAVNTLHSNGIQVYGDVVMNHKAGADYTENVTAVEVKPSNRNQETSGEYNIQAWTGFNFPGRGTTYSNFKWQWFHFDGTDWDQSRSLSRIFKFTGKAWDWEVSSENGNYDYLMYADIDYDHPDVVNEMKKWGVWYANEVGLDGYRLDAVKHIKFSFLKDWVDNARAATGKEMFTVGEYWQNDLGALNNYLAKVNYNQSLFDAPLHYNFYAASTGGGYYDMRNILNNTLVASNPTKAVTLVENHDTQPGQSLESTVQPWFKPLAYAFILTRSGGYPSVFYGDMYGTKGTTTREIPALKSKIEPLLKARKDYAYGTQRDYIDNPDVIGWTREGDSTKAKSGLATVITDGPGGSKRMYVGTSNAGEIWYDLTGNRTDKITIGSDGYATFPVNGGSVSVWVQQ

SEQ ID NO: 36077 - protein, 480 aa, Cytophaga sp.
NGTMMQYFEWYVPNDGQQWNRLRTDAPYLSSVGITAVWTPPAYKGTSQADVGYGPYDLYDLGEFNQKGTVRTKYGTKGELKSAVNTLHSNGIQVYGDVVMNHKAGADYTENMTAVEVNPSNRNQETSGEYNIQAWTGFNFPGRGTTYSNFKWQWFHFDGTDWDQSRSLSRIFKFTGKAWDWEVSSENGNYDYLMYADIDYDHPDVVNEMKKWGVWYANEVGLDGYRLDAVKHIKFSFLKDWVDNARAATGKEMFTVGEYWQNDLGALNNYLAKVNYNQSLFDAPLHYNFYAASTGGGYYDMRNILNNTLVASNPTKAVTLVENHDTQPGQSLESTVQPWFKPLAYAFILTRSGGYPSVFYGDMYGTKGTTTREIPALKSKIEPLLKARKDYAYGTQRDYIDNPDVIGWTREGDSTKAKSGLATVITDGPGGSKRMYVGTSNAGEIWYDLTGNRTDKITIGSDGYATFPVNGGSVSVWVQQ

SEQ ID NO: 36078 - protein, 480 aa, Cytophaga sp.
NGTMMQYFEWYVPNDGQQWNRLRTDAPYLSSVGITAVWTPPAYKGTSQADVGYGPYDLYDLGEFNQKGTVRTKYGTKGELKSAVNTLHSNGIQVYGDVVMNHKAGADYTENVTAVEVNPSNRNQETSGEYNIQAVTGFNFPGRGTTYSNFKWQWFHFDGTDWDQSRSLSRIFKFTGKAWDWEVSSENGNYDYLMYADIDYDHPDVVNEMKKWGVWYANEVGLDGYRLDAVKHIKFSFLKDWVDNARAATGKEMFTVGEYWQNDLGALNNYLAKVNYNQSLFDAPLHYNFYAASTGGGYYDMRNILNNTLVASNPTKAVTLVENHDTQPGQSLESTVQPWFKPLAYAFILTRSGGYPSVFYGDMYGTKGTTTREIPALKSKIEPLLKARKDYAYGTQRDYIDNPDVIGWTREGDSTKAKSGLATVITDGPGGSKRMYVGTSNAGEIWYDLTGNRTDKITIGSDGYATFPVNGGSVSVWVQQ

SEQ ID NO: 36079 - protein, 480 aa, Cytophaga sp.
NGTMMQYFEWYVPNDGQQWNRLRTDAPYLSSVGITAVWTPPAYKGTSQADVGYGPYDLYDLGEFNQKGTVRTKYGTKGELKSAVNTLHSNGIQVYGDVVMNHKAGADYTENVTAVEVNPSNRNMETSGEYNIQAWTGFNFPGRGTTYSNFKWQWFHFDGTDWDQSRSLSRIFKFTGKAWDWEVSSENGNYDYLMYADIDYDHPDVVNEMKKWGVWYANEVGLDGYRLDAVKHIKFSFLKDWVDNARAATGKEMFTVGEYWQNDLGALNNYLAKVNYNQSLFDAPLHYNFYAASTGGGYYDMRNILNNTLVASNPTKAVTLVENHDTQPGQSLESTVQPWFKPLAYAFILTRSGGYPSVFYGDMYGTKGTTTREIPALKSKIEPLLKARKDYAYGTQRDYIDNPDVIGWTREGDSTKAKSGLATVITDGPGGSKRMYVGTSNAGEIWYDLTGNRTDKITIGSDGYATFPVNGGSVSVWVQQ

SEQ ID NO: 36080 - protein, 480 aa, Cytophaga sp.
NGTMMQYFEWYVPNDGQQWNRLRTDAPYLSSVGITAVWTPPAYKGTSQADVGYGPYDLYDLGEFNQKGTVRTKYGTKGELKSAVNTLHSNGIQVYGDVVMNHKAGADYTENVTAVEVNPSNRNQETSGEYNIQAWTGFNFPGRGTTYSNFKWQWFHFDGTDWDQSRSLSRIFKFTGKAWDWEVSSESGNYDYLMYADIDYDHPDVVNEMKKWGVWYANEVGLDGYRLDAVKHIKFSFLKDWVDNARAATGKEMFTVGEYWQNDLGALNNYLAKVNYNQSLFDAPLHYNFYAASTGGGYYDMRNILNNTLVASNPTKAVTLVENHDTQPGQSLESTVQPWFKPLAYAFILTRSGGYPSVFYGDMYGTKGTTTREIPALKSKIEPLLKARKDYAYGTQRDYIDNPDVIGWTREGDSTKAKSGLATVITDGPGGSKRMYVGTSNAGEIWYDLTGNRTDKITIGSDGYATFPVNGGSVSVWVQQ

SEQ ID NO: 36081 - protein, 480 aa, Cytophaga sp.
NGTMMQYFEWYVPNDGQQWNRLRTDAPYLSSVGITAVWTPPAYKGTSQADVGYGPYDLYDLGEFNQKGTVRTKYGTKGELKSAVNTLHSNGIQVYGDVVMNHKAGADYTENVTAVEVNPSNRNQETSGEYNIQAWTGFNFPGRGTTYSNFKWQWFHFDGTDWDQSRSLSRIFKFTGKAWDWEVSSENGNYDYLMYADIDYDDPDVVNEMKKWGVWYANEVGLDGYRLDAVKHIKFSFLKDWVDNARAATGKEMFTVGEYWQNDLGALNNYLAKVNYNQSLFDAPLHYNFYAASTGGGYYDMRNILNNTLVASNPTKAVTLVENHDTQPGQSLESTVQPWFKPLAYAFILTRSGGYPSVFYGDMYGTKGTTTREIPALKSKIEPLLKARKDYAYGTQRDYIDNPDVIGWTREGDSTKAKSGLATVITDGPGGSKRMYVGTSNAGEIWYDLTGNRTDKITIGSDGYATFPVNGGSVSVWVQQ

SEQ ID NO: 36082 - protein, 480 aa, Cytophaga sp.
NGTMMQYFEWYVPNDGQQWNRLRTDAPYLSSVGITAVWTPPAYKGTSQADVGYGPYDLYDLGEFNQKGTVRTKYGTKGELKSAVNTLHSNGIQVYGDVVMNHKAGADYTENVTAVEVNPSNRNQETSGEYNIQAWTGFNFPGRGTTYSNFKWQWFHFDGTDWDQSRSLSRIFKFTGKAWDWEVSSENGNYDYLMYADIDYDHPDVVNEMKKWGVWYANEVGLDGYRLDAVKHIKFSFLKDWVDNASAATGKEMFTVGEYWQNDLGALNNYLAKVNYNQSLFDAPLHYNFYAASTGGGYYDMRNILNNTLVASNPTKAVTLVENHDTQPGQSLESTVQPWFKPLAYAFILTRSGGYPSVFYGDMYGTKGTTTREIPALKSKIEPLLKARKDYAYGTQRDYIDNPDVIGWTREGDSTKAKSGLATVITDGPGGSKRMYVGTSNAGEIWYDLTGNRTDKITIGSDGYATFPVNGGSVSVWVQQ

SEQ ID NO: 36083 - protein, 480 aa, Cytophaga sp.
NGTMMQYFEWYVPNDGQQWNRLRTDAPYLSSVGITAVWTPPAYKGTSQADVGYGPYDLYDLGEFNQKGTVRTKYGTKGELKSAVNTLHSNGIQVYGDVVMNHKAGADYTENVTAVEVNPSNRNQETSGEYNIQAWTGFNFPGRGTTYSNFKWQWFHFDGTDWDQSRSLSRIFKFTGKAWDWEVSSENGNYDYLMYADIDYDHPDVVNEMKKWGVWYANEVGLDGYRLDAVKHIKFSFLKDWVDNARAATGKEMFTVGEYWQNDLGALNNYLAKVNYNQSLFDAPLHYNFYAASTGGGYYDMRNILNNTLVASNPTKAVTLVENHDTQPGQSLESTVQPWFKPLAYAFILTRSGGYPSVFYGDMYGTKGTTTREIPALKSKIEPLLKGRKDYAYGTQRDYIDNPDVIGWTREGDSTKAKSGLATVITDGPGGSKRMYVGTSNAGEIWYDLTGNRTDKITIGSDGYATFPVNGGSVSVWVQQ

SEQ ID NO: 36084 - protein, 480 aa, Cytophaga sp.
NGTMMQYFEWYVPNDGQQWNRLRTDAPYLSSVGITAVWTPPAYKGTSQADVGYGPYDLYDLGEFNQKGTVRTKYGTKGELKSAVNTLHSNGIQVYGDVVMNHKAGADYTENVTAVEVNPSNRNQETSGEYNIQAWTGFNFPGRGTTYSNFKWQWFHFDGTDWDQSRSLSRIFKFTGKAWDWEVSSENGNYDYLMYADIDYDHPDVVNEMKKWGVWYANEVGLDGYRLDAVKHIKFSFLKDWVDNARAATGKEMFTVGEYWQNDLGALNNYLAKVNYNQSLFDAPLHYNFYAASTGGGYYDMRNILNNTLVASNPTKAVTLVENHDTQPGQSLESTVQPWFKPLAYAFILTRSGGYPSVFYGDMYGTKGTTTREIPALKSKIEPLLKARKDYAYGTQRDYIDNKDVIGWTREGDSTKAKSGLATVITDGPGGSKRMYVGTSNAGEIWYDLTGNRTDKITIGSDGYATFPVNGGSVSVWVQQ

SEQ ID NO: 36085 - protein, 480 aa, Cytophaga sp.
NGTMMQYFEWYVPNDGQQWNRLRTDAPYLSSVGITAVWTPPAYKGTSQADVGYGPYDLYDLGEFNQKGTVRTKYGTKGELKSAVNTLHSNGIQVYGDVVMNHKAGADYTENVTAVEVNPSNRNQETSGEYNIQAWTGFNFPGRGTTYSNFKWQWFHFDGTDWDQSRSLSRIFKFTGKAWDWEVSSENGNYDYLMYADIDYDHPDVVNEMKKWGVWYANEVGLDGYRLDAVKHIKFSFLKDWVDNARAATGKEMFTVGEYWQNDLGALNNYLAKVNYNQSLFDAPLHYNFYAASTGGGYYDMRNILNNTLVASNPTKAVTLVENHDTQPGQSLESTVQPWFKPLAYAFILTRSGGYPSVFYGDMYGTKGTTTREIPALKSKIEPLLKARKDYAYGTQRDYIDNPDVIGWTREGDSTKAKSGLATVITDGPGGSKRMYVGTSNAGEIWMDLTGNRTDKITIGSDGYATFPVNGGSVSVWVQQ

SEQ ID NO: 36086 - protein, 480 aa, Cytophaga sp.
NGTMMQYFEWYVPNDGQQWNRLRTDAPYLSSVGITAVWTPPAYKGTSQADVGYGPYDLYDLGEFNQKGTVRTKYGTKGELKSAVNTLHSNGIQVYGDVVMNHKAGADYTENVTAVEVNPSNRNQETSGEYNIQAWTGFNFPGRGTTYSNFKWQWFHFDGTDWDQSRSLSRIFKFTGKAWDWEVSSENGNYDYLMYADIDYDHPDVVNEMKKWGVWYANEVGLDGYRLDAVKHIKFSFLKDWVDNARAATGKEMFTVGEYWQNDLGALNNYLAKVNYNQSLFDAPLHYNFYAASTGGGYYDMRNILNNTLVASNPTKAVTLVENHDTQPGQSLESTVQPWFKPLAYAFILTRSGGYPSVFYGDMYGTHGTTTREIPALKSKIEPLLKARKDYAYGTQRDYIDNPDVIGWTREGDSTKAKSGLATVITDGPGGSKRMYVGTSNAGEIWYDLTGNRTDKITIGSDGYATFPVNGGSVSVWVQQ

SEQ ID NO: 36087 - protein, 480 aa, Cytophaga sp.
NGTMMQYFEWYVPNDGQQWNRLRTDAPYLSSVGITAVWTPPAYKGTSQADVGYGPYDLYDLGEFNQKGTVRTKYGTKGELKSAVNTLHSNGIQVYGDVVMNHKAGADYTENVTAVEVNPSNRNQETSGEYNIQAWTGFNFPGRGTTYSNFKWQWFHFDGTDWDQSRSLSRIFKHTGKAWDWEVSSENGNYDYLMYADIDYDHPDVVNEMKKWGVWYANEVGLDGYRLDAVKHIKFSFLKDWVDNARAATGKEMFTVGEYWQNDLGALNNYLAKVNYNQSLFDAPLHYNFYAASTGGGYYDMRNILNNTLVASNPTKAVTLVENHDTQPGQSLESTVQPWFKPLAYAFILTRSGGYPSVFYGDMYGTKGTTTREIPALKSKIEPLLKARKDYAYGTQRDYIDNPDVIGWTREGDSTKAKSGLATVITDGPGGSKRMYVGTSNAGEIWYDLTGNRTDKITIGSDGYATFPVNGGSVSVWVQQ

SEQ ID NO: 36088 - protein, 480 aa, Cytophaga sp.
NGTMMQYFEWYVPNDGQQWNRLRTDAPYLSSVGITAVWTPPAYKGTSQADVGYGPYDLYDLGEFNQKGTVRTKYGTKGELKSAVNTLHSNGIQVYGDVVMNHKAGADYTENVTAVEVNPSNRNQETSGEYNIQAWTGFNFPGRGTTYSNFKWQWFHFDGTDWDQSRSLSRIFKFTGKAWDWEVSSENGNYDYLMYADIDYDHPDVVNEMKKWGVWYANEVGLDGYRLDAVKHIKFSFLKDWVDNARAATGKEMFTVGEYWQNDLGALNNYLAKVNYNQSLFDAPLHYNFYAASTGGGYYDMRNILNNTLVASNPTKAVTLVENHDTQPGQSLESTVQPWFKPLAYAFILTRSGGYPSVFYGDMYGTKGTTTREIPALKSKIEPLLKARKDYAYGTQRDYIDNPDVIGWTREGDSTKAKSGLATVITDGPGGSKRMYVGTSNADEIWYDLTGNRTDKITIGSDGYATFPVNGGSVSVWVQQ

SEQ ID NO: 36089 - protein, 480 aa, Cytophaga sp.
NKTMMQYFEWYVPNDGQQWNRLRTDAPYLSSVGITAVWTPPAYKGTSQADVGYGPYDLYDLGEFNQKGTVRTKYGTKGELKSAVNTLHSNGIQVYGDVVMNHKAGADYTENVTAVEVNPSNRNQETSGEYNIQAWTGFNFPGRGTTYSNFKWQWFHFDGTDWDQSRSLSRIFKFTGKAWDWEVSSENGNYDYLMYADIDYDHPDVVNEMKKWGVWYANEVGLDGYRLDAVKHIKFSFLKDWVDNARAATGKEMFTVGEYWQNDLGALNNYLAKVNYNQSLFDAPLHYNFYAASTGGGYYDMRNILNNTLVASNPTKAVTLVENHDTQPGQSLESTVQPWFKPLAYAFILTRSGGYPSVFYGDMYGTKGTTTREIPALKSKIEPLLKARKDYAYGTQRDYIDNPDVIGWTREGDSTKAKSGLATVITDGPGGSKRMYVGTSNAGEIWYDLTGNRTDKITIGSDGYATFPVNGGSVSVWVQQ

SEQ ID NO: 36090 - protein, 480 aa, Cytophaga sp.
NGTMMQYFEWYVPNDGQQWNRLRTDAPYLSSVGITAVWTPPAYKGTSQADVGYGPYDLYDLGEFNQKGTVRTKYGTKGELKSAVNTLHSNGIQVYGDVVMNHKAGADYTENVTAVEVNPSNRNQETSGEYNIQAWTGFNFPGRGTTYSNFKWQWFHFDGTDWDQSRSLSRIFKFTGKAWDWEVSSENGNYDYLMYADIDYDHPDVVNEMNKWGVWYANEVGLDGYRLDAVKHIKFSFLKDWVDNARAATGKEMFTVGEYWQNDLGALNNYLAKVNYNQSLFDAPLHYNFYAASTGGGYYDMRNILNNTLVASNPTKAVTLVENHDTQPGQSLESTVQPWFKPLAYAFILTRSGGYPSVFYGDMYGTKGTTTREIPALKSKIEPLLKARKDYAYGTQRDYIDNPDVIGWTREGDSTKAKSGLATVITDGPGGSKRMYVGTSNAGEIWYDLTGNRTDKITIGSDGYATFPVNGGSVSVWVQQ

SEQ ID NO: 36091 - protein, 480 aa, Cytophaga sp.
NGTMMQYFEWYVPNDGQQWNRLRTDAPYLSSVGITAVWTPPAYKGTSQADVGYGPYDLYDLGEFNQKGTVRTKYGTKGEFKSAVNTLHSNGIQVYGDVVMNHKAGADYTENVTAVEVNPSNRNQETSGEYNIQAWTGFNFPGRGTTYSNFKWQWFHFDGTDWDQSRSLSRIFKFTGKAWDWEVSSENGNYDYLMYADIDYDHPDVVNEMKKWGVWYANEVGLDGYRLDAVKHIKFSFLKDWVDNARAATGKEMFTVGEYWQNDLGALNNYLAKVNYNQSLFDAPLHYNFYAASTGGGYYDMRNILNNTLVASNPTKAVTLVENHDTQPGQSLESTVQPWFKPLAYAFILTRSGGYPSVFYGDMYGTKGTTTREIPALKSKIEPLLKARKDYAYGTQRDYIDNPDVIGWTREGDSTKAKSGLATVITDGPGGSKRMYVGTSNAGEIWYDLTGNRTDKITIGSDGYATFPVNGGSVSVWVQQ

SEQ ID NO: 36092 - protein, 480 aa, Cytophaga sp.
NGTMMQYFEWYVPNDGQQWNRLRTDAPYLSSVGITAVWTPPAYKGTSQADVGYGPYDLYDLGEFNQKGTVRTKYGTKGELKSAVNTLHSNGIQVYGDVVMNHKAGADYTENVTAVEVNPSNRNQETSGEYNIQAWTGFNFPGRGTTYSNFKWQWFHFDGTDWDQSRSLSRIFKFTGKAWDWEVSSENGNYDYLMYADIDYDHPDVVNEMKKWGVWYANEVGLDGYRLDAVKHIKFSILKDWVDNARAATGKEMFTVGEYWQNDLGALNNYLAKVNYNQSLFDAPLHYNFYAASTGGGYYDMRNILNNTLVASNPTKAVTLVENHDTQPGQSLESTVQPWFKPLAYAFILTRSGGYPSVFYGDMYGTKGTTTREIPALKSKIEPLLKARKDYAYGTQRDYIDNPDVIGWTREGDSTKAKSGLATVITDGPGGSKRMYVGTSNAGEIWYDLTGNRTDKITIGSDGYATFPVNGGSVSVWVQQ

SEQ ID NO: 36093 - protein, 480 aa, Cytophaga sp.
NGTMMQYFEWYVPNDGQQWNRLRTDAPYLSSVGITAVWTPPAYKGTSQADVGYGPYDLYDLGEFNQKGTVRTKYGTKGELKSAVNTLHSNGIQVYGDVVMNHKAGADYTENVTAVEVNPSNRNQETSGEYNIQAWTGFNFPGRGTTYSNFKWQWFHFDGTDWDQSRSLSRIFKFTGKAWDWEVSSENGNYDYLMYADIDYDHPDVVNEMKKWGVWYANEVGLDGYRLDAVKHIKFSFLKDWVDNARAATGKEMFTVGEYWQNDLGALNNYLAKVNYNQSLFDAPLHYNFYAASTGGGYYDMRNILNNTLVASNPTKAVTLVENHDTQPGQSLESTVQPWFKPLAYAFILTRSGGYPSVFYGDMYGTKGTTTREIPALKSKIEPLLKARKDYAYGTQRDYIDNPDVIGWTREGDSTKAKSGLATVITDGPGGSKRMCVGTSNAGEIWYDLTGNRTDKITIGSDGYATFPVNGGSVSVWVQQ

SEQ ID NO: 36094 - protein, 480 aa, Cytophaga sp.
NGTMMQYFEWYVPNDGQQWNRLRTDAPYLSSVGITAVWTPPAYKGTSQADVGYGPYDLYDLGEFNQKGTVRTKYGTKGELKSAVNTLHSNGIQVYGDVVMNHKAGADYTENVTAVEVNPSNRNQETSGEYNIQAWTGFNFPGRGTTYSNFKWQWFHFDGTDWDQSDSLSRIFKFTGKAWDWEVSSENGNYDYLMYADIDYDHPDVVNEMKKWGVWYANEVGLDGYRLDAVKHIKFSFLKDWVDNARAATGKEMFTVGEYWQNDLGALNNYLAKVNYNQSLFDAPLHYNFYAASTGGGYYDMRNILNNTLVASNPTKAVTLVENHDTQPGQSLESTVQPWFKPLAYAFILTRSGGYPSVFYGDMYGTKGTTTREIPALKSKIEPLLKARKDYAYGTQRDYIDNPDVIGWTREGDSTKAKSGLATVITDGPGGSKRMYVGTSNAGEIWYDLTGNRTDKITIGSDGYATFPVNGGSVSVWVQQ

SEQ ID NO: 36095 - protein, 480 aa, Cytophaga sp.
NGTMMQYFEWYVPNDGQQWNRLRTDAPYLSSVGITAVWTPPAYKGTSQADVGYGPYDLYDLGEFNQKGTVRTKYGTKGELKSAVNTLHSNGIQVYGDVVMNHKAGADYTENVTAVEVNPSNRNQGTSGEYNIQAWTGFNFPGRGTTYSNFKWQWFHFDGTDWDQSRSLSRIFKFTGKAWDWEVSSENGNYDYLMYADIDYDHPDVVNEMKKWGVWYANEVGLDGYRLDAVKHIKFSFLKDWVDNARAATGKEMFTVGEYWQNDLGALNNYLAKVNYNQSLFDAPLHYNFYAASTGGGYYDMRNILNNTLVASNPTKAVTLVENHDTQPGQSLESTVQPWFKPLAYAFILTRSGGYPSVFYGDMYGTKGTTTREIPALKSKIEPLLKARKDYAYGTQRDYIDNPDVIGWTREGDSTKAKSGLATVITDGPGGSKRMYVGTSNAGEIWYDLTGNRTDKITIGSDGYATFPVNGGSVSVWVQQ

SEQ ID NO: 36096 - protein, 480 aa, Cytophaga sp.
NGTMMQYFEWYVPNDGQQWNRLRTDAPYLSSVGITAVWTPPAYKGTSQADVGYGPYDLYDLGEFNQKGTVRTKYGTKGELKSAVNTLHSNGIQVYGDVVMNHKAGADYTENVTAVEVNPSNRNQEYSGEYNIQAWTGFNFPGRGTTYSNFKWQWFHFDGTDWDQSRSLSRIFKFTGKAWDWEVSSENGNYDYLMYADIDYDHPDVVNEMKKWGVWYANEVGLDGYRLDAVKHIKFSFLKDWVDNARAATGKEMFTVGEYWQNDLGALNNYLAKVNYNQSLFDAPLHYNFYAASTGGGYYDMRNILNNTLVASNPTKAVTLVENHDTQPGQSLESTVQPWFKPLAYAFILTRSGGYPSVFYGDMYGTKGTTTREIPALKSKIEPLLKARKDYAYGTQRDYIDNPDVIGWTREGDSTKAKSGLATVITDGPGGSKRMYVGTSNAGEIWYDLTGNRTDKITIGSDGYATFPVNGGSVSVWVQQ

SEQ ID NO: 36097 - protein, 480 aa, Cytophaga sp.
NGTMMQYFEWYVPNDGQQWNRLRTDAPYLSSVGITAVWTPPAYKGTSQADVGYGPYDLYDLGEFNQKGTVRTKYGTKGELKSAVNTLHSNGIQVYGDVVMNHKAGADYTENVTAVEVNPSNRNQETSGEYNIQAWTGFNFPGRGTTYSNFKWQWFHFDGTDWDQSRSLCRIFKFTGKAWDWEVSSENGNYDYLMYADIDYDHPDVVNEMKKWGVWYANEVGLDGYRLDAVKHIKFSFLKDWVDNARAATGKEMFTVGEYWQNDLGALNNYLAKVNYNQSLFDAPLHYNFYAASTGGGYYDMRNILNNTLVASNPTKAVTLVENHDTQPGQSLESTVQPWFKPLAYAFILTRSGGYPSVFYGDMYGTKGTTTREIPALKSKIEPLLKARKDYAYGTQRDYIDNPDVIGWTREGDSTKAKSGLATVITDGPGGSKRMYVGTSNAGEIWYDLTGNRTDKITIGSDGYATFPVNGGSVSVWVQQ

SEQ ID NO: 36098 - protein, 480 aa, Cytophaga sp.
NGTMMQYFEWYVPNDGQQWNRLRTDAPYLSSVGITAVWTPPAYKGTSQADVGYGPYDLYDLGEFNQKGTVRTKYGTKGELKSAVNTLHSNGIQVYGDVVMNHKAGADYTENVTAVEVNPSNRNQETSGEYNIQAWTGFNFPGRGTTYSNFKWQWFHFDGTDWDQSRSLSRIFKFTGKAWDWEVSSENGNYDYLMYADIDYDHPDVVNEMKKWGVWYANEVGLDGYRLDAVKHIKFSFLKDWVDNARAATGKEMFTVGEYWQNDLGALNNYLAKVNYNQSLFDAPLHYNFYAASTGGGYYDMRNILNNTLVASNPTKAVTLVENHDTQPGQSLESTVQPWFKPLAYAFILTRSGGYPSVFYGDMYGTKGTTTREIPALKSKIEPLLKARKDYAYGTQRDYIDNPDKIGWTREGDSTKAKSGLATVITDGPGGSKRMYVGTSNAGEIWYDLTGNRTDKITIGSDGYATFPVNGGSVSVWVQQ

SEQ ID NO: 36099 - protein, 480 aa, Cytophaga sp.
NGTMMQYFEWYVPNDGQQWNRLRTDAPYLSSVGITAVWTPPAYKGTSQADVGYGPYDLYDLGEFNQKGTVRTKYGTKGELKSAVNTLHSNGIQVYGDVVMNHKAGADYTENVTAVEVNPSNRNQETSGEYNIQAWTGFNFPGRGTTYSNFKWQWFHFDGTDWDQSRSLSRIFKFTGKAWDWEVSSENGNYDYLMYADIDYDHPDVVNEMKKWGVWYANEVGLDGYRLDAVKHIKFSFLKDWVDNARAATGKEMFTVGEYWQNDLGALNNYLAKVNYNQSLFDAPLHYNFYAASTGGGYYDMRNILNNTLVASNPTKAVTLVENHDTQPGQSLESTVQPWFKPLAYAFILTRSGGYPSVFYGDMYGTKGTTTREIPALKSKIEPLLKARKDYAYGTQRDYIDNPDVIGWTREGDSTKAKSGLATVITDGPGGSKRMYVGTSNAGEIWYDLTGNRTDKITIGSDGYATFPVFGGSVSVWVQQ

SEQ ID NO: 36100 - protein, 480 aa, Cytophaga sp.
NGTMMQYFEWYVPNDGQQWNRLRTDAPYLSSVGITAVWTPPAYKGTSQADVGYGPYDLYDLGEFNQKATVRTKYGTKGELKSAVNTLHSNGIQVYGDVVMNHKAGADYTENVTAVEVNPSNRNQETSGEYNIQAWTGFNFPGRGTTYSNFKWQWFHFDGTDWDQSRSLSRIFKFTGKAWDWEVSSENGNYDYLMYADIDYDHPDVVNEMKKWGVWYANEVGLDGYRLDAVKHIKFSFLKDWVDNARAATGKEMFTVGEYWQNDLGALNNYLAKVNYNQSLFDAPLHYNFYAASTGGGYYDMRNILNNTLVASNPTKAVTLVENHDTQPGQSLESTVQPWFKPLAYAFILTRSGGYPSVFYGDMYGTKGTTTREIPALKSKIEPLLKARKDYAYGTQRDYIDNPDVIGWTREGDSTKAKSGLATVITDGPGGSKRMYVGTSNAGEIWYDLTGNRTDKITIGSDGYATFPVNGGSVSVWVQQ

SEQ ID NO: 36101 - protein, 480 aa, Cytophaga sp.
NGTMMQYFEWYVPNDGQQWNRLRTDAPYLSSVGITAVWTPPAYKGTSQADVGYGPYDLYDLGEFNQKGTVRTKYGTKGELKSAVNTLHSNGIQVYGDVVMNHKAGADYTENVTAVEVNPSNRNQETSGEYNIQAWTGFNFPGRGTTYSNFKWQWFHFDGTDWDQSRSLSRIFKFTGKAWDWEVSSENGNYDYLMYADIDYDHPDVVNEMKKWGVWYANEVGLDGYRLDAVKHIKFSFLKDWVDNARAATGKEMFTVGEYWQNDLGALNNYLAKVNYNQSLFDAPLHYNFYIASTGGGYYDMRNILNNTLVASNPTKAVTLVENHDTQPGQSLESTVQPWFKPLAYAFILTRSGGYPSVFYGDMYGTKGTTTREIPALKSKIEPLLKARKDYAYGTQRDYIDNPDVIGWTREGDSTKAKSGLATVITDGPGGSKRMYVGTSNAGEIWYDLTGNRTDKITIGSDGYATFPVNGGSVSVWVQQ

SEQ ID NO: 36102 - protein, 480 aa, Cytophaga sp.
NGTMMQYFEWYVPNDGQQWNRLRTDAPYLSSVGITAVWTPPAYKGTSQADVGYGPYDLYDLGEFNQKGTVRTKYGTKGELKSAVNTLHSNGIQVYGDVVMNHKAGADYTENVTAVEVNPSNRNQETSGEYNIQAWTGFNFPGRGTTYSNFKWQWFHFDGTDWKQSRSLSRIFKFTGKAWDWEVSSENGNYDYLMYADIDYDHPDVVNEMKKWGVWYANEVGLDGYRLDAVKHIKFSFLKDWVDNARAATGKEMFTVGEYWQNDLGALNNYLAKVNYNQSLFDAPLHYNFYAASTGGGYYDMRNILNNTLVASNPTKAVTLVENHDTQPGQSLESTVQPWFKPLAYAFILTRSGGYPSVFYGDMYGTKGTTTREIPALKSKIEPLLKARKDYAYGTQRDYIDNPDVIGWTREGDSTKAKSGLATVITDGPGGSKRMYVGTSNAGEIWYDLTGNRTDKITIGSDGYATFPVNGGSVSVWVQQ

SEQ ID NO: 36103 - protein, 480 aa, Cytophaga sp.
NGTMMQYFEWYVPNDGQQWNRLRTDAPYLSSVGITAVWTPPAYKGTSQADVGYGPYDLYDLGEFNQKGTVRTKYGTKGELKSAVNTLHSNGIQVYGDVVMNHKAGADYTENVKAVEVNPSNRNQETSGEYNIQAWTGFNFPGRGTTYSNFKWQWFHFDGTDWDQSRSLSRIFKFTGKAWDWEVSSENGNYDYLMYADIDYDHPDVVNEMKKWGVWYANEVGLDGYRLDAVKHIKFSFLKDWVDNARAATGKEMFTVGEYWQNDLGALNNYLAKVNYNQSLFDAPLHYNFYAASTGGGYYDMRNILNNTLVASNPTKAVTLVENHDTQPGQSLESTVQPWFKPLAYAFILTRSGGYPSVFYGDMYGTKGTTTREIPALKSKIEPLLKARKDYAYGTQRDYIDNPDVIGWTREGDSTKAKSGLATVITDGPGGSKRMYVGTSNAGEIWYDLTGNRTDKITIGSDGYATFPVNGGSVSVWVQQ

SEQ ID NO: 36104 - protein, 480 aa, Cytophaga sp.
NGTMMQYFEWYVPNDGQQWNRLRTDAPYLSSVGITAVWTPPAYKGTSQADVGYGPYDLYDLGEFNQKGTVRTKYGTKGELKSAVNTLHSNGIQVYGDVVMNHKAGADYTENVTAVEVNPSNRNQETSGEYNIQAWTGFNFPGRGTTYSNFKWQWFHFDGTDWDQSRSLSRIFKFTGKAWDWEVSSENGNYDYLMYADIDYDHPDVCNEMKKWGVWYANEVGLDGYRLDAVKHIKFSFLKDWVDNARAATGKEMFTVGEYWQNDLGALNNYLAKVNYNQSLFDAPLHYNFYAASTGGGYYDMRNILNNTLVASNPTKAVTLVENHDTQPGQSLESTVQPWFKPLAYAFILTRSGGYPSVFYGDMYGTKGTTTREIPALKSKIEPLLKARKDYAYGTQRDYIDNPDVIGWTREGDSTKAKSGLATVITDGPGGSKRMYVGTSNAGEIWYDLTGNRTDKITIGSDGYATFPVNGGSVSVWVQQ

SEQ ID NO: 36105 - protein, 480 aa, Cytophaga sp.
NGTMMQYFEWYVPNDGQQWNRLRTDAPYLSSVGITAVWTPPAYKGTSQADVGYGPYDLYDLGEFNQKGTVRTKYGTKGELKSAVNTLHSNGIQVYGDVVMNHKAGADYTENVTAVEVNPSNRNQETSGEYNIQAWTGFNFPGRGTTYSNFKWQWFHFDGTDWDQSRSLSRIFKFTGKAWDWEVSSENGNYDYLMYADIDYDHPDVVNEMKKWGVWYANEVGLDGYRLDAVKHIKFSFLKDWVDNARAALGKEMFTVGEYWQNDLGALNNYLAKVNYNQSLFDAPLHYNFYAASTGGGYYDMRNILNNTLVASNPTKAVTLVENHDTQPGQSLESTVQPWFKPLAYAFILTRSGGYPSVFYGDMYGTKGTTTREIPALKSKIEPLLKARKDYAYGTQRDYIDNPDVIGWTREGDSTKAKSGLATVITDGPGGSKRMYVGTSNAGEIWYDLTGNRTDKITIGSDGYATFPVNGGSVSVWVQQ

SEQ ID NO: 36106 - protein, 480 aa, Cytophaga sp.
NGTMMQYFEWYVPNDGQQWNRLRTDAPYLSSVGITAVWTPPAYKGTSQADVGYGPYDLYDLGEFNQKGTVRTKYGTKGELKSAVNTLHSNGIQVYGDVVMNHKAGADYTENVTAVEVNPSNRNQETSGEYNIQAWTGFNFPGRGTTYSNFKWQWFHFDGTDWDQSRSLSRIFKFTGKAWDWEVSSENGNYDYLMYADIDYDHPDVVNEMKKWGVWYANEVGLDGYRLDAVKHIKFSFLKDWVDNARAATGKEMFTVGEYWQNDLGALNNYLAKVNYNQSLFDAPLHYNFYAASTGGGYYDMRNILNNTLVASNPTKAVTLVENHDTQPGQALESTVQPWFKPLAYAFILTRSGGYPSVFYGDMYGTKGTTTREIPALKSKIEPLLKARKDYAYGTQRDYIDNPDVIGWTREGDSTKAKSGLATVITDGPGGSKRMYVGTSNAGEIWYDLTGNRTDKITIGSDGYATFPVNGGSVSVWVQQ

SEQ ID NO: 36107 - protein, 480 aa, Cytophaga sp.
NGTMMQYFEWYVPNDGQQWNRLRTDAPYLSSVGITAVWTPPAYKGTSQADVGYGPYDLYDLGEFNQKGTVRTKYGTKGELKSAVNTLHSNGIQVYGDVVMNHKAGADYTENVTAVEVNPSNRNQETSGEYNIQAWTGFNFPARGTTYSNFKWQWFHFDGTDWDQSRSLSRIFKFTGKAWDWEVSSENGNYDYLMYADIDYDHPDVVNEMKKWGVWYANEVGLDGYRLDAVKHIKFSFLKDWVDNARAATGKEMFTVGEYWQNDLGALNNYLAKVNYNQSLFDAPLHYNFYAASTGGGYYDMRNILNNTLVASNPTKAVTLVENHDTQPGQSLESTVQPWFKPLAYAFILTRSGGYPSVFYGDMYGTKGTTTREIPALKSKIEPLLKARKDYAYGTQRDYIDNPDVIGWTREGDSTKAKSGLATVITDGPGGSKRMYVGTSNAGEIWYDLTGNRTDKITIGSDGYATFPVNGGSVSVWVQQ

SEQ ID NO: 36108 - protein, 480 aa, Cytophaga sp.
NGTMMQYFEWYVPNDGQQWNRLRTDAPYLSSVGITAVWTPPAYKGTSQADVGYGPYDLYDLGEFNQKGTVRTKYGTKGELKSAVNTLHSNGIQVYGDVVMNHKAGADYTENVTAVEVNPSNRNQETSGEHNIQAWTGFNFPGRGTTYSNFKWQWFHFDGTDWDQSRSLSRIFKFTGKAWDWEVSSENGNYDYLMYADIDYDHPDVVNEMKKWGVWYANEVGLDGYRLDAVKHIKFSFLKDWVDNARAATGKEMFTVGEYWQNDLGALNNYLAKVNYNQSLFDAPLHYNFYAASTGGGYYDMRNILNNTLVASNPTKAVTLVENHDTQPGQSLESTVQPWFKPLAYAFILTRSGGYPSVFYGDMYGTKGTTTREIPALKSKIEPLLKARKDYAYGTQRDYIDNPDVIGWTREGDSTKAKSGLATVITDGPGGSKRMYVGTSNAGEIWYDLTGNRTDKITIGSDGYATFPVNGGSVSVWVQQ

SEQ ID NO: 36109 - protein, 480 aa, Cytophaga sp.
NGTMMQYFEWYVPNDGQQWNRLRTDAPYLSSVGITAVWTPPAYKGTSQADVGYGPYDLYDLGEFNQKGTVRTKYGTKGELKSAVNTLHSNGIQVYGDVVMNHKAGADYTENVTAMEVNPSNRNQETSGEYNIQAWTGFNFPGRGTTYSNFKWQWFHFDGTDWDQSRSLSRIFKFTGKAWDWEVSSENGNYDYLMYADIDYDHPDVVNEMKKWGVWYANEVGLDGYRLDAVKHIKFSFLKDWVDNARAATGKEMFTVGEYWQNDLGALNNYLAKVNYNQSLFDAPLHYNFYAASTGGGYYDMRNILNNTLVASNPTKAVTLVENHDTQPGQSLESTVQPWFKPLAYAFILTRSGGYPSVFYGDMYGTKGTTTREIPALKSKIEPLLKARKDYAYGTQRDYIDNPDVIGWTREGDSTKAKSGLATVITDGPGGSKRMYVGTSNAGEIWYDLTGNRTDKITIGSDGYATFPVNGGSVSVWVQQ

SEQ ID NO: 36110 - protein, 480 aa, Cytophaga sp.
NGTMMQYFEWYVPNDGQQWNRLRTDAPYLSSVGITAVWTPPAYKGTSQADVGYGPYDLYDLGEFNQKGTVRTKYGTKGELKSAVNTLHSNGIQVYGDVVMNHKAGADYTENVTAVEVNPSNRNQETSGEYNIQAWTGFNFPVRGTTYSNFKWQWFHFDGTDWDQSRSLSRIFKFTGKAWDWEVSSENGNYDYLMYADIDYDHPDVVNEMKKWGVWYANEVGLDGYRLDAVKHIKFSFLKDWVDNARAATGKEMFTVGEYWQNDLGALNNYLAKVNYNQSLFDAPLHYNFYAASTGGGYYDMRNILNNTLVASNPTKAVTLVENHDTQPGQSLESTVQPWFKPLAYAFILTRSGGYPSVFYGDMYGTKGTTTREIPALKSKIEPLLKARKDYAYGTQRDYIDNPDVIGWTREGDSTKAKSGLATVITDGPGGSKRMYVGTSNAGEIWYDLTGNRTDKITIGSDGYATFPVNGGSVSVWVQQ

SEQ ID NO: 36111 - protein, 480 aa, Cytophaga sp.
NGTMMQYFEWYVPNDGQQWNRLRTDAPYLSSVGITAVWTPPAYKGTSQADVGYGPYDLYDLGEFNQKGTVRTKYGTKGELKSAVNTLHSNGIQVYGDVVMNHKAGADYTENVTAVEVNPSNRNQETSGEYNIQAWTGFNFPGRGTKYSNFKWQWFHFDGTDWDQSRSLSRIFKFTGKAWDWEVSSENGNYDYLMYADIDYDHPDVVNEMKKWGVWYANEVGLDGYRLDAVKHIKFSFLKDWVDNARAATGKEMFTVGEYWQNDLGALNNYLAKVNYNQSLFDAPLHYNFYAASTGGGYYDMRNILNNTLVASNPTKAVTLVENHDTQPGQSLESTVQPWFKPLAYAFILTRSGGYPSVFYGDMYGTKGTTTREIPALKSKIEPLLKARKDYAYGTQRDYIDNPDVIGWTREGDSTKAKSGLATVITDGPGGSKRMYVGTSNAGEIWYDLTGNRTDKITIGSDGYATFPVNGGSVSVWVQQ

SEQ ID NO: 36112 - protein, 480 aa, Cytophaga sp.
NGTMMQYFEWYVPNDGQQWNRLRTDAPYLSSVGITAVWTPPAYKGTSQADVGYGPYDLYDLGEFNQKGTVRTKYGTKGELKSAVNTLHSNGIQVYGDVVMNHKAGADYTENVTAVEVNPSNRNQETSGEYNIQAWTGFNFPGRGTTYSNFKWQWFHFDGTDWDQSRSLSRIFKFTGKAWDWEVSSENGNYDYLMYADIDYDHPDVVNEMKKWGVWYANEVGLDGYRLDAVKHIKFSFLKDWVDNARAATGKEMFTVGEYWQNDLGALNNYLAKVNYNQSLFDAPLHYNFYAASTGGGYYDMRNILNNTLVASNPTKAVTLVENHDTQPGQSLESTVQPWFKPLAYAFILTRSGGYPSVFYGDMYGTKGTTTREIPALKSKIEPLLKARKDYAYGTQRDYIDNPDVIGWTREGDSTKAKSGLATVITDGPGGSKRMYVGTSNAGEIWYDLTGNATDKITIGSDGYATFPVNGGSVSVWVQQ

SEQ ID NO: 36113 - protein, 480 aa, Cytophaga sp.
NGTMMQYFEWYVPNDGQQWNRLRTDAPYLSSVGITAVWTPPAYKGTSQADVGYGPYDLYDLGEFNQNGTVRTKYGTKGELKSAVNTLHSNGIQVYGDVVMNHKAGADYTENVTAVEVNPSNRNQETSGEYNIQAWTGFNFPGRGTTYSNFKWQWFHFDGTDWDQSRSLSRIFKFTGKAWDWEVSSENGNYDYLMYADIDYDHPDVVNEMKKWGVWYANEVGLDGYRLDAVKHIKFSFLKDWVDNARAATGKEMFTVGEYWQNDLGALNNYLAKVNYNQSLFDAPLHYNFYAASTGGGYYDMRNILNNTLVASNPTKAVTLVENHDTQPGQSLESTVQPWFKPLAYAFILTRSGGYPSVFYGDMYGTKGTTTREIPALKSKIEPLLKARKDYAYGTQRDYIDNPDVIGWTREGDSTKAKSGLATVITDGPGGSKRMYVGTSNAGEIWYDLTGNRTDKITIGSDGYATFPVNGGSVSVWVQQ

SEQ ID NO: 36114 - protein, 480 aa, Cytophaga sp.
NGTMMQYFEWYVPNDGQQWNRLRTDAPYLSSVGITAVWTPPAYKGTSQADVGYGPYDLYDLGEFNQKGTVRTKYGTKGELKSAVNTLHSNGIQVYGDVVMNHKAGADYTENVTAVEVNPSNRNQETSGEYNIQAWTGFNFPGRGTTYSNFKWQWFHFDGTDWDQSRSLSRIFKFTGKAWDWEVSSENGNYDYLMYADIDYDHPDVVNEMKKWGVWYANEVGLDGYRLDAVKHIKFSFLKDWVDNARAATGKEMFTVGEYWQNDLGALNNYLAKVNYNQSLFDAPLHYNFYAASTGGGYYDMRNILNNTLVASNPTKAVTLVENHDTQPGQSLESTVQPWFKPLAYAFILTRSGGYPSVFYGDMYGTKGTTTREIPALKSKIEPLLKARKDYAYGTQRDYIDNPDVIGWTREGWSTKAKSGLATVITDGPGGSKRMYVGTSNAGEIWYDLTGNRTDKITIGSDGYATFPVNGGSVSVWVQQ

SEQ ID NO: 36115 - protein, 480 aa, Cytophaga sp.
NGTMMQYFEWYVPNDGQQWNRLRTDAPYLSSVGITAVWTPPAYKGTSQADVGYGPYDLYDLGEFNQKGTVRTKYGTKGELKSAVNTLHSNGIQVYGDVVMNHKAGADYTENVTAVEVNPSNRNQETSGEYNIQAWTGFNFPGRGTTYSNFKWQWFHFDGTDWDQSRSLSRIFKFTGKAWDWEVSSENGNYDYLMYADIDYDHPDVVNEMKKWGVWYANEVGLDGYRLDAVKHIKFSFLKDWVDNARAATGKEMFTVGEYWQNDLGALNNYLAKVNYNQSLFDAPLHYNFYAASTGGGYYDMRNILNNTLVASNPTKAVTLVENHDTQPGQSLESTVQPWFKPLAYAFILTRSGGYPSVFYGDMYGTKGTTTREIPALKSKIEPLLKARKDYAYGTQRDYIDNPDVIGWTREGDSTKYKSGLATVITDGPGGSKRMYVGTSNAGEIWYDLTGNRTDKITIGSDGYATFPVNGGSVSVWVQQ

SEQ ID NO: 36116 - protein, 480 aa, Cytophaga sp.
NGTMMQYFEWYVPNDGQQWNRLRTDAPYLSSVGITAVWTPPAYKGTSQADVGYGPYDLYDLGEFNQKGTVRTKYGTKGELKSAVNTLHSNGIQVYGDVVMNHKAGADYTENVTAVEVNPSNRNQETSGEYNIQAWTGFNFPGRGTTYSNFKWQWFHFDGTDWDQSRSLSRIFKFTGKAWDWEVSSENGNYDYLMYADIDYDHPDVVNEMKKWGVWYANEVGLDGYRLDAVKHIKFSFLKDWVDNARAATGKEMFTVGEYWQNDLGALNNYLAKVNYNQSLFDAPLHYNFYAASTGGGYYDMRNILNNTLVASNPTKAVTLVENHDTQPGQSLESTVQPWFKPLAYAFILTRSGGYPSVFYGDMYGTKGTTTREIPALKSKIEPLLKARKDYAYGTQRDYIDNPDVIGWTREGFSTKAKSGLATVITDGPGGSKRMYVGTSNAGEIWYDLTGNRTDKITIGSDGYATFPVNGGSVSVWVQQ

SEQ ID NO: 36117 - protein, 480 aa, Cytophaga sp.
NGTMMQYFEWYVPNDGQQWNRLRTDAPYLSSVGITAVWTPPAYKGTSQADVGYGPYDLYDLGEFNQKGTVRTKYGTKGELKSAVNTLHSNGIQVYGDVVMNHKAGADYTENVTAVEVNPSNRNQETSGEYNIQAWTGFNFPGRGTTYSNFKWQWFHFDGTDWDQSRSLSRIFKFTGKAWDWEVSSENGNYDYLMYADIDYDHPDVVNEMKKWGVWYANEVGLDGYRLDAVKHIKFSFLKDWVDNARAATGKEMFTVGEYWQNDLGALNNYLAKVNYNQSLFDAPLHYNFYAASTGGGYYDMRNILNNTLVASNPTKAVTLVENHDTQPGQSLESTVQPWFKPLAYAFILTRSGGYPSVFYGDMYGTKGTTTREIPALKSKIEPLLKARKDYAYGTQRDYIDNPDVIGWTREGDSTKAKSGLSTVITDGPGGSKRMYVGTSNAGEIWYDLTGNRTDKITIGSDGYATFPVNGGSVSVWVQQ

SEQ ID NO: 36118 - protein, 480 aa, Cytophaga sp.
NGTMMQYFEWYVPNDGQQWNRLRTDAPYLSSVGITAIWTPPAYKGTSQADVGYGPYDLYDLGEFNQKGTVRTKYGTKGELKSAVNTLHSNGIQVYGDVVMNHKAGADYTENVTAVEVNPSNRNQETSGEYNIQAWTGFNFPGRGTTYSNFKWQWFHFDGTDWDQSRSLSRIFKFTGKAWDWEVSSENGNYDYLMYADIDYDHPDVVNEMKKWGVWYANEVGLDGYRLDAVKHIKFSFLKDWVDNARAATGKEMFTVGEYWQNDLGALNNYLAKVNYNQSLFDAPLHYNFYAASTGGGYYDMRNILNNTLVASNPTKAVTLVENHDTQPGQSLESTVQPWFKPLAYAFILTRSGGYPSVFYGDMYGTKGTTTREIPALKSKIEPLLKARKDYAYGTQRDYIDNPDVIGWTREGDSTKAKSGLATVITDGPGGSKRMYVGTSNAGEIWYDLTGNRTDKITIGSDGYATFPVNGGSVSVWVQQ

SEQ ID NO: 36119 - protein, 480 aa, Cytophaga sp.
NGTMMQYFEWYVPNDGQQWNRLRTDAPYLSSVGITAVWTPPAYKGTSQADVGYGPYDLYDLGEFNQKGTVRTKYGTKGELKSAVNTLHSNGIQVYGDVVMNHKAGADYTENVTAVEVNPSNRNQETSGEYNIQAWTGFNFPGRGTTYSNFKWQWFHFDGTDWDQSRSLSRIFKFTGKAWDWEVSSENGNYDYLMYADIDYDHPDVVNEMKKWGVWYANEVGLDGYRLDAVKHIKFSFLKDWVDNARAATGKEMFTVGEYWQNDLGALNNYLAKVNYNQSLFDAPLHYNFYHASTGGGYYDMRNILNNTLVASNPTKAVTLVENHDTQPGQSLESTVQPWFKPLAYAFILTRSGGYPSVFYGDMYGTKGTTTREIPALKSKIEPLLKARKDYAYGTQRDYIDNPDVIGWTREGDSTKAKSGLATVITDGPGGSKRMYVGTSNAGEIWYDLTGNRTDKITIGSDGYATFPVNGGSVSVWVQQ

SEQ ID NO: 36120 - protein, 480 aa, Cytophaga sp.
NGTMMQYFEWYVPNDGQQWNRLRTDAPYLSSVGITAVWTPPAYKGTSQADVGYGPYDLYDLGEFNQKGTVRTKYGTKGELKSAVNTLHSNGIQVYGDVVMNHKAGADYTENVTAVEVNPSNRNQETSGEYNIQAWTGFNFPGRGTTYSNFKWQWFHFDGTDWDQSRSLSRIAKFTGKAWDWEVSSENGNYDYLMYADIDYDHPDVVNEMKKWGVWYANEVGLDGYRLDAVKHIKFSFLKDWVDNARAATGKEMFTVGEYWQNDLGALNNYLAKVNYNQSLFDAPLHYNFYAASTGGGYYDMRNILNNTLVASNPTKAVTLVENHDTQPGQSLESTVQPWFKPLAYAFILTRSGGYPSVFYGDMYGTKGTTTREIPALKSKIEPLLKARKDYAYGTQRDYIDNPDVIGWTREGDSTKAKSGLATVITDGPGGSKRMYVGTSNAGEIWYDLTGNRTDKITIGSDGYATFPVNGGSVSVWVQQ

SEQ ID NO: 36121 - protein, 480 aa, Cytophaga sp.
NGTMMQYFEWYVPNDGQQWNRLRTDAPYLSSVGITAVWTPPAYKGTSQADVGYGPYDLYDLGEFNQKGTVRTKYGTKGELKSAVNTLHSNGIQVYGDVVMNHKAGADYTENVTAVEVNPSNRNQETSGEYNIQAWTGFNFPGRGTHYSNFKWQWFHFDGTDWDQSRSLSRIFKFTGKAWDWEVSSENGNYDYLMYADIDYDHPDVVNEMKKWGVWYANEVGLDGYRLDAVKHIKFSFLKDWVDNARAATGKEMFTVGEYWQNDLGALNNYLAKVNYNQSLFDAPLHYNFYAASTGGGYYDMRNILNNTLVASNPTKAVTLVENHDTQPGQSLESTVQPWFKPLAYAFILTRSGGYPSVFYGDMYGTKGTTTREIPALKSKIEPLLKARKDYAYGTQRDYIDNPDVIGWTREGDSTKAKSGLATVITDGPGGSKRMYVGTSNAGEIWYDLTGNRTDKITIGSDGYATFPVNGGSVSVWVQQ

SEQ ID NO: 36122 - protein, 480 aa, Cytophaga sp.
NGTMMQYFEWYVPNDGQQWNRLRTDAPYLSSVGITAVWTPPAYKGTSQADVGYGPYDLYDLGEFNQKGTVRTKYGTKGELKSAVNTLHSNGIQVYGDVVMNHKAGADYTENVTAVEVNPSNRNQETSGEYNIQAWTGFNFPGRGTTYSNFKWQWFHFDGTDWDQSRSLSRIFKFTGKAWDWEVSSENGNYDYLMYADIDYDHPDVVNEMKKWGVWYANEVGLDGYRLDAVKHIKFSFLKDWVDNARAATGKEMFTVGEYWQNDLGALNNYMAKVNYNQSLFDAPLHYNFYAASTGGGYYDMRNILNNTLVASNPTKAVTLVENHDTQPGQSLESTVQPWFKPLAYAFILTRSGGYPSVFYGDMYGTKGTTTREIPALKSKIEPLLKARKDYAYGTQRDYIDNPDVIGWTREGDSTKAKSGLATVITDGPGGSKRMYVGTSNAGEIWYDLTGNRTDKITIGSDGYATFPVNGGSVSVWVQQ

SEQ ID NO: 36123 - protein, 480 aa, Cytophaga sp.
NGTMMQYFEWYVPNDGQQWNRLRTDAPYLSSVGITAVWTPPAYKGTSQADVGYGPYDLYDLGEFNQKGTVRTKYGTKGELKSAVNTLHSNGIQVYGDVVMNHKAGADYTENVTAVEVNPSNRNQETSGEYNIQAWTGFNFLGRGTTYSNFKWQWFHFDGTDWDQSRSLSRIFKFTGKAWDWEVSSENGNYDYLMYADIDYDHPDVVNEMKKWGVWYANEVGLDGYRLDAVKHIKFSFLKDWVDNARAATGKEMFTVGEYWQNDLGALNNYLAKVNYNQSLFDAPLHYNFYAASTGGGYYDMRNILNNTLVASNPTKAVTLVENHDTQPGQSLESTVQPWFKPLAYAFILTRSGGYPSVFYGDMYGTKGTTTREIPALKSKIEPLLKARKDYAYGTQRDYIDNPDVIGWTREGDSTKAKSGLATVITDGPGGSKRMYVGTSNAGEIWYDLTGNRTDKITIGSDGYATFPVNGGSVSVWVQQ

SEQ ID NO: 36124 - protein, 480 aa, Cytophaga sp.
NHTMMQYFEWYVPNDGQQWNRLRTDAPYLSSVGITAVWTPPAYKGTSQADVGYGPYDLYDLGEFNQKGTVRTKYGTKGELKSAVNTLHSNGIQVYGDVVMNHKAGADYTENVTAVEVNPSNRNQETSGEYNIQAWTGFNFPGRGTTYSNFKWQWFHFDGTDWDQSRSLSRIFKFTGKAWDWEVSSENGNYDYLMYADIDYDHPDVVNEMKKWGVWYANEVGLDGYRLDAVKHIKFSFLKDWVDNARAATGKEMFTVGEYWQNDLGALNNYLAKVNYNQSLFDAPLHYNFYAASTGGGYYDMRNILNNTLVASNPTKAVTLVENHDTQPGQSLESTVQPWFKPLAYAFILTRSGGYPSVFYGDMYGTKGTTTREIPALKSKIEPLLKARKDYAYGTQRDYIDNPDVIGWTREGDSTKAKSGLATVITDGPGGSKRMYVGTSNAGEIWYDLTGNRTDKITIGSDGYATFPVNGGSVSVWVQQ

SEQ ID NO: 36125 - protein, 480 aa, Cytophaga sp.
NGTMMQYFEWYVPNDGQQWNRLRTDAPYLSSVGITAVWTPPAYKGTSQADVGYGPYDLYDLGEFNQKGTVRTKYGTKGELKSAVNTLHSNGIQVYGDVVMNHKAGADYTENVTAVEVNPSNRNQETSGEYNIQAWTGFNFPGRGTTYSNFKWQWFHFDGTDWDQSRSLSRIFKFTGKAWDWEVSSENGNYDYLMYADIDYDHPDVVNEMKKWGVWYANEVGLDGYRLDAVKHIKFRFLKDWVDNARAATGKEMFTVGEYWQNDLGALNNYLAKVNYNQSLFDAPLHYNFYAASTGGGYYDMRNILNNTLVASNPTKAVTLVENHDTQPGQSLESTVQPWFKPLAYAFILTRSGGYPSVFYGDMYGTKGTTTREIPALKSKIEPLLKARKDYAYGTQRDYIDNPDVIGWTREGDSTKAKSGLATVITDGPGGSKRMYVGTSNAGEIWYDLTGNRTDKITIGSDGYATFPVNGGSVSVWVQQ

SEQ ID NO: 36126 - protein, 480 aa, Cytophaga sp.
NGTMMQYFEWYVPNDGQQWNRLRTDAPYLSSVGITAVWTPPAYKGTSQADVGYGPYDLYDLGEFNQKGTVRTKYGTKGELKSAVNTLHSNGIQVYGDVVMNHKAGADYTENVTAVEVNPSNRNQETSGEYNIQAWTGFNFPGRGTTYSNFKWQWFHFDGTDWDQSRSLSRIFKFTGKAWDWEVSSENGNYDYLMYADIDYDHPDVVNEMKKWGVWYANEVGLDGYRLDAVKHIKFSFLKDWVDNARAATGKEMFTVGEYWQNDLGALNNYLAKVNYNQSLFDAPLHYNFYMASTGGGYYDMRNILNNTLVASNPTKAVTLVENHDTQPGQSLESTVQPWFKPLAYAFILTRSGGYPSVFYGDMYGTKGTTTREIPALKSKIEPLLKARKDYAYGTQRDYIDNPDVIGWTREGDSTKAKSGLATVITDGPGGSKRMYVGTSNAGEIWYDLTGNRTDKITIGSDGYATFPVNGGSVSVWVQQ

SEQ ID NO: 36127 - protein, 480 aa, Cytophaga sp.
NGTMMQYFEWYVPNDGQQWNRLRTDAPYLSSVGITAVWTPPAYKGTSQADVGYGPYDLYDLGEFNQKGTVRTKYGTKGELKSAVNTLHSNGIQVYGDVVMNHKAGADYTENVTACEVNPSNRNQETSGEYNIQAWTGFNFPGRGTTYSNFKWQWFHFDGTDWDQSRSLSRIFKFTGKAWDWEVSSENGNYDYLMYADIDYDHPDVVNEMKKWGVWYANEVGLDGYRLDAVKHIKFSFLKDWVDNARAATGKEMFTVGEYWQNDLGALNNYLAKVNYNQSLFDAPLHYNFYAASTGGGYYDMRNILNNTLVASNPTKAVTLVENHDTQPGQSLESTVQPWFKPLAYAFILTRSGGYPSVFYGDMYGTKGTTTREIPALKSKIEPLLKARKDYAYGTQRDYIDNPDVIGWTREGDSTKAKSGLATVITDGPGGSKRMYVGTSNAGEIWYDLTGNRTDKITIGSDGYATFPVNGGSVSVWVQQ

SEQ ID NO: 36128 - protein, 480 aa, Cytophaga sp.
NGTMMQYFEWYVPNDGQQWNRLRTDAPYLSSVGITAVWTPPAYKGTSQADVGYGPYDLYDLGEFNQKGTVRTKYGTKGELKSAVNTLHSNGIQVYGDVVMNHKAGADYTENVTAVEVNPSNRNQETSGEYNIQAWTGFNFPGRGTTYSNFKWQWFHFDGTDWDQSRSLSRIFKFTGKAWDWEVSSENGNYDYLMYADIDYDHPDVVNEMKKWGVWYANEVGLDGYRLDAVKHIKFSFLKDWVDNARAATGKEMFTVGEYWQNDLGALNNYLAKVNYNQSLFDAPLHYNFYAASTGGGYYDMRNIDNNTLVASNPTKAVTLVENHDTQPGQSLESTVQPWFKPLAYAFILTRSGGYPSVFYGDMYGTKGTTTREIPALKSKIEPLLKARKDYAYGTQRDYIDNPDVIGWTREGDSTKAKSGLATVITDGPGGSKRMYVGTSNAGEIWYDLTGNRTDKITIGSDGYATFPVNGGSVSVWVQQ

SEQ ID NO: 36129 - protein, 480 aa, Cytophaga sp.
NGTMMQYFEWYVPNDGQQWNRLRTDAPYLSSVGITAVWTPPAYKGTSQADVGYGPYDLYDLGEFNQKGGVRTKYGTKGELKSAVNTLHSNGIQVYGDVVMNHKAGADYTENVTAVEVNPSNRNQETSGEYNIQAWTGFNFPGRGTTYSNFKWQWFHFDGTDWDQSRSLSRIFKFTGKAWDWEVSSENGNYDYLMYADIDYDHPDVVNEMKKWGVWYANEVGLDGYRLDAVKHIKFSFLKDWVDNARAATGKEMFTVGEYWQNDLGALNNYLAKVNYNQSLFDAPLHYNFYAASTGGGYYDMRNILNNTLVASNPTKAVTLVENHDTQPGQSLESTVQPWFKPLAYAFILTRSGGYPSVFYGDMYGTKGTTTREIPALKSKIEPLLKARKDYAYGTQRDYIDNPDVIGWTREGDSTKAKSGLATVITDGPGGSKRMYVGTSNAGEIWYDLTGNRTDKITIGSDGYATFPVNGGSVSVWVQQ

SEQ ID NO: 36130 - protein, 480 aa, Cytophaga sp.
NGTMMQYFEWYVPNDGQQWNRLRTDAPYLSSVGITAVWTPPAYKGTSQADVGYGPYDLYDLGEFNQKGTVRTKYGTKGELKSAVNTLHSNGIQVYGDVVMNHKAGADYTENVTAVEVNPSNRNQETSGEYNIQAWTGFNFPGRGTTYSNFKWQWFHFDGTDWDQSRSLSRIFKFTGKAWDWEVSSENGNYDYLMYADIDYDHPDVVNEMKKWGVWYANEVGLDGYRLDAVKHIKFSFLKDWVDNARAATGKEMFTVGEYWQNDLGALNNYLAKVNYNQSLFDAPLHYNFYAASTGGGYYDMRNILNNTLVASNPTKAVTLVENHDTQPGQSLESTVQPWFKPLAYAFILTRSGGYPSVFYGDMYGTRGTTTREIPALKSKIEPLLKARKDYAYGTQRDYIDNPDVIGWTREGDSTKAKSGLATVITDGPGGSKRMYVGTSNAGEIWYDLTGNRTDKITIGSDGYATFPVNGGSVSVWVQQ

SEQ ID NO: 36131 - protein, 480 aa, Cytophaga sp.
NGTMMQYFEWYVPNDGQQWNRLRTDAPYLSSVGITAVWTPPAYKGTSQADVGYGPYDLYDLGEFNQKGTVRTKYGTKGELKSAVNTLHSNGIQVYGDVVMNHKAGADYTENVTAVEVNPSNRNQETSGEYNIQAWTGFNFPGRGTTYSNFKWQWFHFDGTDWDQSRSLSRIFKFTGKAWDWEVSSENGNYDYLMYADIDYDHPDVVNEMKKWGVWYANEVGLDGYRLDAVKHIKFSFLKDWVDNARAATGKEMFTVGEYWQNDLGALNNYLAKVNYNQSLFDAPLHYNFYAASTGGGYYDMRNILNNTLVASNPTKAVTLVENHDTQPGQSLESTVQPWFKPCAYAFILTRSGGYPSVFYGDMYGTKGTTTREIPALKSKIEPLLKARKDYAYGTQRDYIDNPDVIGWTREGDSTKAKSGLATVITDGPGGSKRMYVGTSNAGEIWYDLTGNRTDKITIGSDGYATFPVNGGSVSVWVQQ

SEQ ID NO: 36132 - protein, 480 aa, Cytophaga sp.
NGTMMQYFEWYVPNDGQQWNRLRTDAPYLSSVGITAVWTPPAYKGTSQADVGYGPYDLYDLGEFNQKGTVRTKYGTKGELKSAVNTLHSNGIQVYGDVVMNHKAGADYTENVTAVEVNPSNRNQETSGEYNIQAWTGFNFPGRGTTYSNFKWQWFHFDGTDWDQSRSLSRIFKFTGKAWDWEVSSENGNYDYLMYADIDYDHPDVVNEMKKWGVWYANEVGLDGYRLDAVKHIKFSFLKDWVDNARAATGKEMFTVGEYWQNDLGALNNYLAKVNYNQSLFDAPLHYNFYAASTGGGYYDMRNILNNTLVASNPTKAVTLVENHDTQPGQSLESTVQPWFKPLAYAFILTRSGGYPSVFYGDMYGTKGTTTREIPALKSKIEPLLKARKDYAYGTQRDYIDNPDVIGWTREGDSTKAKSGLATVITDGPGGLKRMYVGTSNAGEIWYDLTGNRTDKITIGSDGYATFPVNGGSVSVWVQQ

SEQ ID NO: 36133 - protein, 480 aa, Cytophaga sp.
NGTMMQYFEWYVPNDGQQWNRLRTDAPYLSSVGITAVWTPPAYKGTSQADVGYGPYDLYDLGEFNQKGTVRTKYGTKGELKSAVNTLHSNGIQVYGDVVMNHKAGADYTENVTAVEVNPSNRNQETSGEYNIQAWTGFNFPGRGTTYSNFKWQWFHFDGTDWDQSRSLSRIFKFTGKAWDWEVSSENHNYDYLMYADIDYDHPDVVNEMKKWGVWYANEVGLDGYRLDAVKHIKFSFLKDWVDNARAATGKEMFTVGEYWQNDLGALNNYLAKVNYNQSLFDAPLHYNFYAASTGGGYYDMRNILNNTLVASNPTKAVTLVENHDTQPGQSLESTVQPWFKPLAYAFILTRSGGYPSVFYGDMYGTKGTTTREIPALKSKIEPLLKARKDYAYGTQRDYIDNPDVIGWTREGDSTKAKSGLATVITDGPGGSKRMYVGTSNAGEIWYDLTGNRTDKITIGSDGYATFPVNGGSVSVWVQQ

SEQ ID NO: 36134 - protein, 480 aa, Cytophaga sp.
NGTMMQYFEWYVPNDGQQWNRLRTDAPYLSSVGITAVWTPPAYKGTSQADVGYGPYDLYDLGEFNQKGTVRTKYGTKGELKSAVNTLHSNGIQVYGDVVMNHKAGADYTENVTAVEVNPSNRNQETSGEYNIQAWTGFNFPGRGTTYSNFKWQWFHFDGTDWDQSRSLSRIFKFTGKAWDWEVSSENGNYDYLMYADIDYDHPCVVNEMKKWGVWYANEVGLDGYRLDAVKHIKFSFLKDWVDNARAATGKEMFTVGEYWQNDLGALNNYLAKVNYNQSLFDAPLHYNFYAASTGGGYYDMRNILNNTLVASNPTKAVTLVENHDTQPGQSLESTVQPWFKPLAYAFILTRSGGYPSVFYGDMYGTKGTTTREIPALKSKIEPLLKARKDYAYGTQRDYIDNPDVIGWTREGDSTKAKSGLATVITDGPGGSKRMYVGTSNAGEIWYDLTGNRTDKITIGSDGYATFPVNGGSVSVWVQQ

SEQ ID NO: 36135 - protein, 480 aa, Cytophaga sp.
NGTMMQYFEWYVPNDGQQWNRLRTDAPYLSSVGITAVWTPPAYKGTSQADVGYGPYDLYDLGEFNQKGTVRTKYGTKGELKSAVNTLHSNGIQVYGDVVMNHKAGADYTENVTAVEVNPSNRNQETSGEYNIQAWTGFNFPGRGTTYSNFKWQWFHFDGTDWDQSRSLSRIFKFTGKAWDWEVSSEFGNYDYLMYADIDYDHPDVVNEMKKWGVWYANEVGLDGYRLDAVKHIKFSFLKDWVDNARAATGKEMFTVGEYWQNDLGALNNYLAKVNYNQSLFDAPLHYNFYAASTGGGYYDMRNILNNTLVASNPTKAVTLVENHDTQPGQSLESTVQPWFKPLAYAFILTRSGGYPSVFYGDMYGTKGTTTREIPALKSKIEPLLKARKDYAYGTQRDYIDNPDVIGWTREGDSTKAKSGLATVITDGPGGSKRMYVGTSNAGEIWYDLTGNRTDKITIGSDGYATFPVNGGSVSVWVQQ

SEQ ID NO: 36136 - protein, 480 aa, Cytophaga sp.
NGTMMQYFEWYVPNDGQQWNRLRTDAPYLSSVGITAVWTPPAYKGTSQADVGYGPYDLYDLGEFNQKGTVRTKYGTKGELKSAVNTLHSNGIQVYGDVVMNHKAGADYTENVTAVEVNPSNRNQETSGEYNIQAWTGFNFPGRGTTYSNFKWQWFHFDGTDWDQSRSLSRIFKFTGKAWDWEVSSENGNYDYLMYADIDYDHPDVVNEMKKWGVWYANEVGLDGYRLDAVKHIKFSFLKDWVDNARAATGKEMFTVGEYWQNDLGALNNYLAKVNYNQSLFDAPLHYNFYAASTGGGYYDMRNILNNTLVASNPTKAVTLVENHDTQPGQSLESTVQPWFKPLAYAFILTRSGGYPSVFYGDMYGTKGTTTREIPALKSKIEPLLKARKDYAYGTQRDYIDNPDVIGWTREGDSTKAKSGLATVITDGPIGSKRMYVGTSNAGEIWYDLTGNRTDKITIGSDGYATFPVNGGSVSVWVQQ

SEQ ID NO: 36137 - protein, 480 aa, Cytophaga sp.
NGTMMQYFEWYVPNDGQQWNRLRTDAPYLSSVGITAVWTPPAYKGTSQADVGYGPYDLYDLGEFNQKGTVRTKYGTKGELKSAVNTLHSNGIQVYGDVVMNHKAGADYTENVTAVEVNPSNRNQETSGEYNIQAWTGFNFPGRGTTYSNFKWQWFHFDGTDWDQSRSLSRIFLFTGKAWDWEVSSENGNYDYLMYADIDYDHPDVVNEMKKWGVWYANEVGLDGYRLDAVKHIKFSFLKDWVDNARAATGKEMFTVGEYWQNDLGALNNYLAKVNYNQSLFDAPLHYNFYAASTGGGYYDMRNILNNTLVASNPTKAVTLVENHDTQPGQSLESTVQPWFKPLAYAFILTRSGGYPSVFYGDMYGTKGTTTREIPALKSKIEPLLKARKDYAYGTQRDYIDNPDVIGWTREGDSTKAKSGLATVITDGPGGSKRMYVGTSNAGEIWYDLTGNRTDKITIGSDGYATFPVNGGSVSVWVQQ

SEQ ID NO: 36138 - protein, 480 aa, Cytophaga sp.
NGTMMQYFEWYVPNDGQQWNRLRTDAPYLSSVGITAVWTPPAYKGTSQADVGYGPYDLYDLGEFNQKGTVRTKYGTKGELKSAVNTLHSNGIQVYGDVVMNHKAGADYTENVTAVEVNPSNRNQETSGEYNIQAWTGFNFPGRGTTYSNFKWQWFHFDGTDWDQSRSLSRIFKFTGKAWDWEVSSENGNYDYLMYADIDYDHPDVVNEMKKWGVWYANEVGLDGYRLDAVKHIKFSFLKDWVDNARAVTGKEMFTVGEYWQNDLGALNNYLAKVNYNQSLFDAPLHYNFYAASTGGGYYDMRNILNNTLVASNPTKAVTLVENHDTQPGQSLESTVQPWFKPLAYAFILTRSGGYPSVFYGDMYGTKGTTTREIPALKSKIEPLLKARKDYAYGTQRDYIDNPDVIGWTREGDSTKAKSGLATVITDGPGGSKRMYVGTSNAGEIWYDLTGNRTDKITIGSDGYATFPVNGGSVSVWVQQ

SEQ ID NO: 36139 - protein, 480 aa, Cytophaga sp.
NGTMMQYFEWYVPNDGQQWNRLRTDAPYLSSVGITAVWTPPAYKGTSQADVGYGPYDLYDLGEFNQKGTVRTKYGTKGELKSAVNTLHSNGIQVYGDVVMNHKAGADYTENVTAVEVNPSNRNQETSGEYNIQAWTGFNFPGRGTTYSNFKWQWFHFDGTDWDQSRSLSRIFKFTGKAWDWEVSSENGNYDYLMYADIDYDHPDVVNEMKKWGVWYANEVGLDGYRLDAVKHIKFSFLKDWVDNARAATGKKMFTVGEYWQNDLGALNNYLAKVNYNQSLFDAPLHYNFYAASTGGGYYDMRNILNNTLVASNPTKAVTLVENHDTQPGQSLESTVQPWFKPLAYAFILTRSGGYPSVFYGDMYGTKGTTTREIPALKSKIEPLLKARKDYAYGTQRDYIDNPDVIGWTREGDSTKAKSGLATVITDGPGGSKRMYVGTSNAGEIWYDLTGNRTDKITIGSDGYATFPVNGGSVSVWVQQ

SEQ ID NO: 36140 - protein, 480 aa, Cytophaga sp.
NGTMMQYFEWYVPNDGQQWNRLRTDAPYLSSVGITAVWTPPAYKGTSQADVGYGPYDLYDLGEFNQKGTVRTKYGTKGELKSAVNTLHSNGIQVYGDVVMNHKAGADYTENVTAVEVNPSNRNQETIGEYNIQAWTGFNFPGRGTTYSNFKWQWFHFDGTDWDQSRSLSRIFKFTGKAWDWEVSSENGNYDYLMYADIDYDHPDVVNEMKKWGVWYANEVGLDGYRLDAVKHIKFSFLKDWVDNARAATGKEMFTVGEYWQNDLGALNNYLAKVNYNQSLFDAPLHYNFYAASTGGGYYDMRNILNNTLVASNPTKAVTLVENHDTQPGQSLESTVQPWFKPLAYAFILTRSGGYPSVFYGDMYGTKGTTTREIPALKSKIEPLLKARKDYAYGTQRDYIDNPDVIGWTREGDSTKAKSGLATVITDGPGGSKRMYVGTSNAGEIWYDLTGNRTDKITIGSDGYATFPVNGGSVSVWVQQ

SEQ ID NO: 36141 - protein, 480 aa, Cytophaga sp.
NGTMMQYFEWYVPNDGQQWNRLRTDAPYLSSVGITAVWTPPAYKGTSQADVGYGPYDLYDLGEFNQKGTVRTKYGTKGELKSAVNTLHSNGIQVYGDVVMNHKAGADYTENVTAVEVNPSNRNQSTSGEYNIQAWTGFNFPGRGTTYSNFKWQWFHFDGTDWDQSRSLSRIFKFTGKAWDWEVSSENGNYDYLMYADIDYDHPDVVNEMKKWGVWYANEVGLDGYRLDAVKHIKFSFLKDWVDNARAATGKEMFTVGEYWQNDLGALNNYLAKVNYNQSLFDAPLHYNFYAASTGGGYYDMRNILNNTLVASNPTKAVTLVENHDTQPGQSLESTVQPWFKPLAYAFILTRSGGYPSVFYGDMYGTKGTTTREIPALKSKIEPLLKARKDYAYGTQRDYIDNPDVIGWTREGDSTKAKSGLATVITDGPGGSKRMYVGTSNAGEIWYDLTGNRTDKITIGSDGYATFPVNGGSVSVWVQQ

SEQ ID NO: 36142 - protein, 480 aa, Cytophaga sp.
NGTMMQYFEWYVPNDGQQWNRLRTDAPYLSSVGITAVWTPPAYKGTSQADVGYGPYDLYDLGEFNQKGTVRTKYGTKGELKSAVNTLHSNGIQVYGDVVMNHKAGADYTENVTAVEVNPSNRNQETSGEYNIQAWTGFNFPGRGTTYSNFKWQWFHFDGTDWDQSRSLSRIFKFTGKAWDWEVSSENGNYDYLMYADIDYDHPDVVNEMKKWGVWYANEVGLDGYRLDAVKHIKFSFLKDWVDNARAATGKEMFTVGEYWQNDLGALNNYLAKVNYNQSLFDAPLHYNFYAASTGGGYYDMRNILNNTLVASNPTKAVTLVENHDTQPGQSLESTVQPWFKPLAYAFILTRSGGYPSVFYGDMYGTKGTTTREIPALKSKIEPLLKARKDYAYGTQRDYIDNPDEIGWTREGDSTKAKSGLATVITDGPGGSKRMYVGTSNAGEIWYDLTGNRTDKITIGSDGYATFPVNGGSVSVWVQQ

SEQ ID NO: 36143 - protein, 480 aa, Cytophaga sp.
NGTMMQYFEWYVPNDGQQWNRLRTDAPYLSSVGITAVWTPPAYKGTSQADVGYGPYDLYDLGEFNQKGTVRTKYGTKGELKSAVNTLHSNGIQVYGDVVMNHKAGADYTENVTAVEVNPSNRNQETSGEYNIQAWTGFNFPGRGTTYSNFKWQWFHFDGTDWDQSRSLSRIFKFTGKAWDWEVSSENGNYDYLMYADIDYDHPDVVNEMKKWGVWYANEVGLDGYRLDAVKHIKFSFLKDWVDNARAATGKEMFTVGEYWQNDLGALNNYLAKVNYNQSLFDAPLHYNFYAASTGGGYYDMRNILNNTLVASNPTKAVTLVENHDTQPGQSLESTVQPWFKPLAYAFILTRSGGYPSVFYGDMYGTKGTTTREIPALKSKIEPLLKARKDYAYGTQRDYIDNPDVIGWTREGDSTKAKSGLATVITDGPGGSKRMYVGTSNAGEIWYDLTGNRTDKITIGVDGYATFPVNGGSVSVWVQQ

SEQ ID NO: 36144 - protein, 480 aa, Cytophaga sp.
NGTMMQYFEWYVPNDGQQWNRLRTDAPYLSSVGITAVWTPPAYKGTSQADVGYGPYDLYDLGEFNQKGTVRTKYGTKGELKSAVNTLHSNGIQVYGDVVMNHKAGADYTENVTAVEVNPSNRNQETSGEYNIQAWTGFNFPGRGTTYSNFKWQWFHFDGTDWDQSRSLSRIFKFTGKAWDWEVSSENGNYDYLMYADIDYDHPDVVNEMKKWGVWYANEVGLDGYRLDAVKHIKFSFLKDWVDNARAATGKEMFTVGEYWQNDLCALNNYLAKVNYNQSLFDAPLHYNFYAASTGGGYYDMRNILNNTLVASNPTKAVTLVENHDTQPGQSLESTVQPWFKPLAYAFILTRSGGYPSVFYGDMYGTKGTTTREIPALKSKIEPLLKARKDYAYGTQRDYIDNPDVIGWTREGDSTKAKSGLATVITDGPGGSKRMYVGTSNAGEIWYDLTGNRTDKITIGSDGYATFPVNGGSVSVWVQQ

SEQ ID NO: 36145 - protein, 480 aa, Cytophaga sp.
NGTMMQYFEWYVPNDGQQWNRLRTDAPYLSSVGITAVWTPPAYKGTSQADVGYGPYDLYDLGEFNQKGTVRTKYGTKGELKSAVNTLHSNGIQVYGDVVMNHKAGADYTENVTAVEVNPSNRNQETSGEYNIQAWTGFNFPGRGTTYSNFKWQWFHFDGTDWDQSRSLSRIFKFTGKAWDWEVSSENGNYDYLMYADIDYDHPDVVNEMKKWGVWYANEVGLDGYRLDAVKHIKFSFLKDWVDNARAATGKEMFTVGEYWQNDLGALNNYLAKVNYNQSLFDAPLHYNFYAASTGGGYYDMRNILNNTLVASNPTKAVTLVENHDTQPGQSLESTVQPWFKPLAYAFILTRSGGYPSVFYGDMYGTKGTTTREIPALKSKIEPLLKARKDYAYGTQRDYIDNPDVIGWTREGDSTKAKSGLATVITDGPCGSKRMYVGTSNAGEIWYDLTGNRTDKITIGSDGYATFPVNGGSVSVWVQQ

SEQ ID NO: 36146 - protein, 480 aa, Cytophaga sp.
NGTMMQYFEWYVPNDGQQWNRLRTDAPYLSSVGITAVWTPPAYKGTSQADVGYGPYDLYDLGEFNQKGTVRTKYGTKGELKSAVNTLHSNGIQVYGDVVMNHKAGADYTENVTAVEVNPSNRNQETSGEYNIQAWTGFNFPGRGTTYSNFKWQWFHFDGTDWDQSRSLSRIFKFTGKAWDWEVSSENGNYDYLMYADIDYDHPDVVNEMQKWGVWYANEVGLDGYRLDAVKHIKFSFLKDWVDNARAATGKEMFTVGEYWQNDLGALNNYLAKVNYNQSLFDAPLHYNFYAASTGGGYYDMRNILNNTLVASNPTKAVTLVENHDTQPGQSLESTVQPWFKPLAYAFILTRSGGYPSVFYGDMYGTKGTTTREIPALKSKIEPLLKARKDYAYGTQRDYIDNPDVIGWTREGDSTKAKSGLATVITDGPGGSKRMYVGTSNAGEIWYDLTGNRTDKITIGSDGYATFPVNGGSVSVWVQQ

SEQ ID NO: 36147 - protein, 480 aa, Cytophaga sp.
NGTMMQYFEWYVPNDGQQWNRLRTDAPYLSSVGITAVWTPPAYKGTSQADVGYGPYDLYDLGEFNQKGTVRTKYGTKGELKSAVNTLHSNGIQVYGDVVMNHKAGADYTENVTAVEVNPSNRNQETSGEYNIQAWTGFNFPGRGTRYSNFKWQWFHFDGTDWDQSRSLSRIFKFTGKAWDWEVSSENGNYDYLMYADIDYDHPDVVNEMKKWGVWYANEVGLDGYRLDAVKHIKFSFLKDWVDNARAATGKEMFTVGEYWQNDLGALNNYLAKVNYNQSLFDAPLHYNFYAASTGGGYYDMRNILNNTLVASNPTKAVTLVENHDTQPGQSLESTVQPWFKPLAYAFILTRSGGYPSVFYGDMYGTKGTTTREIPALKSKIEPLLKARKDYAYGTQRDYIDNPDVIGWTREGDSTKAKSGLATVITDGPGGSKRMYVGTSNAGEIWYDLTGNRTDKITIGSDGYATFPVNGGSVSVWVQQ

SEQ ID NO: 36148 - protein, 480 aa, Cytophaga sp.
NGTMMQYFEWYVPNDGQQWNRLRTDAPYLSSVGITAVWTPPAYKGTSQADVGYGPYDLYDLGEFNQKGTVRTKYGTKGELKSAVNTLHSNGIQVYGDVVMNHKAGADYTENVTAVEVNPSNRNQETSGEYNIQAWTGFNFPGRGTTYSNFKWQWFHFDGTDWDQSRSLSRIFKFTGKAWDWEVSSENGNYDYLMYADIDYDHPDVVNEMKKWGVWYANEVGLDGYRLDAVKHIKFSFLKDWVDNARAATGKEMFTVGEYWQDDLGALNNYLAKVNYNQSLFDAPLHYNFYAASTGGGYYDMRNILNNTLVASNPTKAVTLVENHDTQPGQSLESTVQPWFKPLAYAFILTRSGGYPSVFYGDMYGTKGTTTREIPALKSKIEPLLKARKDYAYGTQRDYIDNPDVIGWTREGDSTKAKSGLATVITDGPGGSKRMYVGTSNAGEIWYDLTGNRTDKITIGSDGYATFPVNGGSVSVWVQQ

SEQ ID NO: 36149 - protein, 480 aa, Cytophaga sp.
NGTMMQYFEWYVPNDGQQWNRLRTDAPYLSSVGITAVWTPPAYKGTSQADVGYGPYDLYDLGEFNQKGTVRTKYGTKGELKSAVNTLHSNGIQVYGDVVMNHKAGADYTENVTAVEVNPSNRNQETSGEYNIQAWTGFNFPGRGTTYSNFKWQWFHFDGTDWDQSRSLSRIFKFTGKAWDWEVSSENGNYDYLMYADIDYDHPDVVNEMKKWGVWYANEVGLDGYRLDAVKHIKFSFLKDWVDNARAATGKEMFTVGEYWQNDLGALNNYLAKVNYNQSLFDAPLHYNFYAASTGGGYYDMRNILNNTLVASNPTKAVTLVENHDTQPGQSLESTVQPWFKPLAYAFILTRSGGYPSVFYGDMYGTKGTTTREIPALKSKIEPLLKARKDYAYGTQRDYIDNPDVIGWTREGDSTKADSGLATVITDGPGGSKRMYVGTSNAGEIWYDLTGNRTDKITIGSDGYATFPVNGGSVSVWVQQ

SEQ ID NO: 36150 - protein, 480 aa, Cytophaga sp.
NGTMMQYFEWYVPNDGQQWNRLRTDAPYLSSVGITAVWTPPAYKGTSQADVGYGPYDLYDLGEFNQKGTVRTKYGTKGELKSAVNTLHSNGIQVYGDVVMNHKAGADYTENVTAVEVNPSNRNQETSGEYNIQAWTGFNFPGRGTTYSNFKWQWFHFDGTDWDQSRSLSRIFKFTGKAWDWEVSSENGNYDYLMYADIDYDHPDVVNEMKKWGVWYANEVGLDGYRLDAVKHIKFSFLKDWVDNARAATGKEMFTVGEYWQNDLGALNNYLAKVNYNQSLFDAPLHYNFYAASTGGGYYDMRNILNNTLVASNPTKAVTLVENHDTQPGQSLESTVQPWFKPLAYAFILTRSGGYPSVFYGDMYGTKGTTTREIPALKSKIEPLLKARKDYAYGTQRDYIDNPDVIGWTREGDSTKAKSGLATVITDGPGGSKRMYVGTSNAGEIWYDLTGNYTDKITIGSDGYATFPVNGGSVSVWVQQ

SEQ ID NO: 36151 - protein, 480 aa, Cytophaga sp.
NGTMMQYFEWYVPNDGQQWNRLRTDAPYLSSVGITAVWTPPAYKGTSQADVGYGPYDLYDLGEFNQKGTVRTKYGTKGELKSAVNTLHSNGIQVYGDVVMNHKAGADYTENVTAVEVNPSNRNQETSGEYNIQAWTGFNFPGRGTTYSNFKWQWFHFDGTDWDQSRSLSRIFKFTGKAWDWEVSSENGNYDYGMYADIDYDHPDVVNEMKKWGVWYANEVGLDGYRLDAVKHIKFSFLKDWVDNARAATGKEMFTVGEYWQNDLGALNNYLAKVNYNQSLFDAPLHYNFYAASTGGGYYDMRNILNNTLVASNPTKAVTLVENHDTQPGQSLESTVQPWFKPLAYAFILTRSGGYPSVFYGDMYGTKGTTTREIPALKSKIEPLLKARKDYAYGTQRDYIDNPDVIGWTREGDSTKAKSGLATVITDGPGGSKRMYVGTSNAGEIWYDLTGNRTDKITIGSDGYATFPVNGGSVSVWVQQ

SEQ ID NO: 36152 - protein, 480 aa, Cytophaga sp.
NGTMMQYFEWYVPNDGQQWNRLRTDAPYLSSVGITAVWTPPAYKGTSQADVGYGPYDLYDLGEFNQKGTVRTKYGTKGELKSAVNTLHSNGIQVYGDVVMNHKAGADYTENVTAVEVNPSNRNQETSGEYNIQAWTGFNFPGRGTTYSNFKWQWFHFDGTDWDQSRSLSRIFKFTGKAWDWEVSSENGNYDYLMYADIDYDHPDVVNEMKKWGVWYANEVGLDGYRLDAVKHIKFSFLKDWVDNARAATGKEMFTVGEYWQNDLGALNNYLAKVNYNQSLFDAPLHYNFYAASTGGGYYDMRNILNNTLVASNPTKAVTLVENHDTQPGQSLESTVQPWFKPLAYAFILTRSGGYPSVFYGDLYGTKGTTTREIPALKSKIEPLLKARKDYAYGTQRDYIDNPDVIGWTREGDSTKAKSGLATVITDGPGGSKRMYVGTSNAGEIWYDLTGNRTDKITIGSDGYATFPVNGGSVSVWVQQ

SEQ ID NO: 36153 - protein, 480 aa, Cytophaga sp.
NGTMMQYFEWYVPNDGQQWNRLRTDAPYLSSVGITAVWTPPAYKGTSQADVGYGPYDLYDLGEFNQKGTVRTKYGTKGELKSAVNTLHSNGIQVYGDVVMNHKAGADYTENVTAVEVNPSNRNQETSGEYNIQAWTGFNFPGRGTTYSNFKWQWFHFDGTDWDQSRSLSRIFKFTGKAWDWEVSSENGNYDYLMYADIDYDHPDVVNEMKKWGVWYANEVGLDGYRLDAVKHIKFSFLKDWVDNARAATGKEMFTVGEYWQNDLGALNNYLAKVNYNQSLFDAPLHYNFYAASTGGGYYDMRNILNNTLVASNPTKAVTLVENHDTQPGQSLESTVQPWFKPLAYAFILTRSGGYPSVFYGDMYGTKGTTTREIPALKSKIEPLLKARKDYAYGTQRDYIDNPDVIGWTREGDSTKVKSGLATVITDGPGGSKRMYVGTSNAGEIWYDLTGNRTDKITIGSDGYATFPVNGGSVSVWVQQ

SEQ ID NO: 36154 - protein, 480 aa, Cytophaga sp.
NGTMMQYFEWYVPNDGQQWNRLRTDAPYLSSVGITAVWTPPAYKGTSQADVGYGPYDLYDLGEFNQKGTVRTKYGTKGELKSAVNTLHSNGIQVYGDVVMNHKAGADYTENVTAAEVNPSNRNQETSGEYNIQAWTGFNFPGRGTTYSNFKWQWFHFDGTDWDQSRSLSRIFKFTGKAWDWEVSSENGNYDYLMYADIDYDHPDVVNEMKKWGVWYANEVGLDGYRLDAVKHIKFSFLKDWVDNARAATGKEMFTVGEYWQNDLGALNNYLAKVNYNQSLFDAPLHYNFYAASTGGGYYDMRNILNNTLVASNPTKAVTLVENHDTQPGQSLESTVQPWFKPLAYAFILTRSGGYPSVFYGDMYGTKGTTTREIPALKSKIEPLLKARKDYAYGTQRDYIDNPDVIGWTREGDSTKAKSGLATVITDGPGGSKRMYVGTSNAGEIWYDLTGNRTDKITIGSDGYATFPVNGGSVSVWVQQ

SEQ ID NO: 36155 - protein, 480 aa, Cytophaga sp.
NGTMMQYFEWYVPNDGQQWNRLRTDAPYLSSVGITAVWTPPAYKGTSQADVGYGPYDLYDLGEFNQKGTVRTKYGTKGELKSAVNTLHSNGIQVYGDVVMNHKAGADYTENVTAVEVNPSNRNQETSGEYNIQAWTGFNFPGRGTTYSNFKWQWFHFDGTDWDQSRSLSRIFKFTGKAWDWEVSSENGNYDYLMYADIDYDHPDVVNEMKKWGVWYANEVGLDGYRLDAVKHIKFSFLKDWVDNARAATGKEMFTVGEYWDNDLGALNNYLAKVNYNQSLFDAPLHYNFYAASTGGGYYDMRNILNNTLVASNPTKAVTLVENHDTQPGQSLESTVQPWFKPLAYAFILTRSGGYPSVFYGDMYGTKGTTTREIPALKSKIEPLLKARKDYAYGTQRDYIDNPDVIGWTREGDSTKAKSGLATVITDGPGGSKRMYVGTSNAGEIWYDLTGNRTDKITIGSDGYATFPVNGGSVSVWVQQ

SEQ ID NO: 36156 - protein, 480 aa, Cytophaga sp.
NGTMMQYFEWYVPNDGQQWNRLRTDAPYLSSVGITAVWTPPAYKGTSQADVGYGPYDLYDLGEFNQKGTVRTKYGTKGELKSAVNTLHSNGIQVYGDVVMNHKAGADYTENVTAVEVNPSNRNQETSGEYNIQAWTGFNFFGRGTTYSNFKWQWFHFDGTDWDQSRSLSRIFKFTGKAWDWEVSSENGNYDYLMYADIDYDHPDVVNEMKKWGVWYANEVGLDGYRLDAVKHIKFSFLKDWVDNARAATGKEMFTVGEYWQNDLGALNNYLAKVNYNQSLFDAPLHYNFYAASTGGGYYDMRNILNNTLVASNPTKAVTLVENHDTQPGQSLESTVQPWFKPLAYAFILTRSGGYPSVFYGDMYGTKGTTTREIPALKSKIEPLLKARKDYAYGTQRDYIDNPDVIGWTREGDSTKAKSGLATVITDGPGGSKRMYVGTSNAGEIWYDLTGNRTDKITIGSDGYATFPVNGGSVSVWVQQ

SEQ ID NO: 36157 - protein, 480 aa, Cytophaga sp.
NGTMMQYFEWYVPNDGQQWNRLRTDAPYLSSVGITAVWTPPAYKGTSQADVGYGPYDLYDLGEFNQKGTVRTKYGTKGELKSAVNTLHSNGIQVYGDVVMNHKAGADYTENVTAVEVNPSNRNQETSGEYNIQAWTGFNFPGRGTTYSNFKWQWFHFDGTDWDQSRSLSRIFKFTGKAWDWEVSSENGNYDYLMYADIDYDHPDVVNEMKKWGVWYANEVGLDGYRLDAVKHIKFSFLKDWVDNARAATGKEMFTVGEYWQNDLGALNNYLAKVNYNQSLFDAPLHYNFYAASTGGGYYDMRNILNNTLVASNPTKAVTLVENHDTQPGQSLESTVQPWFKPLAYAFILTRSGGYPSVFYGDMYGTKGTTTREIPALKSKIEPLLKARKDYAYGTQRDYIDNPDVIGWTREGDSTKAKSGLATVITDGPGGSKRMYVGTSNAGEIWYDLTGNMTDKITIGSDGYATFPVNGGSVSVWVQQ

SEQ ID NO: 36158 - protein, 480 aa, Cytophaga sp.
NGTMMQYFEWYVPNDGQQWNRLRTDAPYLSSVGITAVWTPPAYKGTSQADVGYGPYDLYDLGEFNQKGTVRTKYGTKGELKSAVNTLHSNGIQVYGDVVMNHKAGADYTENVTAVEVNPSNRNQETSGEYNIQAWTGFNFPGRGTTYSNFKWQWFHFDGTDWDQSRSLSRIFKFTGKAWDWEVSSENGNYDYLMYADIDYDHPDVVNEMKKWGVWYANEVGLDGYRLDAVKHIKFSFLKDWVDNARAATGKEMFTVGEYWQNDLGALNNYLAKVNYNQSLFDAPLHYNFYAASTGHGYYDMRNILNNTLVASNPTKAVTLVENHDTQPGQSLESTVQPWFKPLAYAFILTRSGGYPSVFYGDMYGTKGTTTREIPALKSKIEPLLKARKDYAYGTQRDYIDNPDVIGWTREGDSTKAKSGLATVITDGPGGSKRMYVGTSNAGEIWYDLTGNRTDKITIGSDGYATFPVNGGSVSVWVQQ

SEQ ID NO: 36159 - protein, 480 aa, Cytophaga sp.
NGTMMQYFEWYVPNDGQQWNRLRTDAPYLSSVGITAVWTPPAYKGTSQADVGYGPYDLYDLGEFNQKGTVRTKYGTKGELKSAVNTLHSNGIQVYGDVVMNHKAGADYTENVTAVEVNPSNRNQETSGELNIQAWTGFNFPGRGTTYSNFKWQWFHFDGTDWDQSRSLSRIFKFTGKAWDWEVSSENGNYDYLMYADIDYDHPDVVNEMKKWGVWYANEVGLDGYRLDAVKHIKFSFLKDWVDNARAATGKEMFTVGEYWQNDLGALNNYLAKVNYNQSLFDAPLHYNFYAASTGGGYYDMRNILNNTLVASNPTKAVTLVENHDTQPGQSLESTVQPWFKPLAYAFILTRSGGYPSVFYGDMYGTKGTTTREIPALKSKIEPLLKARKDYAYGTQRDYIDNPDVIGWTREGDSTKAKSGLATVITDGPGGSKRMYVGTSNAGEIWYDLTGNRTDKITIGSDGYATFPVNGGSVSVWVQQ

SEQ ID NO: 36160 - protein, 480 aa, Cytophaga sp.
NGTMMQYFEWYVPNDGQQWNRLRTDAPYLSSVGITAVWTPPAYKGTSQADVGYGPYDLYDLGEFNQKGTVRTKYGTKGELKSAVNTLHSNGIQVYGDVVMNHKAGADYTENVTAVEVNPSNRNQETSGEYNIQAWTGFNFPGRGTTYSNFKWQWFHFDGTDWDQSRSLSRIFKFTGKAWDWEVSSENGNYDYLMYADIDYDHPDVVNEMKKWGVWYANEVGLDGYRLDAVKHIKFSFLKDWVDNARAATGKEMFTVGEYWQNDLGALNNYLAKVNYNQSLFDAPLHYNFYAASTGGGYYDMRNILNNTLVASNPTKAVTLVENHDTQPGQSLESTVQPWFKPLAYAFILTRSGGYPSVFYGDMYGTKGTTTREIPALKSKIEPLLKARKDYAYGTQRDYIDNPDVIGWTREGDSTKAKSGLCTVITDGPGGSKRMYVGTSNAGEIWYDLTGNRTDKITIGSDGYATFPVNGGSVSVWVQQ

SEQ ID NO: 36161 - protein, 480 aa, Cytophaga sp.
NGTMMQYFEWYVPNDGQQWNRLRTDAPYLSSVGITAVWTPPAYKGTSQADVGYGPYDLYDLGEFNQKGTVRTKYGTKGELKSAVNTLHSNGIQVYGDVVMNHKAGADYTENVTAVEVNPSNRNQETSGEYNIQAWTGFNFPGRGTTYSNFKWQWFHFDGTDWDQSRSLSRIFKFTGKAWDWEVSSENGNYDYLMYADIDYDHPDVVNEMKKWGVWYANEVGLDGYRLDAVKHIKFSFLKDWVDNARAATGKEMFTVGEYWQNDLGALNNYLAKVNYNQSLFDAPLHYNFYAASTGGGYYDMRNILNNTLVASNPTKAVTLVENHDTQPGQSLESTVQPWFKPLAYAFILTRSGGYPSVFYGDMYGTKGTTTREIPALKSKIEPLLKARKDYAYGTQRDYIDNPDVIGWTREGDSTKAKSGLATVITDGPGGSKRMYVGTSNTGEIWYDLTGNRTDKITIGSDGYATFPVNGGSVSVWVQQ

SEQ ID NO: 36162 - protein, 480 aa, Cytophaga sp.
NGTMMQYFEWYVPNDGQQWNRLRTDAPYLSSVGITAVWTPPAYKGTSQADVGYGPYDLYDLGEFNQKGTVRTKYGTKGELKSAVNTLHSNGIQVYGDVVMNHKAGADYTENVTAVEVNPSNRNQETSGEYNIQAWTGFNFPGRGTTYSNFKWQWFHFDGTDWDQSRSLSRIFKFTGKAWDWEVSSENGNYDYLMYADIDYDHPDVVNEMKKWGVWYANEVGLDGYRLDAVKHIKFSFLKDWVDNARAATGKEMFTVGEYWRNDLGALNNYLAKVNYNQSLFDAPLHYNFYAASTGGGYYDMRNILNNTLVASNPTKAVTLVENHDTQPGQSLESTVQPWFKPLAYAFILTRSGGYPSVFYGDMYGTKGTTTREIPALKSKIEPLLKARKDYAYGTQRDYIDNPDVIGWTREGDSTKAKSGLATVITDGPGGSKRMYVGTSNAGEIWYDLTGNRTDKITIGSDGYATFPVNGGSVSVWVQQ

SEQ ID NO: 36163 - protein, 480 aa, Cytophaga sp.
NGTMMQYFEWYVPNDGQQWNRLRTDAPYLSSVGITAVWTPPAYKGTSQADVGYGPYDLYDLGEFNQKGTVRTKYGTKGELKSAVNTLHSNGIQVYGDVVMNHKAGADYTENVTAVEVNPSNRNQETSGEYNIQAWTGFNFPGRGTAYSNFKWQWFHFDGTDWDQSRSLSRIFKFTGKAWDWEVSSENGNYDYLMYADIDYDHPDVVNEMKKWGVWYANEVGLDGYRLDAVKHIKFSFLKDWVDNARAATGKEMFTVGEYWQNDLGALNNYLAKVNYNQSLFDAPLHYNFYAASTGGGYYDMRNILNNTLVASNPTKAVTLVENHDTQPGQSLESTVQPWFKPLAYAFILTRSGGYPSVFYGDMYGTKGTTTREIPALKSKIEPLLKARKDYAYGTQRDYIDNPDVIGWTREGDSTKAKSGLATVITDGPGGSKRMYVGTSNAGEIWYDLTGNRTDKITIGSDGYATFPVNGGSVSVWVQQ

SEQ ID NO: 36164 - protein, 480 aa, Cytophaga sp.
NGTMMQYFEWYVPNDGQQWNRLRTDAPYLSSVGITAVWTPPAYKGTSQADVGYGPYDLYDLGEFNQKGTVRTKYGTKGELKSAVNTLHSNGIQVYGDVVMNHKAGADYTENVTAVEVNPSNRNQETSGEYNIQAWTGFNFPGRGTTYSNFKWQWFHFDGTDWDQSRSLSRIFKFTGKAWDWEVSSENGNYDYLMYADIDYDHPGVVNEMKKWGVWYANEVGLDGYRLDAVKHIKFSFLKDWVDNARAATGKEMFTVGEYWQNDLGALNNYLAKVNYNQSLFDAPLHYNFYAASTGGGYYDMRNILNNTLVASNPTKAVTLVENHDTQPGQSLESTVQPWFKPLAYAFILTRSGGYPSVFYGDMYGTKGTTTREIPALKSKIEPLLKARKDYAYGTQRDYIDNPDVIGWTREGDSTKAKSGLATVITDGPGGSKRMYVGTSNAGEIWYDLTGNRTDKITIGSDGYATFPVNGGSVSVWVQQ

SEQ ID NO: 36165 - protein, 480 aa, Cytophaga sp.
NGTMMQYFEWYVPNDGQQWNRLRTDAPYLSSVGITAVWTPPAYKGTSQADVGYGPYDLYDLGEFNQKGTVRTKYGTKGELKSAVNTLHSNGIQIYGDVVMNHKAGADYTENVTAVEVNPSNRNQETSGEYNIQAWTGFNFPGRGTTYSNFKWQWFHFDGTDWDQSRSLSRIFKFTGKAWDWEVSSENGNYDYLMYADIDYDHPDVVNEMKKWGVWYANEVGLDGYRLDAVKHIKFSFLKDWVDNARAATGKEMFTVGEYWQNDLGALNNYLAKVNYNQSLFDAPLHYNFYAASTGGGYYDMRNILNNTLVASNPTKAVTLVENHDTQPGQSLESTVQPWFKPLAYAFILTRSGGYPSVFYGDMYGTKGTTTREIPALKSKIEPLLKARKDYAYGTQRDYIDNPDVIGWTREGDSTKAKSGLATVITDGPGGSKRMYVGTSNAGEIWYDLTGNRTDKITIGSDGYATFPVNGGSVSVWVQQ

SEQ ID NO: 36166 - protein, 480 aa, Cytophaga sp.
NGTMMQYFEWYVPNDGQQWNRLRTDAPYLSSVGITAVWTPPAYKGTSQADVGYGPYDLYDLGEFNQKGTVRTKYGTKGELKSAVNTLHSNGIQVYGDVVMNHKAGADYTENVTAVEVNPSNRNQETSGEYNIQAWTGFNFPGRGTTYSNFKWQWFHFDGTDWDQSRSLSRIFKFTGKAWDWEVSSENGNYDYLMYADIDYDHPDVVNEMKKWGVWYANEVGLDGYRLDAVKHIKFSFLKDWVDNARAATGKEMFTVGEYWQNDLIALNNYLAKVNYNQSLFDAPLHYNFYAASTGGGYYDMRNILNNTLVASNPTKAVTLVENHDTQPGQSLESTVQPWFKPLAYAFILTRSGGYPSVFYGDMYGTKGTTTREIPALKSKIEPLLKARKDYAYGTQRDYIDNPDVIGWTREGDSTKAKSGLATVITDGPGGSKRMYVGTSNAGEIWYDLTGNRTDKITIGSDGYATFPVNGGSVSVWVQQ

SEQ ID NO: 36167 - protein, 480 aa, Cytophaga sp.
NGTMMQYFEWYVPNDGQQWNRLRTDAPYLSSVGITAVWTPPAYKGTSQADVGYGPYDLYDLGEFNQKGTVRTKYGTKGELKSAVNTLHSNGIQVYGDVVMNHKAGADYTENVTAVEVNPSNRNQETSGEYNIQAWTGFNFPGRGTTYSNFKWQWFHFDGTDWDQSRSLSRIFKFTGKAWDWEVSSENGNYDYLMYADIDYDHPDVVNEMKKWGVWYANEVGLDGYRLDAVKHIKFSFLKDWVDNARAATGKEMFTVGEYWQNDLGALNNYLAKVNYNQSLFDAPLHYNFYAASTGGGYYDMRNILNNTLVASNPTKAVTLVENHDTQPGQSLESTVQPWFKPLAYAFILTRSGGYPSVFYGDMYGTKGTTTREIPALKSKIEPLLKARKDYAYGTQRDYIDNPDVIGWTREGDSTKAKSGLATVITDGPGGSKRMKVGTSNAGEIWYDLTGNRTDKITIGSDGYATFPVNGGSVSVWVQQ

SEQ ID NO: 36168 - protein, 480 aa, Cytophaga sp.
NGTMMQYFEWYVPNDGQQWNRLRTDAPYLSSVGITAVWTPPAYKGTSQADVGYGPYDLYDLGEFNQKGTVRTKYGTKGELKSAVNTLHSNGIQVYGDVVMNHKAGADYTENVTAVEVNPSNRNQETSGEYNIQAWTGFNFPGRGTTYSNFKWQWFHFDGTDWDQSRSLSRIFKFTGKAWDWEVSSENGNYDYLMYADIDYDHPDVVNEMKKWGVWYANEVGLDGYRLDAVKHIKFSFLKDWVDNARAATGKEMFTVGEYWQNDLGALNNYLAKVNYNQSLFDAPLHYNFYAASTGQGYYDMRNILNNTLVASNPTKAVTLVENHDTQPGQSLESTVQPWFKPLAYAFILTRSGGYPSVFYGDMYGTKGTTTREIPALKSKIEPLLKARKDYAYGTQRDYIDNPDVIGWTREGDSTKAKSGLATVITDGPGGSKRMYVGTSNAGEIWYDLTGNRTDKITIGSDGYATFPVNGGSVSVWVQQ

SEQ ID NO: 36169 - protein, 480 aa, Cytophaga sp.
NGTMMQYFEWYVPNDGQQWNRLRTDAPYLSSVGITAVWTPPAYKGTSQADVGYGPYDLYDLGEFNQKGTVRTKYGTKGELKSAVNTLHSNGIQVYGDVVMNHKAGADYTENVTAVEVNRSNRNQETSGEYNIQAWTGFNFPGRGTTYSNFKWQWFHFDGTDWDQSRSLSRIFKFTGKAWDWEVSSENGNYDYLMYADIDYDHPDVVNEMKKWGVWYANEVGLDGYRLDAVKHIKFSFLKDWVDNARAATGKEMFTVGEYWQNDLGALNNYLAKVNYNQSLFDAPLHYNFYAASTGGGYYDMRNILNNTLVASNPTKAVTLVENHDTQPGQSLESTVQPWFKPLAYAFILTRSGGYPSVFYGDMYGTKGTTTREIPALKSKIEPLLKARKDYAYGTQRDYIDNPDVIGWTREGDSTKAKSGLATVITDGPGGSKRMYVGTSNAGEIWYDLTGNRTDKITIGSDGYATFPVNGGSVSVWVQQ

SEQ ID NO: 36170 - protein, 480 aa, Cytophaga sp.
NGTMMQYFEWYVPNDGQQWNRLRTDAPYLSSVGITAVWTPPAYKGTSQADVGYGPYDLYDLGEFNQKGTVRTKYGTKGELKSAVNTLHSNGIQVYGDVVMNHKAGADYTENVTAVEVNPSNRNQETSGEYNIQAWTGFNFPGRGTTYSNFKWQWFHFDGTDWDQSRSLSRIFKFTGKAWDWEVSSENGNYDYLMYADIDYDHLDVVNEMKKWGVWYANEVGLDGYRLDAVKHIKFSFLKDWVDNARAATGKEMFTVGEYWQNDLGALNNYLAKVNYNQSLFDAPLHYNFYAASTGGGYYDMRNILNNTLVASNPTKAVTLVENHDTQPGQSLESTVQPWFKPLAYAFILTRSGGYPSVFYGDMYGTKGTTTREIPALKSKIEPLLKARKDYAYGTQRDYIDNPDVIGWTREGDSTKAKSGLATVITDGPGGSKRMYVGTSNAGEIWYDLTGNRTDKITIGSDGYATFPVNGGSVSVWVQQ

SEQ ID NO: 36171 - protein, 480 aa, Cytophaga sp.
NGTMMQYFEWYVPNDGQQWNRLRTDAPYLSSVGITAVWTPPAYKGTSQADVGYGPYDLYDLGEFNQKGTVRTKYGTKGELKSAVNTLHSNGIQVYGDVVMNHKAGADYTENVTAVEVNPSNRNQETSGEFNIQAWTGFNFPGRGTTYSNFKWQWFHFDGTDWDQSRSLSRIFKFTGKAWDWEVSSENGNYDYLMYADIDYDHPDVVNEMKKWGVWYANEVGLDGYRLDAVKHIKFSFLKDWVDNARAATGKEMFTVGEYWQNDLGALNNYLAKVNYNQSLFDAPLHYNFYAASTGGGYYDMRNILNNTLVASNPTKAVTLVENHDTQPGQSLESTVQPWFKPLAYAFILTRSGGYPSVFYGDMYGTKGTTTREIPALKSKIEPLLKARKDYAYGTQRDYIDNPDVIGWTREGDSTKAKSGLATVITDGPGGSKRMYVGTSNAGEIWYDLTGNRTDKITIGSDGYATFPVNGGSVSVWVQQ

SEQ ID NO: 36172 - protein, 480 aa, Cytophaga sp.
NGTMMQYFEWYVPNDGQQWNRLRTDAPYLSSVGITAVWTPPAYKGTSQADVGYGPYDLYDLGEFNQKGTVRTKYGTKGELKSAVNTLHSNGIQVYGDVVMNHKAGADYTENVTAVEVNPSNRNQETSGEYNIQAWTGFNFPGRGTTYSNFKWQWFHFDGTDWDQSRSLSRIFKFTGKAWDWEVSSENGNYDYLMYADIDYDHPDVVNEMKKWGVWYANEVGLDGYRLDAVKHIKFSFLKDWVDNARAATGKEMFTVGEYWQNDLGALNNYLAKVNYNQSLFDAPLHYNFYAASTGGGYYDMRNILNNTLVASNPTKAVTLVENHDTQPGQSLESTVQPWFKPLAYAFILTRSGGYPSVFYGDMYGTKGTTTREIPALKSKIEPLLKARKDYAYGTQRDYIDNPDVIGWTREGDSTKAKSGLATVITDGPEGSKRMYVGTSNAGEIWYDLTGNRTDKITIGSDGYATFPVNGGSVSVWVQQ

SEQ ID NO: 36173 - protein, 480 aa, Cytophaga sp.
NGTMMQYFEWYVPNDGQQWNRLRTDAPYLSSVGITAVWTPPAYKGTSQADVGYGPYDLYDLGEFNQKGTVRTKYGTKGELKSAVNTLHSNGIQVYGDVVMNHKAGADYTENVTAVEVNPSNRNQETSGEYNIQAWTGFNFPGRGTTYSNFKWQWFHFDGTDWMQSRSLSRIFKFTGKAWDWEVSSENGNYDYLMYADIDYDHPDVVNEMKKWGVWYANEVGLDGYRLDAVKHIKFSFLKDWVDNARAATGKEMFTVGEYWQNDLGALNNYLAKVNYNQSLFDAPLHYNFYAASTGGGYYDMRNILNNTLVASNPTKAVTLVENHDTQPGQSLESTVQPWFKPLAYAFILTRSGGYPSVFYGDMYGTKGTTTREIPALKSKIEPLLKARKDYAYGTQRDYIDNPDVIGWTREGDSTKAKSGLATVITDGPGGSKRMYVGTSNAGEIWYDLTGNRTDKITIGSDGYATFPVNGGSVSVWVQQ

SEQ ID NO: 36174 - protein, 480 aa, Cytophaga sp.
NGTMMQYFEWYVPNDGQQWNRLRTDAPYLSSVGITAVWTPPAYKGTSQADVGYGPYDLYDLGEFNQKGTVRTKYGTKGELKSAVNTLHSNGIQVYGDVVMNHKAGADYTENVTAVEVNPSNRNQETSGEYNIQAWTGFNFPGRGTTYSNFKWQWFHFDGTDWDQSRSLSRIFKFTGKAWDWEVSSENGNYDYLMYADIDYDHPDVVNEMKKWGVWYANEVGLDGYRLDAVKHIKFSFLKDWVDNARAATGKEMFTVGEYWQNDLGALNNYLAKVNYNQSLFDAPLHYNFYAASTGGGYYDMRNILNNTLVASNPTKAVTLVENHDTQPGQSLESTVQPWFKPLAYAFILTRSGGYPSVFYGDMYGTKGTTTREIPALKSKIEPLLKARKDYAYGTQRDYIDNPDVIGWTREGDSTKAKSGLATVITDGPLGSKRMYVGTSNAGEIWYDLTGNRTDKITIGSDGYATFPVNGGSVSVWVQQ

SEQ ID NO: 36175 - protein, 480 aa, Cytophaga sp.
NGTMMQYFEWYVPNDGQQWNRLRTDAPYLSSVGITAVWTPPAYKGTSQADVGYGPYDLYDLGEFNQKGTVRTKYGTKGELKSAVNTLHSNGIQVYGDVVMNHKAGADYTENVTAVEVNPSNRNQETSGEYNIQAWTGFNFPGRGTTYSNFKWQWFHFDGTDWDQSRSLSRIFKFTGKAWDWEVSSENGNYDYLMYADIDYDHPDVVNEMKKWGVWYANEVGLDGYRLDAVKHIKFVFLKDWVDNARAATGKEMFTVGEYWQNDLGALNNYLAKVNYNQSLFDAPLHYNFYAASTGGGYYDMRNILNNTLVASNPTKAVTLVENHDTQPGQSLESTVQPWFKPLAYAFILTRSGGYPSVFYGDMYGTKGTTTREIPALKSKIEPLLKARKDYAYGTQRDYIDNPDVIGWTREGDSTKAKSGLATVITDGPGGSKRMYVGTSNAGEIWYDLTGNRTDKITIGSDGYATFPVNGGSVSVWVQQ

SEQ ID NO: 36176 - protein, 480 aa, Cytophaga sp.
NGTMMQYFEWYVPNDGQQWNRLRTDAPYLSSVGITAVWTPPAYKGTSQADVGYGPYDLYDLGEFNQKGTVRTKYGTKGELKSAVNTLHSNGIQVYGDVVMNHKAGADYTENVTAVEVNPSNRNQETSGEYNIQAWTGFNFPGRGTTYSNFKWQWFHFDGTDWDQSRSLSRIFKFTGKAWDWEVSSENGNYDYLMYADIDYDHPDVVNEMKKWGVWYANEVGLDGYRLDAVKHIKFSFLKDWVDNARAATGKEMFTVGEYWQNDLGALNNYLAKVNYNQSLFDAPLHYNFYAASTGGGYYDMRNILNNTLVASNPTKAVTLVENHDTQPGQSLESTVQPWFKPLAYAFILTRSGGYPSVFYGDMYGTKGTTTREIPALKSKIEPLLKARKDYAYGTQRDYIDNPDVIGWTREGDSTKAKSGLATVITDGPGGSKRMYVGTSNAGEIWVDLTGNRTDKITIGSDGYATFPVNGGSVSVWVQQ

SEQ ID NO: 36177 - protein, 480 aa, Cytophaga sp.
NGTMMQYFEWYVPNDGQQWNRLRTDAPYLSSVGITAVWTPPAYKGTSQADVGYGPYDLYDLGEFNQKGTVRTKYGTKGELKSAVNTLHSNGIQVYGDVVMNHKAGADYTENVTAVEVNPSNRNQETSGEYNRQAWTGFNFPGRGTTYSNFKWQWFHFDGTDWDQSRSLSRIFKFTGKAWDWEVSSENGNYDYLMYADIDYDHPDVVNEMKKWGVWYANEVGLDGYRLDAVKHIKFSFLKDWVDNARAATGKEMFTVGEYWQNDLGALNNYLAKVNYNQSLFDAPLHYNFYAASTGGGYYDMRNILNNTLVASNPTKAVTLVENHDTQPGQSLESTVQPWFKPLAYAFILTRSGGYPSVFYGDMYGTKGTTTREIPALKSKIEPLLKARKDYAYGTQRDYIDNPDVIGWTREGDSTKAKSGLATVITDGPGGSKRMYVGTSNAGEIWYDLTGNRTDKITIGSDGYATFPVNGGSVSVWVQQ

SEQ ID NO: 36178 - protein, 480 aa, Cytophaga sp.
NGTMMQYFEWYVPNDGQQWNRLRTDAPYLSSVGITAVWTPPAYKGTSQADVGYGPYDLYDLGEFNQKGTVRTKYGTKGELKSAVNTLHSNGIQVYGDVVMNHKAGADYTENVTAVEVNPSNRNAETSGEYNIQAWTGFNFPGRGTTYSNFKWQWFHFDGTDWDQSRSLSRIFKFTGKAWDWEVSSENGNYDYLMYADIDYDHPDVVNEMKKWGVWYANEVGLDGYRLDAVKHIKFSFLKDWVDNARAATGKEMFTVGEYWQNDLGALNNYLAKVNYNQSLFDAPLHYNFYAASTGGGYYDMRNILNNTLVASNPTKAVTLVENHDTQPGQSLESTVQPWFKPLAYAFILTRSGGYPSVFYGDMYGTKGTTTREIPALKSKIEPLLKARKDYAYGTQRDYIDNPDVIGWTREGDSTKAKSGLATVITDGPGGSKRMYVGTSNAGEIWYDLTGNRTDKITIGSDGYATFPVNGGSVSVWVQQ

SEQ ID NO: 36179 - protein, 480 aa, Cytophaga sp.
NGTMMQYFEWYVPNDGQQWNRLRTDAPYLSSVGITAVWTPPAYKGTSQADVGYGPYDLYDLGEFNQKGTVRTKYGTKGELKSAVNTLHSNGIQVYGDVVMNHKAGADYTENVTAVEVNPSNRNQETSGCYNIQAWTGFNFPGRGTTYSNFKWQWFHFDGTDWDQSRSLSRIFKFTGKAWDWEVSSENGNYDYLMYADIDYDHPDVVNEMKKWGVWYANEVGLDGYRLDAVKHIKFSFLKDWVDNARAATGKEMFTVGEYWQNDLGALNNYLAKVNYNQSLFDAPLHYNFYAASTGGGYYDMRNILNNTLVASNPTKAVTLVENHDTQPGQSLESTVQPWFKPLAYAFILTRSGGYPSVFYGDMYGTKGTTTREIPALKSKIEPLLKARKDYAYGTQRDYIDNPDVIGWTREGDSTKAKSGLATVITDGPGGSKRMYVGTSNAGEIWYDLTGNRTDKITIGSDGYATFPVNGGSVSVWVQQ

SEQ ID NO: 36180 - protein, 480 aa, Cytophaga sp.
NGTMMQYFEWYVPNDGQQWNRLRTDAPYLSSVGITAVWTPPAYKGTSQADVGYGPYDLYDLGEFNQKGTVRTKYGTKGELKSAVNTLHSNGIQVYGDVVMNHKAGADYTENVTAVEVNPSNRNQETSGEYNIQAWTGFNFPGRGTTYSNFKWQWFHFDGTDWDQSRSLSRIFKFTGKAWDWEVSSENGNYDYLMYADIDYDHPDVVNEMKKWGVWYANEVGLDGYRLDAVKHIKFSFLKDWVDNARAATGKEMFTVGEYWQNDLGALNNYLAKVNYNQSLFDAPLHYNFYAASTGGGYYDMRNILNNTLVASNPTKAVTLVENHDTQPGQSLESTVQPWFKPLAYAFILTRSGGYPSVFYGDMYGTKGTTTREIPALKSKIEPLLKARKDYAYGTQRDYIDNPDVIGWTREGDSTKAKSGLATVITDGPGGSKRMYVGTSNAGEIWYDLTGNRTDKITIGSDGYATFPVNGGSCSVWVQQ

SEQ ID NO: 36181 - protein, 480 aa, Cytophaga sp.
NGTMMQYFEWYVPNDGQQWNRLRTDAPYLSSVGITAVWTPPAYKGTSQADVGYGPYDLYDLGEFNQKGTVRTKYGTKGELKSAVNTLHSNGIQVYGDVVMNHKAGADYTENVTAVEVNPSNRNQETSGEYNIQAWTGFNFIGRGTTYSNFKWQWFHFDGTDWDQSRSLSRIFKFTGKAWDWEVSSENGNYDYLMYADIDYDHPDVVNEMKKWGVWYANEVGLDGYRLDAVKHIKFSFLKDWVDNARAATGKEMFTVGEYWQNDLGALNNYLAKVNYNQSLFDAPLHYNFYAASTGGGYYDMRNILNNTLVASNPTKAVTLVENHDTQPGQSLESTVQPWFKPLAYAFILTRSGGYPSVFYGDMYGTKGTTTREIPALKSKIEPLLKARKDYAYGTQRDYIDNPDVIGWTREGDSTKAKSGLATVITDGPGGSKRMYVGTSNAGEIWYDLTGNRTDKITIGSDGYATFPVNGGSVSVWVQQ

SEQ ID NO: 36182 - protein, 480 aa, Cytophaga sp.
NGTMMQYFEWYVPNDGQQWNRLRTDAPYLSSVGITAVWTPPAYKGTSQADVGYGPYDLYDLGEFNQKGTVRTKYGTKGELKSAVNTLHSNGIQVYGDVVMNHKAGADYTENVTAVEVNPSNRNQETSGEYNIQAWTGFNFPGRGTTYSNFKWQWFHFDGTDWDQSRSLSRIFKFTGKAWDWEVSSENGNYDYLMYADIDYDHKDVVNEMKKWGVWYANEVGLDGYRLDAVKHIKFSFLKDWVDNARAATGKEMFTVGEYWQNDLGALNNYLAKVNYNQSLFDAPLHYNFYAASTGGGYYDMRNILNNTLVASNPTKAVTLVENHDTQPGQSLESTVQPWFKPLAYAFILTRSGGYPSVFYGDMYGTKGTTTREIPALKSKIEPLLKARKDYAYGTQRDYIDNPDVIGWTREGDSTKAKSGLATVITDGPGGSKRMYVGTSNAGEIWYDLTGNRTDKITIGSDGYATFPVNGGSVSVWVQQ

SEQ ID NO: 36183 - protein, 480 aa, Cytophaga sp.
NGTMMQYFEWYVPNDGQQWNRLRTDAPYLSSVGITAVWTPPAYKGTSQADVGYGPYDLYDLGEFNQKGTVRTKYGTKGELKSAVNTLHSNGIQVYGDVVMNHKAGADYTENVTAVEVNPSNRNQETSGEYNIQAWTGFNFPGRGTTYSNFKWQWFHFDGTDWDQSRSLSRIFKFTGKAWDWEVSSENGNYDYLMYADIDYDHPDVVNEMKKWGVWYANEVGLDGYRLDAVKHIKFSFLKDWVDNARAATGKEMFTVGEYWQNDLGALNNYLAKVNYNQSLFDAPLHYNFYKASTGGGYYDMRNILNNTLVASNPTKAVTLVENHDTQPGQSLESTVQPWFKPLAYAFILTRSGGYPSVFYGDMYGTKGTTTREIPALKSKIEPLLKARKDYAYGTQRDYIDNPDVIGWTREGDSTKAKSGLATVITDGPGGSKRMYVGTSNAGEIWYDLTGNRTDKITIGSDGYATFPVNGGSVSVWVQQ

SEQ ID NO: 36184 - protein, 480 aa, Cytophaga sp.
NGTMMQYFEWYVPNDGQQWNRLRTDAPYLSSVGITAVWTPPAYKGTSQADVGYGPYDLYDLGEFNQKGTVRTKYGTKGELKSAVNTLHSNGIQVYGDVVMNHKAGADYTENVTAVEVNPSNRNQETSGEYNIQAWTGFNFPGRGTTYSNFKWQWFHFDGTDWDQSRSLSRIFKFTGKAWDWEVSSENGNYDYLMYADIDYDHPDVVNEMKKWGVWYANEVGLDGYRLDAVKHIKFSFLKDWVDNARAATGKEMFTVGEYWQNDLGALNNYLAKVNYNQSLFDAPLHYNFYAASTGGGYYDMRNILNNTLVASNPTKAVTLVENHDTQPGQSLESTVQPWFKPLAYAFILTRSGGYPSVFYGDMYGTKGTTTREIPALKSKIEPLLKARKDYAYGTQRDYIDNPDYIGWTREGDSTKAKSGLATVITDGPGGSKRMYVGTSNAGEIWYDLTGNRTDKITIGSDGYATFPVNGGSVSVWVQQ

SEQ ID NO: 36185 - protein, 480 aa, Cytophaga sp.
NGTMMQYFEWYVPNDGQQWNRLRTDAPYLSSVGITAVWTPPAYKGTSQADVGYGPYDLYDLGEFNQKGTVRTKYGTKGELKSAVNTLHSNGIQVYGDVVMNHKAGADYTENVTAVEVNPSNRNQETSGEYNIQAWTGFNFPGRGTTYSNFKWQNFHFDGTDWDQSRSLSRIFKFTGKAWDWEVSSENGNYDYLMYADIDYDHPDVVNEMKKWGVWYANEVGLDGYRLDAVKHIKFSFLKDWVDNARAATGKEMFTVGEYWQNDLGALNNYLAKVNYNQSLFDAPLHYNFYAASTGGGYYDMRNILNNTLVASNPTKAVTLVENHDTQPGQSLESTVQPWFKPLAYAFILTRSGGYPSVFYGDMYGTKGTTTREIPALKSKIEPLLKARKDYAYGTQRDYIDNPDVIGWTREGDSTKAKSGLATVITDGPGGSKRMYVGTSNAGEIWYDLTGNRTDKITIGSDGYATFPVNGGSVSVWVQQ

SEQ ID NO: 36186 - protein, 480 aa, Bacillus amyloliquefaciens
NGTMMQYFEWYVPNDGQQWNRLRTDAPYLAEHGITAVWTPPAYKGTSQADVGYGPYDLYDLGEFNQKGTVRTKYGTKGELKSAVNTLHSNGIQVYGDVVMNHKAGADYTENVTAVEVNPSNRNQETSGEYNIQAWTGFNFPGRGTTYSNFKWQWFHFDGTDWDQSRSLSRIFKFTGKAWDWEVSSENGNYDYLMYADIDYDHPDVVNEMKKWGVWYANEVGLDGYRLDAVKHIKFSFLKDWVDNARAATGKEMFTVGEYWQNDLGALNNYLAKVNYNQSLFDAPLHYNFYAASTGGGYYDMRNILNNTLVASNPTKAVTLVENHDTQPGQSLESTVQPWFKPLAYAFILTRSGGYPSVFYGDMYGTKGTTTREIPALKSKIEPLLKARKDYAYGTQRDYIDNPDVIGWTREGDSTKAKSGLATVITDGPGGSKRMYVGTSNAGEIWYDLTGNRTDKITIGSDGYATFPVNGGSVSVWVQQ

SEQ ID NO: 36187 - protein, 480 aa, Cytophaga sp.
NGTMMQYFEWYVPNDGQQWNRLRTDAPYLSSVGITAVWTPPAYKGTSQADVGYGPYDLYDLGEFNQKGTVRTKYGTKGELKSAVNTLHSNGIQVYGDVVMNHKAGADYTENVTAVEVNPSNRYQETSGEYNIQAWTGFNFPGRGTTYSNFKWQWFHFDGTDWDQSRSLSRIFKFTGKAWDWEVSSENGNYDYLMYADIDYDHPDVVNEMKKWGVWYANEVGLDGYRLDAVKHIKFSFLKDWVDNARAATGKEMFTVGEYWQNDLGALNNYLAKVNYNQSLFDAPLHYNFYAASTGGGYYDMRNILNNTLVASNPTKAVTLVENHDTQPGQSLESTVQPWFKPLAYAFILTRSGGYPSVFYGDMYGTKGTTTREIPALKSKIEPLLKARKDYAYGTQRDYIDNPDVIGWTREGDSTKAKSGLATVITDGPGGSKRMYVGTSNAGEIWYDLTGNRTDKITIGSDGYATFPVNGGSVSVWVQQ

SEQ ID NO: 36188 - protein, 480 aa, Cytophaga sp.
NGTMMQYFEWYVPNDGQQWNRLRTDAPYLSSVGITAVWTPPAYKGTSQADVGYGPYDLYDLGEFNQKGTVRTKYGTKGELKSAVNTLHSNGIQVYGDVVMNHKAGADYTENVTAVEVNPSNRNQETSGEYNIQAWTGFNFPLRGTTYSNFKWQWFHFDGTDWDQSRSLSRIFKFTGKAWDWEVSSENGNYDYLMYADIDYDHPDVVNEMKKWGVWYANEVGLDGYRLDAVKHIKFSFLKDWVDNARAATGKEMFTVGEYWQNDLGALNNYLAKVNYNQSLFDAPLHYNFYAASTGGGYYDMRNILNNTLVASNPTKAVTLVENHDTQPGQSLESTVQPWFKPLAYAFILTRSGGYPSVFYGDMYGTKGTTTREIPALKSKIEPLLKARKDYAYGTQRDYIDNPDVIGWTREGDSTKAKSGLATVITDGPGGSKRMYVGTSNAGEIWYDLTGNRTDKITIGSDGYATFPVNGGSVSVWVQQ

SEQ ID NO: 36189 - protein, 480 aa, Cytophaga sp.
NGTMMQYFEWYVPNDGQQWNRLRTDAPYLSSVGITAVWTPPAYKGTSQADVGYGPYDLYDLGEFNQKGTVRTKYGTKGELKSAVNTLHSNGIQVYGDVVMNHKAGADYTENVTAVEVNPSNRNQETSGEYNIQAWTGFNFPGRGTTYSNFKWQWFHFDGTDWDQSRSLSRIFKFTGKAWDWEVSSENGNYDYLMYADIDYDHPDVVNEMKKWGVWYANEVGLDGYRLDAVKHIKFSFLKDWVDNARAATGKEMFTVGEYWQNDLGALNNYLAKVNYNQSLFDAPLHYNFYAASTGGGYYDMRNILNNTLVASNPTKAVTLVENHDTQPGQSLESTVQPWFKPLAYAFILTRSGGYPSVFYGDMYGTKGTTTREIPALKSKIEDLLKARKDYAYGTQRDYIDNPDVIGWTREGDSTKAKSGLATVITDGPGGSKRMYVGTSNAGEIWYDLTGNRTDKITIGSDGYATFPVNGGSVSVWVQQ

SEQ ID NO: 36190 - protein, 480 aa, Cytophaga sp.
NGTMMQYFEWYVPNDGQQWNRLRTDAPYLSSVGITAVWTPPAYKGTSQADVGYGPYDLYDLGEFNQKGTVRTKYGTKGELKSAVNTLHSNGIQVYGDVVMNHKAGADYTENVTAVEVNPSNRNQETSGEYNIQAWTGFNFPGRGTTYSNFKWQWFHFDGTDWDQSRSLSRIFKFTGKAWDWEVSSENGNYDYLMYADIDYDHPDVVNEMKKWGVWYANEVGLDGYRLDAVKHIKFSFLKDWVDNARAATGKEMFTVGEYWQNDLGALNNYLAKVNYNQSLFDAPLHYNFYAASTGGGYYDMRNILNNTLVASNPTKAVTLVENHDTQPGQSLESTVQPWFKPLAYAFILTRSGGVPSVFYGDMYGTKGTTTREIPALKSKIEPLLKARKDYAYGTQRDYIDNPDVIGWTREGDSTKAKSGLATVITDGPGGSKRMYVGTSNAGEIWYDLTGNRTDKITIGSDGYATFPVNGGSVSVWVQQ

SEQ ID NO: 36191 - protein, 480 aa, Cytophaga sp.
NGTMMQYFEWYVPNDGQQWNRLRTDAPYLSSVGITAVWTPPAYKGTSQADVGYGPYDLYDLGEFNQKGTVRTKYGTKGELKSAVNTLHSNGIQVYGDVVMNHKAGADYTENVTAVEVNPSNRNQETSGEYNIQAWTGFNFPGRGTTYSNFKWQWFHFDGTDWDQSRSLSRIFKFTGKAWDWEVSSLNGNYDYLMYADIDYDHPDVVNEMKKWGVWYANEVGLDGYRLDAVKHIKFSFLKDWVDNARAATGKEMFTVGEYWQNDLGALNNYLAKVNYNQSLFDAPLHYNFYAASTGGGYYDMRNILNNTLVASNPTKAVTLVENHDTQPGQSLESTVQPWFKPLAYAFILTRSGGYPSVFYGDMYGTKGTTTREIPALKSKIEPLLKARKDYAYGTQRDYIDNPDVIGWTREGDSTKAKSGLATVITDGPGGSKRMYVGTSNAGEIWYDLTGNRTDKITIGSDGYATFPVNGGSVSVWVQQ

SEQ ID NO: 36192 - protein, 480 aa, Cytophaga sp.
NGTMMQYFEWYVPNDGQQWNRLRTDAPYLSSVGITAVWTPPAYKGTSQADVGYGPYDLYDLGEFNQKGTVRTKYGTKGELKSAVNTLHSNGIQVYGDVVMNHKAGADYTENVTAVEVNPSNRNQETSGEYNIQAWTGFNFPGRGTTYSNFKWQWFHFDGTDWDQSRSLSRIFKFTGKAWDWEVSSENGNYDYLMYADIDYQHPDVVNEMKKWGVWYANEVGLDGYRLDAVKHIKFSFLKDWVDNARAATGKEMFTVGEYWQNDLGALNNYLAKVNYNQSLFDAPLHYNFYAASTGGGYYDMRNILNNTLVASNPTKAVTLVENHDTQPGQSLESTVQPWFKPLAYAFILTRSGGYPSVFYGDMYGTKGTTTREIPALKSKIEPLLKARKDYAYGTQRDYIDNPDVIGWTREGDSTKAKSGLATVITDGPGGSKRMYVGTSNAGEIWYDLTGNRTDKITIGSDGYATFPVNGGSVSVWVQQ

SEQ ID NO: 36193 - protein, 480 aa, Cytophaga sp.
NGTMMQYFEWYVPNDGQQWNRLRTDAPYLSSVGITAVWTPPAYKGTSQADVGYGPYDLYDLGEFNQKGTVRTKYGTKGELKSAVNTLHSNGIQVYGDVVMNHKAGADYTENVTAVEVNPSNRNQETSGEYNIQAWTGFNFPGRGTTYSNFKWQWFHFDGTDWDQSRSLSRIFKFTGKAWDWEVSSENGNYDYLMYADIDYDHPDVVNEMMKWGVWYANEVGLDGYRLDAVKHIKFSFLKDWVDNARAATGKEMFTVGEYWQNDLGALNNYLAKVNYNQSLFDAPLHYNFYAASTGGGYYDMRNILNNTLVASNPTKAVTLVENHDTQPGQSLESTVQPWFKPLAYAFILTRSGGYPSVFYGDMYGTKGTTTREIPALKSKIEPLLKARKDYAYGTQRDYIDNPDVIGWTREGDSTKAKSGLATVITDGPGGSKRMYVGTSNAGEIWYDLTGNRTDKITIGSDGYATFPVNGGSVSVWVQQ

SEQ ID NO: 36194 - protein, 480 aa, Cytophaga sp.
NGTMMQYFEWYVPNDGQQWNRLRTDAPYLSSVGITAVWTPPAYKGTSQADVGYGPYDLYDLGEFNQKGTVRTKYGTKGELKSAVNTLHSNGIQVYGDVVMNHKAGADYTENVTAVEVNPSNRNQETSGEYNIQAWTGFNFPGRGTTYSNFKWQWFHFDGTDWDQSRSLSRIFKFTGKAWDWEVSSENGNYDYLMYADIDYDHPKVVNEMKKWGVWYANEVGLDGYRLDAVKHIKFSFLKDWVDNARAATGKEMFTVGEYWQNDLGALNNYLAKVNYNQSLFDAPLHYNFYAASTGGGYYDMRNILNNTLVASNPTKAVTLVENHDTQPGQSLESTVQPWFKPLAYAFILTRSGGYPSVFYGDMYGTKGTTTREIPALKSKIEPLLKARKDYAYGTQRDYIDNPDVIGWTREGDSTKAKSGLATVITDGPGGSKRMYVGTSNAGEIWYDLTGNRTDKITIGSDGYATFPVNGGSVSVWVQQ

SEQ ID NO: 36195 - protein, 480 aa, Cytophaga sp.
NGTMMQYFEWYVPNDGQQWNRLRTDAPYLSSVGITAVWTPPAYKGTSQADVGYGPYDLYDLGEFNQKGTVRTKYGTKGELKSAVNTLHSNGIQVYGDVVMNHKAGADYTENVTAVEVNPSNRNQETSGEYNIQAWTGFNFPGRGTTYSNFKWQWFHFDGTDWDQSRSLSRIFKFTGKAWDWEVSSENGNYDYLMYADIDYDHPDVVNEMKKWGVWYANEVGLDGYRLDAVKHIKFSFLKDWVDNARAATGKEMFTVGEYWQNDLGALNNYLAKVNYNQSLFDAPLHYNFYAASTGGGYYDMRNILNNTLVASNPTKAVTLVENHDTQPGQSLESTVQPWFKPLAYAFILTRSGGYPSVFYGDMYGTKGTTTREIPALKSKIEPLLKARKDYAYGTQRDYIDNPDVIGWTREGDSTKAKSGLATVITDGPGGSKRMYVGTSNAGEIWYDLTGNRTDKITIGMDGYATFPVNGGSVSVWVQQ

SEQ ID NO: 36196 - protein, 480 aa, Cytophaga sp.
NGTMMQYFEWYVPNDGQQWNRLRTDAPYLSSVGITAVWTPPAYKGTSQADVGYGPYDLYDLGEFNQKGTVRTKYGTKGELKSAVNTLHSNGIQVYGDVVMNHKAGADYTENVTAVEVNPSNRNQETSGEYNIQAWTGFNFPGRGTTYSNFKWQWFHFDGTDWDQSRSLSRIFKFTGKAWDWEVSSENGNYDYLMYADIDYDHPDVVNEMKKWGVWYANEVGLDGYRLDAVKHIKFSFLKDWVDNARAATGKEMFTVGEYWQNDLGALNNYLAKVNYNQSLFDAPLHYNFYAASTGGGYYDMRNILNNTLVASNPTKAVTLVENHDTQPGQSLESTVQPWFKPLWYAFILTRSGGYPSVFYGDMYGTKGTTTREIPALKSKIEPLLKARKDYAYGTQRDYIDNPDVIGWTREGDSTKAKSGLATVITDGPGGSKRMYVGTSNAGEIWYDLTGNRTDKITIGSDGYATFPVNGGSVSVWVQQ

SEQ ID NO: 36197 - protein, 480 aa, Cytophaga sp.
NGTMMQYFEWYVPNDGQQWNRLRTDAPYLSSVGITAVWTPPAYKGTSQADVGYGPYDLYDLGEFNQKGTVRTKYGTKGELKSAVNTLHSNGIQVYGDVVMNHKAGADYTENVTAVEVNPSNRNQETSGEYNIQAWTGFNFPGRGTTYSNFKWQWFHFDGTDWDQKRSLSRIFKFTGKAWDWEVSSENGNYDYLMYADIDYDHPDVVNEMKKWGVWYANEVGLDGYRLDAVKHIKFSFLKDWVDNARAATGKEMFTVGEYWQNDLGALNNYLAKVNYNQSLFDAPLHYNFYAASTGGGYYDMRNILNNTLVASNPTKAVTLVENHDTQPGQSLESTVQPWFKPLAYAFILTRSGGYPSVFYGDMYGTKGTTTREIPALKSKIEPLLKARKDYAYGTQRDYIDNPDVIGWTREGDSTKAKSGLATVITDGPGGSKRMYVGTSNAGEIWYDLTGNRTDKITIGSDGYATFPVNGGSVSVWVQQ

SEQ ID NO: 36198 - protein, 480 aa, Cytophaga sp.
NGTMMQYFEWYVPNDGQQWNRLRTDAPYLSSVGITAVWTPPAYKGTSQADVGYGPYDLYDLGEFNQKGTVRTKYGTKGELKSAVNTLHSNGIQVYGDVVMNHKAGADYTENVTAVEVNPSNRNQETSGEYNIQAWTGFNFPGRGTTYSNFKWQWFHFDGTDWDQSRSLSRIFKFTGKAWDWEVSSENGNYDYLMYADIDYDHPDVVNEMKKWGVWYANEVGLDGYRLDAVKHIKFSFLKDWVDNARAATGKEMFTVGEYWQNDLGALNNYLAKVNYNQSLFDAPLHYNFYAASTGGGYYDMRNILNNTLVASNPTKAVTLVENHDTQPGQSLESTVQPWFKPLAYAFILTRSGGYPSVFYGDMYGTKGTTTREIPALKSKIEPLLKARKDYAYGTQRDYIDNPDIIGWTREGDSTKAKSGLATVITDGPGGSKRMYVGTSNAGEIWYDLTGNRTDKITIGSDGYATFPVNGGSVSVWVQQ

SEQ ID NO: 36199 - protein, 480 aa, Cytophaga sp.
NGTMMQYFEWYVPNDGQQWNRLRTDAPYLSSVGITAVWTPPAYKGTSQADVGYGPYDLYDLGEFNQKGTVRTKYGTKGELKSAVNTLHSNGIQVYGDVVMNHKAGADYTENVTAVEVNPSNRNQETSGEYNIQAWTGFNFPGRGTTYSNFKWQWFHFDGTDWDQSRSLSRIFKFTGKAWDWEVSSENGNYDYLMYADIDYDHPDVVNEMKKWGVWYANEVGLDGYRLDAVKHIKFEFLKDWVDNARAATGKEMFTVGEYWQNDLGALNNYLAKVNYNQSLFDAPLHYNFYAASTGGGYYDMRNILNNTLVASNPTKAVTLVENHDTQPGQSLESTVQPWFKPLAYAFILTRSGGYPSVFYGDMYGTKGTTTREIPALKSKIEPLLKARKDYAYGTQRDYIDNPDVIGWTREGDSTKAKSGLATVITDGPGGSKRMYVGTSNAGEIWYDLTGNRTDKITIGSDGYATFPVNGGSVSVWVQQ

SEQ ID NO: 36200 - protein, 480 aa, Cytophaga sp.
NGTMMQYFEWYVPNDGQQWNRLRTDAPYLSSVGITAVWTPPAYKGTSQADVGYGPYDLYDLGEFNQKGTVRTKYGTKGELKSAVNTLHSNGIQVYGDVVMNHKAGADYTENVTAVEVNPSNRNQETSGEYNIQAWTGFNFPGRGTTYSNFKWQWFHFDGTDWDQSRSLSRIFKFTGKAWDWEVSSENGNYDYLMYADIDYDHPDVVNEMKKWGVWYANEVGLDGYRLDAVKHIKFSFLKDWVDNARAATGKEMFTVGEYWQNDLGALNNYLAKVNYNQSLFDAPLHYNFYAASTGGGYYDMRNILNNTLVASNPTKAVTLVENHDTQPGQSLESTVQPWFKPLAYAFILTRSGGYPSVFYGDMYGTKGTTTREIPALKSKIEPLLKARKDYAYGTQRDYIDNPDVIGWTREGDSTKAKSGLATVITDGPGGSKRMYVGTSNRGEIWYDLTGNRTDKITIGSDGYATFPVNGGSVSVWVQQ

SEQ ID NO: 36201 - protein, 480 aa, Cytophaga sp.
NGTMMQYFEWYVPNDGQQWNRLRTDAPYLSSVGITAVWTPPAYKGTSQADVGYGPYDLYDLGEFNQKGTVRTKYGTKGELKSAVNTLHSNGIQVYGDVVMNHKAGADYTENVTAVEVNPSNRNQETSGEYNIQAWTGFNFPGRGTTYSNFKWQWFHFDGTDWDQSRSLSRIFKFTGKAWDWEVSSENGNYDYLMYADIDYDHPDVVNEMKKWGVWYANEVGLDGYRLDAVKHIKFSFLKDWVDNARAATGKEMFTVGEYWQNDLGALNNYLAKVNYNQSLFDAPLHYNFYAASTGGGYYDMRNILNNTLVASNPTKAVTLVENHDTQPGQSLESTVQPWFKPLAYAFILTRSGGYPSVFYGDMYGTKGTTTREIPALKSKIEPLLKARKDYAYGTQRDYIDNPDVIGWTREGDSTKAKSGLATVITDGPGGSKRMYVGTSNAGEIWYDLTGNRTDKITIGWDGYATFPVNGGSVSVWVQQ

SEQ ID NO: 36202 - protein, 480 aa, Cytophaga sp.
NGTMMQYFEWYVPNDGQQWNRLRTDAPYLSSVGITAVWTPPAYKGTSQADVGYGPYDLYDLGEFNQKGTVRTKYGTKGELKSAVNTLHSNGIQVYGDVVMNHKAGADYTENVTAVEVNPSNRNQETSGLYNIQAWTGFNFPGRGTTYSNFKWQWFHFDGTDWDQSRSLSRIFKFTGKAWDWEVSSENGNYDYLMYADIDYDHPDVVNEMKKWGVWYANEVGLDGYRLDAVKHIKFSFLKDWVDNARAATGKEMFTVGEYWQNDLGALNNYLAKVNYNQSLFDAPLHYNFYAASTGGGYYDMRNILNNTLVASNPTKAVTLVENHDTQPGQSLESTVQPWFKPLAYAFILTRSGGYPSVFYGDMYGTKGTTTREIPALKSKIEPLLKARKDYAYGTQRDYIDNPDVIGWTREGDSTKAKSGLATVITDGPGGSKRMYVGTSNAGEIWYDLTGNRTDKITIGSDGYATFPVNGGSVSVWVQQ

SEQ ID NO: 36203 - protein, 480 aa, Cytophaga sp.
NGTMMQYFEWYVPNDGQQWNRLRTDAPYLSSVGITAVWTPPAYKGTSQADVGYGPYDLYDLGEFNQKGTVRTKYGTKGELKSAVNTLHSNGIQVYGDVVMNHKAGADYTENVTAVEVNPSNRNQETSGEYNIQAWTGFNFPGRGTTYSNFKWQWFHFDGTDWDQSRSLSRIFKFTGKAWDWEVSSENGNYDYLMYADIDYDYPDVVNEMKKWGVWYANEVGLDGYRLDAVKHIKFSFLKDWVDNARAATGKEMFTVGEYWQNDLGALNNYLAKVNYNQSLFDAPLHYNFYAASTGGGYYDMRNILNNTLVASNPTKAVTLVENHDTQPGQSLESTVQPWFKPLAYAFILTRSGGYPSVFYGDMYGTKGTTTREIPALKSKIEPLLKARKDYAYGTQRDYIDNPDVIGWTREGDSTKAKSGLATVITDGPGGSKRMYVGTSNAGEIWYDLTGNRTDKITIGSDGYATFPVNGGSVSVWVQQ

SEQ ID NO: 36204 - protein, 480 aa, Cytophaga sp.
NGTMMQYFEWYVPNDGQQWNRLRTDAPYLSSVGITAVWTPPAYKGTSQADVGYGPYDLYDLGEFNQKGTVRTKYGTKGELKSAVNTLHSNGIQVYGDVVMNHKAGADYTENVTAVEVNPSNRNQETSGEYNIQAWTGFNFPGRGTSYSNFKWQWFHFDGTDWDQSRSLSRIFKFTGKAWDWEVSSENGNYDYLMYADIDYDHPDVVNEMKKWGVWYANEVGLDGYRLDAVKHIKFSFLKDWVDNARAATGKEMFTVGEYWQNDLGALNNYLAKVNYNQSLFDAPLHYNFYAASTGGGYYDMRNILNNTLVASNPTKAVTLVENHDTQPGQSLESTVQPWFKPLAYAFILTRSGGYPSVFYGDMYGTKGTTTREIPALKSKIEPLLKARKDYAYGTQRDYIDNPDVIGWTREGDSTKAKSGLATVITDGPGGSKRMYVGTSNAGEIWYDLTGNRTDKITIGSDGYATFPVNGGSVSVWVQQ

SEQ ID NO: 36205 - protein, 480 aa, Cytophaga sp.
NGTMMQYFEWYVPNDGQQWNRLRTDAPYLSSVGITAVWTPPAYKGTSQADVGYGPYDLYDLGEFNQKGTVRTKYGTKGELKSAVNTLHSNGIQVYGDVVMNHKAGADYTENVTAVEVNPSNRNQETSGEYNIQAWTGFNFPGRGTTYSNFKWQWFHFDGTDWDQSRSLSRIFKFTGKAWDWEVSSENGNYDYLMYADIDYDHPDVVNEMEKWGVWYANEVGLDGYRLDAVKHIKFSFLKDWVDNARAATGKEMFTVGEYWQNDLGALNNYLAKVNYNQSLFDAPLHYNFYAASTGGGYYDMRNILNNTLVASNPTKAVTLVENHDTQPGQSLESTVQPWFKPLAYAFILTRSGGYPSVFYGDMYGTKGTTTREIPALKSKIEPLLKARKDYAYGTQRDYIDNPDVIGWTREGDSTKAKSGLATVITDGPGGSKRMYVGTSNAGEIWYDLTGNRTDKITIGSDGYATFPVNGGSVSVWVQQ

SEQ ID NO: 36206 - protein, 480 aa, Cytophaga sp.
NGTMMQYFEWYVPNDGQQWNRLRTDAPYLSSVGITAVWTPPAYKGTSQADVGYGPYDLYDLGEFNQKGTVRTKYGTKGELKSAVNTLHSNGIQVYGDVVMNHKAGADYTENVTAKEVNPSNRNQETSGEYNIQAWTGFNFPGRGTTYSNFKWQWFHFDGTDWDQSRSLSRIFKFTGKAWDWEVSSENGNYDYLMYADIDYDHPDVVNEMKKWGVWYANEVGLDGYRLDAVKHIKFSFLKDWVDNARAATGKEMFTVGEYWQNDLGALNNYLAKVNYNQSLFDAPLHYNFYAASTGGGYYDMRNILNNTLVASNPTKAVTLVENHDTQPGQSLESTVQPWFKPLAYAFILTRSGGYPSVFYGDMYGTKGTTTREIPALKSKIEPLLKARKDYAYGTQRDYIDNPDVIGWTREGDSTKAKSGLATVITDGPGGSKRMYVGTSNAGEIWYDLTGNRTDKITIGSDGYATFPVNGGSVSVWVQQ

SEQ ID NO: 36207 - protein, 480 aa, Cytophaga sp.
NGTMMQYFEWYVPNDGQQWNRLRTDAPYLSSVGITAVWTPPAYKGTSQADVGYGPYDLYDLGEFNQKGTVRTKYGTKGELKSAVNTLHSNGIQVYGDVVMNHKAGADYTENVTAVEVNPSNRNQETSGEYNIQAWTGFNFPGRGTTYSNFKWQWFHFDGTDWDQSRSLSRIFKFTGKAWDWEVSSENGNYDYLMYADIDYDHPDVVNEMKKWGVWYANEVGLDGYRLDAVKHIKFSFLKDWVDNARAATGKEMFTVGEYWQNDLGALNNYLAKVNYNQSLFDAPLHYNFYAASTGGGYYDMRNILNNTLVASNPTKAVTLVENHDTQPGQSLESTVQPWFKPLAYAFILTRSGGYPSVFYGDMYGTKGTTTREIPALKSKIEPLLKARKDYAYGTQRDYIDNPDVIGWTREGDSTKAYSGLATVITDGPGGSKRMYVGTSNAGEIWYDLTGNRTDKITIGSDGYATFPVNGGSVSVWVQQ

SEQ ID NO: 36208 - protein, 480 aa, Cytophaga sp.
NGTMMQYFEWYVPNDGQQWNRLRTDAPYLSSVGITAVWTPPAYKGTSQADVGYGPYDLYDLGEFNQKGTVRTKYGTKGELKSAVNTLHSNGIQVYGDVVMNHKAGADYMENVTAVEVNPSNRNQETSGEYNIQAWTGFNFPGRGTTYSNFKWQWFHFDGTDWDQSRSLSRIFKFTGKAWDWEVSSENGNYDYLMYADIDYDHPDVVNEMKKWGVWYANEVGLDGYRLDAVKHIKFSFLKDWVDNARAATGKEMFTVGEYWQNDLGALNNYLAKVNYNQSLFDAPLHYNFYAASTGGGYYDMRNILNNTLVASNPTKAVTLVENHDTQPGQSLESTVQPWFKPLAYAFILTRSGGYPSVFYGDMYGTKGTTTREIPALKSKIEPLLKARKDYAYGTQRDYIDNPDVIGWTREGDSTKAKSGLATVITDGPGGSKRMYVGTSNAGEIWYDLTGNRTDKITIGSDGYATFPVNGGSVSVWVQQ

SEQ ID NO: 36209 - protein, 480 aa, Cytophaga sp.
NGTMMQYFEWYVPNDGQQWNRLRTDAPYLSSVGITAVWTPPAYKGTSQADVGYGPYDLYDLGEFNQKGTVRTKYGTKGELKSAVNTLHSNGIQVYGDVVMNHKAGADYTENVTAVEVNPSNRNQETSGEYNIQAWTGFNFPGRGTTYSNFKWQWFHFDGTDWDQSRSLSRIFKFTGKAWDWEVSSENGNYDYLMYADIDYDHPDVVNEMKKWGVWYANEVGLDGYRLDAVKHIKFSFLKDWVDNARAATGKEMFTVGEYWQNDLGALNNYLAKVNYNQFLFDAPLHYNFYAASTGGGYYDMRNILNNTLVASNPTKAVTLVENHDTQPGQSLESTVQPWFKPLAYAFILTRSGGYPSVFYGDMYGTKGTTTREIPALKSKIEPLLKARKDYAYGTQRDYIDNPDVIGWTREGDSTKAKSGLATVITDGPGGSKRMYVGTSNAGEIWYDLTGNRTDKITIGSDGYATFPVNGGSVSVWVQQ

SEQ ID NO: 36210 - protein, 480 aa, Cytophaga sp.
NGTMMQYFEWYVPNDGQQWNRLRTDAPYLSSVGITAVWTPPAYKGTSQADVGYGPYDLYDLGEFNQKGTVRTKYGTKGELKSAVNTLHSNGIQVYGDVVMNHKAGADYTENVTAVEVNPSNRNQETSGEYNIQAWTGFNFPGRGTTYSNFKWQWFHFDGTDWDQSRSLSRIFKFTGKAWDWEVSSENGNYDYLMYADIDYDHPDVVNEMKKWGVWYANEVGLDGYRLDAVKHIKFSFLKDWVDNARAATGKEMFTVGEYWQNDLGALNNYLAKVNYNQSLFDAPLHYNFYAASTGGGYYDMRNILNNTLVASNPTKAVTLVENHDTQPGQSLESTVQPWFKPLAYAFILTRSGGYPSVFYGDMYGTKGTTTREIPALKSKIEPLLKARKDYAYGTQRDYIDNYDVIGWTREGDSTKAKSGLATVITDGPGGSKRMYVGTSNAGEIWYDLTGNRTDKITIGSDGYATFPVNGGSVSVWVQQ

SEQ ID NO: 36211 - protein, 480 aa, Cytophaga sp.
NGTMMQYFEWYVPNDGQQWNRLRTDAPYLSSVGITAVWTPPAYKGTSQADVGYGPYDLYDLGEFNQKGTVRTKYGTKGELKSAVNTLHSNGIQVYGDVVMNHKAGADYTDNVTAVEVNPSNRNQETSGEYNIQAWTGFNFPGRGTTYSNFKWQWFHFDGTDWDQSRSLSRIFKFTGKAWDWEVSSENGNYDYLMYADIDYDHPDVVNEMKKWGVWYANEVGLDGYRLDAVKHIKFSFLKDWVDNARAATGKEMFTVGEYWQNDLGALNNYLAKVNYNQSLFDAPLHYNFYAASTGGGYYDMRNILNNTLVASNPTKAVTLVENHDTQPGQSLESTVQPWFKPLAYAFILTRSGGYPSVFYGDMYGTKGTTTREIPALKSKIEPLLKARKDYAYGTQRDYIDNPDVIGWTREGDSTKAKSGLATVITDGPGGSKRMYVGTSNAGEIWYDLTGNRTDKITIGSDGYATFPVNGGSVSVWVQQ

SEQ ID NO: 36212 - protein, 480 aa, Cytophaga sp.
NGTMMQYFEWYVPNDGQQWNRLRTDAPYLSSVGITAVWTPPAYKGTSQADVGYGPYDLYDLGEFNQKGTVRTKYGTKGELKSAVNTLHSNGIQVYGDVVMNHKAGADYTENVTAVEVNPSNRNQETSGEYNIQAWTGFNFPGRGTTYSNFKWQWFHFDGTDWDQSRSLSRIFKFTGKAWDWEVSSENGNYDYLMYADIDYDHPDVVNEMKKWGVWYANEVGLDGYRLDAVKHIKFSFLKDWVDNARAATGKEMFTVGEYWQNDLGALNNYLAKVNYNQSLFDAPLHYNFYAASTGGGYYDMRNILNNTLVASNPTKAVTLVENHDTQPGQSLESTVQPWFKPLAYAFILTRSGGYPSVFYGDMYGTKGTTTREIPALKSKIEPLLKARKDYAYGTQRDYIDNPDVIGWTREGDSTKAKSGLATVITDGPGGSKRMYVGTSNAGEIWLDLTGNRTDKITIGSDGYATFPVNGGSVSVWVQQ

SEQ ID NO: 36213 - protein, 480 aa, Cytophaga sp.
NGTMMQYFEWYVPNDGQQWNRLRTDAPYLSSVGITAVWTPPAYKGTSQADVGYGPYDLYDLGEFNQKGTVRTKYGTKGELKSAVNTLHSNGIQVYGDVVMNHKAGADYTENVTAVEVNPSNRNQETSGEYNIQAWTGFNFPGRGTTYSNFKWQWFHFDGTDWDQSRSLSRIFKFTGKAWDWEVSSENGNYDYLMYADIDYDHPDVVNEMKKWGVWYANEVGLDGYRLDAVKHIKFSFLKDWVDNARAATGKEMFTVGEYWQNDLGALNNYLAKVNYNQSLFDAPLHYNFYAASTGGGYYDMRNILNNTLVASNPTKAVTLVENHDTQPGQSLESTVQPWFKPLAYAFILTRSGGYPSVFYGDMYGTKGTTTREIPALKSKIEPLLKARKDYAYGTQRDYIDNPDVIGWTREGDSTKAKSGLATVITDGPGGSKRMYVGTSNAGEIWYDLTGNRTDKITIASDGYATFPVNGGSVSVWVQQ

SEQ ID NO: 36214 - protein, 480 aa, Cytophaga sp.
NGTMMQYFEWYVPNDGQQWNRLRTDAPYLSSVGITAVWTPPAYKGTSQADVGYGPYDLYDLGEFNQKGTVRTKYGTKGELKSAVNTLHSNGIQVYGDVVMNHKAGADYTENVTAVEVNPSNRNQETSGEYNIQAWTGFNFPGRGTTYSNFKWQWFHFDGTDWDQSRSLSRIFKFTGKAWDWEVSSENGNYDYLMYADIDYDHPDVVNEMKKWGVWYANEVGLDGYRLDAVKHIKFSFLKDWVDNARAATGKEMFTVGEYWQNDLGALNNYLAKVNYNQSLFDAPLHYNFYAASTGGGYYDMRNILNNTLVASNPTKAVTLVENHDTQPGQSLESTVQPWFKPLAYAFILTRSGGYPSVFYGDMYGTKGTTTREIPALKSKIEPLLKARKDYAYGTQRDYIDNPDVIGWTREGKSTKAKSGLATVITDGPGGSKRMYVGTSNAGEIWYDLTGNRTDKITIGSDGYATFPVNGGSVSVWVQQ

SEQ ID NO: 36215 - protein, 480 aa, Cytophaga sp.
NGTMMQYFEWYVPNDGQQWNRLRTDAPYLSSVGITAVWTPPAYKGTSQADVGYGPYDLYDLGEFNQKGTVRTKYGTKGELKSAVNTLHSNGIQVYGDVVMNHKAGADYTENVTAVEVNPSNRNQETSGEYNIQAWTGFNFPGRCTTYSNFKWQWFHFDGTDWDQSRSLSRIFKFTGKAWDWEVSSENGNYDYLMYADIDYDHPDVVNEMKKWGVWYANEVGLDGYRLDAVKHIKFSFLKDWVDNARAATGKEMFTVGEYWQNDLGALNNYLAKVNYNQSLFDAPLHYNFYAASTGGGYYDMRNILNNTLVASNPTKAVTLVENHDTQPGQSLESTVQPWFKPLAYAFILTRSGGYPSVFYGDMYGTKGTTTREIPALKSKIEPLLKARKDYAYGTQRDYIDNPDVIGWTREGDSTKAKSGLATVITDGPGGSKRMYVGTSNAGEIWYDLTGNRTDKITIGSDGYATFPVNGGSVSVWVQQ

SEQ ID NO: 36216 - protein, 480 aa, Cytophaga sp.
NGTMMQYFEWYVPNDGQQWNRLRTDAPYLSSVGITAVWTPPAYKGTSQADVGYGPYDLYDLGEFNQKGTVRTKYGTKGELKSAVNTLHSNGIQVYGDVVMNHKAGADYTENVTAVEVNPSNRNQETSGEYNIQAWTGFNFPGRGTTYSNFKWQWFHFDGTDWDQSRSLSRIFKFTGKAWDWEVSSENGNYDYLMYADIDYDHPDVVNEMKKWGVWYANEVGYDGYRLDAVKHIKFSFLKDWVDNARAATGKEMFTVGEYWQNDLGALNNYLAKVNYNQSLFDAPLHYNFYAASTGGGYYDMRNILNNTLVASNPTKAVTLVENHDTQPGQSLESTVQPWFKPLAYAFILTRSGGYPSVFYGDMYGTKGTTTREIPALKSKIEPLLKARKDYAYGTQRDYIDNPDVIGWTREGDSTKAKSGLATVITDGPGGSKRMYVGTSNAGEIWYDLTGNRTDKITIGSDGYATFPVNGGSVSVWVQQ

SEQ ID NO: 36217 - protein, 480 aa, Cytophaga sp.
NGTMMQYFEWYVPNDGQQWNRLRTDAPYLSSVGITAVWTPPAYKGTSQADVGYGPYDLYDLGEFNQKGTVRTKYGTKGELKSAVNTLHSNGIQVYGDVVMNHKAGADYTENVTAVEVNPSNRNQETSGEYNIQAWTGFNFPGRGTTYSNFKWQWFHFDGTDWDQSRSLSRIFKFTGKAWDWEVSSENGNYDYLMYADIDYDHPDVVNEMKKWGVWYANEVGLDGYRLDAVKHIKFSFLKDWVDNARAATGKEMFTVGEYWQNDLGALNNYLAKVNYNQSLFDAPLHYNFYAASTGGGYYDMRNILNNTLVASNPTKAVTLVENHDTQPGQSLESTVQPWFKPLAYAFILTRSGGYPSVFYGDYYGTKGTTTREIPALKSKIEPLLKARKDYAYGTQRDYIDNPDVIGWTREGDSTKAKSGLATVITDGPGGSKRMYVGTSNAGEIWYDLTGNRTDKITIGSDGYATFPVNGGSVSVWVQQ

SEQ ID NO: 36218 - protein, 480 aa, Cytophaga sp.
NGTMMQYFEWYVPNDGQQWNRLRTDAPYLSSVGITAVWTPPAYKGTSQADVGYGPYDLYDLGEFNQKGTVRTKYGTKGQLKSAVNTLHSNGIQVYGDVVMNHKAGADYTENVTAVEVNPSNRNQETSGEYNIQAWTGFNFPGRGTTYSNFKWQWFHFDGTDWDQSRSLSRIFKFTGKAWDWEVSSENGNYDYLMYADIDYDHPDVVNEMKKWGVWYANEVGLDGYRLDAVKHIKFSFLKDWVDNARAATGKEMFTVGEYWQNDLGALNNYLAKVNYNQSLFDAPLHYNFYAASTGGGYYDMRNILNNTLVASNPTKAVTLVENHDTQPGQSLESTVQPWFKPLAYAFILTRSGGYPSVFYGDMYGTKGTTTREIPALKSKIEPLLKARKDYAYGTQRDYIDNPDVIGWTREGDSTKAKSGLATVITDGPGGSKRMYVGTSNAGEIWYDLTGNRTDKITIGSDGYATFPVNGGSVSVWVQQ

SEQ ID NO: 36219 - protein, 480 aa, Cytophaga sp.
NGTMMQYFEWYVPNDGQQWNRLRTDAPYLSSVGITAVWTPPAYKGTSQADVGYGPYDLYDLGEFNQKGTVRTKYGTKGELKSAVNTLHSNGIQVYGDVVMNHKAGADYWENVTAVEVNPSNRNQETSGEYNIQAWTGFNFPGRGTTYSNFKWQWFHFDGTDWDQSRSLSRIFKFTGKAWDWEVSSENGNYDYLMYADIDYDHPDVVNEMKKWGVWYANEVGLDGYRLDAVKHIKFSFLKDWVDNARAATGKEMFTVGEYWQNDLGALNNYLAKVNYNQSLFDAPLHYNFYAASTGGGYYDMRNILNNTLVASNPTKAVTLVENHDTQPGQSLESTVQPWFKPLAYAFILTRSGGYPSVFYGDMYGTKGTTTREIPALKSKIEPLLKARKDYAYGTQRDYIDNPDVIGWTREGDSTKAKSGLATVITDGPGGSKRMYVGTSNAGEIWYDLTGNRTDKITIGSDGYATFPVNGGSVSVWVQQ

SEQ ID NO: 36220 - protein, 480 aa, Cytophaga sp.
NGTMMQYFEWYVPNDGQQWNRLRTDAPYLSSVGITAVWTPPAYKGTSQADVGYGPYDLYDLGEFNQKGTVRTKYGTKGELKSAVNTLHSNGIQVYGDVVMNHKAGADYTENVTAVEVNPSNRNQETSGEYNIQAYTGFNFPGRGTTYSNFKWQWFHFDGTDWDQSRSLSRIFKFTGKAWDWEVSSENGNYDYLMYADIDYDHPDVVNEMKKWGVWYANEVGLDGYRLDAVKHIKFSFLKDWVDNARAATGKEMFTVGEYWQNDLGALNNYLAKVNYNQSLFDAPLHYNFYAASTGGGYYDMRNILNNTLVASNPTKAVTLVENHDTQPGQSLESTVQPWFKPLAYAFILTRSGGYPSVFYGDMYGTKGTTTREIPALKSKIEPLLKARKDYAYGTQRDYIDNPDVIGWTREGDSTKAKSGLATVITDGPGGSKRMYVGTSNAGEIWYDLTGNRTDKITIGSDGYATFPVNGGSVSVWVQQ

SEQ ID NO: 36221 - protein, 480 aa, Cytophaga sp.
NGTMMQYFEWYVPNDGQQWNRLRTDAPYLSSVGITAVWTPPAYKGTSQADVGYGPYDLYDLGEFNQKGTVRTKYGTKGELKSAVNTLHSNGIQVYGDVVMNHKAGADYTENVTAVEVNPSNRNQETSGEYNIQAWTGFNFPGRGTTYSNFKWQWFHFDGTDWCQSRSLSRIFKFTGKAWDWEVSSENGNYDYLMYADIDYDHPDVVNEMKKWGVWYANEVGLDGYRLDAVKHIKFSFLKDWVDNARAATGKEMFTVGEYWQNDLGALNNYLAKVNYNQSLFDAPLHYNFYAASTGGGYYDMRNILNNTLVASNPTKAVTLVENHDTQPGQSLESTVQPWFKPLAYAFILTRSGGYPSVFYGDMYGTKGTTTREIPALKSKIEPLLKARKDYAYGTQRDYIDNPDVIGWTREGDSTKAKSGLATVITDGPGGSKRMYVGTSNAGEIWYDLTGNRTDKITIGSDGYATFPVNGGSVSVWVQQ

SEQ ID NO: 36222 - protein, 480 aa, Cytophaga sp.
NPTMMQYFEWYVPNDGQQWNRLRTDAPYLSSVGITAVWTPPAYKGTSQADVGYGPYDLYDLGEFNQKGTVRTKYGTKGELKSAVNTLHSNGIQVYGDVVMNHKAGADYTENVTAVEVNPSNRNQETSGEYNIQAWTGFNFPGRGTTYSNFKWQWFHFDGTDWDQSRSLSRIFKFTGKAWDWEVSSENGNYDYLMYADIDYDHPDVVNEMKKWGVWYANEVGLDGYRLDAVKHIKFSFLKDWVDNARAATGKEMFTVGEYWQNDLGALNNYLAKVNYNQSLFDAPLHYNFYAASTGGGYYDMRNILNNTLVASNPTKAVTLVENHDTQPGQSLESTVQPWFKPLAYAFILTRSGGYPSVFYGDMYGTKGTTTREIPALKSKIEPLLKARKDYAYGTQRDYIDNPDVIGWTREGDSTKAKSGLATVITDGPGGSKRMYVGTSNAGEIWYDLTGNRTDKITIGSDGYATFPVNGGSVSVWVQQ

SEQ ID NO: 36223 - protein, 480 aa, Cytophaga sp.
NGTMMQYFEWYVPNDGQQWNRLRTDAPYLSSVGITAVWTPPAYKGTSQADVGYGPYDLYDLGEFNQKGTVRTKYGTKGELKSAVNTLHSNGIQVYGDVVMNHKAGADYTENVTAVEVNPSNRNQETSGEYNIQAWTGFNFPGRGTTYSNFKWQWFHFDGTDWDQSRSLSRIFKFTGKAWDWEVSSENGNYDYLMYADIDYDHPDVVNEMKKWGVWYANEVGLDGYRLDAVKHIKFSFLKDWVDNARAATGKEMFTVGEYWQNDLGALNNYLAKVNYNQSLFDAPLHYNFYAASTGGGYYDMRNILNNTLVASNPTKAVTLVENHDTQPGQSLESTVQPWFKPLAYAFILTRSGGYPSVFYGDMYGTKGTTTREIPALKSKIEPLLKARKDYAYGTQRDYIDNPDVIGWTREGDPTKAKSGLATVITDGPGGSKRMYVGTSNAGEIWYDLTGNRTDKITIGSDGYATFPVNGGSVSVWVQQ

SEQ ID NO: 36224 - protein, 480 aa, Cytophaga sp.
NGTMMQYFEWYVPNDGQQWNRLRTDAPYLSSVGITAVWTPPAYKGTSQADVGYGPYDLYDLGEFNQKGTVRTKYGTKGELKSAVNTLHSNGIQVYGDVVMNHKAGADYTENVTAVEVNPSNRNQETSGEYNIQAWTGFNFPGRGTTYSNFKWQWFHFDGTDWDQSRSLSRIFKFTGKAWDWEVSSENGNYDYLMYADIDYDHPDVVNEMKKWGVWYANEVGLDGYRLDAVKHIKFSFLKDWVDNARAATGKEMFTVGEYWQNDLGALNNYLAKVNYNQSLFDAPLHYNFYAASTGGGYYDMRNILNNTLVASNPTKAVTLVENHDTQPGQSLESTVQPWFKPLAYAFILTRSGGYPSVFYGDMYGTKGTTTREIPALKSKIEPLLKARKDYAYGTQRDYIDNPDVIGWTREGSSTKAKSGLATVITDGPGGSKRMYVGTSNAGEIWYDLTGNRTDKITIGSDGYATFPVNGGSVSVWVQQ

SEQ ID NO: 36225 - protein, 480 aa, Cytophaga sp.
NGTMMQYFEWYVPNDGQQWNRLRTDAPYLSSVGITAVWTPPAYKGTSQADVGYGPYDLYDLGEFNQKGTVRTKYGTKGELKSAVNTLHSNGIQVYGDVVMNHKAGADYTENVTAVEVNPSNRNQETSGEYNIQAWTGFNFPGRGTTYSNFKWQWFHFDGTDWDQSRSLSRIFKFTGKAWDWEVSSENGNYDYLMYADIDYDHPDVVNEMKKWGVWYANEVGLDGYRLDAVKHIKFSFLKDWVDNARAATGKEMFTVGEYWQNDLGALNNYLAKVNYNQSLFDAPLHYNFYAASTGGGYYDMRNILNNTLVASNPTKAVTLVENHDTQPGQSLESTVQPWFKPLAYAFILTRSGGYPSVFYGDMYGTKGTTTREIPALKSKIEPLLKARKDYAYGTQRDYIDNPDVIGWTREGDSTKAMSGLATVITDGPGGSKRMYVGTSNAGEIWYDLTGNRTDKITIGSDGYATFPVNGGSVSVWVQQ

SEQ ID NO: 36226 - protein, 480 aa, Cytophaga sp.
NGTMMQYFEWYVPNDGQQWNRLRTDAPYLSSVGITAVWTPPAYKGTSQADVGYGPYDLYDLGEFNQKGTVRTKYGTKGELKSAVNTLHSNGIQVYGDVVMNHKAGADYTENVTAVEVNPSNRNQETSGEYNIQAWTGFNFPGRGTTYSNFKWQWFHFDGTDWDQSRSLSRIFKFTGKAWDWEVSSENGNYDYLMYADIDYDHPDVVNEMKKWGVWYANEVGLDGYRLDAVKHIKFSFLKDWVDNARAATGKEMFTVGEYWQNDLGALNNYLAKVNYNQSLFDAPLHYNFYAASTGGGYYDMRNILNNTLVASNPTKAVTLVENHDTQPGQSLESTVQPWFKPLAYAFILTRSGGYPSVFYGDMYGTKGTTTREIPALKSKIEPLLKARKDYAYGTQRDYIDNPDVIGWTREGDSTKAKSGLATVITDGPGGSKRMYVGTSNAGEIWYDLAGNRTDKITIGSDGYATFPVNGGSVSVWVQQ

SEQ ID NO: 36227 - protein, 480 aa, Cytophaga sp.
NGTMMQYFEWYVPNDGQQWNRLRTDAPYLSSVGITAVWTPPAYKGTSQADVGYGPYDLYDLGEFNQKGSVRTKYGTKGELKSAVNTLHSNGIQVYGDVVMNHKAGADYTENVTAVEVNPSNRNQETSGEYNIQAWTGFNFPGRGTTYSNFKWQWFHFDGTDWDQSRSLSRIFKFTGKAWDWEVSSENGNYDYLMYADIDYDHPDVVNEMKKWGVWYANEVGLDGYRLDAVKHIKFSFLKDWVDNARAATGKEMFTVGEYWQNDLGALNNYLAKVNYNQSLFDAPLHYNFYAASTGGGYYDMRNILNNTLVASNPTKAVTLVENHDTQPGQSLESTVQPWFKPLAYAFILTRSGGYPSVFYGDMYGTKGTTTREIPALKSKIEPLLKARKDYAYGTQRDYIDNPDVIGWTREGDSTKAKSGLATVITDGPGGSKRMYVGTSNAGEIWYDLTGNRTDKITIGSDGYATFPVNGGSVSVWVQQ

SEQ ID NO: 36228 - protein, 480 aa, Cytophaga sp.
NGTMMQYFEWYVPNDGQQWNRLRTDAPYLSSVGITAVWTPPAYKGTSQADVGYGPYDLYDLGEFNQKGTVRTKYGTKGELKSAVNTLHSNGIQVYGDVVMNHKAGADYTENVTAVEVNPSNRNQETSGEYNIQAWTGFNFPGRGTTYSNFKWQWFHFDGTDWDQSRSLSRIFKFTGKAWDWEVSSNNGNYDYLMYADIDYDHPDVVNEMKKWGVWYANEVGLDGYRLDAVKHIKFSFLKDWVDNARAATGKEMFTVGEYWQNDLGALNNYLAKVNYNQSLFDAPLHYNFYAASTGGGYYDMRNILNNTLVASNPTKAVTLVENHDTQPGQSLESTVQPWFKPLAYAFILTRSGGYPSVFYGDMYGTKGTTTREIPALKSKIEPLLKARKDYAYGTQRDYIDNPDVIGWTREGDSTKAKSGLATVITDGPGGSKRMYVGTSNAGEIWYDLTGNRTDKITIGSDGYATFPVNGGSVSVWVQQ

SEQ ID NO: 36229 - protein, 480 aa, Cytophaga sp.
NGTMMQYFEWYVPNDGQQWNRLRTDAPYLSSVGITAVWTPPAYKGTSQADVGYGPYDLYDLGEFNQKGTVRTKYGTKGELKSAVNTLHSNGIQVYGDVVMNHKAGADYTENVTAVEVNPSNRNQETSGEYNIQAWTGFNFPGRGTTYSNFKWQWFHFDGTDWDQSRSLSRIFKFTGKAWDWEVSSENGNYDYLMYADIDYDHPDVVNEMKKWGVWYANEVGLDGYRLDAVKHIKFNFLKDWVDNARAATGKEMFTVGEYWQNDLGALNNYLAKVNYNQSLFDAPLHYNFYAASTGGGYYDMRNILNNTLVASNPTKAVTLVENHDTQPGQSLESTVQPWFKPLAYAFILTRSGGYPSVFYGDMYGTKGTTTREIPALKSKIEPLLKARKDYAYGTQRDYIDNPDVIGWTREGDSTKAKSGLATVITDGPGGSKRMYVGTSNAGEIWYDLTGNRTDKITIGSDGYATFPVNGGSVSVWVQQ

SEQ ID NO: 36230 - protein, 480 aa, Cytophaga sp.
NGTMMQYFEWYVPNDGQQWNRLRTDAPYLSSVGITAVWTPPAYKGTSQADVGYGPYDLYDLGEFNQKGTVRTKYGTKGELKSAVNTLHSNGIQVYGDVVMNHKAGADYTENVTAVEVNPSNRNQETSGEYNIQAWTGFNFPHRGTTYSNFKWQWFHFDGTDWDQSRSLSRIFKFTGKAWDWEVSSENGNYDYLMYADIDYDHPDVVNEMKKWGVWYANEVGLDGYRLDAVKHIKFSFLKDWVDNARAATGKEMFTVGEYWQNDLGALNNYLAKVNYNQSLFDAPLHYNFYAASTGGGYYDMRNILNNTLVASNPTKAVTLVENHDTQPGQSLESTVQPWFKPLAYAFILTRSGGYPSVFYGDMYGTKGTTTREIPALKSKIEPLLKARKDYAYGTQRDYIDNPDVIGWTREGDSTKAKSGLATVITDGPGGSKRMYVGTSNAGEIWYDLTGNRTDKITIGSDGYATFPVNGGSVSVWVQQ

SEQ ID NO: 36231 - protein, 480 aa, Cytophaga sp.
NGTMMQYFEWYVPNDGQQWNRLRTDAPYLSSVGITAVWTPPAYKGTSQADVGYGPYDLYDLGEFNQKGTVRTKYGTKGELKSAVNTLHSNGIQVYGDVVMNHKAGADYTENVTAVEVNPSNRNQETSGEYNIQAWTGFNFPGRGTTYSNFKWQWFHFDGTDWDQSRSLSRIFKFTGKAWDWEVSSENGNYDYLMYADIDYDHPDVVNEMKKWGVWYANEVGLDGYRLDAVKHIKFSFLKDWVDNARAATGKEMFTVGEYWQNDLGALNNYLAKVNYNQSLFDAPLHYNFYAASTGGGYYDMRNILNNTLVASNPTKAVTLVENHDTQPGQSLESTVQPWFKPLAYAFILTRSGGYPSVFYGDMYGTKGTTTREIPALKSKIEPLLKARKDYAYGTQRDYIDNPDVIGWTREGESTKAKSGLATVITDGPGGSKRMYVGTSNAGEIWYDLTGNRTDKITIGSDGYATFPVNGGSVSVWVQQ

SEQ ID NO: 36232 - protein, 480 aa, Cytophaga sp.
NVTMMQYFEWYVPNDGQQWNRLRTDAPYLSSVGITAVWTPPAYKGTSQADVGYGPYDLYDLGEFNQKGTVRTKYGTKGELKSAVNTLHSNGIQVYGDVVMNHKAGADYTENVTAVEVNPSNRNQETSGEYNIQAWTGFNFPGRGTTYSNFKWQWFHFDGTDWDQSRSLSRIFKFTGKAWDWEVSSENGNYDYLMYADIDYDHPDVVNEMKKWGVWYANEVGLDGYRLDAVKHIKFSFLKDWVDNARAATGKEMFTVGEYWQNDLGALNNYLAKVNYNQSLFDAPLHYNFYAASTGGGYYDMRNILNNTLVASNPTKAVTLVENHDTQPGQSLESTVQPWFKPLAYAFILTRSGGYPSVFYGDMYGTKGTTTREIPALKSKIEPLLKARKDYAYGTQRDYIDNPDVIGWTREGDSTKAKSGLATVITDGPGGSKRMYVGTSNAGEIWYDLTGNRTDKITIGSDGYATFPVNGGSVSVWVQQ

SEQ ID NO: 36233 - protein, 480 aa, Cytophaga sp.
NGTMMQYFEWYVPNDGQQWNRLRTDAPYLSSVGITAVWTPPAYKGTSQADVGYGPYDLYDLGEFNQKGTVRTKYGTKGELKSAVNTLHSNGIQVYGDVVMNHKAGADYTENVTAVEVNPSNRNQETSGEYNIQAWTGFNFPGRGTTYSNFKWQWFHFDGTDWDQSRSLSRIFKFTGKAWDWEVSSENGNYDYLMYADIDYDHPDVVNEMKKWGVWYANEVGLDGYRLDAVKHIKFSFLKDWVDNARAATGKEMFTVGEYWQNDLGALNNYLAKVNYNQSLFDAPLHYNFYAASTGMGYYDMRNILNNTLVASNPTKAVTLVENHDTQPGQSLESTVQPWFKPLAYAFILTRSGGYPSVFYGDMYGTKGTTTREIPALKSKIEPLLKARKDYAYGTQRDYIDNPDVIGWTREGDSTKAKSGLATVITDGPGGSKRMYVGTSNAGEIWYDLTGNRTDKITIGSDGYATFPVNGGSVSVWVQQ

SEQ ID NO: 36234 - protein, 480 aa, Cytophaga sp.
NGTMMQYFEWYVPNDGQQWNRLRTDAPYLSSVGITAVWTPPAYKGTSQADVGYGPYDLYDLGEFNQKGTVRTKYGTKGELKSAVNTLHSNGIQVYGDVVMNHKAGADYTENVTAVEVNPSNRNQETSGEYNIQAWTGFNFPGRGTTYSNFKWQWFHFDGTDWDQSRSLSRIFKFTGKAWDWEVSSENGNYDYLMYADIDYDHPDVVNEMKKWGVWYANEVGLDGYRLDAVKHIKFSFLKDWVDNARAATGKEMFTVGEYWQNDLGALNNYLAKVNYNQSLFDAPLHYNFYAASTGGGYYDMRNILNNTLVASNPTKAVTLVENHDTQPGQSLESTVQPWFKPLAYAFILTRSGGYPSVFYGDMYGTKGTTTREIPALKSKIEPLLKARKDYAYGTQRDYIDNPDVIGWTREGDSTKAKSGLATVITDGPGGSKRMYVGTSNAGEIWYDLTLNRTDKITIGSDGYATFPVNGGSVSVWVQQ

SEQ ID NO: 36235 - protein, 480 aa, Cytophaga sp.
NGTMMQYFEWYVPNDGQQWNRLRTDAPYLSSVGITAVWTPPAYKGTSQADVGYGPYDLYDLGEFNQKGTVRTKYGTKGELKSAVNTLHSNGIQVYGDVVMNHKAGADYTENVTAVEVNPSNRNQETSGEYNIQAWTGFNFPGRGTTYSNFKWQWFHFDGTDWDQSRSLSRIVKFTGKAWDWEVSSENGNYDYLMYADIDYDHPDVVNEMKKWGVWYANEVGLDGYRLDAVKHIKFSFLKDWVDNARAATGKEMFTVGEYWQNDLGALNNYLAKVNYNQSLFDAPLHYNFYAASTGGGYYDMRNILNNTLVASNPTKAVTLVENHDTQPGQSLESTVQPWFKPLAYAFILTRSGGYPSVFYGDMYGTKGTTTREIPALKSKIEPLLKARKDYAYGTQRDYIDNPDVIGWTREGDSTKAKSGLATVITDGPGGSKRMYVGTSNAGEIWYDLTGNRTDKITIGSDGYATFPVNGGSVSVWVQQ

SEQ ID NO: 36236 - protein, 480 aa, Cytophaga sp.
NGTMMQYFEWYVPNDGQQWNRLRTDAPYLSSVGITAVWTPPAYKGTSQADVGYGPYDLYDLGEFNQKGTVRTKYGTKGELKSAVNTLHSNGIQVYGDVVMNHKAGADYTENVTAVEVNPSNRNQETSGEYNIQAWTGFNFPGRGTTYSNFKWQWFHFDGTDWDQSRSLSRIFKFTGKAWDWEVSSENGNYDYLMYADIDYDHPDVVNEMKKWGVWYANEVGLDGYRLDAVKHIKFSFLKDWVDNARAATGKEMFTVGEYWQNDLGALNNYLAKVNYNQSLFDAPLHYNFYAASTGGGYYDMRNILNNTLVASNPTKAVTLVENHDTQPGQSLESTVQPWFKPLAYAFILTRSGGYPSVFYGDMYGTKGTTTREIPALKSKIEPLLKARKDYAYGTQRDYIDNPDVIGWTREGDETKAKSGLATVITDGPGGSKRMYVGTSNAGEIWYDLTGNRTDKITIGSDGYATFPVNGGSVSVWVQQ

SEQ ID NO: 36237 - protein, 480 aa, Cytophaga sp.
NGTMMQYFEWYVPNDGQQWNRLRTDAPYLSSVGITAVWTPPAYKGTSQADVGYGPYDLYDLGEFNQKGTVRTKYGTKGELKSAVNTLHSNGIQVYGDVVMNHKAGADYTENVTAVEVNPSNRNQETSGEYNIQAWTGFNFPGRGTTYSNFKWQWFHFDGTDWDQSRSLSRIFKFTGKAWDWEVSSENGNYDYLMYADIDYDHPDVVNEMKKWGVWYANEVGLDGYRLDAVKHIKFSFLKDWVDNARAATGKEMFTVGEYWQNDLGALNNYLAKVNYNQSLFDAPLHYNFYAASTGGGYYDMSNILNNTLVASNPTKAVTLVENHDTQPGQSLESTVQPWFKPLAYAFILTRSGGYPSVFYGDMYGTKGTTTREIPALKSKIEPLLKARKDYAYGTQRDYIDNPDVIGWTREGDSTKAKSGLATVITDGPGGSKRMYVGTSNAGEIWYDLTGNRTDKITIGSDGYATFPVNGGSVSVWVQQ

SEQ ID NO: 36238 - protein, 480 aa, Cytophaga sp.
NGTMMQYFEWYVPNDGQQWNRLRTDAPYLQSVGITAVWTPPAYKGTSQADVGYGPYDLYDLGEFNQKGTVRTKYGTKGELKSAVNTLHSNGIQVYGDVVMNHKAGADYTENVTAVEVNPSNRNQETSGEYNIQAWTGFNFPGRGTTYSNFKWQWFHFDGTDWDQSRSLSRIFKFTGKAWDWEVSSENGNYDYLMYADIDYDHPDVVNEMKKWGVWYANEVGLDGYRLDAVKHIKFSFLKDWVDNARAATGKEMFTVGEYWQNDLGALNNYLAKVNYNQSLFDAPLHYNFYAASTGGGYYDMRNILNNTLVASNPTKAVTLVENHDTQPGQSLESTVQPWFKPLAYAFILTRSGGYPSVFYGDMYGTKGTTTREIPALKSKIEPLLKARKDYAYGTQRDYIDNPDVIGWTREGDSTKAKSGLATVITDGPGGSKRMYVGTSNAGEIWYDLTGNRTDKITIGSDGYATFPVNGGSVSVWVQQ

SEQ ID NO: 36239 - protein, 480 aa, Cytophaga sp.
NGTMMQYFEWYVPNDGQQWNRLRTDAPYLSSVGITAVWTPPAYKGTSQADVGYGPYDLYDLGEFNQKGTVRTKYGTKGELKSAVNTLHSNGIQVYGDVVMNHKAGADYTENVTAVEVNPSNRNQETSGEYNIQAWTGFNFPGRGTTYSNFKWQWFHFDGTDWDQSRSLSRIFKFTGKAWDWEVSSENGNYDYLMYADIDYDHPDVVNEMKKWGVWYANEVGLDGYRLDAVKHIKFSFLKDWVDNARAATGKEMFTVGEYWQNDLGALNNYLAKVNYNQSLFDAPLHYNFYAASTGGGYYDMRNILNNTLVASNPTKAVTLVENHDTQPGQSLESTVQPWFKPLAYAFILTRSGGYPSVFYGDMYGTKGTTTREIPALKSKIEPLLKARKDYAYGTQRDYIDNPDVIGWTREGDSTKAKSGLATVITDGPGGSKRMYVGTSNAGEIWYDLIGNRTDKITIGSDGYATFPVNGGSVSVWVQQ

SEQ ID NO: 36240 - protein, 480 aa, Cytophaga sp.
NGTMMQYFEWYVPNDGQQWNRLRTDAPYLSSVGITAVWTPPAYKGTSQADVGYGPYDLYDLGEFNQKGTVRTKYGTKGELKSAVNTLHSNGIQVYGDVVMNHKAGADYTENVTAVEVNPSNRNQETSGEYNIQAWTGFNFPGRGTTYSNFKWQWFHFDGTDWDQSRSLSRIFKFTGKAWDWEVSSENGNYDYLMYADIDYDHPDVVNEMKKWGVWYANEVGLDGYRLDAVKHIKFSFLKDWVDNARAATGKEFFTVGEYWQNDLGALNNYLAKVNYNQSLFDAPLHYNFYAASTGGGYYDMRNILNNTLVASNPTKAVTLVENHDTQPGQSLESTVQPWFKPLAYAFILTRSGGYPSVFYGDMYGTKGTTTREIPALKSKIEPLLKARKDYAYGTQRDYIDNPDVIGWTREGDSTKAKSGLATVITDGPGGSKRMYVGTSNAGEIWYDLTGNRTDKITIGSDGYATFPVNGGSVSVWVQQ

SEQ ID NO: 36241 - protein, 480 aa, Cytophaga sp.
NGTMMQYFEWYVPNDGQQWNRLRTDAPYLSSVGITAVWTPPAYKGTSQADVGYGPYDLYDLGEFNQKGTVRTKYGTKGELKSAVNTLHSNGIQVYGDVVMNHKAGADYTENVTAVEVNPSNRNQETSGEYNIQAWTGFNFPGRGTTYSNFKWQWFHFDGTDWDQSRSLSRIFKFTGKAWDWEVSSENGNYDYLMYADIDYDHPDVVNEMKKWGVWYANEVGLDGYRLDAVKHIKFSFLKDWVDNARAATGKEMFTVGEYWQNDLGALNNYLAKVNYNQSLFDAPLHYNFYAASTGGGYYDMRNILNNTLVASNPTKAVTLVENHDTQPGQSLESTVQPWFKPLAYAFILTRSGGYPSVFYGDMYGTKGTTTREIPALKSKIEPLLKARKDYAYGTQRDYIDNPDVIGWTREGDSTKAKSGLATVITDSPGGSKRMYVGTSNAGEIWYDLTGNRTDKITIGSDGYATFPVNGGSVSVWVQQ

SEQ ID NO: 36242 - protein, 480 aa, Cytophaga sp.
NGTMMQYFEWYVPNDGQQWNRLRTDAPYLSSVGITSVWTPPAYKGTSQADVGYGPYDLYDLGEFNQKGTVRTKYGTKGELKSAVNTLHSNGIQVYGDVVMNHKAGADYTENVTAVEVNPSNRNQETSGEYNIQAWTGFNFPGRGTTYSNFKWQWFHFDGTDWDQSRSLSRIFKFTGKAWDWEVSSENGNYDYLMYADIDYDHPDVVNEMKKWGVWYANEVGLDGYRLDAVKHIKFSFLKDWVDNARAATGKEMFTVGEYWQNDLGALNNYLAKVNYNQSLFDAPLHYNFYAASTGGGYYDMRNILNNTLVASNPTKAVTLVENHDTQPGQSLESTVQPWFKPLAYAFILTRSGGYPSVFYGDMYGTKGTTTREIPALKSKIEPLLKARKDYAYGTQRDYIDNPDVIGWTREGDSTKAKSGLATVITDGPGGSKRMYVGTSNAGEIWYDLTGNRTDKITIGSDGYATFPVNGGSVSVWVQQ

SEQ ID NO: 36243 - protein, 480 aa, Cytophaga sp.
NGTMMQYFEWYVPNDGQQWNRLRTDAPYLSSVGITAVWTPPAYKGTSQADVGYGPYDLYDLGEFNQKGTVRTKYGTKGELKSAVNTLHSNGIQVYGDVVMNHKAGADYTENVTAVEVNPSNRNQETSGEYNIQAWTGFNFPGRGTTYSNFKWQWFHFDGTDWDQSRSLSRIFKFTGKAWDWEVSSENGNYDYLMYADIDYDHPDVVNEMKKWGVWYANEVGLDGYRLDAVKHIKFSFLKDWVDNARAATGKEMFTVGEYWQNDLGALNNYLAKVNYNQSLFDAPLHYNFYAASTGGGYYDMRNILNNTLVASNPTKAVTLVENHDTQPGQSLESTVQPWFKPLAYAFILTRSGGYPSVFYGDMYGTKGTTTREIPALKSKIEPLLKARKDYAYGTQRDYIDNPDVIGWTREGDSTKAKSGLATVITDGPGGSKRMYVGTSNAGEIWYDLTGNRTDKITIGFDGYATFPVNGGSVSVWVQQ

SEQ ID NO: 36244 - protein, 480 aa, Cytophaga sp.
NGTMMQYFEWYVPNDGQQWNRLRTDAPYLSSVGITAVWTPPAYKGTSQADVGYGPYDLYDLGEFNQKGTVRTKYGTKGELKSAVNTLHSNGIQVYGDVVMNHKAGADYTYNVTAVEVNPSNRNQETSGEYNIQAWTGFNFPGRGTTYSNFKWQWFHFDGTDWDQSRSLSRIFKFTGKAWDWEVSSENGNYDYLMYADIDYDHPDVVNEMKKWGVWYANEVGLDGYRLDAVKHIKFSFLKDWVDNARAATGKEMFTVGEYWQNDLGALNNYLAKVNYNQSLFDAPLHYNFYAASTGGGYYDMRNILNNTLVASNPTKAVTLVENHDTQPGQSLESTVQPWFKPLAYAFILTRSGGYPSVFYGDMYGTKGTTTREIPALKSKIEPLLKARKDYAYGTQRDYIDNPDVIGWTREGDSTKAKSGLATVITDGPGGSKRMYVGTSNAGEIWYDLTGNRTDKITIGSDGYATFPVNGGSVSVWVQQ

SEQ ID NO: 36245 - protein, 480 aa, Cytophaga sp.
NGTMMQYFEWYVPNDGQQWNRLRTDAPYLSSVGITAVWTPPAYKGTSQADVGYGPYDLYDLGEFNQKGTVRTKYGTKGELKSAVNTLHSNGIQVYGDVVMNHKAGADYTENVTAVEVNTSNRNQETSGEYNIQAWTGFNFPGRGTTYSNFKWQWFHFDGTDWDQSRSLSRIFKFTGKAWDWEVSSENGNYDYLMYADIDYDHPDVVNEMKKWGVWYANEVGLDGYRLDAVKHIKFSFLKDWVDNARAATGKEMFTVGEYWQNDLGALNNYLAKVNYNQSLFDAPLHYNFYAASTGGGYYDMRNILNNTLVASNPTKAVTLVENHDTQPGQSLESTVQPWFKPLAYAFILTRSGGYPSVFYGDMYGTKGTTTREIPALKSKIEPLLKARKDYAYGTQRDYIDNPDVIGWTREGDSTKAKSGLATVITDGPGGSKRMYVGTSNAGEIWYDLTGNRTDKITIGSDGYATFPVNGGSVSVWVQQ

SEQ ID NO: 36246 - protein, 480 aa, Cytophaga sp.
NGTMMQYFEWYVPNDGQQWNRLRTDAPYLSSVGITAVWTPPAYKGTSQADVGYGPYDLYDLGEFNQKGTVRTKYGTKGELKSAVNTLHSNGIQVYGDVVMNHKAGADYTENVTAVEVNPSNRNQETSGEYNIQAWTGFNFPERGTTYSNFKWQWFHFDGTDWDQSRSLSRIFKFTGKAWDWEVSSENGNYDYLMYADIDYDHPDVVNEMKKWGVWYANEVGLDGYRLDAVKHIKFSFLKDWVDNARAATGKEMFTVGEYWQNDLGALNNYLAKVNYNQSLFDAPLHYNFYAASTGGGYYDMRNILNNTLVASNPTKAVTLVENHDTQPGQSLESTVQPWFKPLAYAFILTRSGGYPSVFYGDMYGTKGTTTREIPALKSKIEPLLKARKDYAYGTQRDYIDNPDVIGWTREGDSTKAKSGLATVITDGPGGSKRMYVGTSNAGEIWYDLTGNRTDKITIGSDGYATFPVNGGSVSVWVQQ

SEQ ID NO: 36247 - protein, 480 aa, Cytophaga sp.
NGTMMQYFEWYVPNDGQQWNRLRTDAPYLSSVGITAVWTPPAYKGTSQADVGYGPYDLYDLGEFNQKGTVRTKYGTKGELKSAVNTLHSNGIQVYGDVVMNHKAGADYTENVTASEVNPSNRNQETSGEYNIQAWTGFNFPGRGTTYSNFKWQWFHFDGTDWDQSRSLSRIFKFTGKAWDWEVSSENGNYDYLMYADIDYDHPDVVNEMKKWGVWYANEVGLDGYRLDAVKHIKFSFLKDWVDNARAATGKEMFTVGEYWQNDLGALNNYLAKVNYNQSLFDAPLHYNFYAASTGGGYYDMRNILNNTLVASNPTKAVTLVENHDTQPGQSLESTVQPWFKPLAYAFILTRSGGYPSVFYGDMYGTKGTTTREIPALKSKIEPLLKARKDYAYGTQRDYIDNPDVIGWTREGDSTKAKSGLATVITDGPGGSKRMYVGTSNAGEIWYDLTGNRTDKITIGSDGYATFPVNGGSVSVWVQQ

SEQ ID NO: 36248 - protein, 480 aa, Cytophaga sp.
NGTMMQYFEWYVPNDGQQWNRLRTDAPYLSSVGITAVWTPPAYKGTSQADVGYGPYDLYDLGEFNQKGTVRTKYGTKGELKSAVNTLHSNGIQVYGDVVMNHKAGADYTENVTAVEVNPSNRNQETSGEYNIQAWTGFNFPGRGTTYSNFKWQWFHFDGTDWDQSRSLSRIFKFTGKAWDWEVSSENGNYDYLMYADIDYDHPDVVNEMKKWGVWYANEVGLDGYRLDAVKHIKFSFLKDWVDNARAATGKEMFTVGEYWQNDLAALNNYLAKVNYNQSLFDAPLHYNFYAASTGGGYYDMRNILNNTLVASNPTKAVTLVENHDTQPGQSLESTVQPWFKPLAYAFILTRSGGYPSVFYGDMYGTKGTTTREIPALKSKIEPLLKARKDYAYGTQRDYIDNPDVIGWTREGDSTKAKSGLATVITDGPGGSKRMYVGTSNAGEIWYDLTGNRTDKITIGSDGYATFPVNGGSVSVWVQQ

SEQ ID NO: 36249 - protein, 480 aa, Cytophaga sp.
NGTMMQYFEWYVPNDGQQWNRLRTDAPYLSSVGITAVWTPPAYKGTSQADVGYGPYDLYDLGEFNQKGTVRTKYGTKGELKSAVNTLHRNGIQVYGDVVMNHKAGADYTENVTAVEVNPSNRNQETSGEYNIQAWTGFNFPGRGTTYSNFKWQWFHFDGTDWDQSRSLSRIFKFTGKAWDWEVSSENGNYDYLMYADIDYDHPDVVNEMKKWGVWYANEVGLDGYRLDAVKHIKFSFLKDWVDNARAATGKEMFTVGEYWQNDLGALNNYLAKVNYNQSLFDAPLHYNFYAASTGGGYYDMRNILNNTLVASNPTKAVTLVENHDTQPGQSLESTVQPWFKPLAYAFILTRSGGYPSVFYGDMYGTKGTTTREIPALKSKIEPLLKARKDYAYGTQRDYIDNPDVIGWTREGDSTKAKSGLATVITDGPGGSKRMYVGTSNAGEIWYDLTGNRTDKITIGSDGYATFPVNGGSVSVWVQQ

SEQ ID NO: 36250 - protein, 480 aa, Cytophaga sp.
NGTMMQYFEWYVPNDGQQWNRLRTDAPYLSSVGITAVWTPPAYKGTSQADVGYGPYDLYDLGEFNQKGTVRTKYGTKGELKSAVNTLHSNGIQVYGDVVMNHKAGADYTENVTAVEVNPSNRNQETSGEYNIQAWTGFNFPGRGTTYSNFKWQWFHFDGTDWDQSRSLSRIFKFTGKAWDWEVSSENGNYDYLMYADIDYDHPDVFNEMKKWGVWYANEVGLDGYRLDAVKHIKFSFLKDWVDNARAATGKEMFTVGEYWQNDLGALNNYLAKVNYNQSLFDAPLHYNFYAASTGGGYYDMRNILNNTLVASNPTKAVTLVENHDTQPGQSLESTVQPWFKPLAYAFILTRSGGYPSVFYGDMYGTKGTTTREIPALKSKIEPLLKARKDYAYGTQRDYIDNPDVIGWTREGDSTKAKSGLATVITDGPGGSKRMYVGTSNAGEIWYDLTGNRTDKITIGSDGYATFPVNGGSVSVWVQQ

SEQ ID NO: 36251 - protein, 480 aa, Cytophaga sp.
NGTMMQYFEWYVPNDGQQWNRLRTDAPYLSSVGITAVWTPPAYKGTSQADVGYGPYDLYDLGEFNQKGTVRTKYGTKGELKSAVNTLHSNGIQVYGDVVMNHKAGADYTENVTAVEVNPSNRNQETSGEYNIQAWTGFNFPGRGTTYSNFKWQWFHFDGTDPDQSRSLSRIFKFTGKAWDWEVSSENGNYDYLMYADIDYDHPDVVNEMKKWGVWYANEVGLDGYRLDAVKHIKFSFLKDWVDNARAATGKEMFTVGEYWQNDLGALNNYLAKVNYNQSLFDAPLHYNFYAASTGGGYYDMRNILNNTLVASNPTKAVTLVENHDTQPGQSLESTVQPWFKPLAYAFILTRSGGYPSVFYGDMYGTKGTTTREIPALKSKIEPLLKARKDYAYGTQRDYIDNPDVIGWTREGDSTKAKSGLATVITDGPGGSKRMYVGTSNAGEIWYDLTGNRTDKITIGSDGYATFPVNGGSVSVWVQQ

SEQ ID NO: 36252 - protein, 480 aa, Cytophaga sp.
NGTMMQYFEWYVPNDGQQWNRLRTDAPYLSSVGITAVWTPPAYKGTSQADVGYGPYDLYDLGEFNQKGTVRTKYGTKGELKSAVNTLHSNGIQVYGDVVMNHKAGADYTENVTAVEVNPSNRNQETSGEYNIQAWTGFNFPGRLTTYSNFKWQWFHFDGTDWDQSRSLSRIFKFTGKAWDWEVSSENGNYDYLMYADIDYDHPDVVNEMKKWGVWYANEVGLDGYRLDAVKHIKFSFLKDWVDNARAATGKEMFTVGEYWQNDLGALNNYLAKVNYNQSLFDAPLHYNFYAASTGGGYYDMRNILNNTLVASNPTKAVTLVENHDTQPGQSLESTVQPWFKPLAYAFILTRSGGYPSVFYGDMYGTKGTTTREIPALKSKIEPLLKARKDYAYGTQRDYIDNPDVIGWTREGDSTKAKSGLATVITDGPGGSKRMYVGTSNAGEIWYDLTGNRTDKITIGSDGYATFPVNGGSVSVWVQQ

SEQ ID NO: 36253 - protein, 480 aa, Cytophaga sp.
NGTMMQYFEWYVPNDGQQWNRLRTDAPYLSSVGITAVWTPPAYKGTSQADVGYGPYDLYDLGEFNQKGTVRTKYGTKGELKSAVNTLHSNGIQVYGDVVMNHKAGADYTENVTAVEVNPSNRNQETSGEYNIQAWTGFNFPGRGTTYSNFKWQWFHFDGTDWDQSRSLSRIFKFTGKAWDWEVSSENGNYDYLMYADIDYDHPDVVNEMKKWGVWYANEVGLDGYRLDAVKHIKFSFLKDWVDNARAATGKEMFTVGEYWQNDLVALNNYLAKVNYNQSLFDAPLHYNFYAASTGGGYYDMRNILNNTLVASNPTKAVTLVENHDTQPGQSLESTVQPWFKPLAYAFILTRSGGYPSVFYGDMYGTKGTTTREIPALKSKIEPLLKARKDYAYGTQRDYIDNPDVIGWTREGDSTKAKSGLATVITDGPGGSKRMYVGTSNAGEIWYDLTGNRTDKITIGSDGYATFPVNGGSVSVWVQQ

SEQ ID NO: 36254 - protein, 480 aa, Cytophaga sp.
NGTMMQYFEWYVPNDGQQWNRLRTDAPYLSSVGITAVWTPPAYKGTSQADVGYGPYDLYDLGEFNQKGTVRTKYGTKGELKSAVNTLHSNGIQVYGDVVMNHKAGADYTENVTAVEVNPSNRNQETSGEYNIQAWTGFNFPGRGTTYSNFKWQWFHFDGTDWDQSRSLSRIFKFTGKAWDWEVSSENGNYDYLMYADIDYDHPDVVNEMKKWGVWYANEVGLDGYRLDAVKHIKFSFLKDWVDNARAATGKEMFTVGEYWQNDLGALNNYLAKVNYNQSLFDAPLHYNFYAASTGGGYYDMRNILNNTLVASNPTKAVTLVENHDTQPGQSLESTVQPWFKPLAYAFILTRSGGYPSVFYGDMYGTKGTTTREIPALKSKIEPLLKARKDYAYGTQRDYIDNPDVIGWTREGDRTKAKSGLATVITDGPGGSKRMYVGTSNAGEIWYDLTGNRTDKITIGSDGYATFPVNGGSVSVWVQQ

SEQ ID NO: 36255 - protein, 480 aa, Cytophaga sp.
NGTMMQYFEWYVPNDGQQWNRLRTDAPYLSSVGITAVWTPPAYKGTSQADVGYGPYDLYDLGEFNQKGTVRTKYGTKGELKSAVNTLHSNGIQVYGDVVMNHKAGADYTENVTAVEVNPSNRNQELSGEYNIQAWTGFNFPGRGTTYSNFKWQWFHFDGTDWDQSRSLSRIFKFTGKAWDWEVSSENGNYDYLMYADIDYDHPDVVNEMKKWGVWYANEVGLDGYRLDAVKHIKFSFLKDWVDNARAATGKEMFTVGEYWQNDLGALNNYLAKVNYNQSLFDAPLHYNFYAASTGGGYYDMRNILNNTLVASNPTKAVTLVENHDTQPGQSLESTVQPWFKPLAYAFILTRSGGYPSVFYGDMYGTKGTTTREIPALKSKIEPLLKARKDYAYGTQRDYIDNPDVIGWTREGDSTKAKSGLATVITDGPGGSKRMYVGTSNAGEIWYDLTGNRTDKITIGSDGYATFPVNGGSVSVWVQQ

SEQ ID NO: 36256 - protein, 480 aa, Cytophaga sp.
NGTMMQYFEWYVPNDGQQWNRLRTDAPYLSSVGITAVWTPPAYKGTSQADVGYGPYDLYDLGEFNQKGTVRTKYGTKGELKSAVNTLHSNGIQVYGDVVMNHKAGADYTENVTAVEVNPSNRNQETSGEYNIQAWTGFNFPGRGTTYSNFKWQWFHFDGTDWDQSRSLSRIFKFTGKAWDWEVSSENGNYDYLMYADIDYDHPDVVNEMKKWGVWYANEVGLDGYRLDAVKHIKFSFLKDWVDNARAATGKEMFTVGEYWQNDLGALNNYLAKVNYNQSLFDAPLHYNFYAASTGGGYYDMRNILNNTLVASNPTKAVTLVENHDTQPGQSLESTVQPWFKPLAYAFILTRSGGYPSVFYGDMYGTKGTTTREIPALKSKIEPLLKARKDYAYGTQRDYIDNPDVIGWTREGDSTKAKSGLATVITDGPGGSKRMYVGTSNAGEIWYDLTGNRTDKITIGSDGYATFPVNGISVSVWVQQ

SEQ ID NO: 36257 - protein, 480 aa, Cytophaga sp.
NGTMMQYFEWYVPNDGQQWNRLRTDAPYLSSVGITAVWTPPAYKGTSQADVGYGPYDLYDLGEFNQKGTVRTKYGTKGELKSAVNTLHSNGIQVYGDVVMNHKAGADYTENVTAVEVNPSNRNQETSGEYNIQAWTGFNFPGRGTTYSNFKWQWFHFDGTDWDQSRSLSRIFKFTGKAWDWEVSSENGNYDYLMYADIDYDHPDVVNEMKKWGVWYANEVGLDGYRLDAVKHIKFSFLKDWVDNARAATGKEMFTVGEYWQNDLGALNNYLAKVNYNQSLFDAPLHYNFYAASTGGGYYDMRNILNNTLVASNPTKAVTLVENHDTQPGQSLESTVQPWFKPLAYAFILTRSGGYPSVFYGDMYGTKGTTTREIPALKSKIEPLLKARKDYAYGTQRDYIDNPDVIGWTREGDSTKAKSGLATVITDGPQGSKRMYVGTSNAGEIWYDLTGNRTDKITIGSDGYATFPVNGGSVSVWVQQ

SEQ ID NO: 36258 - protein, 480 aa, Cytophaga sp.
NGTMMQYFEWYVPNDGQQWNRLRTDAPYLSSVGITAVWTPPAYKGTSQADVGYGPYDLYDLGEFNQKGTVRTKYGTKGELKSAVNTLHSNGIQVYGDVVMNHKAGADYTENVTAVEVNPSNRNQETSGEYNIQAWTGFNFPGRGTTYSNFKWQWFHFDGTDWDQSRSLSRIFKFTGKAWDWEVSSENGNYDYLMYADIDYDHPDVVNEMKKWGVWYANEVGLDGYRLDAVKHIKFSFLKDWVDNARAATGKEMFTVGEYWQNDLGALNNYLAKVNYNQSLFDAPLHYNFYAASTGGGYYDMRNILNNTLVASNPTKAVTLVENHDTQPGQSLESTVQPWFKPLAYAFILTRSGGYPSVFYGDMYGTKGTTTREIPALKSKIEPLLKARKDYAYGTQRDYIDNPDVIGWTREGDSTKAKSGLATVITDGPGGSKRMYVGTSNAGEIWYDLTGNRTDKITIQSDGYATFPVNGGSVSVWVQQ

SEQ ID NO: 36259 - protein, 480 aa, Cytophaga sp.
NGTMMQYFEWYVPNDGQQWNRLRTDAPYLSSVGITAVWTPPAYKGTSQADVGYGPYDLYDLGEFNQKGTVRTKYGTKGELKSAVNTLHSNGIQVYGDVVMNHKAGADYTENVTAVEVNPSNRNQETSGEYNIQAWTGFNFPGRGTTYSNFKWQWFHFDGTDWDQSRSLSRIFKFTGKAWDWEVSSENGNYDYLMYADIDYDHPDVVNEMKKWGVWYANEVGLDGYRLDAVKHIKFSFLKDWVDNARAATGKEMFTVGEYWQNDLGALNNYLAKVNYNQSLFDAPLHYNFYAASTGGGYYDMRNILNNTLVASNPTKAVTLVENHDTQPGQSLESTVQPWFKPLAYAFILTRSGGYPSVFYGDMYGTKGTTTREIPALKSKIEPLLKARKDYAYGTQRDYIDNPDVIGWTREGDSTKAKSGLATVITDGPGGSKRMYVGTSNAGEIWYDLTGNRTDKITIGSDGYATFPVNGGSVSVWVHQ

SEQ ID NO: 36260 - protein, 480 aa, Cytophaga sp.
NGTMMQYFEWYVPNDGQQWNRLRTDAPYLSSVGITAVWTPPAYKGTSQADVGYGPYDLYDLGEFNQKGTVRTKYGTKGELKSAVNTLHSNGIQVYGDVVMNHKAGADYTENVTAVEVNPSNRNQETSGEYNIQAWTGFNFPGRGTTWSNFKWQWFHFDGTDWDQSRSLSRIFKFTGKAWDWEVSSENGNYDYLMYADIDYDHPDVVNEMKKWGVWYANEVGLDGYRLDAVKHIKFSFLKDWVDNARAATGKEMFTVGEYWQNDLGALNNYLAKVNYNQSLFDAPLHYNFYAASTGGGYYDMRNILNNTLVASNPTKAVTLVENHDTQPGQSLESTVQPWFKPLAYAFILTRSGGYPSVFYGDMYGTKGTTTREIPALKSKIEPLLKARKDYAYGTQRDYIDNPDVIGWTREGDSTKAKSGLATVITDGPGGSKRMYVGTSNAGEIWYDLTGNRTDKITIGSDGYATFPVNGGSVSVWVQQ

SEQ ID NO: 36261 - protein, 480 aa, Cytophaga sp.
NGTMMQYFEWYVPNDGQQWNRLRTDAPYLSSVGITAVWTPPAYKGTSQADVGYGPYDLYDLGEFNQKGTVRTKYGTKGELKSAVNTLHSNGIQVYGDVVMNHKAGADYTENVTAVEVNPSNRNQETSGEYNIQAWTGFNFPGRGTTYSNFAWQWFHFDGTDWDQSRSLSRIFKFTGKAWDWEVSSENGNYDYLMYADIDYDHPDVVNEMKKWGVWYANEVGLDGYRLDAVKHIKFSFLKDWVDNARAATGKEMFTVGEYWQNDLGALNNYLAKVNYNQSLFDAPLHYNFYAASTGGGYYDMRNILNNTLVASNPTKAVTLVENHDTQPGQSLESTVQPWFKPLAYAFILTRSGGYPSVFYGDMYGTKGTTTREIPALKSKIEPLLKARKDYAYGTQRDYIDNPDVIGWTREGDSTKAKSGLATVITDGPGGSKRMYVGTSNAGEIWYDLTGNRTDKITIGSDGYATFPVNGGSVSVWVQQ

SEQ ID NO: 36262 - protein, 480 aa, Cytophaga sp.
NGTMMQYFEWYVPNDGQQWNRLRTDAPYLSSVGITAVWTPPAYKGTSQADVGYGPYDLYDLGEFNQKGTVRTKYGTKGELKSAVNTLHSNGIQVYGDVVMNHKAGADYTENVTAVEVNPSNRNQETSGEYNIQAWTGFNFPGRGTTYSNFKWQWFHFDGTDWDQSRSLSRIFKFTGKAWDWEVSSENGNYDYLMYADIDYDHPDVVNEMKKWGVWYANEVGLDGYRLDAVKHIKFSFTKDWVDNARAATGKEMFTVGEYWQNDLGALNNYLAKVNYNQSLFDAPLHYNFYAASTGGGYYDMRNILNNTLVASNPTKAVTLVENHDTQPGQSLESTVQPWFKPLAYAFILTRSGGYPSVFYGDMYGTKGTTTREIPALKSKIEPLLKARKDYAYGTQRDYIDNPDVIGWTREGDSTKAKSGLATVITDGPGGSKRMYVGTSNAGEIWYDLTGNRTDKITIGSDGYATFPVNGGSVSVWVQQ

SEQ ID NO: 36263 - protein, 480 aa, Cytophaga sp.
NGTMMQYFEWYVPNDGQQWNRLRTDAPYLSSVGITAVWTPPAYKGTSQADVGYGPYDLYDLGEFNQKGTVRTKYGTKGELKSAVNTLHSNGIQVYGDVVMNHKAGADYTENVTAVEVNPSNRNQETSGEYNIQAWTGFNFPGRGTTYSNFKWQWFHFDGTDWDQSRSLSRIFKFTGKAWDWEVSSENGNYDYLMYADIDYDHPDVVNEMKKWGVWYANEVGLDGYRLDAVKHIKFSFLKDWVDNARAMTGKEMFTVGEYWQNDLGALNNYLAKVNYNQSLFDAPLHYNFYAASTGGGYYDMRNILNNTLVASNPTKAVTLVENHDTQPGQSLESTVQPWFKPLAYAFILTRSGGYPSVFYGDMYGTKGTTTREIPALKSKIEPLLKARKDYAYGTQRDYIDNPDVIGWTREGDSTKAKSGLATVITDGPGGSKRMYVGTSNAGEIWYDLTGNRTDKITIGSDGYATFPVNGGSVSVWVQQ

SEQ ID NO: 36264 - protein, 480 aa, Cytophaga sp.
NGTMMQYFEWYVPNDGQQWNRLRTDAPYLSSVGITAVWTPPAYKGTSQADVGYGPYDLYDLGEFNQKGTVRTKYGTKGELKSAVNTLHSNGIQVYGDVVMNHKAGADYTENVTAVEVNPSNRNQETSGEYNIQAWTGFNFPGRGTTYSNFKWQWFHFDGTDWDQSTSLSRIFKFTGKAWDWEVSSENGNYDYLMYADIDYDHPDVVNEMKKWGVWYANEVGLDGYRLDAVKHIKFSFLKDWVDNARAATGKEMFTVGEYWQNDLGALNNYLAKVNYNQSLFDAPLHYNFYAASTGGGYYDMRNILNNTLVASNPTKAVTLVENHDTQPGQSLESTVQPWFKPLAYAFILTRSGGYPSVFYGDMYGTKGTTTREIPALKSKIEPLLKARKDYAYGTQRDYIDNPDVIGWTREGDSTKAKSGLATVITDGPGGSKRMYVGTSNAGEIWYDLTGNRTDKITIGSDGYATFPVNGGSVSVWVQQ

SEQ ID NO: 36265 - protein, 480 aa, Cytophaga sp.
NGTMMQYFEWYVPNDGQQWNRLRTDAPYLSSVGITAVWTPPAYKGTSQADVGYGPYDLYDLGEFNQKGTVRTKYGTKGELKSAVNTLHSNGIQVYGDVVMNHKAGADYTENVTAVEVNPSNRNQETSGRYNIQAWTGFNFPGRGTTYSNFKWQWFHFDGTDWDQSRSLSRIFKFTGKAWDWEVSSENGNYDYLMYADIDYDHPDVVNEMKKWGVWYANEVGLDGYRLDAVKHIKFSFLKDWVDNARAATGKEMFTVGEYWQNDLGALNNYLAKVNYNQSLFDAPLHYNFYAASTGGGYYDMRNILNNTLVASNPTKAVTLVENHDTQPGQSLESTVQPWFKPLAYAFILTRSGGYPSVFYGDMYGTKGTTTREIPALKSKIEPLLKARKDYAYGTQRDYIDNPDVIGWTREGDSTKAKSGLATVITDGPGGSKRMYVGTSNAGEIWYDLTGNRTDKITIGSDGYATFPVNGGSVSVWVQQ

SEQ ID NO: 36266 - protein, 480 aa, Cytophaga sp.
NGTMMQYFEWYVPNDGQQWNRLRTDAPYLSSVGITAVWTPPAYKGTSQADVGYGPYDLYDLGEFNQKGTVRTKYGTKGELKSAVNTLHSNGIQVYGDVVMNHKAGADYTENVTAVEVNPSNRNQETSGEYNIQAWTGFNFPGRGTTYSNFKWQWFHFDGTDWDQSRSLSRIFKFTGKAWDWEVSSENGNYDYLMYADIDYDHPDVVNEMKKWGVWYANEVGLDGYRLDAVKHIKFSFLKDWVDNARAATGKEMFTVGEYWQNDLGALNNYLAKVNYNQSLFDAPLHYNFYAASTGGGYYDMRNILNNTLVASNPTKAVTLVENHDTQPGQSLESTVQPWFKPLAYAFILTRSGGYPSVFYGDMYGTKGTTTREIPALKSKIEPLLKARKDYAYGTQRDYIDNPDVIGWTREGDSTKAKSGCATVITDGPGGSKRMYVGTSNAGEIWYDLTGNRTDKITIGSDGYATFPVNGGSVSVWVQQ

SEQ ID NO: 36267 - protein, 480 aa, Cytophaga sp.
NGTMMQYFEWYVPNDGQQWNRLRTDAPYLSSVGITAVWTPPAYKGTSQADVGYGPYDLYDLGEFNQKGTVRTKYGTKGELKSAVNTLHSNGIQVYGDVVMNHKAGADYTENVTAVEVNPSNRNQETSGEYNIQAWTGFNFPGRGTTYSNFKWQWFHFDGTDWDQSRSLSRIFKFTGKAWDWEVSSENGNYDYLMYADIDYDHPDVVNEMKKWGVWYANEVGLDGYRLDAVKHIKFSFLKDWVDNARAATGKEMFTVGEYWQNDLGALNNYLAKVNYNQYLFDAPLHYNFYAASTGGGYYDMRNILNNTLVASNPTKAVTLVENHDTQPGQSLESTVQPWFKPLAYAFILTRSGGYPSVFYGDMYGTKGTTTREIPALKSKIEPLLKARKDYAYGTQRDYIDNPDVIGWTREGDSTKAKSGLATVITDGPGGSKRMYVGTSNAGEIWYDLTGNRTDKITIGSDGYATFPVNGGSVSVWVQQ

SEQ ID NO: 36268 - protein, 480 aa, Cytophaga sp.
NGTMMQYFEWYVPNDGQQWNRLRTDAPYLSSVGITAVWTPPAYKGTSQADVGYGPYDLYDLGEFNQKGTVRTKYGTKGELKSAVNTLHSNGIQVYGDVVMNHKAGADYTENVTAVEVNPSNRNQETSGEYNIQAWTGFNFPGRGTTYSNFKWQWFHFDGTDWDQSRSLSRIFKFTGKAWDWEVSSENGNYDYLMYADIDYDHPDVVNEMKKWGVWYANEVGLDGYRLDAVKHIKFSFLKDWVDNARAATGKEMFTVGEYWQNDLGALNNYLAKVNYNQSLFDAPLHYNFYAASTGGGYYDMRNILNNTLVASNPTKAVTLVENHDTQPGQSLESTVQPWFKPLAYAFILTRSGGYPSVFYGDMYGTKGTTTREIPALKSKIEPLLKARKDYAYGTQRDYIDNPDVIGWTREGDSTKAKSGLATVITDGPGGSKRMYVGTSNAGEIWYDLTGNRTNKITIGSDGYATFPVNGGSVSVWVQQ

SEQ ID NO: 36269 - protein, 480 aa, Cytophaga sp.
NGTMMQYFEWYVPNDGQQWNRLRTDAPYLSSVGITAVWTPPAYKGTSQADVGYGPYDLYDLGEFNQKGTVRTKYGTKGELKSAVNTLHSNGIQVYGDVVMNHKAGADYTENVTAVEVNPSNRNQETSGEYNIQAWTGFNFPGRGTTYSNFKWQWFHFDGTDWDQSRSLSRIFKFTGKAWDWEVSSENGNYDYLMYADIDYDHPDVVNEMKKWGVWYANEVGLDGYRLDAVKHIKFSFLKDWVDNARAATGKEMFTVGEYWQNDLGALNNYLAKVNYNQSLFDAPLHYNFYAASTGGGYYDMRNILNNTLVASNPTKAVTLVENHDTQPGQSLESTVQPWFKPLAYAFILTRSGGYPSVFYGDMYGTKGTTTREIPALKSKIEPLLKARKDYAYGTQRDYIDNPDVIGWTREGDSTKAKSGLATVITDGPGGSKRMYVGTSNAGEIWYDLTGNRTDKITIGSDGYATFPVNGRSVSVWVQQ

SEQ ID NO: 36270 - protein, 480 aa, Cytophaga sp.
NGTMMQYFEWYVPNDGQQWNRLRTDAPYLSSVGITAVWTPPAYKGTSQADVGYGPYDLYDLGEFNQKGTVRTKYGTKGELKSAVNTLHSNGIQVYGDVVMNHKAGADYTENVTAVEVNPSNRNQETSGEYNIQAWTGFNFPGRGTTYSNFKWQWFHFDGTDWDQSRSLSRIFKFTGKAWDWEVSSENGNYDYLMYADIDYDHPDVVNEMKKWGVWYANEVGLDGYRLDAVKHIKFSFLKDWVDNARAATGKEMFTVGEYWQNDLGALNNYLAKVNYNQSLFDAPLHYNFYAASTGGGYYDMRNITNNTLVASNPTKAVTLVENHDTQPGQSLESTVQPWFKPLAYAFILTRSGGYPSVFYGDMYGTKGTTTREIPALKSKIEPLLKARKDYAYGTQRDYIDNPDVIGWTREGDSTKAKSGLATVITDGPGGSKRMYVGTSNAGEIWYDLTGNRTDKITIGSDGYATFPVNGGSVSVWVQQ

SEQ ID NO: 36271 - protein, 480 aa, Cytophaga sp.
NGTMMQYFEWYVPNDGQQWNRLRTDAPYLSSVGITAVWTPPAYKGTSQADVGYGPYDLYDLGEFNQKGTVRTKYGTKGELKSAVNTLHSNGIQVYGDVVMNHKAGADYTENVTAVEVNPSNRNQETSGEYNIQVWTGFNFPGRGTTYSNFKWQWFHFDGTDWDQSRSLSRIFKFTGKAWDWEVSSENGNYDYLMYADIDYDHPDVVNEMKKWGVWYANEVGLDGYRLDAVKHIKFSFLKDWVDNARAATGKEMFTVGEYWQNDLGALNNYLAKVNYNQSLFDAPLHYNFYAASTGGGYYDMRNILNNTLVASNPTKAVTLVENHDTQPGQSLESTVQPWFKPLAYAFILTRSGGYPSVFYGDMYGTKGTTTREIPALKSKIEPLLKARKDYAYGTQRDYIDNPDVIGWTREGDSTKAKSGLATVITDGPGGSKRMYVGTSNAGEIWYDLTGNRTDKITIGSDGYATFPVNGGSVSVWVQQ

SEQ ID NO: 36272 - protein, 480 aa, Cytophaga sp.
NGTMMQYFEWYVPNDGQQWNRLRTDAPYLSSVGITAVWTPPAYKGTSQADVGYGPYDLYDLGEFNQKGTVRTKYGTKGELKSAVNTLHSNGIQVYGDVVMNHKAGADYTENVTAVEVNPSNRNQETSGEYNIQAWTGFNFPGRGTTYSNFKWQWFHFDGTDWDQSRSLSRIFKFTGKAWDWEVSSENGNYDYLMYADIDYDHPDVVNEMKKWGVWYANEVGLDGYRLDAVKHIKFSFLKDWVDNARAATGKEMFTVGEYWQNDLGALNNYLAKVNYNQSLFDAPLHYNFYAASTGGGYYDMRNILNNTLVASNPTKAVTLVENHDTQPGQSLESTVQPWFKPLAYAFILTRSGGYPSVFYGDMYGTKGTTTREIPALKSKIEPLLKARKDYAYGTQRDYIDNPDVIGWTREGDSTKAKSGLATVITDGPSGSKRMYVGTSNAGEIWYDLTGNRTDKITIGSDGYATFPVNGGSVSVWVQQ

SEQ ID NO: 36273 - protein, 480 aa, Cytophaga sp.
NGTMMQYFEWYVPNDGQQWNRLRTDAPYLSSVGITAVWTPPAYKGTSQADVGYGPYDLYDLGEFNQKGTVRTKYGTKGELKSAVNTLHSNGIQVYGDVVMNHKAGADYTENVTAVEVNPSNRNQETSGEYNIQAWTGFNFPGRGTTYSNFKWQWFHFDGTDWDQSRSLSRIFKFTGKAWDWEVSSENGNYDYLMYADIDYDHPDVVNEMKKWGVWYANEVGLDGYRLDAVKHIKFSFLKDWVDNARAATGKEMFTVGEYWQNDLGALNNYLAKVNYNQSLFDAPLHYNFYAASTGGGYYDMRNILNNTLVASNPTKAVTLVENHDTQPGQSLESTVQPWFKPLAYAFILTRSGGYPSVFYGDMYGTKGTTTREIPALKSKIEPLLKARKDYAYGTQRDYIDNPDVIGWTREGDSTKAKSGLATVETDGPGGSKRMYVGTSNAGEIWYDLTGNRTDKITIGSDGYATFPVNGGSVSVWVQQ

SEQ ID NO: 36274 - protein, 480 aa, Cytophaga sp.
NGTMMQYFEWYVPNDGQQWNRLRTDAPYLSSVGITAVWTPPAYKGTSQADVGYGPYDLYDLGEFNQKGTVRTKYGTKGELKSAVNTLHSNGIQVYGDVVMNHKAGADYTENVTAVEVNPSNRNQETSGEYNIQAWTGFNFPGRGTCYSNFKWQWFHFDGTDWDQSRSLSRIFKFTGKAWDWEVSSENGNYDYLMYADIDYDHPDVVNEMKKWGVWYANEVGLDGYRLDAVKHIKFSFLKDWVDNARAATGKEMFTVGEYWQNDLGALNNYLAKVNYNQSLFDAPLHYNFYAASTGGGYYDMRNILNNTLVASNPTKAVTLVENHDTQPGQSLESTVQPWFKPLAYAFILTRSGGYPSVFYGDMYGTKGTTTREIPALKSKIEPLLKARKDYAYGTQRDYIDNPDVIGWTREGDSTKAKSGLATVITDGPGGSKRMYVGTSNAGEIWYDLTGNRTDKITIGSDGYATFPVNGGSVSVWVQQ

SEQ ID NO: 36275 - protein, 480 aa, Cytophaga sp.
NGTMMQYFEWYVPNDGQQWNRLRTDAPYLSSVGITAVWTPPAYKGTSQADVGYGPYDLYDLGEFNQKGTVRTKYGTKGELKSAVNTLHSNGIQVYGDVVMNHKAGADYTENVTAVEVNPSNRNQETSGEYNIQAWTGFNFPGRGTTYSNFKWQWFHFDGTDWDQSRSLSRIFKFTGKAWDWEVSSENGNYDYLMYADIDYDHPDVVNEMKRWGVWYANEVGLDGYRLDAVKHIKFSFLKDWVDNARAATGKEMFTVGEYWQNDLGALNNYLAKVNYNQSLFDAPLHYNFYAASTGGGYYDMRNILNNTLVASNPTKAVTLVENHDTQPGQSLESTVQPWFKPLAYAFILTRSGGYPSVFYGDMYGTKGTTTREIPALKSKIEPLLKARKDYAYGTQRDYIDNPDVIGWTREGDSTKAKSGLATVITDGPGGSKRMYVGTSNAGEIWYDLTGNRTDKITIGSDGYATFPVNGGSVSVWVQQ

SEQ ID NO: 36276 - protein, 480 aa, Cytophaga sp.
NGTMMQYFEWYVPNDGEQWNRLRTDAPYLSSVGITAVWTPPAYKGTSQADVGYGPYDLYDLGEFNQKGTVRTKYGTKGELKSAVNTLHSNGIQVYGDVVMNHKAGADYTENVTAVEVNPSNRNQETSGEYNIQAWTGFNFPGRGTTYSNFKWQWFHFDGTDWDQSRSLSRIFKFTGKAWDWEVSSENGNYDYLMYADIDYDHPDVVNEMKKWGVWYANEVGLDGYRLDAVKHIKFSFLKDWVDNARAATGKEMFTVGEYWQNDLGALNNYLAKVNYNQSLFDAPLHYNFYAASTGGGYYDMRNILNNTLVASNPTKAVTLVENHDTQPGQSLESTVQPWFKPLAYAFILTRSGGYPSVFYGDMYGTKGTTTREIPALKSKIEPLLKARKDYAYGTQRDYIDNPDVIGWTREGDSTKAKSGLATVITDGPGGSKRMYVGTSNAGEIWYDLTGNRTDKITIGSDGYATFPVNGGSVSVWVQQ

SEQ ID NO: 36277 - protein, 480 aa, Cytophaga sp.
NGTMMQYFEWYVPNDGQQWNRLRTDAPYLSSVGITAVWTPPAYKGTSQADVGYGPYDLYDLGEFNQKGTVRTKYGTKGELKSAVNTLHSNGIQVYGDVVMNHKAGADYRENVTAVEVNPSNRNQETSGEYNIQAWTGFNFPGRGTTYSNFKWQWFHFDGTDWDQSRSLSRIFKFTGKAWDWEVSSENGNYDYLMYADIDYDHPDVVNEMKKWGVWYANEVGLDGYRLDAVKHIKFSFLKDWVDNARAATGKEMFTVGEYWQNDLGALNNYLAKVNYNQSLFDAPLHYNFYAASTGGGYYDMRNILNNTLVASNPTKAVTLVENHDTQPGQSLESTVQPWFKPLAYAFILTRSGGYPSVFYGDMYGTKGTTTREIPALKSKIEPLLKARKDYAYGTQRDYIDNPDVIGWTREGDSTKAKSGLATVITDGPGGSKRMYVGTSNAGEIWYDLTGNRTDKITIGSDGYATFPVNGGSVSVWVQQ

SEQ ID NO: 36278 - protein, 480 aa, Cytophaga sp.
NGTMMQYFEWYVPNDGQQWNRLRTDAPYLSSVGITAVWTPPAYKGTSQADVGYGPYDLYDLGEFNQKGTVRTKYGTKGELKSAVNTLHSNGIQVYGDVVMNHKAGADYTENVTAVEVNPSNRNQETSGIYNIQAWTGFNFPGRGTTYSNFKWQWFHFDGTDWDQSRSLSRIFKFTGKAWDWEVSSENGNYDYLMYADIDYDHPDVVNEMKKWGVWYANEVGLDGYRLDAVKHIKFSFLKDWVDNARAATGKEMFTVGEYWQNDLGALNNYLAKVNYNQSLFDAPLHYNFYAASTGGGYYDMRNILNNTLVASNPTKAVTLVENHDTQPGQSLESTVQPWFKPLAYAFILTRSGGYPSVFYGDMYGTKGTTTREIPALKSKIEPLLKARKDYAYGTQRDYIDNPDVIGWTREGDSTKAKSGLATVITDGPGGSKRMYVGTSNAGEIWYDLTGNRTDKITIGSDGYATFPVNGGSVSVWVQQ

SEQ ID NO: 36279 - protein, 480 aa, Cytophaga sp.
NGTMMQYFEWYVPNDGQQWNRLRTDAPYLSSVGITAVWTPPAYKGTSQADVGYGPYDLYDLGEFNQKGTVRTKYGTKGELKSAVNTLHSNGIQVYGDVVMNHKAGADYTENVTAVEVNPSNRNQETSGEYNIQAWTGFNFPGRGTTYSNFKWQWFHFDGTDWDQSRSLSRIFKFTGKAWDWEVSSENGNYDYLMYADIDYDHPDVVNEMKKWGVWYANEVGLDGYRLDAVKHIKFSFLKDWVDNARAATGKEMFTVGEYWQNDLGALNNYLAKVNYNHSLFDAPLHYNFYAASTGGGYYDMRNILNNTLVASNPTKAVTLVENHDTQPGQSLESTVQPWFKPLAYAFILTRSGGYPSVFYGDMYGTKGTTTREIPALKSKIEPLLKARKDYAYGTQRDYIDNPDVIGWTREGDSTKAKSGLATVITDGPGGSKRMYVGTSNAGEIWYDLTGNRTDKITIGSDGYATFPVNGGSVSVWVQQ

SEQ ID NO: 36280 - protein, 480 aa, Cytophaga sp.
NGTMMQYFEWYVPNDGQQWNRLRTDAPYLSSVGITAVWTPPAYKGTSQADVGYGPYDLYDLGEFNQKGTVRTKYGTKGELKSAVNTLHSNGIQVYGDVVMNHKAGADYTENVTAVEVNPSNRNQETSGEYNIQAWTGFNFPGRGTTYSNFKWQWFHFDGTDWDQSRSLSRIFKFTGKAWDWEVSSENGNYDYLMYADIDYDHPDVVNEMKKWGVWYANEVGLDGYRLDAVKHIKFSFLKDWVDNARAATGKEMFTVGEYWQNDLGALNNYLAKVNYNQSLFDAPLHYNFYAASTGGGYYDMRNILNNTLVASNPTKAVTLVENHDTQPGQSLESTVQPWFKPLAYAFILTRSGGYPSVFYGDMYGTKGTTTREIPALKSKIEPLLKARKDYAYGTQRDYIDNPDVIGWTREGDSTKACSGLATVITDGPGGSKRMYVGTSNAGEIWYDLTGNRTDKITIGSDGYATFPVNGGSVSVWVQQ

SEQ ID NO: 36281 - protein, 480 aa, Cytophaga sp.
NGTMMQYFEWYVPNDGQQWNRLRTDAPYLSSVGITAVWTPPAYKGTSQADVGYGPYDLYDLGEFNQKGTVRTKYGTKGELKSAVNTLHSNGIQVYGDVVMNHKAGADYTENVTAVEVNPSNRNQERSGEYNIQAWTGFNFPGRGTTYSNFKWQWFHFDGTDWDQSRSLSRIFKFTGKAWDWEVSSENGNYDYLMYADIDYDHPDVVNEMKKWGVWYANEVGLDGYRLDAVKHIKFSFLKDWVDNARAATGKEMFTVGEYWQNDLGALNNYLAKVNYNQSLFDAPLHYNFYAASTGGGYYDMRNILNNTLVASNPTKAVTLVENHDTQPGQSLESTVQPWFKPLAYAFILTRSGGYPSVFYGDMYGTKGTTTREIPALKSKIEPLLKARKDYAYGTQRDYIDNPDVIGWTREGDSTKAKSGLATVITDGPGGSKRMYVGTSNAGEIWYDLTGNRTDKITIGSDGYATFPVNGGSVSVWVQQ

SEQ ID NO: 36282 - protein, 480 aa, Cytophaga sp.
NGTMMQYFEWYVPNDGQQWNRLRTDAPYLSSVGITAVWTPPAYKGTSQADVGYGPYDLYDLGEFNQKGTVRTKYGTKGELKSAVNTLHSNGIQVYGDVVMNHKAGADYTENVTAVEVNPSNRNQETSGEYNIQAWTGFNFPGRGTTYSNFKWQWFHFDGTDWDQSRSLSRIFKFTGKAWDWEVSSENGNYDYLMYADIDYDHPDVVNEMKKWGVWYANEVGLDGYRLDAVKHIKFSFLKDWVDNARAATGKEMFTVGEYWQNDLGALNNYLAKVNYNQSLFDAPLHYNFYAASTGGGYYDMRNILNNTLVASNPTKAVTLVENHDTQPGQSLESTVQPWFKPLAYAFILTRSGGYPSVFYGDMYGTKGTTTREIPALKSKIEPLLKARKDYAYGTQRDYIDNPDVIGWTREGDSTKAKSGLATVITDGPGGSKRMYVGTSNAGEIWYDLTHNRTDKITIGSDGYATFPVNGGSVSVWVQQ

SEQ ID NO: 36283 - protein, 480 aa, Cytophaga sp.
NGTMMQYFEWYVPNDGQQWNRLRTDAPYLSSVGITAVWTPPAYKGTSQADVGYGPYDLYDLGEFNQKGTVRTKYGTKGELKSAVNTLHSNGIQVYGDVVMNHKAGADYTENVTAVEVNPSNRNQETSGEYNIQAWTGFNFPGRGTTYSNFKWQWFHFDGTDWDQSRSLSRIFKFTGKAWDWEVSSENGNYDYLMYADIDYDHPDVMNEMKKWGVWYANEVGLDGYRLDAVKHIKFSFLKDWVDNARAATGKEMFTVGEYWQNDLGALNNYLAKVNYNQSLFDAPLHYNFYAASTGGGYYDMRNILNNTLVASNPTKAVTLVENHDTQPGQSLESTVQPWFKPLAYAFILTRSGGYPSVFYGDMYGTKGTTTREIPALKSKIEPLLKARKDYAYGTQRDYIDNPDVIGWTREGDSTKAKSGLATVITDGPGGSKRMYVGTSNAGEIWYDLTGNRTDKITIGSDGYATFPVNGGSVSVWVQQ

SEQ ID NO: 36284 - protein, 480 aa, Cytophaga sp.
NGTMMQYFEWYVPNDGQQWNRLRTDAPYLSSVGITAVWTPPAYKGTSQADVGYGPYDLYDLGEFNQKGTVRTKYGTKGELKSAVNTLHSNGIQVYGDVVMNHKAGADYTENVTAVEVNPSNRNQETSGEYNIQAWTGFNFPGRGTTYSNFKWQWFHFDGTDWDQSRSLSRIFKFTGKAWDWEVSSENGNYDYLMYADIDYDHPDVVNEMKKWGVWYANEVGLDGYRLDAVKHIKFSFLKDWVDNARAATGKEMFTVGEYWQNDLGALNNYLAKVNYNQSLFDAPLHYNFYAASTGGGYYDMRNILNNTLVASNPTKAVTLVENHDTQPGQSLESTVQPWFKPLAYAFILTRSGGYPSVFYGDMYGTKGTTTREIPALKSKIEPLLKARKDYAYGTQRDYIDNPDMIGWTREGDSTKAKSGLATVITDGPGGSKRMYVGTSNAGEIWYDLTGNRTDKITIGSDGYATFPVNGGSVSVWVQQ

SEQ ID NO: 36285 - protein, 480 aa, Cytophaga sp.
NGTMMQYFEWYVPNDGQQWNRLRTDAPYLSSVGITAVWTPPAYKGTSQADVGYGPYDLYDLGEFNQKGTVRTKYGTKGELKSAVNTLHSNGIQVYGDVVMNHKAGADYTENVTAVEVNPSNRNQETSGEYNIQAWTGFNFPGRGTTYSNFKWQWFHFDGTDWDQSRSLSRIFKFTGKAWDWEVSSENGNYDYLMYADIDYDHPDVVNEMKKWGVWYANEVGLDGYRLDAVKHIKFSFLKDWVDNARAATGKEMFTVGEYWQNDLGALNNYLAKVNYNQSLFDAPLHYNFYAASTGGGYYDMRNILNNTLVASNPTKAVTLVENHDTQPGQSLESTVQPWFKPLAYAFILTRSGGYPSVFYGDMYGTKGTTTREIPALKSKIEPLLKARKDYAYGTQRDYIDNPDVIGWTREGDSTKAKSGLATVITDGRGGSKRMYVGTSNAGEIWYDLTGNRTDKITIGSDGYATFPVNGGSVSVWVQQ

SEQ ID NO: 36286 - protein, 480 aa, Cytophaga sp.
NGTMMQYFEWYVPNDGQQWNRLRTDAPYLSSVGITAVWTPPAYKGTSQADVGYGPYDLYDLGEFNQKGTVRTKYGTKGELKSAVNTLHSNGIQVYGDVVMNHKAGADYTENVTAVEVNPSNRNQETSGEYNIQAWTGFNFPGRGTTYSNFKWQWFHFDGTDWDQSRSLSRIFKFTGKAWDWEVSSENGNYDYLMYADIDYDHPDVVNEMKKWGVWYANEVGLDGYRLDAVKHIKFSFLKDWVDNARAATGKEMFTVGEYWQNDLGALNNYLAKVNYNQSLFDAPLHYNFYAASTGGGYYDMRNILNNTLVASNPTKAVTLVENHDTQPGQSLESTVQPWFKPLAYAFILTRSGGYPSVFYGDMYGTKGTTTREIPALKSKIEPLLKARKDYAYGTQRDYIDNHDVIGWTREGDSTKAKSGLATVITDGPGGSKRMYVGTSNAGEIWYDLTGNRTDKITIGSDGYATFPVNGGSVSVWVQQ

SEQ ID NO: 36287 - protein, 480 aa, Cytophaga sp.
NGTMMQYFEWYVPNDGQQWNRLRTDAPYLSSVGITAVWTPPAYKGTSQADVGYGPYDLYDLGEFNQKGTVRTKYGTKGELKSAVNTLHSNGIQVYGDVVMNHKAGADYTENVTAVEVNPSNRNQETSGEYNIQAWTGFNFPGRGTTYSNFKWQWFHFDGTDWDQSRSLSRIFKFTGKAWDWEVSSENGNYDYLMYADIDYDHPDVVNEMKKWGVWYANEVGLDGYRLDAVKHIKFSFLKDWVDNARAATGKEMFTVGEYWQNDLGALNNYLAKVNYNQSLFDAPLHYNFYAASTGGGYYDMRNILNNTLVASNPTKAVTLVENHDTQPGGSLESTVQPWFKPLAYAFILTRSGGYPSVFYGDMYGTKGTTTREIPALKSKIEPLLKARKDYAYGTQRDYIDNPDVIGWTREGDSTKAKSGLATVITDGPGGSKRMYVGTSNAGEIWYDLTGNRTDKITIGSDGYATFPVNGGSVSVWVQQ

SEQ ID NO: 36288 - protein, 480 aa, Cytophaga sp.
NGTMMQYFEWYVPNDGQQWNRLRTDAPYLSSVGITAVWTPPAYKGTSQADVGYGPYDLYDLGEFNQKGTVRTKYGTKGELKSAVNTLHSNGIQVYGDVVMNHKAGADYTENVTAVEVNPSNRNQETSGMYNIQAWTGFNFPGRGTTYSNFKWQWFHFDGTDWDQSRSLSRIFKFTGKAWDWEVSSENGNYDYLMYADIDYDHPDVVNEMKKWGVWYANEVGLDGYRLDAVKHIKFSFLKDWVDNARAATGKEMFTVGEYWQNDLGALNNYLAKVNYNQSLFDAPLHYNFYAASTGGGYYDMRNILNNTLVASNPTKAVTLVENHDTQPGQSLESTVQPWFKPLAYAFILTRSGGYPSVFYGDMYGTKGTTTREIPALKSKIEPLLKARKDYAYGTQRDYIDNPDVIGWTREGDSTKAKSGLATVITDGPGGSKRMYVGTSNAGEIWYDLTGNRTDKITIGSDGYATFPVNGGSVSVWVQQ

SEQ ID NO: 36289 - protein, 480 aa, Cytophaga sp.
NGTMMQYFEWYVPNDGQQWNRLRTDAPYLSSVGITAVWTPPAYKGTSQADVGYGPYDLYDLGEFNQKGTVRTKYGTKGELKSAVNTLHSNGIQVYGDVVMNHKAGADYTENVTAVEVNPSNRNQETSGEYNIQAWTGFNFPGRGTTYSNFKWQWFHFDGTDWDQSRSLSRIFKFTGKAWDWEVSSENGNYDYLMYADIDYDHPDVVNEMKKWGVWYANEVGLDGYRLDAVKHIKFSFLKDWVDNARAATGKEMFTVGEYWQNDLGALNNYLAKVNYNQSLFDAPLHYNFYAASTGGGYYDMRNILNNTLVASNPTKAVTLVENHDTQPGQSLESTVQPWFKPLAYAFILTRSGGYPSVFYGDMYGTKGTTTREIPALKSKIEPLLKARKDYAYGTQRDYIDNPDVIGWTREGDSTKAKSGLATVITDGPGGSKRMYVGTSNAGEIWYDLTGNRTDKITIGSDGYATFPVKGGSVSVWVQQ

SEQ ID NO: 36290 - protein, 480 aa, Cytophaga sp.
NGTMMQYFEWYVPNDGQQWNRLRTDAPYLSSVGITAVWTPPAYKGTSQADVGYGPYDLYDLGEFNQKGTVRTKYGTKGELKSAVNTLHSNGIQVYGDVVMNHKAGADYTENVTAVEVNPSNRNQETSGEYNIQAWTGFNFPGRGTTYSNFKWQWFHFDGTDWDQSRSLSRIFKFTGKAWDWEVSSENGNYDYLMYADIDYDHPDVVNEMKKWGVWYANEVGLDGYRLDAVKHIKFSFLKDWVDNARAATGKEMFTVGEYWQNDLGALNNYLAKVNYNQSLFDAPLHYNFYAASTGGGYYDMRNILNNTLVASNPTKAVTLVENHDTQPGQSLESTVQPWFKPLAYAFILTRSGGYPSVFYGDMYGTKGTTTREIPALKSKIEPLLKARKDYAYGTQRDYIDNPDVIGWTREGDATKAKSGLATVITDGPGGSKRMYVGTSNAGEIWYDLTGNRTDKITIGSDGYATFPVNGGSVSVWVQQ

SEQ ID NO: 36291 - protein, 480 aa, Cytophaga sp.
NYTMMQYFEWYVPNDGQQWNRLRTDAPYLSSVGITAVWTPPAYKGTSQADVGYGPYDLYDLGEFNQKGTVRTKYGTKGELKSAVNTLHSNGIQVYGDVVMNHKAGADYTENVTAVEVNPSNRNQETSGEYNIQAWTGFNFPGRGTTYSNFKWQWFHFDGTDWDQSRSLSRIFKFTGKAWDWEVSSENGNYDYLMYADIDYDHPDVVNEMKKWGVWYANEVGLDGYRLDAVKHIKFSFLKDWVDNARAATGKEMFTVGEYWQNDLGALNNYLAKVNYNQSLFDAPLHYNFYAASTGGGYYDMRNILNNTLVASNPTKAVTLVENHDTQPGQSLESTVQPWFKPLAYAFILTRSGGYPSVFYGDMYGTKGTTTREIPALKSKIEPLLKARKDYAYGTQRDYIDNPDVIGWTREGDSTKAKSGLATVITDGPGGSKRMYVGTSNAGEIWYDLTGNRTDKITIGSDGYATFPVNGGSVSVWVQQ

SEQ ID NO: 36292 - protein, 480 aa, Cytophaga sp.
NGTMMQYFEWYVPNDGQQWNRLRTDAPYLSSVGITAVWTPPAYKGTSQADVGYGPYDLYDLGEFNQKGTVRTKYGTKGELKSAVNTLHSNGIQVYGDVVMNHKAGADYTENVTAVEVNPSNRNQETSGEYNIQAWTGFNFPGRGTTYSNFKWQWFHFDGTDWDQSRSLSRIFKFTGKAWDWEVSSENGNYDYLMLADIDYDHPDVVNEMKKWGVWYANEVGLDGYRLDAVKHIKFSFLKDWVDNARAATGKEMFTVGEYWQNDLGALNNYLAKVNYNQSLFDAPLHYNFYAASTGGGYYDMRNILNNTLVASNPTKAVTLVENHDTQPGQSLESTVQPWFKPLAYAFILTRSGGYPSVFYGDMYGTKGTTTREIPALKSKIEPLLKARKDYAYGTQRDYIDNPDVIGWTREGDSTKAKSGLATVITDGPGGSKRMYVGTSNAGEIWYDLTGNRTDKITIGSDGYATFPVNGGSVSVWVQQ

SEQ ID NO: 36293 - protein, 480 aa, Cytophaga sp.
NGTMMQYFEWYVPNDGQQWNRLRTDAPYLSSVGITAVWTPPAYKGTSQADVGYGPYDLYDLGEFNQKGTVRTKYGTKGELKSAVNTLHSNGIQVYGDVVMNHKAGADYTENVTAVEVNPSNRNQETSGEYNIQAWTGFNFPGRGTTYSNFKWQWFHFDGTDWDQSRSLSRIFKFTGKAWDWEVSSENGNYDYLMYADIDYDHPDVVNEMFKWGVWYANEVGLDGYRLDAVKHIKFSFLKDWVDNARAATGKEMFTVGEYWQNDLGALNNYLAKVNYNQSLFDAPLHYNFYAASTGGGYYDMRNILNNTLVASNPTKAVTLVENHDTQPGQSLESTVQPWFKPLAYAFILTRSGGYPSVFYGDMYGTKGTTTREIPALKSKIEPLLKARKDYAYGTQRDYIDNPDVIGWTREGDSTKAKSGLATVITDGPGGSKRMYVGTSNAGEIWYDLTGNRTDKITIGSDGYATFPVNGGSVSVWVQQ

SEQ ID NO: 36294 - protein, 480 aa, Cytophaga sp.
NGTMMQYFEWYVPNDGQQWNRLRTDAPYLSSVGITAVWTPPAYKGTSQADVGYGPYDLYDLGEFNQKGTVRTKYGTKGELKSAVNTLHSNGIQVYGDVVMNHKAGADYTENVTAVEVNPSNRNQETSGEYNIQAWTGHNFPGRGTTYSNFKWQWFHFDGTDWDQSRSLSRIFKFTGKAWDWEVSSENGNYDYLMYADIDYDHPDVVNEMKKWGVWYANEVGLDGYRLDAVKHIKFSFLKDWVDNARAATGKEMFTVGEYWQNDLGALNNYLAKVNYNQSLFDAPLHYNFYAASTGGGYYDMRNILNNTLVASNPTKAVTLVENHDTQPGQSLESTVQPWFKPLAYAFILTRSGGYPSVFYGDMYGTKGTTTREIPALKSKIEPLLKARKDYAYGTQRDYIDNPDVIGWTREGDSTKAKSGLATVITDGPGGSKRMYVGTSNAGEIWYDLTGNRTDKITIGSDGYATFPVNGGSVSVWVQQ

SEQ ID NO: 36295 - protein, 480 aa, Cytophaga sp.
NGTMMQYFEWYVPNDGQQWNRLRTDAPYLSSVGITAVWTPPAYKGTSQADVGYGPYDLYDLGEFNQKGTVRTKYGTKGELKSAVNTLHSNGIQVYGDVVMNHKAGADYTENVTAVEVNPSNRNQETSGEYNIQAWTGFNFPGRGTYYSNFKWQWFHFDGTDWDQSRSLSRIFKFTGKAWDWEVSSENGNYDYLMYADIDYDHPDVVNEMKKWGVWYANEVGLDGYRLDAVKHIKFSFLKDWVDNARAATGKEMFTVGEYWQNDLGALNNYLAKVNYNQSLFDAPLHYNFYAASTGGGYYDMRNILNNTLVASNPTKAVTLVENHDTQPGQSLESTVQPWFKPLAYAFILTRSGGYPSVFYGDMYGTKGTTTREIPALKSKIEPLLKARKDYAYGTQRDYIDNPDVIGWTREGDSTKAKSGLATVITDGPGGSKRMYVGTSNAGEIWYDLTGNRTDKITIGSDGYATFPVNGGSVSVWVQQ

SEQ ID NO: 36296 - protein, 480 aa, Cytophaga sp.
NGTMMQYFEWYVPNDGQQWNRLRTDAPYLSSVGITAVWTPPAYKGTSQADVGYGPYDLYDLGEFNQKGTVRTKYGTKGELKSAVNTLHSNGIQVYGDVVMNHKAGADYTENVTAVEVNPSNRNQETSGEYNIQAWTGFNFPGRGTTYSNFKWQWFHFDGTDWDQSRSLSRIFKFTGKAWDWEVSSENGNYDYLMYADIDYDHPDVVNEMKKWGVWYANEVGLDGYRLDAVKHIKFSFLKDWVDNARAATGKEMFTVGEYWQNDLGALNNYLAKVNYNQSLFDAPLHYNFYAASTGGGYYDMRNILNNTLVASNPTKAVTLVENHDTQPGQSLESTVQPWFKPLAYAFILTRSGGYPSVFYGDMYGTKGTTTREIPALKSKIEPLLKARKDYAYGTQRDYIDNPDVIGWTREGDSTKAKSGLATVITDGPGGSKRMYVGTSNVGEIWYDLTGNRTDKITIGSDGYATFPVNGGSVSVWVQQ

SEQ ID NO: 36297 - protein, 480 aa, Cytophaga sp.
NGTMMQYFEWYVPNDGQQWNRLRTDAPYLSSVGITAVWTPPAYKGTSQADVGYGPYDLYDLGEFNQKGTVRTKYGTKGELKSAVNTLHSNGIQVYGDVVMNHKAGADYTENVTAVEVNPSNRNQETSGAYNIQAWTGFNFPGRGTTYSNFKWQWFHFDGTDWDQSRSLSRIFKFTGKAWDWEVSSENGNYDYLMYADIDYDHPDVVNEMKKWGVWYANEVGLDGYRLDAVKHIKFSFLKDWVDNARAATGKEMFTVGEYWQNDLGALNNYLAKVNYNQSLFDAPLHYNFYAASTGGGYYDMRNILNNTLVASNPTKAVTLVENHDTQPGQSLESTVQPWFKPLAYAFILTRSGGYPSVFYGDMYGTKGTTTREIPALKSKIEPLLKARKDYAYGTQRDYIDNPDVIGWTREGDSTKAKSGLATVITDGPGGSKRMYVGTSNAGEIWYDLTGNRTDKITIGSDGYATFPVNGGSVSVWVQQ

SEQ ID NO: 36298 - protein, 480 aa, Cytophaga sp.
NGTMMQYFEWYVPNDGQQWNRLRTDAPYLSSVGITAVWTPPAYKGTSQADVGYGPYDLYDLGEFNQKGTVRCKYGTKGELKSAVNTLHSNGIQVYGDVVMNHKAGADYTENVTAVEVNPSNRNQETSGEYNIQAWTGFNFPGRGTTYSNFKWQWFHFDGTDWDQSRSLSRIFKFTGKAWDWEVSSENGNYDYLMYADIDYDHPDVVNEMKKWGVWYANEVGLDGYRLDAVKHIKFSFLKDWVDNARAATGKEMFTVGEYWQNDLGALNNYLAKVNYNQSLFDAPLHYNFYAASTGGGYYDMRNILNNTLVASNPTKAVTLVENHDTQPGQSLESTVQPWFKPLAYAFILTRSGGYPSVFYGDMYGTKGTTTREIPALKSKIEPLLKARKDYAYGTQRDYIDNPDVIGWTREGDSTKAKSGLATVITDGPGGSKRMYVGTSNAGEIWYDLTGNRTDKITIGSDGYATFPVNGGSVSVWVQQ

SEQ ID NO: 36299 - protein, 480 aa, Cytophaga sp.
NGTMMQYFEWYVPNDGQQWNRLRTDAPYLSSVGITAVWTPPAYKGTSQADVGYGPYDLYDLGEFNQKGTVRTKYGTKGELKSAVNTLHSNGIQVYGDVVMNHKAGADYTENVTAVEVNPSNRNQETSGEYNIQAWTGFNFPGRGTTYSNFKWQWFHFDGTDWDQSRSLSRIFKFTGKAWDWEVSSENGNYDYLMYADIDYDHPDVVNEMKKWGVWYANEVGLDGYRLDAVKHIKFSFLKDWVDNARAATGKEMFTVGEYWQNDLGALNNYLAKVNYNQSLFDAPLHYNFYAASTGGGYYDMRNILNNTLVASNPTKAVTLVENHDTQPGQSLESTVQPWFKPLAYAFILTRSGGYPSVFYGDMYGTKGTTTREIPALKSKIEPLLKARKDYAYGTQRDYIDNPDVIGWTREGDSTKAKSGLATVITDGPGGSKRMYVGTSNAGEIWYDLTGNRTDKITIGSDGYATFPVNGQSVSVWVQQ

SEQ ID NO: 36300 - protein, 480 aa, Cytophaga sp.
NGTMMQYFEWYVPNDGQQWNRLRTDAPYLSSVGITAVWTPPAYKGTSQADVGYGPYDLYDLGEFNQKGTVRTKYGTKGELKSAVNTLHSNGIQVYGDVVMNHKAGADYTENVTAVEVNPSNRNQETSGEYNIQAWTGFNFPGRGTTYSNFKWQWFHFDGTDWDQSRSLSRIFKFTGKAWDWEVSSENGNYDYLMYADIDYDHPDVVNEMKKWGVWYANEVGLDGYRLDAVKHIKFSFLKDWVDNARAATGKEMFTVGEYWQNDLGALNNYLAKVNYNQSLFDAPLHYNFYAASTGGGYYDMRNILNNTLVASNPTKAVTLVENHDTQPGQSLESTVQPWFKPLAYAFILTRSGGYPSVFYGDMYGTKGTTTREIPALKSKIEPLLKARKDYAYGTQRDYIDNPDVIGWTREGDSTKAKSGLATVITDGPGGSKRMYVGTSNAGEIWYDLTGNRTDKITIGLDGYATFPVNGGSVSVWVQQ

SEQ ID NO: 36301 - protein, 480 aa, Cytophaga sp.
NGTMMQYFEWYVPNDGQQWNRLRTDAPYLSSVGISAVWTPPAYKGTSQADVGYGPYDLYDLGEFNQKGTVRTKYGTKGELKSAVNTLHSNGIQVYGDVVMNHKAGADYTENVTAVEVNPSNRNQETSGEYNIQAWTGFNFPGRGTTYSNFKWQWFHFDGTDWDQSRSLSRIFKFTGKAWDWEVSSENGNYDYLMYADIDYDHPDVVNEMKKWGVWYANEVGLDGYRLDAVKHIKFSFLKDWVDNARAATGKEMFTVGEYWQNDLGALNNYLAKVNYNQSLFDAPLHYNFYAASTGGGYYDMRNILNNTLVASNPTKAVTLVENHDTQPGQSLESTVQPWFKPLAYAFILTRSGGYPSVFYGDMYGTKGTTTREIPALKSKIEPLLKARKDYAYGTQRDYIDNPDVIGWTREGDSTKAKSGLATVITDGPGGSKRMYVGTSNAGEIWYDLTGNRTDKITIGSDGYATFPVNGGSVSVWVQQ

SEQ ID NO: 36302 - protein, 480 aa, Cytophaga sp.
NGTMMQYFEWYVPNDGQQWNRLRTDAPYLSSVGITAVWTPPAYKGTSQADVGYGPYDLYDLGEFNQKGTVRTKYGTKGELKSAVNTLHSNGIQVYGDVVMNHKAGADYTENVTAVEVNPSNRNQETSGEYNIQAWTGFNFPGRGTTYSNFKWQWFHFDGTDWDQSRSLSRIFKFTGKAWDWEVSSENGNYDYLMYADIDYDHPDVVNEMKKWGVWYANEVGLDGYRLDAVKHIKFSFLKDWVDNARAATGKEMFTVGEYWNNDLGALNNYLAKVNYNQSLFDAPLHYNFYAASTGGGYYDMRNILNNTLVASNPTKAVTLVENHDTQPGQSLESTVQPWFKPLAYAFILTRSGGYPSVFYGDMYGTKGTTTREIPALKSKIEPLLKARKDYAYGTQRDYIDNPDVIGWTREGDSTKAKSGLATVITDGPGGSKRMYVGTSNAGEIWYDLTGNRTDKITIGSDGYATFPVNGGSVSVWVQQ

SEQ ID NO: 36303 - protein, 480 aa, Cytophaga sp.
NGTMMQYFEWYVPNDGQQWNRLRTDAPYLSSVGITAVWTPPAYKGTSQADVGYGPYDLYDLGEFNQKGTVRTKYGTKGELKSAVNTLHSNGIQVYGDVVMNHKAGADYTENVTAVEVNPSNRNQETSGEYNIQAWTGFNFPGRGTTYSNFKWQWFHFDGTDWDQSRSLSRIFKFTGKAWDWEVSSENGNYDYLMYADIDYDHPDVVNEMKKWGVWYANEVGLDGYRLDAVKHIKFSFLKDWVDNARAATGKEMFTVGEYWQNDLGALNNYLAKVNYNQRLFDAPLHYNFYAASTGGGYYDMRNILNNTLVASNPTKAVTLVENHDTQPGQSLESTVQPWFKPLAYAFILTRSGGYPSVFYGDMYGTKGTTTREIPALKSKIEPLLKARKDYAYGTQRDYIDNPDVIGWTREGDSTKAKSGLATVITDGPGGSKRMYVGTSNAGEIWYDLTGNRTDKITIGSDGYATFPVNGGSVSVWVQQ

SEQ ID NO: 36304 - protein, 480 aa, Cytophaga sp.
NGTMMQYFEWYVPNDGQQWNRLRTDAPYLSSVGITAVWTPPAYKGTSQADVGYGPYDLYDLGEFNQKGTVRTKYGTKGELKSAVNTLHSNGIQVYGDVVMNHKAGADYTENVTAVEVNPSNRNQETSGEYNIQAWTGFNFPGRGTTYSNFKWQWFHFDGTDWDQSRSLSRIFKFTGKAWDWEVSSENGNYDYLMYADIDYDHPDVVNEMKKWGVWYANEVGLDGYRLDAVKHIKFGFLKDWVDNARAATGKEMFTVGEYWQNDLGALNNYLAKVNYNQSLFDAPLHYNFYAASTGGGYYDMRNILNNTLVASNPTKAVTLVENHDTQPGQSLESTVQPWFKPLAYAFILTRSGGYPSVFYGDMYGTKGTTTREIPALKSKIEPLLKARKDYAYGTQRDYIDNPDVIGWTREGDSTKAKSGLATVITDGPGGSKRMYVGTSNAGEIWYDLTGNRTDKITIGSDGYATFPVNGGSVSVWVQQ

SEQ ID NO: 36305 - protein, 480 aa, Cytophaga sp.
NGTMMQYFEWYVPNDGQQWNRLRTDAPYLSSVGITAVWTPPAYKGTSQADVGYGPYDLYDLGEFNQKGTVRTKYGTKGELKSAVNTLHSNGIQVYGDVVMNHKAGADYTENVTAVEVNPSNRNQETSGEYNIQAWTGFNFPGRGTTYSNFKWQWFHFDGTNWDQSRSLSRIFKFTGKAWDWEVSSENGNYDYLMYADIDYDHPDVVNEMKKWGVWYANEVGLDGYRLDAVKHIKFSFLKDWVDNARAATGKEMFTVGEYWQNDLGALNNYLAKVNYNQSLFDAPLHYNFYAASTGGGYYDMRNILNNTLVASNPTKAVTLVENHDTQPGQSLESTVQPWFKPLAYAFILTRSGGYPSVFYGDMYGTKGTTTREIPALKSKIEPLLKARKDYAYGTQRDYIDNPDVIGWTREGDSTKAKSGLATVITDGPGGSKRMYVGTSNAGEIWYDLTGNRTDKITIGSDGYATFPVNGGSVSVWVQQ

SEQ ID NO: 36306 - protein, 480 aa, Cytophaga sp.
NGTMMQYFEWYVPNDGQQWNRLRTDAPYLSSVGITAVWTPPAYKGTSQADVGYGPYDLYDLGEFNQKGTVRTKYGTKGELKSAVNTLHSNGIQVYGDVVMNHKAGADYTENVTAVEVNPSNRNQETSGEYNIQAWTGFNFPGRGTTYSNFKWQWFHFDGTDWDQSRSLSRIFKFTGKAWDWEVSSENGNYDYLMYADIDYDHPDVVNEMKKWGVWYANEVGLDGYRLDAVKHIKFSFLKDWVDNARAATGKEMFTVGEYWGNDLGALNNYLAKVNYNQSLFDAPLHYNFYAASTGGGYYDMRNILNNTLVASNPTKAVTLVENHDTQPGQSLESTVQPWFKPLAYAFILTRSGGYPSVFYGDMYGTKGTTTREIPALKSKIEPLLKARKDYAYGTQRDYIDNPDVIGWTREGDSTKAKSGLATVITDGPGGSKRMYVGTSNAGEIWYDLTGNRTDKITIGSDGYATFPVNGGSVSVWVQQ

SEQ ID NO: 36307 - protein, 480 aa, Cytophaga sp.
NGTMMQYFEWYVPNDGQQWNRLRTDAPYLSSVGITAVWTPPAYKGTSQADVGYGPYDLYDLGEFNQKGTVRTKYGTKGELKSAVNTLHSNGIQVYGDVVMNHKAGADYTENVTAVEVNPSNRNQETSGEYNIQAWTGFNFPGRGTTYSNFKWQWFHFDGTDWDQSRSLSRIFKFTGKAWDWEVSSENGNYDYLMYADIDYDHPDVVNEMKKWGVWYANEVGLDGYRLDAVKHIKFSFLKDWVDNARAATGKEMFTVGEYWQNDLGALNNYLAKVNYNQSLFDAPLHYNFYAASTGGGYYDMRNILNNTLVASNPTKAVTLVENHDTQPGQSLESTVQPWFKPLAYAFILTRSGGYPSVFYGDMYGTKGTTTREIPALKSKIEPLLKARKDYAYGTQRDYIDNPDVIGWTREGDSTKAKSGLATVITDGPGGHKRMYVGTSNAGEIWYDLTGNRTDKITIGSDGYATFPVNGGSVSVWVQQ

SEQ ID NO: 36308 - protein, 480 aa, Cytophaga sp.
NGTMMQYFEWYVPNDGQQWNRLRTDAPYLSSVGITAVWTPPAYKGTSQADVGYGPYDLYDLGEFNQKGTVRTKYGTKGELKSAVNTLHSNGIQVYGDVVMNHKAGADYTENVTAVEVNPSNRNQETSGEYNIQAWTGFNFPGRGTTYSNFKWQWFHFDGTDWDQSRSLSRIFKFTGKAWDWEVSSENGNYDYLMYADIDYDHPDVVNEMKKWGVWYANEVGLDGYRLDAVKHIKFSFLKDWVDNARAATGKEMFTVGEYWQNDLGALNNYLAKVNYNQSLFDAPLHYNFYAASTGGGYYDMRNILNNTLVASNPTKAVTLVENHDTQPGQSLESTVQPWFKPLAYAFILTRSGGYPSVFYGDMYGTKGTTTREIPALKSKIEPLLKARKDYAYGTQRDYIDNRDVIGWTREGDSTKAKSGLATVITDGPGGSKRMYVGTSNAGEIWYDLTGNRTDKITIGSDGYATFPVNGGSVSVWVQQ

SEQ ID NO: 36309 - protein, 480 aa, Cytophaga sp.
NGTMMQYFEWYVPNDGQQWNRLRTDAPYLSSVGITAVWTPPAYKGTSQADVGYGPYDLYDLGEFNQKGTVRTKYGTKGELKSAVNTLHSNGIQVYGDVVMNHKAGADYAENVTAVEVNPSNRNQETSGEYNIQAWTGFNFPGRGTTYSNFKWQWFHFDGTDWDQSRSLSRIFKFTGKAWDWEVSSENGNYDYLMYADIDYDHPDVVNEMKKWGVWYANEVGLDGYRLDAVKHIKFSFLKDWVDNARAATGKEMFTVGEYWQNDLGALNNYLAKVNYNQSLFDAPLHYNFYAASTGGGYYDMRNILNNTLVASNPTKAVTLVENHDTQPGQSLESTVQPWFKPLAYAFILTRSGGYPSVFYGDMYGTKGTTTREIPALKSKIEPLLKARKDYAYGTQRDYIDNPDVIGWTREGDSTKAKSGLATVITDGPGGSKRMYVGTSNAGEIWYDLTGNRTDKITIGSDGYATFPVNGGSVSVWVQQ

SEQ ID NO: 36310 - protein, 480 aa, Cytophaga sp.
NGTMMQYFEWYVPNDGQQWNRLRTDAPYLSSVGITAVWTPPAYKGTSQADVGYGPYDLYDLGEFNQKGTVRTKYGTKGELKSAVNTLHSNGIQVYGDVVMNHKAGADYTENVTAVEVNPSNRNQETSGEYNIQAWTGFNFPGRGTTYSNFKWQWFHFDGTDWDQSRSLHRIFKFTGKAWDWEVSSENGNYDYLMYADIDYDHPDVVNEMKKWGVWYANEVGLDGYRLDAVKHIKFSFLKDWVDNARAATGKEMFTVGEYWQNDLGALNNYLAKVNYNQSLFDAPLHYNFYAASTGGGYYDMRNILNNTLVASNPTKAVTLVENHDTQPGQSLESTVQPWFKPLAYAFILTRSGGYPSVFYGDMYGTKGTTTREIPALKSKIEPLLKARKDYAYGTQRDYIDNPDVIGWTREGDSTKAKSGLATVITDGPGGSKRMYVGTSNAGEIWYDLTGNRTDKITIGSDGYATFPVNGGSVSVWVQQ

SEQ ID NO: 36311 - protein, 480 aa, Cytophaga sp.
NGTMMQYFEWYVPNDGQQWNRLRTDAPYLSSVGITAVWTPPAYKGTSQADVGYGPYDLYDLGEFNQKGTVRTKYGTKGELKSAVNTLHSNGIQVYGDVVMNHKAGADYTENVTAVEVNPSNRNQETSGEYNIQAWTGFNFPNRGTTYSNFKWQWFHFDGTDWDQSRSLSRIFKFTGKAWDWEVSSENGNYDYLMYADIDYDHPDVVNEMKKWGVWYANEVGLDGYRLDAVKHIKFSFLKDWVDNARAATGKEMFTVGEYWQNDLGALNNYLAKVNYNQSLFDAPLHYNFYAASTGGGYYDMRNILNNTLVASNPTKAVTLVENHDTQPGQSLESTVQPWFKPLAYAFILTRSGGYPSVFYGDMYGTKGTTTREIPALKSKIEPLLKARKDYAYGTQRDYIDNPDVIGWTREGDSTKAKSGLATVITDGPGGSKRMYVGTSNAGEIWYDLTGNRTDKITIGSDGYATFPVNGGSVSVWVQQ

SEQ ID NO: 36312 - protein, 480 aa, Cytophaga sp.
NGTMMQYFEWYVPNDGQQWNRLRTDAPYLSSVGITAVWTPPAYKGTSQADVGYGPYDLYDLGEFNQKGTVRTKYGTKGELKSAVNTLHSNGIQVYGDVVMNHKAGADYTENVTAVEVNPSNRNQETSGEYNIQAWTGFNFPGRGTTYSNFKWQWFHFDGTDWDQSRSLNRIFKFTGKAWDWEVSSENGNYDYLMYADIDYDHPDVVNEMKKWGVWYANEVGLDGYRLDAVKHIKFSFLKDWVDNARAATGKEMFTVGEYWQNDLGALNNYLAKVNYNQSLFDAPLHYNFYAASTGGGYYDMRNILNNTLVASNPTKAVTLVENHDTQPGQSLESTVQPWFKPLAYAFILTRSGGYPSVFYGDMYGTKGTTTREIPALKSKIEPLLKARKDYAYGTQRDYIDNPDVIGWTREGDSTKAKSGLATVITDGPGGSKRMYVGTSNAGEIWYDLTGNRTDKITIGSDGYATFPVNGGSVSVWVQQ

SEQ ID NO: 36313 - protein, 480 aa, Cytophaga sp.
NGTMMQYFEWYVPNDGQQWNRLRTDAPYLSSVGITAVWTPPAYKGTSQADVGYGPYDLYDLGEFNQKGTVRTKYGTKGELKSAVNTLHSNGIQVYGDVVMNHKAGADYTENVTAVEVNPSNRNQETSGEYNIQAWTGFNFPGRGTTYSNFKWQWFHFDGTDWDQSRSLSRIFKFTGKAWDWEVSSENGNYDYLMYADIDYDHPDVVNEMKKWGVWYANEVGLDGYRLDAVKHIKFSFLKDWVDNARAATGKEIFTVGEYWQNDLGALNNYLAKVNYNQSLFDAPLHYNFYAASTGGGYYDMRNILNNTLVASNPTKAVTLVENHDTQPGQSLESTVQPWFKPLAYAFILTRSGGYPSVFYGDMYGTKGTTTREIPALKSKIEPLLKARKDYAYGTQRDYIDNPDVIGWTREGDSTKAKSGLATVITDGPGGSKRMYVGTSNAGEIWYDLTGNRTDKITIGSDGYATFPVNGGSVSVWVQQ

SEQ ID NO: 36314 - protein, 480 aa, Cytophaga sp.
NGTMMQYFEWYVPNDGQQWNRLRTDAPYLSSVGITAVWTPPAYKGTSQADVGYGPYDLYDLGEFNQKGTVRTKYGTKGELKSAVNTLHSNGIQVYGDVVMNHKAGADYTENVLAVEVNPSNRNQETSGEYNIQAWTGFNFPGRGTTYSNFKWQWFHFDGTDWDQSRSLSRIFKFTGKAWDWEVSSENGNYDYLMYADIDYDHPDVVNEMKKWGVWYANEVGLDGYRLDAVKHIKFSFLKDWVDNARAATGKEMFTVGEYWQNDLGALNNYLAKVNYNQSLFDAPLHYNFYAASTGGGYYDMRNILNNTLVASNPTKAVTLVENHDTQPGQSLESTVQPWFKPLAYAFILTRSGGYPSVFYGDMYGTKGTTTREIPALKSKIEPLLKARKDYAYGTQRDYIDNPDVIGWTREGDSTKAKSGLATVITDGPGGSKRMYVGTSNAGEIWYDLTGNRTDKITIGSDGYATFPVNGGSVSVWVQQ

SEQ ID NO: 36315 - protein, 480 aa, Cytophaga sp.
NGTMMQYFEWYVPNDGQQWNRLRTDAPYLSSVGITAVWTPPAYKGTSQADVGYGPYDLYDLGEFNQKGTVRTKYGTKGELKSAVNTLHSNGIQVYGDVVMNHKAGADYTENVTAVEVNPSNRNQETSGEYNIQAWTGFNFPGRGTTYSNFKWQWFHFDGTDWDQSRSLSRIFKFTGKAWDWEVSSEHGNYDYLMYADIDYDHPDVVNEMKKWGVWYANEVGLDGYRLDAVKHIKFSFLKDWVDNARAATGKEMFTVGEYWQNDLGALNNYLAKVNYNQSLFDAPLHYNFYAASTGGGYYDMRNILNNTLVASNPTKAVTLVENHDTQPGQSLESTVQPWFKPLAYAFILTRSGGYPSVFYGDMYGTKGTTTREIPALKSKIEPLLKARKDYAYGTQRDYIDNPDVIGWTREGDSTKAKSGLATVITDGPGGSKRMYVGTSNAGEIWYDLTGNRTDKITIGSDGYATFPVNGGSVSVWVQQ

SEQ ID NO: 36316 - protein, 480 aa, Cytophaga sp.
NGTMMQYFEWYVPNDGQQWNRLRTDAPYLSSVGITAVWTPPAYKGTSQADVGYGPYDLYDLGEFNQKGTVRTKYGTKGELKSAVNTLHSNGIQVYGDVVMNHKAGADYTENVTAVEVNPSNRNQETSGEYNIQAWTGFNFPGRGTTYSNFKWQWFHFDGTDWDQSRSLSRIFKFTGKAWDWEVSSENGNYDYLMYADIDYDHPDVVNEMKKWGVWYANEVGLDGYRLDAVKHIKFSFLKDWVDNARAATGKEMFTVGEYWQNDLGALNNYLAKVNYNQSLFDAPLHYNFYAASTGGGYYDMRNILNNALVASNPTKAVTLVENHDTQPGQSLESTVQPWFKPLAYAFILTRSGGYPSVFYGDMYGTKGTTTREIPALKSKIEPLLKARKDYAYGTQRDYIDNPDVIGWTREGDSTKAKSGLATVITDGPGGSKRMYVGTSNAGEIWYDLTGNRTDKITIGSDGYATFPVNGGSVSVWVQQ

SEQ ID NO: 36317 - protein, 480 aa, Cytophaga sp.
NGTMMQYFEWYVPNDGQQWNRLRTDAPYLSSVGITAVWTPPAYKGTSQADVGYGPYDLYDLGEFNQKGTVRTKYGTKGELKSAVNTLHSNGIQVYGDVVMNHKAGADYTENVTAVEVNPSNRNQETSGEYNIQAWTGFNFPGRGTTYSNFKWQWFHFDGTDWDQSRSLSRIFKFTGKAWDWEVSSENGNYDYLMYADIDYDHPDVVNEMKKWGVWYANEVGLDGYRLDAVKHIKFSFLKDWVDNARAATGKEMFTVGEYWQNDLGALNNYLAKVNYNQSLFDAPLHYNFYAASTGRGYYDMRNILNNTLVASNPTKAVTLVENHDTQPGQSLESTVQPWFKPLAYAFILTRSGGYPSVFYGDMYGTKGTTTREIPALKSKIEPLLKARKDYAYGTQRDYIDNPDVIGWTREGDSTKAKSGLATVITDGPGGSKRMYVGTSNAGEIWYDLTGNRTDKITIGSDGYATFPVNGGSVSVWVQQ

SEQ ID NO: 36318 - protein, 480 aa, Cytophaga sp.
NGTMMQYFEWYVPNDGQQWNRLRTDAPYLSSVGITAVWTPPAYKGTSQADVGYGPYDLYDLGEFNQKGTVRTKYGTKGELKSAVNTLHSNGIQVYGDVVMNHIAGADYTENVTAVEVNPSNRNQETSGEYNIQAWTGFNFPGRGTTYSNFKWQWFHFDGTDWDQSRSLSRIFKFTGKAWDWEVSSENGNYDYLMYADIDYDHPDVVNEMKKWGVWYANEVGLDGYRLDAVKHIKFSFLKDWVDNARAATGKEMFTVGEYWQNDLGALNNYLAKVNYNQSLFDAPLHYNFYAASTGGGYYDMRNILNNTLVASNPTKAVTLVENHDTQPGQSLESTVQPWFKPLAYAFILTRSGGYPSVFYGDMYGTKGTTTREIPALKSKIEPLLKARKDYAYGTQRDYIDNPDVIGWTREGDSTKAKSGLATVITDGPGGSKRMYVGTSNAGEIWYDLTGNRTDKITIGSDGYATFPVNGGSVSVWVQQ

SEQ ID NO: 36319 - protein, 480 aa, Cytophaga sp.
NGTMMQYFEWYVPNDGQQWNRLRTDAPYLSSVGITAVWTPPAYKGTSQADVGYGPYDLYDLGEFNQKGTVRTKYGTKGELKSAVNTLHSNGIQVYGDVVMNHKAGADYTENVTAVEVNPSNRNQETSGEYNIQAWTGFNFPGRQTTYSNFKWQWFHFDGTDWDQSRSLSRIFKFTGKAWDWEVSSENGNYDYLMYADIDYDHPDVVNEMKKWGVWYANEVGLDGYRLDAVKHIKFSFLKDWVDNARAATGKEMFTVGEYWQNDLGALNNYLAKVNYNQSLFDAPLHYNFYAASTGGGYYDMRNILNNTLVASNPTKAVTLVENHDTQPGQSLESTVQPWFKPLAYAFILTRSGGYPSVFYGDMYGTKGTTTREIPALKSKIEPLLKARKDYAYGTQRDYIDNPDVIGWTREGDSTKAKSGLATVITDGPGGSKRMYVGTSNAGEIWYDLTGNRTDKITIGSDGYATFPVNGGSVSVWVQQ

SEQ ID NO: 36320 - protein, 480 aa, Cytophaga sp.
NGTMMQYFEWYVPNDGQQWNRLRTDAPYLSSVGITAVWTPPAYKGTSQADVGYGPYDLYDLGEFNQKGTVRTKYGTKGELKSAVNTLHSNGIQVYGDVVMNHKAGADYTENVTAVEVNPSNRNQETSGEYNIQAWTGFNFPGRGTTYSNFKWQWFHFDGTDWDQSRSLSRIFKFTGKAWDWEVSSENGNYDYLMYADIDYDHPDVVNEMKKWGVWYANEVGLDGYRLDAVKHIKFSFLKDWVDNARAATGKEMFTVGEYWQNDLGALNNYLAKVNYNQSLFDAPLHYNFYAASTGGGYYDMRNILNNTLVASNPTKAVTLVENHDTQPGQSLESTVQPWFKPLAYAFILTRSGGYPSVFYGDMYGTKGQTTREIPALKSKIEPLLKARKDYAYGTQRDYIDNPDVIGWTREGDSTKAKSGLATVITDGPGGSKRMYVGTSNAGEIWYDLTGNRTDKITIGSDGYATFPVNGGSVSVWVQQ

SEQ ID NO: 36321 - protein, 480 aa, Cytophaga sp.
NGTMMQYFEWYVPNDGQQWNRLRTDAPYLSSVGITAVWTPPAYKGTSQADVGYGPYDLYDLGEFNQKGTVRTKYGTKGELKSAVNTLHSNGIQVYGDVVMNHKAGADYTENVTAVEVNPSNRNQETSGEYNIQAWTGFNFPGRGTTYSNFKWQWFHFDGTDWDQSWSLSRIFKFTGKAWDWEVSSENGNYDYLMYADIDYDHPDVVNEMKKWGVWYANEVGLDGYRLDAVKHIKFSFLKDWVDNARAATGKEMFTVGEYWQNDLGALNNYLAKVNYNQSLFDAPLHYNFYAASTGGGYYDMRNILNNTLVASNPTKAVTLVENHDTQPGQSLESTVQPWFKPLAYAFILTRSGGYPSVFYGDMYGTKGTTTREIPALKSKIEPLLKARKDYAYGTQRDYIDNPDVIGWTREGDSTKAKSGLATVITDGPGGSKRMYVGTSNAGEIWYDLTGNRTDKITIGSDGYATFPVNGGSVSVWVQQ

SEQ ID NO: 36322 - protein, 480 aa, Cytophaga sp.
NGTMMQYFEWYVPNDGQQWNRLRTDAPYLSSVGITAVWTPPAYKGTSQADVGYGPYDLYDLGEFNQKGTVRTKYGTKGELKSAVNTLHSNGIQVYGDVVMNHKAGADYTENVTAVEVNPSNRNQETSGEYNIQAWTGFNFPGRGTTYSNFKWQWFHFDGTDWDQSRSLSRIFKFTGKAWDWEVSSENGNYDYLMYADIDYDHPDVVNEMKKWGVWYANEVGLDGYRLDAVKHIKFSFLKDWVDNANAATGKEMFTVGEYWQNDLGALNNYLAKVNYNQSLFDAPLHYNFYAASTGGGYYDMRNILNNTLVASNPTKAVTLVENHDTQPGQSLESTVQPWFKPLAYAFILTRSGGYPSVFYGDMYGTKGTTTREIPALKSKIEPLLKARKDYAYGTQRDYIDNPDVIGWTREGDSTKAKSGLATVITDGPGGSKRMYVGTSNAGEIWYDLTGNRTDKITIGSDGYATFPVNGGSVSVWVQQ

SEQ ID NO: 36323 - protein, 480 aa, Cytophaga sp.
NGTMMQYFEWYVPNDGQQWNRLRTAAPYLSSVGITAVWTPPAYKGTSQADVGYGPYDLYDLGEFNQKGTVRTKYGTKGELKSAVNTLHSNGIQVYGDVVMNHKAGADYTENVTAVEVNPSNRNQETSGEYNIQAWTGFNFPGRGTTYSNFKWQWFHFDGTDWDQSRSLSRIFKFTGKAWDWEVSSENGNYDYLMYADIDYDHPDVVNEMKKWGVWYANEVGLDGYRLDAVKHIKFSFLKDWVDNARAATGKEMFTVGEYWQNDLGALNNYLAKVNYNQSLFDAPLHYNFYAASTGGGYYDMRNILNNTLVASNPTKAVTLVENHDTQPGQSLESTVQPWFKPLAYAFILTRSGGYPSVFYGDMYGTKGTTTREIPALKSKIEPLLKARKDYAYGTQRDYIDNPDVIGWTREGDSTKAKSGLATVITDGPGGSKRMYVGTSNAGEIWYDLTGNRTDKITIGSDGYATFPVNGGSVSVWVQQ

SEQ ID NO: 36324 - protein, 480 aa, Cytophaga sp.
NGTMMQYFEWYVPNDGQQWNRLRTDAPYLSSVGITAVWTPPAYKGTSQADVGYGPYDLYDLGEFNQKGTVRTKYGTKGELKSAVNTLHSNGIQVYGDVVMNHKAGADYDENVTAVEVNPSNRNQETSGEYNIQAWTGFNFPGRGTTYSNFKWQWFHFDGTDWDQSRSLSRIFKFTGKAWDWEVSSENGNYDYLMYADIDYDHPDVVNEMKKWGVWYANEVGLDGYRLDAVKHIKFSFLKDWVDNARAATGKEMFTVGEYWQNDLGALNNYLAKVNYNQSLFDAPLHYNFYAASTGGGYYDMRNILNNTLVASNPTKAVTLVENHDTQPGQSLESTVQPWFKPLAYAFILTRSGGYPSVFYGDMYGTKGTTTREIPALKSKIEPLLKARKDYAYGTQRDYIDNPDVIGWTREGDSTKAKSGLATVITDGPGGSKRMYVGTSNAGEIWYDLTGNRTDKITIGSDGYATFPVNGGSVSVWVQQ

SEQ ID NO: 36325 - protein, 480 aa, Cytophaga sp.
NGTMMQYFEWYVPNDGQQWNRLRTDAPYLSSVGITAVWTPPAYKGTSQADVGYGPYDLYDLGEFNQKGTVRTKYGTKGELKSAVNTLHSNGIQVYGDVVMNHKAGADYTENVTAVEVNPSNRNQETSGEYNIQAWTGFNFPGRGTTYSNFKWQWFHFDGTDWDQSRSLSRIFKFTGKAWDWEVSSENGNYDYLMYADIDYDHPDVVNEMKKWGVWYANEVGLDGYRLDAVKHIKFSFLKDWVDNARAATGKQMFTVGEYWQNDLGALNNYLAKVNYNQSLFDAPLHYNFYAASTGGGYYDMRNILNNTLVASNPTKAVTLVENHDTQPGQSLESTVQPWFKPLAYAFILTRSGGYPSVFYGDMYGTKGTTTREIPALKSKIEPLLKARKDYAYGTQRDYIDNPDVIGWTREGDSTKAKSGLATVITDGPGGSKRMYVGTSNAGEIWYDLTGNRTDKITIGSDGYATFPVNGGSVSVWVQQ

SEQ ID NO: 36326 - protein, 480 aa, Cytophaga sp.
NGTMMQYFEWYVPNDGQQWNRLRTDAPYLSSVGITAVWTPPAYKGTSQADVGYGPYDLYDLGEFNQKGTVRTKYGTKGELKSAVNTLHSNGIQVYGDVVMNHKAGADYTENVTAVEVNPSNRNQETSGEYNIQAWTGFNFPGRGTTYSNFKWQWFHFDGTDWDQNRSLSRIFKFTGKAWDWEVSSENGNYDYLMYADIDYDHPDVVNEMKKWGVWYANEVGLDGYRLDAVKHIKFSFLKDWVDNARAATGKEMFTVGEYWQNDLGALNNYLAKVNYNQSLFDAPLHYNFYAASTGGGYYDMRNILNNTLVASNPTKAVTLVENHDTQPGQSLESTVQPWFKPLAYAFILTRSGGYPSVFYGDMYGTKGTTTREIPALKSKIEPLLKARKDYAYGTQRDYIDNPDVIGWTREGDSTKAKSGLATVITDGPGGSKRMYVGTSNAGEIWYDLTGNRTDKITIGSDGYATFPVNGGSVSVWVQQ

SEQ ID NO: 36327 - protein, 480 aa, Cytophaga sp.
NGTMMQYFEWYVPNDGQQWNRLRTDAPYLSSVGITAVWTPPAYKGTSQADVGYGPYDLYDLGEFNQKGTVRTKYGTKGELKSAVNTLHSNGIQVYGDVVMNHKAGADYTENVTAVEVNPSNRNQETSGEYNIQAWTGFNFPGRGTTYSNFKWQWFHFDGTDWDQSRSLSRIFKFTGKAWDWEVSSENGNYDYLMYADIDYDHPDVVNEMKKWGVWYANEVGLDGYRLDAVKHIKFDFLKDWVDNARAATGKEMFTVGEYWQNDLGALNNYLAKVNYNQSLFDAPLHYNFYAASTGGGYYDMRNILNNTLVASNPTKAVTLVENHDTQPGQSLESTVQPWFKPLAYAFILTRSGGYPSVFYGDMYGTKGTTTREIPALKSKIEPLLKARKDYAYGTQRDYIDNPDVIGWTREGDSTKAKSGLATVITDGPGGSKRMYVGTSNAGEIWYDLTGNRTDKITIGSDGYATFPVNGGSVSVWVQQ

SEQ ID NO: 36328 - protein, 480 aa, Cytophaga sp.
NGTMMQYFEWYVPNDGQQWNRLRTDAPYLSSVGITAVWTPPAYKGTSQADVGYGPYDLYDLGEFNQKGTVRTKYGTKGELKSAVNTLHSNGIQVYGDVVMNHKAGADYTENVTAVEVNPSNRNQETSGEYNIQAWTGFNFPGRGTTYSNFKWQWFHFDGTDWDQSRSLSRIFKFTGKAWDWEVSSENGNYDYLMYADIDYDHPDVVNEMKKWGVWYANEVGLDGYRLDAVKHIKFSFLKDWVDNARAATGKEMFTVGEYWQNDLGALNNYLAKVNYNQSLFDAPLHYNFYAASTGGGYYDMRNILNNTLVASNPTKAVTLVENHDTQPGQSLESTVQPWFKPGAYAFILTRSGGYPSVFYGDMYGTKGTTTREIPALKSKIEPLLKARKDYAYGTQRDYIDNPDVIGWTREGDSTKAKSGLATVITDGPGGSKRMYVGTSNAGEIWYDLTGNRTDKITIGSDGYATFPVNGGSVSVWVQQ

SEQ ID NO: 36329 - protein, 480 aa, Cytophaga sp.
NGTMMQYFEWYVPNDGQQWNRLRTDAPYLSSVGITAVWTPPAYKGTSQADVGYGPYDLYDLGEFNQKGTVRTKYGTKGELKSAVNTLHSNGIQVYGDVVMNHKAGADYTENVTAVEVNPSNRNQETSGEYNIQAWTGFNFPGRGTTYSNFKWQWFHFDGTDWDQSRSLSRIFKFTGKAWDWEVSSENGNYDYLMYADIDYDHPDVVNEMKKWGVWYANEVGLDGYRLDAVKHIKFSFLKDWVDNARAATGKEMFTVGEYWQNDLGALNNYLAKVNYNQSLFDAPLHYNFYAASTGGGYYDMRNILNNTLVASNPTKAVTLVENHDTQPGQSLESTVQPWFKPLAYAFILTRSGGYPSVFYGDMYGTKGTTTREIPALKSKIEPLLKARKDYAYGTQRDYIDNEDVIGWTREGDSTKAKSGLATVITDGPGGSKRMYVGTSNAGEIWYDLTGNRTDKITIGSDGYATFPVNGGSVSVWVQQ

SEQ ID NO: 36330 - protein, 480 aa, Cytophaga sp.
NGTMMQYFEWYVPNDGQQWNRLRTDAPYLSSVGITAVWTPPAYKGTSQADVGYGPYDLYDLGEFNQKGTVRTKYGTKGELKSAVNTLHSNGIQVYGDVVMNHKAGADYTENVTAVEVNPSNRNQETSGEYNIQAWTGFNFPGRGTTYSNFKWQWFHFDGTDWDQSRSLSRIFKFTGKAWDWEVSSENGNDDYLMYADIDYDHPDVVNEMKKWGVWYANEVGLDGYRLDAVKHIKFSFLKDWVDNARAATGKEMFTVGEYWQNDLGALNNYLAKVNYNQSLFDAPLHYNFYAASTGGGYYDMRNILNNTLVASNPTKAVTLVENHDTQPGQSLESTVQPWFKPLAYAFILTRSGGYPSVFYGDMYGTKGTTTREIPALKSKIEPLLKARKDYAYGTQRDYIDNPDVIGWTREGDSTKAKSGLATVITDGPGGSKRMYVGTSNAGEIWYDLTGNRTDKITIGSDGYATFPVNGGSVSVWVQQ

SEQ ID NO: 36331 - protein, 480 aa, Cytophaga sp.
NGTMMQYFEWYVPNDGQQWNRLRTDAPYLSSVGITAVWTPPAYKGTSQADVGYGPYDLYDLGEFNQKGTVRTKYGTKGELKSAVNTLHSNGIQVYGDVVMNHKAGADYTENVTAVEVNPSNRNQETSGEYNIQAWTGFNFPGRGTTYSNFKWQWFHFDGTDWDQSRSLSRIMKFTGKAWDWEVSSENGNYDYLMYADIDYDHPDVVNEMKKWGVWYANEVGLDGYRLDAVKHIKFSFLKDWVDNARAATGKEMFTVGEYWQNDLGALNNYLAKVNYNQSLFDAPLHYNFYAASTGGGYYDMRNILNNTLVASNPTKAVTLVENHDTQPGQSLESTVQPWFKPLAYAFILTRSGGYPSVFYGDMYGTKGTTTREIPALKSKIEPLLKARKDYAYGTQRDYIDNPDVIGWTREGDSTKAKSGLATVITDGPGGSKRMYVGTSNAGEIWYDLTGNRTDKITIGSDGYATFPVNGGSVSVWVQQ

SEQ ID NO: 36332 - protein, 480 aa, Cytophaga sp.
NGTMMQYFEWYVPNDGQQWNRLRTDAPYLSSVGITAVWTPPAYKGTSQADVGYGPYDLYDLGEFNQKGTVRTKYGTKGELKSAVNTLHSNGIQVYGDVVMNHKAGADYTENVTAVEVNPSNRNQETSGEYNIQAWTGFNFPGRGTTYSNFKWQWFHFDGTDWDQSRSLSRIFKFTGKAWDWEVCSENGNYDYLMYADIDYDHPDVVNEMKKWGVWYANEVGLDGYRLDAVKHIKFSFLKDWVDNARAATGKEMFTVGEYWQNDLGALNNYLAKVNYNQSLFDAPLHYNFYAASTGGGYYDMRNILNNTLVASNPTKAVTLVENHDTQPGQSLESTVQPWFKPLAYAFILTRSGGYPSVFYGDMYGTKGTTTREIPALKSKIEPLLKARKDYAYGTQRDYIDNPDVIGWTREGDSTKAKSGLATVITDGPGGSKRMYVGTSNAGEIWYDLTGNRTDKITIGSDGYATFPVNGGSVSVWVQQ

SEQ ID NO: 36333 - protein, 480 aa, Cytophaga sp.
NGTMMQYFEWYVPNDGQQWNRLRTDAPYLSSVGITAVWTPPAYKGTSQADVGYGPYDLYDLGEFNQKGTVRTKYGTKGELKSAVNTLHSNGIQVYGDVVMNHKAGADYTENVTAVEVNPSNRNQETSGEYNIQAWTGFNFPGRGTTYSNFKWQWFHFDGTDWDQSRSLSRIFKFTGKAWDWEVSSENGNYDYLMYADIDYDHPDVVNEMKKWGVWYANEVGLDGYRLDAVKHIKFSFLKDWVDNARAATGKEMFTVGEYWQNDLSALNNYLAKVNYNQSLFDAPLHYNFYAASTGGGYYDMRNILNNTLVASNPTKAVTLVENHDTQPGQSLESTVQPWFKPLAYAFILTRSGGYPSVFYGDMYGTKGTTTREIPALKSKIEPLLKARKDYAYGTQRDYIDNPDVIGWTREGDSTKAKSGLATVITDGPGGSKRMYVGTSNAGEIWYDLTGNRTDKITIGSDGYATFPVNGGSVSVWVQQ

SEQ ID NO: 36334 - protein, 480 aa, Cytophaga sp.
NGTMMQYFEWYVPNDGQQWNRLRTDAPYLSSVGITAVWTPPAYKGTSQADVGYGPYDLYDLGEFNQKGTVRTKYGTKGELKSAVNTLHSNGIQVYGDVVMNHKAGADYTENVTAVEVNPSNRNQETSGEYNIQAWTGFNFPGRGTTYSNFKWQWFHFDGTDWDQSRSLSRIFKFTGKAWDWEVSSENGNYDYLMYADIDYDHPDVVNEMKKWGVWYANEVGLDGYRLDAVKHIKFSFLKDWVDNARAATGKEMFTVGEYWQNDLGALNNYLAKVNYNQSLFDAPLHYNFYAASTGGGYYDMRNILNNTLVASNPTKAVTLVENHDTQPGQSLESTVQPWFKPLAYAFILTRSGGYPSVFYGDMYGTKGTTTREIPALKSKIEPLLKARKDYAYGTQRDYIDNPDVIGWTREGDSTKAKSGLATVITDGPNGSKRMYVGTSNAGEIWYDLTGNRTDKITIGSDGYATFPVNGGSVSVWVQQ

SEQ ID NO: 36335 - protein, 480 aa, Cytophaga sp.
NGTMMQYFEWYVPNDGQQWNRLRTDAPYLSSVGITAVWTPPAYKGTSQADVGYGPYDLYDLGEFNQKGTVRTKYGTKGELKSAVNTLHSNGIQVYGDVVMNHKAGADYTENVTAVEVNPSNRNQETSGEYNIQAWTGFNFPGRGTTYSNFKWQWFHFDGTDWDQSRSLSRIFKFTGKAWDWEVSSENGNYDYLMYADIDYDHPDVVNEMKKWGVWYANEVGLDGYRLDAVKHIKFSFLKDWVDNARAATGKEMFTVGEYWQNDLGALNNYLAKVNYNQSLFDAPLHYNFYAASTGGGYYDMRNILNNTLVASNPTKAVTLVENHDTQPGQSLESTVQPWFKPLAYAFILTRSGGYPSVFYGDMYGTKGTTTREIPALKSKIEPLLKARKDYAYGTQRDYIDNPDVIGWTREGGSTKAKSGLATVITDGPGGSKRMYVGTSNAGEIWYDLTGNRTDKITIGSDGYATFPVNGGSVSVWVQQ

SEQ ID NO: 36336 - protein, 480 aa, Cytophaga sp.
NGTMMQYFEWYVPNDGQQWNRLRTDAPYLSSVGITAVWTPPAYKGTSQADVGYGPYDLYDLGEFNQKGTVRTKYGTKGELKSAVNTLHSNGIQVYGDVVMNHKAGADYTENVHAVEVNPSNRNQETSGEYNIQAWTGFNFPGRGTTYSNFKWQWFHFDGTDWDQSRSLSRIFKFTGKAWDWEVSSENGNYDYLMYADIDYDHPDVVNEMKKWGVWYANEVGLDGYRLDAVKHIKFSFLKDWVDNARAATGKEMFTVGEYWQNDLGALNNYLAKVNYNQSLFDAPLHYNFYAASTGGGYYDMRNILNNTLVASNPTKAVTLVENHDTQPGQSLESTVQPWFKPLAYAFILTRSGGYPSVFYGDMYGTKGTTTREIPALKSKIEPLLKARKDYAYGTQRDYIDNPDVIGWTREGDSTKAKSGLATVITDGPGGSKRMYVGTSNAGEIWYDLTGNRTDKITIGSDGYATFPVNGGSVSVWVQQ

SEQ ID NO: 36337 - protein, 480 aa, Cytophaga sp.
NGTMMQYFEWYVPNDGQQWNRLRTDAPYLSSVGITAVWTPPAYKGTSQADVGYGPYDLYDLGEFNQKGTVRTKYGTKGELKSAVNTLHSNGIQVYGDVVMNHKAGADYTENVTAVEVNPSNRNQETSGEYNIQAWTGFNFPGRGTTYSNFKWQWFHFDGTDWDQSRSLSRIFKFTGKAWDWEVSSENGNYDYLMYADIDYDHPDVVNEMKKWGVWYANEVGLDGYRLDAVKHIKFSFLKDWVDNARAATGKEMFTVGEYWQNDLFALNNYLAKVNYNQSLFDAPLHYNFYAASTGGGYYDMRNILNNTLVASNPTKAVTLVENHDTQPGQSLESTVQPWFKPLAYAFILTRSGGYPSVFYGDMYGTKGTTTREIPALKSKIEPLLKARKDYAYGTQRDYIDNPDVIGWTREGDSTKAKSGLATVITDGPGGSKRMYVGTSNAGEIWYDLTGNRTDKITIGSDGYATFPVNGGSVSVWVQQ

SEQ ID NO: 36338 - protein, 480 aa, Cytophaga sp.
NGTMMQYFEWYVPNDGQQWNRLRTDAPYLSSVGITAVWTPPAYKGTSQADVGYGPYDLYDLGEFNQKGTVRTKYGTKGELKSAVNTLHSNGIQVYGDVVMNHKAGADYTENVTAVEVNPSNRNQETSGEYNIQAWTGFNFPGRGTTYSNFKWQWFHFDGTDWDQSRSLKRIFKFTGKAWDWEVSSENGNYDYLMYADIDYDHPDVVNEMKKWGVWYANEVGLDGYRLDAVKHIKFSFLKDWVDNARAATGKEMFTVGEYWQNDLGALNNYLAKVNYNQSLFDAPLHYNFYAASTGGGYYDMRNILNNTLVASNPTKAVTLVENHDTQPGQSLESTVQPWFKPLAYAFILTRSGGYPSVFYGDMYGTKGTTTREIPALKSKIEPLLKARKDYAYGTQRDYIDNPDVIGWTREGDSTKAKSGLATVITDGPGGSKRMYVGTSNAGEIWYDLTGNRTDKITIGSDGYATFPVNGGSVSVWVQQ

SEQ ID NO: 36339 - protein, 480 aa, Cytophaga sp.
NGTMMQYFEWYVPNDGQQWNRLRTDAPYLSSVGITAVWTPPAYKGTSQADVGYGPYDLYDLGEFNQKGTVRTKYGTKGELKSAVNTLHSNGIQVYGDVVMNHKAGADYTENVTAVEVNPSNRNQETSGEYNIQAWTGFNFPGRGTTYSNFKWQWFHFDGTDWDQSRSLSRIFKFTGKAWDWEVSSENGNYDYLMYADIDYDHNDVVNEMKKWGVWYANEVGLDGYRLDAVKHIKFSFLKDWVDNARAATGKEMFTVGEYWQNDLGALNNYLAKVNYNQSLFDAPLHYNFYAASTGGGYYDMRNILNNTLVASNPTKAVTLVENHDTQPGQSLESTVQPWFKPLAYAFILTRSGGYPSVFYGDMYGTKGTTTREIPALKSKIEPLLKARKDYAYGTQRDYIDNPDVIGWTREGDSTKAKSGLATVITDGPGGSKRMYVGTSNAGEIWYDLTGNRTDKITIGSDGYATFPVNGGSVSVWVQQ

SEQ ID NO: 36340 - protein, 480 aa, Cytophaga sp.
NGTMMQYFEWYVPNDGQQWNRLRTDAPYLSSVGITAVWTPPAYKGTSQADVGYGPYDLYDLGEFNQKGTVRTKYGTKGELKSAVNTLHSNGIQVYGDVVMNHKAGADYTENVTAVEVNPSNRNQETSGEYNIQAWTGFNFPGRGTTYSNFKWQWFHFDGTDWDQSRSLSRIFKFTGKAWDWEVSSENGNYDYLMYADIDYDEPDVVNEMKKWGVWYANEVGLDGYRLDAVKHIKFSFLKDWVDNARAATGKEMFTVGEYWQNDLGALNNYLAKVNYNQSLFDAPLHYNFYAASTGGGYYDMRNILNNTLVASNPTKAVTLVENHDTQPGQSLESTVQPWFKPLAYAFILTRSGGYPSVFYGDMYGTKGTTTREIPALKSKIEPLLKARKDYAYGTQRDYIDNPDVIGWTREGDSTKAKSGLATVITDGPGGSKRMYVGTSNAGEIWYDLTGNRTDKITIGSDGYATFPVNGGSVSVWVQQ

SEQ ID NO: 36341 - protein, 480 aa, Cytophaga sp.
NGTMMQYFEWYVPNDGQQWNRLRTDAPYLSSVGITAVWTPPAYKGTSQADVGYGPYDLYDLGEFNQKGTVRTKYGTKGELKSAVNTLHSNGIQVYGDVVMNHKAGADYTENVTAVEVNPSNRNQETSGEYNIQAWTGFNFPGRGTTYSNFKWQWFHFDGTDWDQSRSLSRIFKFTGKAWDWEVSSENGNYDYLMYADIDYDHPDVVNEMKKWGVWYANEVGLDGYRLDAVKHIKFSFLKDWVDNARAATGKEMFTVGEYWQNDLGALNNYLAKVNYNQSLFDAPLHYNFYTASTGGGYYDMRNILNNTLVASNPTKAVTLVENHDTQPGQSLESTVQPWFKPLAYAFILTRSGGYPSVFYGDMYGTKGTTTREIPALKSKIEPLLKARKDYAYGTQRDYIDNPDVIGWTREGDSTKAKSGLATVITDGPGGSKRMYVGTSNAGEIWYDLTGNRTDKITIGSDGYATFPVNGGSVSVWVQQ

SEQ ID NO: 36342 - protein, 480 aa, Cytophaga sp.
NGTMMQYFEWYVPNDGQQWNRLRTDAPYLSSVGITAVWTPPAYKGTSQADVGYGPYDLYDLGEFNQKGTVRTKYGTKGELKSAVNTLHSNGIQVYGDVVMNHKAGADYTENITAVEVNPSNRNQETSGEYNIQAWTGFNFPGRGTTYSNFKWQWFHFDGTDWDQSRSLSRIFKFTGKAWDWEVSSENGNYDYLMYADIDYDHPDVVNEMKKWGVWYANEVGLDGYRLDAVKHIKFSFLKDWVDNARAATGKEMFTVGEYWQNDLGALNNYLAKVNYNQSLFDAPLHYNFYAASTGGGYYDMRNILNNTLVASNPTKAVTLVENHDTQPGQSLESTVQPWFKPLAYAFILTRSGGYPSVFYGDMYGTKGTTTREIPALKSKIEPLLKARKDYAYGTQRDYIDNPDVIGWTREGDSTKAKSGLATVITDGPGGSKRMYVGTSNAGEIWYDLTGNRTDKITIGSDGYATFPVNGGSVSVWVQQ

SEQ ID NO: 36343 - protein, 480 aa, Cytophaga sp.
NGTMMQYFEWYVPNDGQQWNRLRTDAPYLSSVGITAVWTPPAYKGTSQADVGYGPYDLYDLGEFNQKGTVRTKYGTKGELKSAVNTLHSNGIQVYGDVVMNHKAGADYGENVTAVEVNPSNRNQETSGEYNIQAWTGFNFPGRGTTYSNFKWQWFHFDGTDWDQSRSLSRIFKFTGKAWDWEVSSENGNYDYLMYADIDYDHPDVVNEMKKWGVWYANEVGLDGYRLDAVKHIKFSFLKDWVDNARAATGKEMFTVGEYWQNDLGALNNYLAKVNYNQSLFDAPLHYNFYAASTGGGYYDMRNILNNTLVASNPTKAVTLVENHDTQPGQSLESTVQPWFKPLAYAFILTRSGGYPSVFYGDMYGTKGTTTREIPALKSKIEPLLKARKDYAYGTQRDYIDNPDVIGWTREGDSTKAKSGLATVITDGPGGSKRMYVGTSNAGEIWYDLTGNRTDKITIGSDGYATFPVNGGSVSVWVQQ

SEQ ID NO: 36344 - protein, 480 aa, Cytophaga sp.
NGTMMQYFEWYVPNDGQQWNRLRTDAPYLSSVGITAVWTPPAYKGTSQADVGYGPYDLYDLGEFNQKGTVRTKYGTKGELKSAVNTLHSNGIQVYGDVVMNHKAGADYTENVGAVEVNPSNRNQETSGEYNIQAWTGFNFPGRGTTYSNFKWQWFHFDGTDWDQSRSLSRIFKFTGKAWDWEVSSENGNYDYLMYADIDYDHPDVVNEMKKWGVWYANEVGLDGYRLDAVKHIKFSFLKDWVDNARAATGKEMFTVGEYWQNDLGALNNYLAKVNYNQSLFDAPLHYNFYAASTGGGYYDMRNILNNTLVASNPTKAVTLVENHDTQPGQSLESTVQPWFKPLAYAFILTRSGGYPSVFYGDMYGTKGTTTREIPALKSKIEPLLKARKDYAYGTQRDYIDNPDVIGWTREGDSTKAKSGLATVITDGPGGSKRMYVGTSNAGEIWYDLTGNRTDKITIGSDGYATFPVNGGSVSVWVQQ

SEQ ID NO: 36345 - protein, 480 aa, Cytophaga sp.
NGTMMQYFEWYVPNDGQQWNRLRTDAPYLSSVGITAVWTPPAYKGTSQADVGYGPYDLYDLGEFNQKGTVRTKYGTKGELKSAVNTLHSNGIQVYGDVVMNHKAGADYTENVTAVEVNPSNRNQETSGEYNIQAWTGFNFPGRGTTYSNFKWQWFHFDGTDWDQSRSLSRIFKFTGKAWDWEVSSENGNYDYLMYADIDYDHPDVVNEMKKWGVWYANEVGLDGYRLDAVKHIKFSFLKDWVDNARAATGKGMFTVGEYWQNDLGALNNYLAKVNYNQSLFDAPLHYNFYAASTGGGYYDMRNILNNTLVASNPTKAVTLVENHDTQPGQSLESTVQPWFKPLAYAFILTRSGGYPSVFYGDMYGTKGTTTREIPALKSKIEPLLKARKDYAYGTQRDYIDNPDVIGWTREGDSTKAKSGLATVITDGPGGSKRMYVGTSNAGEIWYDLTGNRTDKITIGSDGYATFPVNGGSVSVWVQQ

SEQ ID NO: 36346 - protein, 480 aa, Cytophaga sp.
NGTMMQYFEWYVPNDGQQWNRLRTDAPYLSSVGITAVWTPPAYKGTSQADVGYGPYDLYDLGEFNQKGTVRTKYGTKGELKSAVNTLHSNGIQVYGDVVMNHKAGADYTENVTAVEVNPSNRNQETSGEYNIQAWTGFNFPGRGTTYSNFKWQWFHFDGTDWDQSRSLSRIFKFTGKAWDWEVSSENGNYDYLMYADIDYDHPDVVNEMKKWGVWYANEVGLDGYRLDAVKHIKFSFLKDWVDNARAATGKEMFLVGEYWQNDLGALNNYLAKVNYNQSLFDAPLHYNFYAASTGGGYYDMRNILNNTLVASNPTKAVTLVENHDTQPGQSLESTVQPWFKPLAYAFILTRSGGYPSVFYGDMYGTKGTTTREIPALKSKIEPLLKARKDYAYGTQRDYIDNPDVIGWTREGDSTKAKSGLATVITDGPGGSKRMYVGTSNAGEIWYDLTGNRTDKITIGSDGYATFPVNGGSVSVWVQQ

SEQ ID NO: 36347 - protein, 480 aa, Cytophaga sp.
NGTMMQYFEWYVPNDGQQWNRLRTDAPYLSSVGITAVWTPPAYKGTSQADVGYGPYDLYDLGEFNQKGTVRTKYGTKGELKSAVNTLHSNGIQVYGDVVMNHKAGADYTENVTAVEVNPSNRNQETSGEYNIQAWTGFNFPGRGTTYSNFKWQWFHFDGTDWDQSRSLSRIWKFTGKAWDWEVSSENGNYDYLMYADIDYDHPDVVNEMKKWGVWYANEVGLDGYRLDAVKHIKFSFLKDWVDNARAATGKEMFTVGEYWQNDLGALNNYLAKVNYNQSLFDAPLHYNFYAASTGGGYYDMRNILNNTLVASNPTKAVTLVENHDTQPGQSLESTVQPWFKPLAYAFILTRSGGYPSVFYGDMYGTKGTTTREIPALKSKIEPLLKARKDYAYGTQRDYIDNPDVIGWTREGDSTKAKSGLATVITDGPGGSKRMYVGTSNAGEIWYDLTGNRTDKITIGSDGYATFPVNGGSVSVWVQQ

SEQ ID NO: 36348 - protein, 480 aa, Cytophaga sp.
NGTMMQYFEWYVPNDGQQWNRLRTDAPYLKSVGITAVWTPPAYKGTSQADVGYGPYDLYDLGEFNQKGTVRTKYGTKGELKSAVNTLHSNGIQVYGDVVMNHKAGADYTENVTAVEVNPSNRNQETSGEYNIQAWTGFNFPGRGTTYSNFKWQWFHFDGTDWDQSRSLSRIFKFTGKAWDWEVSSENGNYDYLMYADIDYDHPDVVNEMKKWGVWYANEVGLDGYRLDAVKHIKFSFLKDWVDNARAATGKEMFTVGEYWQNDLGALNNYLAKVNYNQSLFDAPLHYNFYAASTGGGYYDMRNILNNTLVASNPTKAVTLVENHDTQPGQSLESTVQPWFKPLAYAFILTRSGGYPSVFYGDMYGTKGTTTREIPALKSKIEPLLKARKDYAYGTQRDYIDNPDVIGWTREGDSTKAKSGLATVITDGPGGSKRMYVGTSNAGEIWYDLTGNRTDKITIGSDGYATFPVNGGSVSVWVQQ

SEQ ID NO: 36349 - protein, 480 aa, Cytophaga sp.
NGTMMQYFEWYVPNDGQQWNRLRTDAPYLSSVGITAVWTPPAYKGTSQADVGYGPYDLYDLGEFNQKGTVRTKYGTKGELKSAVNTLHSNGIQVYGDVVMNHKAGADYTENVTAVEVNPSNRNQETSGEYNIQAWTGFNFPGRGTTYSNFKWQWFHFDGTDWDQSRSLSRIFKFTGKAWDWEVSSENGNYDYLMYADIDYDHPDVVNEMKKWGVWYANEVGLDGYRLDAVKHIKFSFLKDWVDNARAATGKEMFTVGEYWINDLGALNNYLAKVNYNQSLFDAPLHYNFYAASTGGGYYDMRNILNNTLVASNPTKAVTLVENHDTQPGQSLESTVQPWFKPLAYAFILTRSGGYPSVFYGDMYGTKGTTTREIPALKSKIEPLLKARKDYAYGTQRDYIDNPDVIGWTREGDSTKAKSGLATVITDGPGGSKRMYVGTSNAGEIWYDLTGNRTDKITIGSDGYATFPVNGGSVSVWVQQ

SEQ ID NO: 36350 - protein, 480 aa, Cytophaga sp.
NGTMMQYFEWYVPNDGQQWNRLRTDAPYLSSVGITAVWTPPAYKGTSQADVGYGPYDLYDLGEFNQKGTVRTKYGTKGELKSAVNTLHSNGIQVYGDVVMNHKAGADYTENVTAVEVNPSNRNQETSGEYNIQAWTGFNFPGRGTTYSNFKWQWFHFDGTDWDQDRSLSRIFKFTGKAWDWEVSSENGNYDYLMYADIDYDHPDVVNEMKKWGVWYANEVGLDGYRLDAVKHIKFSFLKDWVDNARAATGKEMFTVGEYWQNDLGALNNYLAKVNYNQSLFDAPLHYNFYAASTGGGYYDMRNILNNTLVASNPTKAVTLVENHDTQPGQSLESTVQPWFKPLAYAFILTRSGGYPSVFYGDMYGTKGTTTREIPALKSKIEPLLKARKDYAYGTQRDYIDNPDVIGWTREGDSTKAKSGLATVITDGPGGSKRMYVGTSNAGEIWYDLTGNRTDKITIGSDGYATFPVNGGSVSVWVQQ

SEQ ID NO: 36351 - protein, 480 aa, Cytophaga sp.
NGTMMQYFEWYVPNDGQQWNRLRTDAPYLSSVGITAVWTPPAYKGTSQADVGYGPYDLYDLGEFNQKGTVRTKYGTKGELKSAVNTLHSNGIQVYGDVVMNHKGGADYTENVTAVEVNPSNRNQETSGEYNIQAWTGFNFPGRGTTYSNFKWQWFHFDGTDWDQSRSLSRIFKFTGKAWDWEVSSENGNYDYLMYADIDYDHPDVVNEMKKWGVWYANEVGLDGYRLDAVKHIKFSFLKDWVDNARAATGKEMFTVGEYWQNDLGALNNYLAKVNYNQSLFDAPLHYNFYAASTGGGYYDMRNILNNTLVASNPTKAVTLVENHDTQPGQSLESTVQPWFKPLAYAFILTRSGGYPSVFYGDMYGTKGTTTREIPALKSKIEPLLKARKDYAYGTQRDYIDNPDVIGWTREGDSTKAKSGLATVITDGPGGSKRMYVGTSNAGEIWYDLTGNRTDKITIGSDGYATFPVNGGSVSVWVQQ

SEQ ID NO: 36352 - protein, 480 aa, Cytophaga sp.
NGTMMQYFEWYVPNDGQQWNRLRTDAPYLSSVGITAVWTPPAYKGTSQADVGYGPYDLYDLGEFNQKGTVRTKYGTKGELKSAVNTLHSNGIQVYGDVVMNHKAGADYTENVTAVEVNPSNRNQETSGEYNIQAWTGFNFPGRGTTYSNFKWQWFHFDGTDWDQSRSLSRIFKFTGKAWDWEVSSENGNYDYLMYADIDYDHPDVVNEMKKWGVWYANEVGLDGYRLDAVKHIKFSFLKDWVDNARAATGKEMFTVGEYWQNDLGALNNYLAKVNYNQSLFDAPLHYNFYAASTGGGYYDMRNILNNTLVASNPTKAVTLVENHDTQPGQSLESTVQPWFKPLAYAFILTRSGGYPSVFYGDMYGTKGTTTREIPALKSKIECLLKARKDYAYGTQRDYIDNPDVIGWTREGDSTKAKSGLATVITDGPGGSKRMYVGTSNAGEIWYDLTGNRTDKITIGSDGYATFPVNGGSVSVWVQQ

SEQ ID NO: 36353 - protein, 480 aa, Cytophaga sp.
NGTMMQYFEWYVPNDGQQWNRLRTDAPYLSSVGITAVWTPPAYKGTSQADVGYGPYDLYDLGEFNQKGTVRTKYGTKGELKSAVNTLHSNGIQVYGDVVMNHKAGADYTENVTAVEVNPSNRNQETSGEYNIQAWTGFNFPGRGTTYSNFKWQWFHFDGTDWDQSRSLSRIFKFTGKAWDWEVSSENGNYDYLMYADIDYDHPDVVNEMKKWGVWYANEVGLDGYRLDAVKHIKFSFLKDWVDNARAATGKEMFTVGEYWQNDLGALNNYLAKVNYNQSLFDAPLHYNFYAASTGGGYYDMRNILNNTLVASNPTKAVTLVENHDTQPGQSLESTVQPWFKPLAYAFILTRSGGYPSVFYGDMYGTKGTTTREIPALKSKIESLLKARKDYAYGTQRDYIDNPDVIGWTREGDSTKAKSGLATVITDGPGGSKRMYVGTSNAGEIWYDLTGNRTDKITIGSDGYATFPVNGGSVSVWVQQ

SEQ ID NO: 36354 - protein, 480 aa, Cytophaga sp.
NGTMMQYFEWYVPNDGQQWNRLRTDAPYLSSVGITAVWTPPAYKGTSQADVGYGPYDLYDLGEFNQKGTVRTKYGTKGELKSAVNTLHSNGIQVYGDVVMNHKAGADYTENVTAVEVNPSNRNQETSGEYNIQAWTGFNFPGRGTTYSNFKWQWFHFDGTDWDQSRSLSRIFKFTGKAWDWEVSSTNGNYDYLMYADIDYDHPDVVNEMKKWGVWYANEVGLDGYRLDAVKHIKFSFLKDWVDNARAATGKEMFTVGEYWQNDLGALNNYLAKVNYNQSLFDAPLHYNFYAASTGGGYYDMRNILNNTLVASNPTKAVTLVENHDTQPGQSLESTVQPWFKPLAYAFILTRSGGYPSVFYGDMYGTKGTTTREIPALKSKIEPLLKARKDYAYGTQRDYIDNPDVIGWTREGDSTKAKSGLATVITDGPGGSKRMYVGTSNAGEIWYDLTGNRTDKITIGSDGYATFPVNGGSVSVWVQQ

SEQ ID NO: 36355 - protein, 480 aa, Cytophaga sp.
NGTMMQYFEWYVPNDGQQWNRLRTDAPYLSSVGITAVWTPPAYKGTSQADVGYGPYDLYDLGEFNQKGTVRTKYGTKGELKSAVNTLHSNGIQVYGDVVMNHKAGADYTENVTAVEVNPSNRNQETSGEYNIQAWTGFNFPGRGTTYSNFKWQWFHFDGTDWDQSRSLSRIFKFTGKAWDWEVSSENGNYDYLMYADIDYDHPDVVNEMKKWGVWYANEVGLDGYRLDAVKHIKFLFLKDWVDNARAATGKEMFTVGEYWQNDLGALNNYLAKVNYNQSLFDAPLHYNFYAASTGGGYYDMRNILNNTLVASNPTKAVTLVENHDTQPGQSLESTVQPWFKPLAYAFILTRSGGYPSVFYGDMYGTKGTTTREIPALKSKIEPLLKARKDYAYGTQRDYIDNPDVIGWTREGDSTKAKSGLATVITDGPGGSKRMYVGTSNAGEIWYDLTGNRTDKITIGSDGYATFPVNGGSVSVWVQQ

SEQ ID NO: 36356 - protein, 480 aa, Cytophaga sp.
NGTMMQYFEWYVPNDGQQWNRLRTDAPYLSSVGITAVWTPPAYKGTSQADVGYGPYDLYDLGEFNQKGTVRTKYGTKGELKSAVNTLHSNGIQVYGDVVMNHKAGADYTENVTAVEVNPSNRNQETSGEYNIQAWTGFNFPGRGTTYSNFKWQWFHFDGTDWDQSRSLSRIFKFTGKAWDWEVSSENGNYDYLMYADIDYDHTDVVNEMKKWGVWYANEVGLDGYRLDAVKHIKFSFLKDWVDNARAATGKEMFTVGEYWQNDLGALNNYLAKVNYNQSLFDAPLHYNFYAASTGGGYYDMRNILNNTLVASNPTKAVTLVENHDTQPGQSLESTVQPWFKPLAYAFILTRSGGYPSVFYGDMYGTKGTTTREIPALKSKIEPLLKARKDYAYGTQRDYIDNPDVIGWTREGDSTKAKSGLATVITDGPGGSKRMYVGTSNAGEIWYDLTGNRTDKITIGSDGYATFPVNGGSVSVWVQQ

SEQ ID NO: 36357 - protein, 480 aa, Cytophaga sp.
NGTMMQYFEWYVPNDGQQWNRLRTDAPYLSSVGITAVWTPPAYKGTSQADVGYGPYDLYDLGEFNQKGTVRTKYGTKGELKSAVNTLHSNGIQVYGDVVMNHKAGADYTENVTAVEVNPSNRNQETSGEYNIQAWTGFNFPGRGTTYSNFKWQWFHFDGTDWDQSRSLSRIFKFTGKAWDWEVSSENGNYDYLMYADIDYDHPDVVNEMKKWGVWYANEVGLDGYRLDAVKHIKFSFLKDWVDNARAATGKEMFTVGEYWQNDLGALNNYLAKVNYNQSLFDAPLHYNFYAASTGGGYYDMRNILNNTLVASNPTKAVTLVENHDTQPGQSLESTVQPWFKPLAYAFILTRSGGYPSVFYGDMYGTKGTTTREIPALKSKIEPLLKARKDYAYGTQRDYIDNPDVIGWTREGDSTKAKSGLATVITDGPGGSKRMYVGTSNAFEIWYDLTGNRTDKITIGSDGYATFPVNGGSVSVWVQQ

SEQ ID NO: 36358 - protein, 480 aa, Cytophaga sp.
NGTMMQYFEWYVPNDGQQWNRLRTDAPYLSSVGITAVWTPPAYKGTSQADVGYGPYDLYDLGEFNQKGTVRTKYGTKGELKSAVNTLHSNGIQVYGDVVMNHKAGADYTENVTAVEVNPSNRNQETSGEYNIQAWTGFNFPGRGTTYSNFKWQWFHFDGTDWDQSRSLSRIFKFTGKAWDWEVSSENGNYDYLMYLDIDYDHPDVVNEMKKWGVWYANEVGLDGYRLDAVKHIKFSFLKDWVDNARAATGKEMFTVGEYWQNDLGALNNYLAKVNYNQSLFDAPLHYNFYAASTGGGYYDMRNILNNTLVASNPTKAVTLVENHDTQPGQSLESTVQPWFKPLAYAFILTRSGGYPSVFYGDMYGTKGTTTREIPALKSKIEPLLKARKDYAYGTQRDYIDNPDVIGWTREGDSTKAKSGLATVITDGPGGSKRMYVGTSNAGEIWYDLTGNRTDKITIGSDGYATFPVNGGSVSVWVQQ

SEQ ID NO: 36359 - protein, 480 aa, Cytophaga sp.
NGTMMQYFEWYVPNDGQQWNRLRTDAPYLSSVGITAVWTPPAYKGTSQADVGYGPYDLYDLGEFNQKGTVRTKYGTKGELKSAVNTLHSNGIQVYGDVVMNHKAGADYTENVTAVEVNPSNRNQETSGEYNIQAATGFNFPGRGTTYSNFKWQWFHFDGTDWDQSRSLSRIFKFTGKAWDWEVSSENGNYDYLMYADIDYDHPDVVNEMKKWGVWYANEVGLDGYRLDAVKHIKFSFLKDWVDNARAATGKEMFTVGEYWQNDLGALNNYLAKVNYNQSLFDAPLHYNFYAASTGGGYYDMRNILNNTLVASNPTKAVTLVENHDTQPGQSLESTVQPWFKPLAYAFILTRSGGYPSVFYGDMYGTKGTTTREIPALKSKIEPLLKARKDYAYGTQRDYIDNPDVIGWTREGDSTKAKSGLATVITDGPGGSKRMYVGTSNAGEIWYDLTGNRTDKITIGSDGYATFPVNGGSVSVWVQQ

SEQ ID NO: 36360 - protein, 480 aa, Cytophaga sp.
NGTMMQYFEWYVPNDGQQWNRLRTDAPYLSSVGITAVWTPPAYKGTSQADVGYGPYDLYDLGEFNQKGTVRTKYGTKGELKSAVNTLHSNGIQVYGDVVMNHKAGADYTENVTAVEVNPSNRNQETSGPYNIQAWTGFNFPGRGTTYSNFKWQWFHFDGTDWDQSRSLSRIFKFTGKAWDWEVSSENGNYDYLMYADIDYDHPDVVNEMKKWGVWYANEVGLDGYRLDAVKHIKFSFLKDWVDNARAATGKEMFTVGEYWQNDLGALNNYLAKVNYNQSLFDAPLHYNFYAASTGGGYYDMRNILNNTLVASNPTKAVTLVENHDTQPGQSLESTVQPWFKPLAYAFILTRSGGYPSVFYGDMYGTKGTTTREIPALKSKIEPLLKARKDYAYGTQRDYIDNPDVIGWTREGDSTKAKSGLATVITDGPGGSKRMYVGTSNAGEIWYDLTGNRTDKITIGSDGYATFPVNGGSVSVWVQQ

SEQ ID NO: 36361 - protein, 480 aa, Cytophaga sp.
NGTMMQYFEWYVPNDGQQWNRLRTDAPYLSSVGITAVWTPPAYKGTSQADVGYGPYDLYDLGEFNQKGTVRTKYGTKGELKSAVNTLHSNGIQVYGDVVMNHKAGADYTENVTAVEVNPSNRNQETSGEYNIQAWTGFNFPGRGTTYSNFKWQWFHFDGTDWDQSRSLSRIFKFTGKAWDWEVSSENGNYDYLMYADIDYDHPDVVNEMKKWGVWYANEVGLDGYRLDAVKHIKFSFLKDWVDNARAATGKEMFTVGEYWQNDLGALNNYLAKVNYNQSLFDAPLHYNFYAASTGGGYYDMRNILNNTLVASNPTKAVTLVENHDTQPGQSLESTVQPWFKPLAYAFILTRSGGYPSVFYGDMYGTKGTTTREIPALKSKIEPLLKARKDYAYGTQRDYIDNPDVIGWTREGDSTKAKSGLATVITDGPGGSKRMYVGTSNAGEIWYDLTGNRTDKITIGNDGYATFPVNGGSVSVWVQQ

SEQ ID NO: 36362 - protein, 480 aa, Cytophaga sp.
NGTMMQYFEWYVPNDGQQWNRLRTDAPYLSSVGITAVWTPPAYKGTSQADVGYGPYDLYDLGEFNQKGTVRTKYGTKGELKSAVNTLHSNGIQVYGDVVMNHKAGADYTENVTAVEVNPSNRNQETSGEYNIQAWTGFNFPGRGTTYSNFKWQWFHFDGTDWDQSRSLSRIFKFTGKKWDWEVSSENGNYDYLMYADIDYDHPDVVNEMKKWGVWYANEVGLDGYRLDAVKHIKFSFLKDWVDNARAATGKEMFTVGEYWQNDLGALNNYLAKVNYNQSLFDAPLHYNFYAASTGGGYYDMRNILNNTLVASNPTKAVTLVENHDTQPGQSLESTVQPWFKPLAYAFILTRSGGYPSVFYGDMYGTKGTTTREIPALKSKIEPLLKARKDYAYGTQRDYIDNPDVIGWTREGDSTKAKSGLATVITDGPGGSKRMYVGTSNAGEIWYDLTGNRTDKITIGSDGYATFPVNGGSVSVWVQQ

SEQ ID NO: 36363 - protein, 480 aa, Cytophaga sp.
NGTMMQYFEWYVPNDGQQWNRLRTDAPYLSSVGITAVWTPPAYKGTSQADVGYGPYDLYDLGEFNQKGTVRTKYGTKGELKSAVNTLHSNGIQVYGDVVMNHKAGADYTENVTAVEVNPSNRNQETSGEYNIQAWTGFNFPGRGTTYDNFKWQWFHFDGTDWDQSRSLSRIFKFTGKAWDWEVSSENGNYDYLMYADIDYDHPDVVNEMKKWGVWYANEVGLDGYRLDAVKHIKFSFLKDWVDNARAATGKEMFTVGEYWQNDLGALNNYLAKVNYNQSLFDAPLHYNFYAASTGGGYYDMRNILNNTLVASNPTKAVTLVENHDTQPGQSLESTVQPWFKPLAYAFILTRSGGYPSVFYGDMYGTKGTTTREIPALKSKIEPLLKARKDYAYGTQRDYIDNPDVIGWTREGDSTKAKSGLATVITDGPGGSKRMYVGTSNAGEIWYDLTGNRTDKITIGSDGYATFPVNGGSVSVWVQQ

SEQ ID NO: 36364 - protein, 480 aa, Cytophaga sp.
NGTMMQYFEWYVPNDGQQWNRLRTDAPYLSSVGITAVWTPPAYKGTSQADVGYGPYDLYDLGEFNQKGTVRTKYGTKGELKSAVNTLHSNGIQVFGDVVMNHKAGADYTENVTAVEVNPSNRNQETSGEYNIQAWTGFNFPGRGTTYSNFKWQWFHFDGTDWDQSRSLSRIFKFTGKAWDWEVSSENGNYDYLMYADIDYDHPDVVNEMKKWGVWYANEVGLDGYRLDAVKHIKFSFLKDWVDNARAATGKEMFTVGEYWQNDLGALNNYLAKVNYNQSLFDAPLHYNFYAASTGGGYYDMRNILNNTLVASNPTKAVTLVENHDTQPGQSLESTVQPWFKPLAYAFILTRSGGYPSVFYGDMYGTKGTTTREIPALKSKIEPLLKARKDYAYGTQRDYIDNPDVIGWTREGDSTKAKSGLATVITDGPGGSKRMYVGTSNAGEIWYDLTGNRTDKITIGSDGYATFPVNGGSVSVWVQQ

SEQ ID NO: 36365 - protein, 480 aa, Cytophaga sp.
NGTMMQYFEWYVPNDGQQWNRLRTDAPYLSSVGITAVWTPPAYKGTSQADVGYGPYDLYDLGEFNQKGTVRTKYGTKGELKSAVNTLHSNGIQVYGDVVMNHKAGADYTENVTAVEVNPSNRNQETSGEYNIQAWTGFNFPGRGTTYSNFKWQWFHFDGTDWDQSRSLTRIFKFTGKAWDWEVSSENGNYDYLMYADIDYDHPDVVNEMKKWGVWYANEVGLDGYRLDAVKHIKFSFLKDWVDNARAATGKEMFTVGEYWQNDLGALNNYLAKVNYNQSLFDAPLHYNFYAASTGGGYYDMRNILNNTLVASNPTKAVTLVENHDTQPGQSLESTVQPWFKPLAYAFILTRSGGYPSVFYGDMYGTKGTTTREIPALKSKIEPLLKARKDYAYGTQRDYIDNPDVIGWTREGDSTKAKSGLATVITDGPGGSKRMYVGTSNAGEIWYDLTGNRTDKITIGSDGYATFPVNGGSVSVWVQQ

SEQ ID NO: 36366 - protein, 480 aa, Cytophaga sp.
NGTMMQYFEWYVPNDGQQWNRLRTDAPYLSSVGITAVWTPPAYKGTSQADVGYGPYDLYDLGEFNQKGTVRTKYGTKGELKSAVNTLHSNGIQVYGDVVMNHKAGADYTENVTAVEVNPSNRNQETSGEYNIQAWTGFNFPGRGTTYSNFKWQWFHFDGTDWDQSRSLSRIFKFTGKAWDWEVSSENGNYDYLMYADIDYDHPDVVNEMKKWGVWYANEVGLDGYRLDAVKHIKFSFLKDWVDNARAATGKEMFTVGEYWQNDLGALNNYLAKVNYNQSLFDAPLHYNFYAASTGGGYYDMRNILNNTLVASNPTKAVTLVENHDTQPGQSLESTVQPWFKPLAYAFILTRSGGYPSLFYGDMYGTKGTTTREIPALKSKIEPLLKARKDYAYGTQRDYIDNPDVIGWTREGDSTKAKSGLATVITDGPGGSKRMYVGTSNAGEIWYDLTGNRTDKITIGSDGYATFPVNGGSVSVWVQQ

SEQ ID NO: 36367 - protein, 480 aa, Cytophaga sp.
NGTMMQYFEWYVPNDGQQWNRLRTDAPYLSSVGITAVWTPPAYKGTSQADVGYGPYDLYDLGEFNQKGTVRTKYGTKGELKSAVNTLHSNGIQVYGDVVMNHKAGADYTENVTAVEVNPSNRNQETSGEYNIQAWTGFNFPGRGTTYSNFKWQWFHFDGTDWDQSRSLSRIFKFTGKAWDWEVSSENGNYDYLMYADIDYDHPDVVNEMKKWGVWYANEVGLDGYRLDAVKHIKFSFLKDWVDNARAQTGKEMFTVGEYWQNDLGALNNYLAKVNYNQSLFDAPLHYNFYAASTGGGYYDMRNILNNTLVASNPTKAVTLVENHDTQPGQSLESTVQPWFKPLAYAFILTRSGGYPSVFYGDMYGTKGTTTREIPALKSKIEPLLKARKDYAYGTQRDYIDNPDVIGWTREGDSTKAKSGLATVITDGPGGSKRMYVGTSNAGEIWYDLTGNRTDKITIGSDGYATFPVNGGSVSVWVQQ

SEQ ID NO: 36368 - protein, 480 aa, Cytophaga sp.
NGTMMQYFEWYVPNDGQQWNRLRTDAPYLSSVGINAVWTPPAYKGTSQADVGYGPYDLYDLGEFNQKGTVRTKYGTKGELKSAVNTLHSNGIQVYGDVVMNHKAGADYTENVTAVEVNPSNRNQETSGEYNIQAWTGFNFPGRGTTYSNFKWQWFHFDGTDWDQSRSLSRIFKFTGKAWDWEVSSENGNYDYLMYADIDYDHPDVVNEMKKWGVWYANEVGLDGYRLDAVKHIKFSFLKDWVDNARAATGKEMFTVGEYWQNDLGALNNYLAKVNYNQSLFDAPLHYNFYAASTGGGYYDMRNILNNTLVASNPTKAVTLVENHDTQPGQSLESTVQPWFKPLAYAFILTRSGGYPSVFYGDMYGTKGTTTREIPALKSKIEPLLKARKDYAYGTQRDYIDNPDVIGWTREGDSTKAKSGLATVITDGPGGSKRMYVGTSNAGEIWYDLTGNRTDKITIGSDGYATFPVNGGSVSVWVQQ

SEQ ID NO: 36369 - protein, 480 aa, Cytophaga sp.
NGTMMQYFEWYVPNDGQQWNRLRTDAPYLSSVGITAVWTPPAYKGTSQADVGYGPYDLYDLGEFNQKGTVRTKYGTKGELKSAVNTLHSNGIQVYGDVVMNHKAGADYTENVTAVEVNPSNRNQETSGEYNIQAWTGFNFPGRGTTYSNFKWQWFHFDGTDWDQSRSLSRIFKFTGKAWDWEVSSENGNYDYLMYADIDYDHPDVVNEMKKWGVWYANEVGLDGYRLDAVKHIKFSFLKDWVDNARAATGKEMFTVGEYWQNDLGALNNYLAKVNYNQSLFDAPLHYNFYAASTGGGYYDMRNILNNTLVASNPTKAVTLVENHDTQPGQSLESTVQPWFKPLAYAFILTRSGGYPSVFYGDMYGTKGTTTREIPALKSKIEPLLKARKDYAYGTQRDYIDNPDVIGWTRCGDSTKAKSGLATVITDGPGGSKRMYVGTSNAGEIWYDLTGNRTDKITIGSDGYATFPVNGGSVSVWVQQ

SEQ ID NO: 36370 - protein, 480 aa, Cytophaga sp.
NGTMMQYFEWYVPNDGQQWNRLRTDAPYLSSVGITAVWTPPAYKGTSQADVGYGPYDLYDLGEFNQKGTVRTKYGTKGELKSAVNTLHSNGIQVYGDVVMNHKAGADYCENVTAVEVNPSNRNQETSGEYNIQAWTGFNFPGRGTTYSNFKWQWFHFDGTDWDQSRSLSRIFKFTGKAWDWEVSSENGNYDYLMYADIDYDHPDVVNEMKKWGVWYANEVGLDGYRLDAVKHIKFSFLKDWVDNARAATGKEMFTVGEYWQNDLGALNNYLAKVNYNQSLFDAPLHYNFYAASTGGGYYDMRNILNNTLVASNPTKAVTLVENHDTQPGQSLESTVQPWFKPLAYAFILTRSGGYPSVFYGDMYGTKGTTTREIPALKSKIEPLLKARKDYAYGTQRDYIDNPDVIGWTREGDSTKAKSGLATVITDGPGGSKRMYVGTSNAGEIWYDLTGNRTDKITIGSDGYATFPVNGGSVSVWVQQ

SEQ ID NO: 36371 - protein, 480 aa, Cytophaga sp.
NGTMMQYFEWYVPNDGQQWNRLRTDAPYLSSVGITAVWTPPAYKGTSQADVGYGPYDLYDLGEFNQKGTVRTKYGTKGELKSAVNTLHSNGIQVYGDVVMNHKAGADYTENVTAVEVNPSNRNQETSGEYNIQAWTGFNFPGRGTTYSNFKWQWFHFDGTDWDQSRSLSRIFKFTGKAWDWEVSSENGNYDYLMYADIDYDHPDVVNEMKKWGVWYANEVGLDGYRLDAVKHIKFSFLKDWVDNARAATGKEMFTVGEYWQNDLGALNNYLAKVNYNQSLFDAPLHYNFYAASTGGGYYDMRNILNNTLVASNPTKAVTLVENHDTQPGQSLESTVQPWFKPLAYAFILTRSGGYPSVFYGDMYGTKGTTTREIPALKSKIEPLLKARKDYAYGTQRDYIDNPDVIGWTREGDSTKAKSGLATVITDGPGGSKRMYVGTSNAGEIWYDLTGNRTDKITIGSDGYATFPVDGGSVSVWVQQ

SEQ ID NO: 36372 - protein, 480 aa, Cytophaga sp.
NGTMMQYFEWYVPNDGQQWNRLRTDAPYLSSVGITAVWTPPAYKGTSQADVGYGPYDLYDLGEFNQKGTVRTKYGTKGELKSAVNTLHSNGIQVYGDVVMNHKAGADYTENVTAVEVNPSNRNQETSGEYNIQAWTGFNFPGRGTTYSNFKWQWFHFDGTDWDQSRSLSRIFKFTGKAWDWEVSSENGNYDYLMYADIDYDHPDVVNEMKKWGVWYANEVGLDGYRLDAVKHIKFSFLKDWVDNARAATGKEMFTVGEYWQNDLGALNNYLAKVNYNQMLFDAPLHYNFYAASTGGGYYDMRNILNNTLVASNPTKAVTLVENHDTQPGQSLESTVQPWFKPLAYAFILTRSGGYPSVFYGDMYGTKGTTTREIPALKSKIEPLLKARKDYAYGTQRDYIDNPDVIGWTREGDSTKAKSGLATVITDGPGGSKRMYVGTSNAGEIWYDLTGNRTDKITIGSDGYATFPVNGGSVSVWVQQ

SEQ ID NO: 36373 - protein, 480 aa, Cytophaga sp.
NGTMMQYFEWYVPNDGQQWNRLRTDAPYLSSVGITAVWTPPAYKGTSQADVGYGPYDLYDLGEFNQKGTVRTKYGTKGELKSAVNTLHSNGIQVYGDVVMNHKAGADYTENVTAVEVNPSNRNQETSGEYNIQAWTGFNFPGRGTTYSNFKWQWFHFDGTDWDQSRSLSRIFKFTGKAWDWEVSSENGNYDYLMYADIDYDHHDVVNEMKKWGVWYANEVGLDGYRLDAVKHIKFSFLKDWVDNARAATGKEMFTVGEYWQNDLGALNNYLAKVNYNQSLFDAPLHYNFYAASTGGGYYDMRNILNNTLVASNPTKAVTLVENHDTQPGQSLESTVQPWFKPLAYAFILTRSGGYPSVFYGDMYGTKGTTTREIPALKSKIEPLLKARKDYAYGTQRDYIDNPDVIGWTREGDSTKAKSGLATVITDGPGGSKRMYVGTSNAGEIWYDLTGNRTDKITIGSDGYATFPVNGGSVSVWVQQ

SEQ ID NO: 36374 - protein, 480 aa, Cytophaga sp.
NGTMMQYFEWYVPNDGQQWNRLRTDAPYLSSVGITAVWTPPAYKGTSQADVGYGPYDLYDLGEFNQKGTVRTKYGTKGELKSAVNTLHSNGIQVYGDVVMNHKAGADYTENVTAVEVNPSNRNQETSGEYNIQAWTGFNFPGRGTTYSNFKWQWFHFDGTDWDQSRSLSRIFKFTGKAWDWEVSSENGNYDYLMYADIDYDHPDVVNEMKKWGVWYANEVGLDGYRLDAVKHIKFSFLKDWVDNARAATGKEMFTVGEYWTNDLGALNNYLAKVNYNQSLFDAPLHYNFYAASTGGGYYDMRNILNNTLVASNPTKAVTLVENHDTQPGQSLESTVQPWFKPLAYAFILTRSGGYPSVFYGDMYGTKGTTTREIPALKSKIEPLLKARKDYAYGTQRDYIDNPDVIGWTREGDSTKAKSGLATVITDGPGGSKRMYVGTSNAGEIWYDLTGNRTDKITIGSDGYATFPVNGGSVSVWVQQ

SEQ ID NO: 36375 - protein, 480 aa, Cytophaga sp.
NGTMMQYFEWYVPNDGQQWNRLRTDAPYLSSVGITAVWTPPAYKGTSQADVGYGPYDLYDLGEFNQKGTVRTKYGTKGELKSAVNTLHSNGIQVYGDVVMNHKAGADYTENVTAVEVNPSNRNQETSGEYNIQAWTGFNFPGRGTTYSNFKWQWFHFDGTDWDQSRSLSRIFKFTGKAWDWEVSSENGNYDYLMYADIDYDHPDVVNEMKKWGVWYANEVGLDGYRLDAVKHIKFSFLKDWVDNARAATGKEMFTVGEYWQNDLGALNNYLAKVNYNQSLFDAPLHYNFYAASTGGGYYDMRNILNNTLVASNPTKAVTLVENHDTQPGQSLESTVQPWFKPLAYAFILTRSGGYPSVFYGDMYGTKGTTTREIPALKSKIEPLLLARKDYAYGTQRDYIDNPDVIGWTREGDSTKAKSGLATVITDGPGGSKRMYVGTSNAGEIWYDLTGNRTDKITIGSDGYATFPVNGGSVSVWVQQ

SEQ ID NO: 36376 - protein, 480 aa, Cytophaga sp.
NGTMMQYFEWYVPNDGQQWNRLRTDAPYLSSVGITAVWTPPAYKGTSQADVGYGPYDLYDLGEFNQKGTVRTKYGTKGELKSAVNTLHSNGIQVYGDVVMNHKAGADYTENVTAVEVNPSNRNQYTSGEYNIQAWTGFNFPGRGTTYSNFKWQWFHFDGTDWDQSRSLSRIFKFTGKAWDWEVSSENGNYDYLMYADIDYDHPDVVNEMKKWGVWYANEVGLDGYRLDAVKHIKFSFLKDWVDNARAATGKEMFTVGEYWQNDLGALNNYLAKVNYNQSLFDAPLHYNFYAASTGGGYYDMRNILNNTLVASNPTKAVTLVENHDTQPGQSLESTVQPWFKPLAYAFILTRSGGYPSVFYGDMYGTKGTTTREIPALKSKIEPLLKARKDYAYGTQRDYIDNPDVIGWTREGDSTKAKSGLATVITDGPGGSKRMYVGTSNAGEIWYDLTGNRTDKITIGSDGYATFPVNGGSVSVWVQQ

SEQ ID NO: 36377 - protein, 480 aa, Cytophaga sp.
NGTMMQYFEWYVPNDGQQWNRLRTDAPYLSSVGITAVWTPPAYKGTSQADVGYGPYDLYDLGEFNQKGTVRTKYGTKGELKSAVNTLHSNGIQVYGDVVMNHKAGADYTENVTAVEVNPSNRNQETSGEYNIQAWTGFNFPGRGTTYSNFKWQWFHFDGTDWDQSRSLSRIFKFTGKAWDWEVSSENGNYDYLMYADIDYDHPDVVNEMKKWGVWYANEVGLDGYRLDAVKHIKFSFLKDWVDNARAATGKEMFTVGEYWQNDLGALNNYLAKVNYNQSLFDAPLHYNFYAASTGGGYYDMRNILNNTLVASNPTKAVTLVENHDTQPGQSLESTVQPWFKPLAYAFILTRSGGYPSVFYGDMYGTKGTTTREIPALKSKIEPLLKARKDYAYGTQRDYIDNPDVIGWTREGDSTKAKSGLATVCTDGPGGSKRMYVGTSNAGEIWYDLTGNRTDKITIGSDGYATFPVNGGSVSVWVQQ

SEQ ID NO: 36378 - protein, 480 aa, Cytophaga sp.
NGTMMQYFEWYVPNDGQQWNRLRTDAPYLSSVGITAVWTPPAYKGTSQADVGYGPYDLYDLGEFNQKGTVRTKYGTKGELKSAVNTLHSNGIQVYGDVVMNHKAGADYTENVTAVEVNPSNRNQETSGEYNIQAWTGFNFPGRGTTYSNFKWQWFHFDGTDWDQSRSLSRIFKFTGKAWDWEVSSENGNYDYLMYADIDYDHPDVVNEMKKWGVWYANEVGLDGYRLDAVKHIKFSFLKDWVDNARAATGKEMFTVGEYWQNDLGALNNYLAKVNYNQSLFDAPLHYNFYAASTGGGYYDMRNILNNTLVASNPTKAVTLVENHDTQPGQSLESTVQPWFKPLAYAFILTRSGGYPSVFYGDMYGTKGTTTREIPALKSKIEPLLKARKDYAYGTQRDYIDNPDVIGWTREGDSTKAWSGLATVITDGPGGSKRMYVGTSNAGEIWYDLTGNRTDKITIGSDGYATFPVNGGSVSVWVQQ

SEQ ID NO: 36379 - protein, 480 aa, Cytophaga sp.
NGTMMQYFEWYVPNDGQQWNRLRTDAPYLSSVGITAVWTPPAYKGTSQADVGYGPYDLYDLGEFNQKGTVRTKYGTKGELKSAVNTLHSNGIQVYGDVVMNHKAGADYTENVTAVEVNPSNRNQETSGEYNIQAWTGFNFPGRGTTYSNFKWQWFHFDGTDWDQSRSLSRIFKFTGKAWDWEVSSENGNYDYLMYADIDYDHPDVVNEMKKWGVWYANEVGLDGYRLDAVKHIKFSFLKDWVDNARAATGKFMFTVGEYWQNDLGALNNYLAKVNYNQSLFDAPLHYNFYAASTGGGYYDMRNILNNTLVASNPTKAVTLVENHDTQPGQSLESTVQPWFKPLAYAFILTRSGGYPSVFYGDMYGTKGTTTREIPALKSKIEPLLKARKDYAYGTQRDYIDNPDVIGWTREGDSTKAKSGLATVITDGPGGSKRMYVGTSNAGEIWYDLTGNRTDKITIGSDGYATFPVNGGSVSVWVQQ

SEQ ID NO: 36380 - protein, 480 aa, Cytophaga sp.
NGTMMQYFEWYVPNDGQQWNRLRTDAPYLSSVGITAVWTPPAYKGTSQADVGYGPYDLYDLGEFNQKGTVRTKYGTKGELKSAVNTLHSNGIQVYGDVVMNHKAGADYTENVTAVEVNPSNRNQETSGEYNIQAWTGFNFPGRGTTYSNFKWQWFHFDGTDWDQSRSLSRIFKFTGKAWDWEVSSENGNYDYLMYADIDYDHPDVVNEMKKWGVWYANEVGLDGYRLDAVKHIKFSFLKDWVDNARAATGKEMFTVGEYWQNDLGALNNYLAKVNYNQSLFDAPLHYNFYAASTGGGYYDMRNILNNTLVASNPTKAVTLVENHDTQPGQSLESTVQPWFKPLAYAFILTRSGGYPSVFYGDMYGTKGTTTREIPALKSKIEPLLKARKDYAYGTQRDYIDNPDVIGWTREGDSTKAKSGLATVITDGPGGSKRMYVGTSNAGEIWYDLTGNRTDKITIGSDGYATFPVGGGSVSVWVQQ

SEQ ID NO: 36381 - protein, 480 aa, Cytophaga sp.
NGTMMQYFEWYVPNDGQQWNRLRTDAPYLSSVGITAVWTPPAYKGTSQADVGYGPYDLYDLGEFNQKGTVRTKYGTKGELKSAVNTLHSNGIQVYGDVVMNHKAGADYTENVTAVEVNPSNRNQETSGEYNIQAWTGFNFPGRGTTYSNFEWQWFHFDGTDWDQSRSLSRIFKFTGKAWDWEVSSENGNYDYLMYADIDYDHPDVVNEMKKWGVWYANEVGLDGYRLDAVKHIKFSFLKDWVDNARAATGKEMFTVGEYWQNDLGALNNYLAKVNYNQSLFDAPLHYNFYAASTGGGYYDMRNILNNTLVASNPTKAVTLVENHDTQPGQSLESTVQPWFKPLAYAFILTRSGGYPSVFYGDMYGTKGTTTREIPALKSKIEPLLKARKDYAYGTQRDYIDNPDVIGWTREGDSTKAKSGLATVITDGPGGSKRMYVGTSNAGEIWYDLTGNRTDKITIGSDGYATFPVNGGSVSVWVQQ

SEQ ID NO: 36382 - protein, 480 aa, Cytophaga sp.
NGTMMQYFEWYVPNDGQQWNRLRTDAPYLSSVGITAVWTPPAYKGTSQADVGYGPYDLYDLGEFNQKGTVRTKYGTKGELKSAVNTLHSNGIQVYGDVVMNHKAGADYTENVTAVEVNPSNRNQETSGEYNIQAWTGFNFPGRGTTYSNFKWQWFHFDGTDWDQSRSLSRIFKFTGKAWDWEVSSENGNYDYLMYADIDYDHPDVVNEMKKWGVWYANEVGLDGYRLDAVKHIKFSFLKDWVDNARAATGKEMFTVGEYWQNDLGALNNYLAKVNYNQSLFDAPLHYNFYAASTGGGYYDMRNILNNTLVASNPTKAVTLVENHDTQPGQSLESTVQPWFKPLAYAFILTRSGGFPSVFYGDMYGTKGTTTREIPALKSKIEPLLKARKDYAYGTQRDYIDNPDVIGWTREGDSTKAKSGLATVITDGPGGSKRMYVGTSNAGEIWYDLTGNRTDKITIGSDGYATFPVNGGSVSVWVQQ

SEQ ID NO: 36383 - protein, 480 aa, Cytophaga sp.
NGTMMQYFEWYVPNDGQQWNRLRTDAPYLSSVGITAVWTPPAYKGTSQADVGYGPYDLYDLGEFNQKGTVRTKYGTKGELKSAVNTLHSNGIQVYGDVVMNHKAGADYTENVTAVEVNPSNRNQETSGEYNIQAWTGFNFPGRGTTYSNFKWQWFHFDGTDWDQSRSLSRIFKFTGKAWDWEVSSENGNYDYLMYADIDYDHPDSVNEMKKWGVWYANEVGLDGYRLDAVKHIKFSFLKDWVDNARAATGKEMFTVGEYWQNDLGALNNYLAKVNYNQSLFDAPLHYNFYAASTGGGYYDMRNILNNTLVASNPTKAVTLVENHDTQPGQSLESTVQPWFKPLAYAFILTRSGGYPSVFYGDMYGTKGTTTREIPALKSKIEPLLKARKDYAYGTQRDYIDNPDVIGWTREGDSTKAKSGLATVITDGPGGSKRMYVGTSNAGEIWYDLTGNRTDKITIGSDGYATFPVNGGSVSVWVQQ

SEQ ID NO: 36384 - protein, 480 aa, Cytophaga sp.
NGTMMQYFEWYVPNDGQQWNRLRTDAPYLSSVGITAVWTPPAYKGTSQADVGYGPYDLYDLGEFNQKNTVRTKYGTKGELKSAVNTLHSNGIQVYGDVVMNHKAGADYTENVTAVEVNPSNRNQETSGEYNIQAWTGFNFPGRGTTYSNFKWQWFHFDGTDWDQSRSLSRIFKFTGKAWDWEVSSENGNYDYLMYADIDYDHPDVVNEMKKWGVWYANEVGLDGYRLDAVKHIKFSFLKDWVDNARAATGKEMFTVGEYWQNDLGALNNYLAKVNYNQSLFDAPLHYNFYAASTGGGYYDMRNILNNTLVASNPTKAVTLVENHDTQPGQSLESTVQPWFKPLAYAFILTRSGGYPSVFYGDMYGTKGTTTREIPALKSKIEPLLKARKDYAYGTQRDYIDNPDVIGWTREGDSTKAKSGLATVITDGPGGSKRMYVGTSNAGEIWYDLTGNRTDKITIGSDGYATFPVNGGSVSVWVQQ

SEQ ID NO: 36385 - protein, 480 aa, Cytophaga sp.
NGTMMQYFEWYVPNDGQQWNRLRTDAPYLSSVGITAVWTPPAYKGTSQADVGYGPYDLYDLGEFNQKGTVRTKYGTKGELKSAVNTLHSNGIQVYGDVVMNHKAGADYTENVTAVEVNPSNRNQETSGEYNIQAWTGFNFPGRGTTYSNFKWQWFHFDGTDWDQSRSLSRIFKFTGKAWDWEVSSENGNYDYLMYADIDYDHPDVVNEMKKWGVWYANEVGLDGYRLDAVKHIKFSFLKDWVDNARAATGKEMFTVGEYWQNDLGALNNYLAKVNYNQSLFDAPLHYNFYAASTGGGYYDMRNILNNTLVASNPTKAVTLVENHDTQPGQSLESTVQPWFKPSAYAFILTRSGGYPSVFYGDMYGTKGTTTREIPALKSKIEPLLKARKDYAYGTQRDYIDNPDVIGWTREGDSTKAKSGLATVITDGPGGSKRMYVGTSNAGEIWYDLTGNRTDKITIGSDGYATFPVNGGSVSVWVQQ

SEQ ID NO: 36386 - protein, 480 aa, Cytophaga sp.
NGTMMQYFEWYVPNDGQQWNRLRTDAPYLSSVGITAVWTPPAYKGTSQADVGYGPYDLYDLGEFNQKGTVRTKYGTKGELKSAVNTLHSNGIQVYGDVVMNHKAGADYTENVTAVEVNPSNRNQETSGEYNIQAWTGFNFPGRGTTYSNFKWQWFHFDGTDWDQSRSLSRIFKFTGKAWDWEVASENGNYDYLMYADIDYDHPDVVNEMKKWGVWYANEVGLDGYRLDAVKHIKFSFLKDWVDNARAATGKEMFTVGEYWQNDLGALNNYLAKVNYNQSLFDAPLHYNFYAASTGGGYYDMRNILNNTLVASNPTKAVTLVENHDTQPGQSLESTVQPWFKPLAYAFILTRSGGYPSVFYGDMYGTKGTTTREIPALKSKIEPLLKARKDYAYGTQRDYIDNPDVIGWTREGDSTKAKSGLATVITDGPGGSKRMYVGTSNAGEIWYDLTGNRTDKITIGSDGYATFPVNGGSVSVWVQQ

SEQ ID NO: 36387 - protein, 480 aa, Cytophaga sp.
NGTMMQYFEWYVPNDGQQWNRLRTDAPYLSSVGITAVWTPPAYKGTSQADVGYGPYDLYDLGEFNQKGTVRTKYGTKGELKSAVNTLHSNGIQVYGDVVMNHKAGADYTENVTAVEVNPSNRNRETSGEYNIQAWTGFNFPGRGTTYSNFKWQWFHFDGTDWDQSRSLSRIFKFTGKAWDWEVSSENGNYDYLMYADIDYDHPDVVNEMKKWGVWYANEVGLDGYRLDAVKHIKFSFLKDWVDNARAATGKEMFTVGEYWQNDLGALNNYLAKVNYNQSLFDAPLHYNFYAASTGGGYYDMRNILNNTLVASNPTKAVTLVENHDTQPGQSLESTVQPWFKPLAYAFILTRSGGYPSVFYGDMYGTKGTTTREIPALKSKIEPLLKARKDYAYGTQRDYIDNPDVIGWTREGDSTKAKSGLATVITDGPGGSKRMYVGTSNAGEIWYDLTGNRTDKITIGSDGYATFPVNGGSVSVWVQQ

SEQ ID NO: 36388 - protein, 480 aa, Cytophaga sp.
NGTMMQYFEWYVPNDGQQWNRLRTDAPYLSSVGITAVWTPPAYKGTSQADVGYGPYDLYDLGEFNQKGTVRTKYGTKGELKSAVNTLHSNGIQVYGDVVMNHKAGADYTENVTAVEVNPSNRNQETSGEYNIQAWTGFNFPGRGTTYSNFKWQWFHFDGTDWDQSRSLSRIFKFTGKAWDWEVSSENGNYDYLMYADIDYDHPDVVNEMKKWGVWYANEVGLDGYRLDAVKHIKFSFLKDWVDNARAATGKEMFTVGEYWQNDLGALNNYLAKVNYNQSLFDAPLHYNFYAASTGGGYYDMRNILNNTLVASNPTKAVTLVENHDTQPGQSLESTVQPWFKPLAYAFILTRSGGYPSVFYGDMYGTKGTTTREIPALKSKIEPLLKARKDYAYGTQRDYIDNPDVIGWTREGDSTKAKSGLATVITDGPGGSKRMYVGTSNAGEIWYDLTGNRTDKITIGSDGYATFPVHGGSVSVWVQQ

SEQ ID NO: 36389 - protein, 480 aa, Cytophaga sp.
NGTMMQYFEWYVPNDGQQWNRLRTDAPYLSSVGITAVWTPPAYKGTSQADVGYGPYDLYDLGEFNQKGTVRTKYGTKGELKSAVNTLHSNGIQVYGDVVMNHKAGADYTENVTAVEVNPSNRNQETSGEYNIQAWTGFNFPGRGTTYSNFKWQWFHFDGTDWDQSRSLSRIFKFTGKAWDWEVSSENGNYDYLMYADIDYDHPDVVNEMKKWGVWYANEVGLDGYRLDAVKHIKFSFLKDWVDNARAATGKEMFTVGEYWQNDLGALNNYLAKVNYNQSLFDAPLHYNFYAASTGGGYYDMRNILNNTLVASNPTKAVTLVENHDTQPGQSLESTVQPWFKPLAYAFILTRSGGYPSVFYGDMYGTKGTTTREIPALKSKIEPLLKARKDYAYGTQRDYIDNPDVIGWTREGDSTKAKSGLATVITDGPGGSKRMQVGTSNAGEIWYDLTGNRTDKITIGSDGYATFPVNGGSVSVWVQQ

SEQ ID NO: 36390 - protein, 480 aa, Cytophaga sp.
NGTMMQYFEWYVPNDGQQWNRLRTDAPYLSSVGITAVWTPPAYKGTSQADVGYGPYDLYDLGEFNQKGTVRTKYGTKGELKSAVNTLHSNGIQVYGDVVMNHKAGADYTENVTAVEVNPSNRNQETSGEYNIQAWTGFNFPGRGTTYSNFKWQWFHFDGTDWDQSRSLSRIFKFTGKAWDWEVSSCNGNYDYLMYADIDYDHPDVVNEMKKWGVWYANEVGLDGYRLDAVKHIKFSFLKDWVDNARAATGKEMFTVGEYWQNDLGALNNYLAKVNYNQSLFDAPLHYNFYAASTGGGYYDMRNILNNTLVASNPTKAVTLVENHDTQPGQSLESTVQPWFKPLAYAFILTRSGGYPSVFYGDMYGTKGTTTREIPALKSKIEPLLKARKDYAYGTQRDYIDNPDVIGWTREGDSTKAKSGLATVITDGPGGSKRMYVGTSNAGEIWYDLTGNRTDKITIGSDGYATFPVNGGSVSVWVQQ

SEQ ID NO: 36391 - protein, 480 aa, Cytophaga sp.
NGTMMQYFEWYVPNDGQQWNRLRTDAPYLSSVGITAVWTPPAYKGTSQADVGYGPYDLYDLGEFNQKGTVRTKYGTKGELKSAVNTLHSNGIQVYGDVVMNHKAGADYTENVTAVEVNPSNRNQETSGEYNIQAWTGFNFPGRGTTYSNFKWQWFHFDGTDWDQSRSLSRIFKFTGKAWDWEVSSENGNYDYLMYADIDYDHPDVVNEMKKWGVWYANEVGLDGYRLDAVKHIKFSFLKDWVDNARAATGKEMFTVGEYWQNDLGALNNYLAKVNYNQSLFDAPLHYNFYAASTGSGYYDMRNILNNTLVASNPTKAVTLVENHDTQPGQSLESTVQPWFKPLAYAFILTRSGGYPSVFYGDMYGTKGTTTREIPALKSKIEPLLKARKDYAYGTQRDYIDNPDVIGWTREGDSTKAKSGLATVITDGPGGSKRMYVGTSNAGEIWYDLTGNRTDKITIGSDGYATFPVNGGSVSVWVQQ

SEQ ID NO: 36392 - protein, 480 aa, Cytophaga sp.
NGTMMQYFEWYVPNDGQQWNRLRTDAPYLSSVGITAVWTPPAYKGTSQADVGYGPYDLYDLGEFNQKGTVRTKYGTKGELKSAVNTLHSNGIQVYGDVVMNHKAGADYTENVTAVEVNPSNRNCETSGEYNIQAWTGFNFPGRGTTYSNFKWQWFHFDGTDWDQSRSLSRIFKFTGKAWDWEVSSENGNYDYLMYADIDYDHPDVVNEMKKWGVWYANEVGLDGYRLDAVKHIKFSFLKDWVDNARAATGKEMFTVGEYWQNDLGALNNYLAKVNYNQSLFDAPLHYNFYAASTGGGYYDMRNILNNTLVASNPTKAVTLVENHDTQPGQSLESTVQPWFKPLAYAFILTRSGGYPSVFYGDMYGTKGTTTREIPALKSKIEPLLKARKDYAYGTQRDYIDNPDVIGWTREGDSTKAKSGLATVITDGPGGSKRMYVGTSNAGEIWYDLTGNRTDKITIGSDGYATFPVNGGSVSVWVQQ

SEQ ID NO: 36393 - protein, 480 aa, Cytophaga sp.
NGTMMQYFEWYVPNDGQQWNRLRTDAPYLSSVGITAVWTPPAYKGTSQADVGYGPYDLYDLGEFNQKGTVRTKYGTKGELKSAVNTLHSNGIQVYGDVVMNHKAGADYTENVTAVEVNPSNRNQETSGEYNIQAWTGFNFPGRGTTYSNFKWQWFHFDGTDWDQSRSLSRIFKFTGKAWDWEVSSENGNYDYLMYADIDYDHPDVVNEMKKWGVWYANEVGLDGYRLDAVKHIKFSFLKDWVDNARAATGKEMFTVGEYWQNDLGALNNYLAKVNYNQSLFDAPLHYNFYAASTGGGYYDMRNILNNTLVASNPTKAVTLVENHDTQPGQSLESTVQPWFKPLAYAFILTRSGGYPSVFYGDMYGTKGTTTREIPALKSKIEPLLKARKDYAYGTQRDYIDNPDVIGWTREGDSTKAKSGLATVITDGPGGSKRMYVGTSNAGEIWYDLTGNRTDKITIGSDGYATFPVNGGSWSVWVQQ

SEQ ID NO: 36394 - protein, 480 aa, Cytophaga sp.
NGTMMQYFEWYVPNDGQQWNRLRTDAPYLSSVGITAVWTPPAYKGTSQADVGYGPYDLYDLGEFNQKGTVRTKYGTKGELKSAVNTLHSNGIQVYGDVVMNHKAGADYTENVTAVEVNPSNRNQETSGEYNIQAWTGFNFPGRGTTYSNFKWQWFHFDGTDWDQSRSLSRIFKFTGKAWDWEVSSENGNYDYLMYADIDYDHPDVVNEMYKWGVWYANEVGLDGYRLDAVKHIKFSFLKDWVDNARAATGKEMFTVGEYWQNDLGALNNYLAKVNYNQSLFDAPLHYNFYAASTGGGYYDMRNILNNTLVASNPTKAVTLVENHDTQPGQSLESTVQPWFKPLAYAFILTRSGGYPSVFYGDMYGTKGTTTREIPALKSKIEPLLKARKDYAYGTQRDYIDNPDVIGWTREGDSTKAKSGLATVITDGPGGSKRMYVGTSNAGEIWYDLTGNRTDKITIGSDGYATFPVNGGSVSVWVQQ

SEQ ID NO: 36395 - protein, 480 aa, Cytophaga sp.
NGTMMQYFEWYVPNDGQQWNRLRTDAPYLSSVGITAVWTPPAYKGTSQADVGYGPYDLYDLGEFNQKGTVRTKYGTKGELKSAVNTLHSNGIQVYGDVVMNHKAGADYTENVTAVEVNPSNRNQETSGEYNIQAWTGFNFPGRGTTYSNFKWQWFHFDGTDWDQSRSLSRIFKFTGKAWDWEVSSENGNYDYLMYADIDYMHPDVVNEMKKWGVWYANEVGLDGYRLDAVKHIKFSFLKDWVDNARAATGKEMFTVGEYWQNDLGALNNYLAKVNYNQSLFDAPLHYNFYAASTGGGYYDMRNILNNTLVASNPTKAVTLVENHDTQPGQSLESTVQPWFKPLAYAFILTRSGGYPSVFYGDMYGTKGTTTREIPALKSKIEPLLKARKDYAYGTQRDYIDNPDVIGWTREGDSTKAKSGLATVITDGPGGSKRMYVGTSNAGEIWYDLTGNRTDKITIGSDGYATFPVNGGSVSVWVQQ

SEQ ID NO: 36396 - protein, 480 aa, Cytophaga sp.
NGTMMQYFEWYVPNDGQQWNRLRTDAPYLSSVGITAVWTPPAYKGTSQADVGYGPYDLYDLGEFNQKGTVRTKYGTKGELKSAVNTLHSNGIQVYGDVVMNHKAGADYPENVTAVEVNPSNRNQETSGEYNIQAWTGFNFPGRGTTYSNFKWQWFHFDGTDWDQSRSLSRIFKFTGKAWDWEVSSENGNYDYLMYADIDYDHPDVVNEMKKWGVWYANEVGLDGYRLDAVKHIKFSFLKDWVDNARAATGKEMFTVGEYWQNDLGALNNYLAKVNYNQSLFDAPLHYNFYAASTGGGYYDMRNILNNTLVASNPTKAVTLVENHDTQPGQSLESTVQPWFKPLAYAFILTRSGGYPSVFYGDMYGTKGTTTREIPALKSKIEPLLKARKDYAYGTQRDYIDNPDVIGWTREGDSTKAKSGLATVITDGPGGSKRMYVGTSNAGEIWYDLTGNRTDKITIGSDGYATFPVNGGSVSVWVQQ

SEQ ID NO: 36397 - protein, 480 aa, Cytophaga sp.
NGTMMQYFEWYVPNDGQQWNRLRTDAPYLSSVGITAVWTPPAYKGTSQADVGYGPYDLYDLGEFNQKGTVRTKYGTKGELKSAVNTLHSNGIQVYGDVVMNHKAGADYTENVTAVEVNKSNRNQETSGEYNIQAWTGFNFPGRGTTYSNFKWQWFHFDGTDWDQSRSLSRIFKFTGKAWDWEVSSENGNYDYLMYADIDYDHPDVVNEMKKWGVWYANEVGLDGYRLDAVKHIKFSFLKDWVDNARAATGKEMFTVGEYWQNDLGALNNYLAKVNYNQSLFDAPLHYNFYAASTGGGYYDMRNILNNTLVASNPTKAVTLVENHDTQPGQSLESTVQPWFKPLAYAFILTRSGGYPSVFYGDMYGTKGTTTREIPALKSKIEPLLKARKDYAYGTQRDYIDNPDVIGWTREGDSTKAKSGLATVITDGPGGSKRMYVGTSNAGEIWYDLTGNRTDKITIGSDGYATFPVNGGSVSVWVQQ

SEQ ID NO: 36398 - protein, 480 aa, Cytophaga sp.
NGTMMQYFEWYVPNDGQQWNRLRTDAPYLSSVGITAVWTPPAYKGTDQADVGYGPYDLYDLGEFNQKGTVRTKYGTKGELKSAVNTLHSNGIQVYGDVVMNHKAGADYTENVTAVEVNPSNRNQETSGEYNIQAWTGFNFPGRGTTYSNFKWQWFHFDGTDWDQSRSLSRIFKFTGKAWDWEVSSENGNYDYLMYADIDYDHPDVVNEMKKWGVWYANEVGLDGYRLDAVKHIKFSFLKDWVDNARAATGKEMFTVGEYWQNDLGALNNYLAKVNYNQSLFDAPLHYNFYAASTGGGYYDMRNILNNTLVASNPTKAVTLVENHDTQPGQSLESTVQPWFKPLAYAFILTRSGGYPSVFYGDMYGTKGTTTREIPALKSKIEPLLKARKDYAYGTQRDYIDNPDVIGWTREGDSTKAKSGLATVITDGPGGSKRMYVGTSNAGEIWYDLTGNRTDKITIGSDGYATFPVNGGSVSVWVQQ

SEQ ID NO: 36399 - protein, 480 aa, Cytophaga sp.
NGTMMQYFEWYVPNDGQQWNRLRTDAPYLSSVGITAVWTPPAYKGTSQADVGYGPYDLYDLGEFNQKGTVRTKYGTKGELKSAVNTLHSNGIQVYGDVVMNHKAGADYTENVTAVEVNPSNRNQETSGEYNIQAWTGFNFPGRGTTYSNFKWQWFHFDGTDWDQSRSLSRIFKFTGKAWDWEVSSENGNYDYLMYADIDYDHPDVVNEMKKWGVWYANEVGLDGYRLDAVKHIKFSFLKDWVDNARAATGKEMFTVGEYWQNDLGALNNYLAKVNYNQSLFDAPLHYNFYAASTGGGYYDMRNILNNTLVASNPTKAVTLVENHDTQPGQSLESTVQPWFKPLAYAFILTRSGGYPSVFYGDMYGTKGTTTREIPALKSKIEPLLKARKDYAYGTQRDYIDNPDVIGWTREGDSTKAKSGLATVITDGPGGSKRMYVGTSNKGEIWYDLTGNRTDKITIGSDGYATFPVNGGSVSVWVQQ

SEQ ID NO: 36400 - protein, 480 aa, Cytophaga sp.
NGTMMQYFEWYVPNDGQQWNRLRTDAPYLSSVGITAVWTPPAYKGTSQADVGYGPYDLYDLGEFNQKGTVRTKYGTKGELKSAVNTLHSNGIQVYGDVVMNHKAGADYTENVTAVEVNPSNRNQETSGEYNIQAWTGFNFPGRGTTYSNFKWQWFHFDGTDWDQSRSLSRIFKFTGKAWDWEVSSENGNYDYLMYADIDYDHPDVVNEMKKWGVWYANEVGLDGYRLDAVKHIKFSFLKDWVDNARAATGKEMFTVGEYWQNDLGALNNYLAKVNYNQSLFDAPLHYNFYAASTGGGYYDMRNILNNTLVASNPTKAVTLVENHDTQPGQSLESTVQPWFKPLAYAFILTRSGGYPSVFYGDMYGTKGTTTREIPALKSKIEPLLKARKDYAYGTQRDYIDNPDVIGWTREGDQTKAKSGLATVITDGPGGSKRMYVGTSNAGEIWYDLTGNRTDKITIGSDGYATFPVNGGSVSVWVQQ

SEQ ID NO: 36401 - protein, 480 aa, Cytophaga sp.
NGTMMQYFEWYVPNDGQQWNRLRTDAPYLSSVGITAVWTPPAYKGTSQADVGYGPYDLYDLGEFNQKGTVRTKYGTKGELKSAVNTLHSNGIQVYGDVVMNHKAGADYTENVTAVEVNPSNRNQETSGEYNIQAWTGFNFPGRGTTYSNFKWQWFHFDGTDWDQSRSLSRIFKFTGKAWDWEVSSENGNYDYLMYADIDYDHPDVVNEMKKWGVWYANEVGLDGYRLDAVKHIKFSFLKDWVDNARAATGKEMFTVGEYWQNDLGALNNYLAKVNYNQSLFDAPLHYNFYSASTGGGYYDMRNILNNTLVASNPTKAVTLVENHDTQPGQSLESTVQPWFKPLAYAFILTRSGGYPSVFYGDMYGTKGTTTREIPALKSKIEPLLKARKDYAYGTQRDYIDNPDVIGWTREGDSTKAKSGLATVITDGPGGSKRMYVGTSNAGEIWYDLTGNRTDKITIGSDGYATFPVNGGSVSVWVQQ

SEQ ID NO: 36402 - protein, 480 aa, Cytophaga sp.
NGTMMQYFEWYVPNDGQQWNRLRTDAPYLSSVGITAVWTPPAYKGTSQADVGYGPYDLYDLGEFNQKGTVRTKYGTKGELKSAVNTLHSNGIQVYGDVVMNHKARADYTENVTAVEVNPSNRNQETSGEYNIQAWTGFNFPGRGTTYSNFKWQWFHFDGTDWDQSRSLSRIFKFTGKAWDWEVSSENGNYDYLMYADIDYDHPDVVNEMKKWGVWYANEVGLDGYRLDAVKHIKFSFLKDWVDNARAATGKEMFTVGEYWQNDLGALNNYLAKVNYNQSLFDAPLHYNFYAASTGGGYYDMRNILNNTLVASNPTKAVTLVENHDTQPGQSLESTVQPWFKPLAYAFILTRSGGYPSVFYGDMYGTKGTTTREIPALKSKIEPLLKARKDYAYGTQRDYIDNPDVIGWTREGDSTKAKSGLATVITDGPGGSKRMYVGTSNAGEIWYDLTGNRTDKITIGSDGYATFPVNGGSVSVWVQQ

SEQ ID NO: 36403 - protein, 480 aa, Cytophaga sp.
NGTMMQYFEWYVPNDGQQWNRLRTDAPYLSSVGITAVWTPPAYKGTSQADVGYGPYDLYDLGEFNQKGTVRTKYGTKGELKSAVNTLHSNGIQVYGDVVMNHKAGADYTENVTAVEVNPSNRNQETSGEYNIQAWTGFNFPGRGTTYSNFKWQWFHFDGTDWDQSRSLSRIFKFTGKAWDWEVSSENGNYDYLMYADIDYDHPDVVNEMKKWGVWYANEVGLDGYRLDAVKHIKFSFLKDWVDNARAATGKEMFTVGEYWQNDLGALNNYLAKVNYNQSLFDAPLHYNFYAASTGGGYYDMRNILNNTLVASNPTKAVTLVENHDTQPGQSLESTVQPWFKPLAYAFILTRSGGYPSVFYGDMYGTKGTTTREIPALKSKIEPLLKARKDYAYGTQRDYIDNPDVIGWTREGDSTKAKSGLATVITDAPGGSKRMYVGTSNAGEIWYDLTGNRTDKITIGSDGYATFPVNGGSVSVWVQQ

SEQ ID NO: 36404 - protein, 480 aa, Cytophaga sp.
NGTMMQYFEWYVPNDGQQWNRLRTDAPYLSSVGITAVWTPPAYKGTSQADVGYGPYDLYDLGEFNQKGTVRTKYGTKGELKSAVNTLHSNGIQVYGDVVMNHKAGADYTENVTAVEVNPSNRNQETSGEYNIQAWTGFNFPGRGTTYSNFKWQWFHFDGTDWDQSRSLSRIFKFTGKAWDWEVSSENGNYDYLMYADIDYDHPDVVNEMKKWGVWYANEVGLDGYRLDAVKHIKFSFLKDWVDNARAATGKEMFTVGEYWQNDLGALNNYLAKVNYNQSLFDAPLHYNFYAASTGGGYYDMRNILNNTLVASNPTKAVTLVENHDTQPGQSLESTVQPWFKPLAYAFILTRSGGYPSVFYGDMYGTKGTTTREIPALKSKIEPLLKARKDYAYGTQRDYIDNPDVIGWTREGDSTKAKSGLATVITDGPGGSKRMYVGTSNAGEIWYDLTGNRTEKITIGSDGYATFPVNGGSVSVWVQQ

SEQ ID NO: 36405 - protein, 480 aa, Cytophaga sp.
NGTMMQYFEWYVPNDGQQWNRLRTDAPYLSSVGITAVWTPPAYKGTSQADVGYGPYDLYDLGEFNQWGTVRTKYGTKGELKSAVNTLHSNGIQVYGDVVMNHKAGADYTENVTAVEVNPSNRNQETSGEYNIQAWTGFNFPGRGTTYSNFKWQWFHFDGTDWDQSRSLSRIFKFTGKAWDWEVSSENGNYDYLMYADIDYDHPDVVNEMKKWGVWYANEVGLDGYRLDAVKHIKFSFLKDWVDNARAATGKEMFTVGEYWQNDLGALNNYLAKVNYNQSLFDAPLHYNFYAASTGGGYYDMRNILNNTLVASNPTKAVTLVENHDTQPGQSLESTVQPWFKPLAYAFILTRSGGYPSVFYGDMYGTKGTTTREIPALKSKIEPLLKARKDYAYGTQRDYIDNPDVIGWTREGDSTKAKSGLATVITDGPGGSKRMYVGTSNAGEIWYDLTGNRTDKITIGSDGYATFPVNGGSVSVWVQQ

SEQ ID NO: 36406 - protein, 480 aa, Cytophaga sp.
NGTMMQYFEWYVPNDGQQWNRLRTDAPYLSSVGITAVWTPPAYKGTSQADVGYGPYDLYDLGEFNQKGTVRTKYGTKGELKSAVNTLHSNGIQVYGDVVMNHKAGADYTENVTAVEVNPSNRNQETSGEYNIQAWTGFNFPGRGTTYSNFKWQWFHFDGTDWDQSRSLSRIFKFTGKAWDWEVSSENGNYDYLMYADIDYDHPDVVNEMKKWGVWYANEVGLDGYRLDAVKHIKFSFLKDWVDNARAATGKEMFTVGEYWQNDLGALNNYLAKVNYNQSLFDAPLHYNFYAASTGGSYYDMRNILNNTLVASNPTKAVTLVENHDTQPGQSLESTVQPWFKPLAYAFILTRSGGYPSVFYGDMYGTKGTTTREIPALKSKIEPLLKARKDYAYGTQRDYIDNPDVIGWTREGDSTKAKSGLATVITDGPGGSKRMYVGTSNAGEIWYDLTGNRTDKITIGSDGYATFPVNGGSVSVWVQQ

SEQ ID NO: 36407 - protein, 480 aa, Cytophaga sp.
NGTMMQYFEWYVPNDGQQWNRLRTDAPYLSSVGITAVWTPPAYKGTSQADVGYGPYDLYDLGEFNQKGTVRTKYGTKGELKSAVNTLHSNGIQVYGDVVMNHKAGADYTENVTANEVNPSNRNQETSGEYNIQAWTGFNFPGRGTTYSNFKWQWFHFDGTDWDQSRSLSRIFKFTGKAWDWEVSSENGNYDYLMYADIDYDHPDVVNEMKKWGVWYANEVGLDGYRLDAVKHIKFSFLKDWVDNARAATGKEMFTVGEYWQNDLGALNNYLAKVNYNQSLFDAPLHYNFYAASTGGGYYDMRNILNNTLVASNPTKAVTLVENHDTQPGQSLESTVQPWFKPLAYAFILTRSGGYPSVFYGDMYGTKGTTTREIPALKSKIEPLLKARKDYAYGTQRDYIDNPDVIGWTREGDSTKAKSGLATVITDGPGGSKRMYVGTSNAGEIWYDLTGNRTDKITIGSDGYATFPVNGGSVSVWVQQ

SEQ ID NO: 36408 - protein, 480 aa, Cytophaga sp.
NGTMMQYFEWYVPNDGQQWNRLRTDAPYLSSVGITAVWTPPAYKGTSQADVGYGPYDLYDLGEFNQKGTVRTKYGTKGELKSAVNTLHSNGIQVYGDVVMNHKAGADYTENVTAVEVNPSNRNQETSGEYNIQAWTGFNFPGRGTTYSNFKWQWFHFDGTDWDQSRSLSRIFKFTGKAWDWEVSSENGNYDYLMYADIDYDHPDVVNEMLKWGVWYANEVGLDGYRLDAVKHIKFSFLKDWVDNARAATGKEMFTVGEYWQNDLGALNNYLAKVNYNQSLFDAPLHYNFYAASTGGGYYDMRNILNNTLVASNPTKAVTLVENHDTQPGQSLESTVQPWFKPLAYAFILTRSGGYPSVFYGDMYGTKGTTTREIPALKSKIEPLLKARKDYAYGTQRDYIDNPDVIGWTREGDSTKAKSGLATVITDGPGGSKRMYVGTSNAGEIWYDLTGNRTDKITIGSDGYATFPVNGGSVSVWVQQ

SEQ ID NO: 36409 - protein, 480 aa, Cytophaga sp.
NGTMMQYFEWYVPNDGQQWNRLRTDAPYLSSVGITAVWTPPAYKGTSQADVGYGPYDLYDLGEFNQKGTVRTKYGTKGELKSAVNTLHSNGIQVYGDVVMNHKAGADYTENVWAVEVNPSNRNQETSGEYNIQAWTGFNFPGRGTTYSNFKWQWFHFDGTDWDQSRSLSRIFKFTGKAWDWEVSSENGNYDYLMYADIDYDHPDVVNEMKKWGVWYANEVGLDGYRLDAVKHIKFSFLKDWVDNARAATGKEMFTVGEYWQNDLGALNNYLAKVNYNQSLFDAPLHYNFYAASTGGGYYDMRNILNNTLVASNPTKAVTLVENHDTQPGQSLESTVQPWFKPLAYAFILTRSGGYPSVFYGDMYGTKGTTTREIPALKSKIEPLLKARKDYAYGTQRDYIDNPDVIGWTREGDSTKAKSGLATVITDGPGGSKRMYVGTSNAGEIWYDLTGNRTDKITIGSDGYATFPVNGGSVSVWVQQ

SEQ ID NO: 36410 - protein, 480 aa, Cytophaga sp.
NGTMMQYFEWYVPNDGQQWNRLRTDAPYLSSVGITAVWTPPAYKGTSQADVGYGPYDLYDLGEFNQKGTVRTKYGTKGELKSAVNTLHSNGIQVYGDVVMNHKAGADYTENVTAVEVNPSNRNQETSGEYNIQAWTGFNFPGRGTTYSNFKWQWFHFDGTDWDQSRSLSRLFKFTGKAWDWEVSSENGNYDYLMYADIDYDHPDVVNEMKKWGVWYANEVGLDGYRLDAVKHIKFSFLKDWVDNARAATGKEMFTVGEYWQNDLGALNNYLAKVNYNQSLFDAPLHYNFYAASTGGGYYDMRNILNNTLVASNPTKAVTLVENHDTQPGQSLESTVQPWFKPLAYAFILTRSGGYPSVFYGDMYGTKGTTTREIPALKSKIEPLLKARKDYAYGTQRDYIDNPDVIGWTREGDSTKAKSGLATVITDGPGGSKRMYVGTSNAGEIWYDLTGNRTDKITIGSDGYATFPVNGGSVSVWVQQ

SEQ ID NO: 36411 - protein, 480 aa, Cytophaga sp.
NGTMMQYFEWYVPNDGQQWNRLRTDAPYLSSVGITAVWTPPAYKGTSQADVGYGPYDLYDLGEFNQKGTVRTKYGTKGELKSAVNTLHSNGIQVYGDVVMNHKAGADYTENVTAVEVNPSNRNQETSGEYNIQAWTGFNFPGRGTTYSNFKWQWFHFDGTDWDQSRSLSRIFKFTGKAWDWEVSSENGNYDYLMYADIDYDHPDVVNEMKKWGVWYANEVGLDGYRLDAVKHIKFSFLKDWVDNARAATGKEMFTVGEYWQNDLGALNNYLAKVNYNQSLFDAPLHYNFYAASTGGGYYDMRNILNNTLVASNPTKAVTLVENHDTQPGQSLESTVQPWFKPLAYAFILTRSGGYPSVFYGDMYGTKGTTTREIPALKSKIEPLLKARKDYAYGTQRDYIDNPDVIGWTREGDSTKAASGLATVITDGPGGSKRMYVGTSNAGEIWYDLTGNRTDKITIGSDGYATFPVNGGSVSVWVQQ

SEQ ID NO: 36412 - protein, 480 aa, Cytophaga sp.
NGTMMQYFEWYVPNDGQQWNRLRTDAPYLSSVGITAVWTPPAYKGTSQADVGYGPYDLYDLGEFNQKGTVRTKYGTKGELKSAVNTLHSNGIQVYGDVVMNHKAGADYTENVTAVEVNPSNRNQETSGEYNIQAWTGFNFPGRGTTYSNFKWQWFHFDGTDWDQSRSLSRIFKFTGKAWDWEVSSENGNYDYLMYADIDYDHPDVVNEMKKWGVWYANEVGLDGYRLDAVKHIKFTFLKDWVDNARAATGKEMFTVGEYWQNDLGALNNYLAKVNYNQSLFDAPLHYNFYAASTGGGYYDMRNILNNTLVASNPTKAVTLVENHDTQPGQSLESTVQPWFKPLAYAFILTRSGGYPSVFYGDMYGTKGTTTREIPALKSKIEPLLKARKDYAYGTQRDYIDNPDVIGWTREGDSTKAKSGLATVITDGPGGSKRMYVGTSNAGEIWYDLTGNRTDKITIGSDGYATFPVNGGSVSVWVQQ

SEQ ID NO: 36413 - protein, 480 aa, Cytophaga sp.
NGTMMQYFEWYVPNDGQQWNRLRTDAPYLSSVGITAVWTPPAYKGTSQADVGYGPYDLYDLGEFNQKGTVRTKYGTKGELKSAVNTLHSNGIQVYGDVVMNHKAGADYTENVTAVEVNPSNRNQETSGEYNIQAWTGFNFPGRGTTYSNFKWQWFHFDGTDWDQSRSLSRIFKFTGKAWDWEVSSENGNYDYLMYADIDYDHPDVVNEMKKWGVWYANEVGLDGYRLDAVKHIKFSFLKDWVDNARAATGKEMFTVGEYWQNDLGALNNYLAKVNYNQSLFDAPLHYNFYAASTGGGYYDMRNILNNTLVASNPTKAVTLVENHDTQPGQSLESTVQPWFKPLAYAFILTRSGGYPSVFYGDMYGTKGTTTREIPALKSKIEPLLEARKDYAYGTQRDYIDNPDVIGWTREGDSTKAKSGLATVITDGPGGSKRMYVGTSNAGEIWYDLTGNRTDKITIGSDGYATFPVNGGSVSVWVQQ

SEQ ID NO: 36414 - protein, 480 aa, Cytophaga sp.
NGTMMQYFEWYVPNDGQQWNRLRTDAPYLSSVGITAVWTPPAYKGTSQADVGYGPYDLYDLGEFNQKGTVRTKYGTKGELKSAVNTLHSNGIQVYGDVVMNHKAGADYTENVTAVEVNPSNRNQETSGEYNIQAWTGFNFMGRGTTYSNFKWQWFHFDGTDWDQSRSLSRIFKFTGKAWDWEVSSENGNYDYLMYADIDYDHPDVVNEMKKWGVWYANEVGLDGYRLDAVKHIKFSFLKDWVDNARAATGKEMFTVGEYWQNDLGALNNYLAKVNYNQSLFDAPLHYNFYAASTGGGYYDMRNILNNTLVASNPTKAVTLVENHDTQPGQSLESTVQPWFKPLAYAFILTRSGGYPSVFYGDMYGTKGTTTREIPALKSKIEPLLKARKDYAYGTQRDYIDNPDVIGWTREGDSTKAKSGLATVITDGPGGSKRMYVGTSNAGEIWYDLTGNRTDKITIGSDGYATFPVNGGSVSVWVQQ

SEQ ID NO: 36415 - protein, 480 aa, Cytophaga sp.
NGTMMQYFEWYVPNDGQQWNRLRTDAPYLSSVGITAVWTPPAYKGTSQADVGYGPYDLYDLGEFNQKGTVRTKYGTKGELKSAVNTLHSNGIQVYGDVVMNHKAGADYTENVTAVEVNPSNRNQETSGEYNIQAWTGFNFPGRGTTYSNFKWQWFHFDGTDWDQSRSLSRIFKFTGKAWDWEVSSENGNYDYLMYADIDYDHPDVVNEMKKWGVWYANEVGLDGYRLDAVKHIKFSFLKDWVDNARAATGKEMFTVGEYWQNDLGALNNYLAKVNYNQSLFDAPLHYNFYAASTGGGYYDMRNILNNTLVASNPTKAVTLVENHDTQPGQSLESTVQPWFKPLAYAFILTRSGGYPSVFYGDMYGTKGTTTREIPALKSKIEPLLKARKDYAYGTQRDYIDNPDVIGWTREGDYTKAKSGLATVITDGPGGSKRMYVGTSNAGEIWYDLTGNRTDKITIGSDGYATFPVNGGSVSVWVQQ

SEQ ID NO: 36416 - protein, 480 aa, Cytophaga sp.
NGTMMQYFEWYVPNDGQQWNRLRTDAPYLSSVGITAVWTPPAYKGTSQADVGYGPYDLYDLGEFNQKGTVRTKYGTKGELKSAVNTLHSNGIQVYGDVVMNHKAGADYTENVTAVEVNPSNRNQETSGEYNIQAWTGFNFPGRGTTYSNFKWQWFHFDGTDWDQSRSLSRIFKFTGKAWDWEVSSENGNYDYLMYADIDYDHPDVVNEMKKWGVWYANEVGLDGYRLDAVKHIKFSFLKDWVDNARAATGKEMFTVGEYWQNDLGALNNYLAKVNYNQSLFDAPLHYNFYAASTGGGYYDMRNILNNTLVASNPTKAVTLVENHDTQPGQSLESTVQPWFKPLAYAFILTRSGGYPSVFYGDMYGTKGTTTREIPALKSKIEPLLKARKDYAYGTQRDYIDNPDVIGWTREGDSTKAKSGLATVITDGPGGSKRMYVGTSNAGEIWYDLTGNRTDKITIGADGYATFPVNGGSVSVWVQQ

SEQ ID NO: 36417 - protein, 480 aa, Cytophaga sp.
NGTMMQYFEWYVPNDGQQWNRLRTDAPYLSSVGITAVWTPPAYKGTSQADVGYGPYDLYDLGEFNQKGTVRTKYGTKGELKSAVNTLHSNGIQVYGDVVMNHKAGADYTENVTAVEVNPSNRNQETSGEYNIQAWTGFNFPGRGTTYSNFKWQWFHFDGTDWDQSRSLSRIFKFTGKAWDWEVSSENGNYDYLMYADIDYDHPDVVNEMKKWGVWYANEVGLDGYRLDAVKHIKFSFLKDWVDNARAATGKEMFTVGEYWQNDLGALNNYLAKVNYNQSLFDAPLHYNFYAASTGGGYYDMRNILNNTLVASNPTKAVTLVENHDTQPGQSLESTVQPWFKPLAYAFILTRSGGYPSVFYGDMYGTKGTTTREIPALKSKIEPLLKARKDYAYGTQRDYIDNPDVIGWTREGDSTKAGSGLATVITDGPGGSKRMYVGTSNAGEIWYDLTGNRTDKITIGSDGYATFPVNGGSVSVWVQQ

SEQ ID NO: 36418 - protein, 480 aa, Cytophaga sp.
NGTMMQYFEWYVPNDGQQWNRLRTDAPYLSSVGITAVWTPPAYKGTSQADVGYGPYDLYDLGEFNQKGHVRTKYGTKGELKSAVNTLHSNGIQVYGDVVMNHKAGADYTENVTAVEVNPSNRNQETSGEYNIQAWTGFNFPGRGTTYSNFKWQWFHFDGTDWDQSRSLSRIFKFTGKAWDWEVSSENGNYDYLMYADIDYDHPDVVNEMKKWGVWYANEVGLDGYRLDAVKHIKFSFLKDWVDNARAATGKEMFTVGEYWQNDLGALNNYLAKVNYNQSLFDAPLHYNFYAASTGGGYYDMRNILNNTLVASNPTKAVTLVENHDTQPGQSLESTVQPWFKPLAYAFILTRSGGYPSVFYGDMYGTKGTTTREIPALKSKIEPLLKARKDYAYGTQRDYIDNPDVIGWTREGDSTKAKSGLATVITDGPGGSKRMYVGTSNAGEIWYDLTGNRTDKITIGSDGYATFPVNGGSVSVWVQQ

SEQ ID NO: 36419 - protein, 480 aa, Cytophaga sp.
NGTMMQYFEWYVPNDGQQWNRLRTNAPYLSSVGITAVWTPPAYKGTSQADVGYGPYDLYDLGEFNQKGTVRTKYGTKGELKSAVNTLHSNGIQVYGDVVMNHKAGADYTENVTAVEVNPSNRNQETSGEYNIQAWTGFNFPGRGTTYSNFKWQWFHFDGTDWDQSRSLSRIFKFTGKAWDWEVSSENGNYDYLMYADIDYDHPDVVNEMKKWGVWYANEVGLDGYRLDAVKHIKFSFLKDWVDNARAATGKEMFTVGEYWQNDLGALNNYLAKVNYNQSLFDAPLHYNFYAASTGGGYYDMRNILNNTLVASNPTKAVTLVENHDTQPGQSLESTVQPWFKPLAYAFILTRSGGYPSVFYGDMYGTKGTTTREIPALKSKIEPLLKARKDYAYGTQRDYIDNPDVIGWTREGDSTKAKSGLATVITDGPGGSKRMYVGTSNAGEIWYDLTGNRTDKITIGSDGYATFPVNGGSVSVWVQQ

SEQ ID NO: 36420 - protein, 480 aa, Cytophaga sp.
NGTMMQYFEWYVPNDGQQWNRLRTDAPYLSSVGITAVWTPPAYKGTSQADVGYGPYDLYDLGEFNQKGTVRTKYGTKGELKSAVNTLHSNGIQVYGDVVMNHKAGADYTENVTAVEVNPSNRNQETSGEYNIQAWTGFNFPGRGTTYSNFKWQWFHFDGTDWDQSRSLSRIFKFTGKAWDWEVSSENGNYDYLMYADIDYDHPDVVNEMKKWGVWYANEVGLDGYRLDAVKHIKFSFLKDWVDNARAATGKEMFTVGEYWLNDLGALNNYLAKVNYNQSLFDAPLHYNFYAASTGGGYYDMRNILNNTLVASNPTKAVTLVENHDTQPGQSLESTVQPWFKPLAYAFILTRSGGYPSVFYGDMYGTKGTTTREIPALKSKIEPLLKARKDYAYGTQRDYIDNPDVIGWTREGDSTKAKSGLATVITDGPGGSKRMYVGTSNAGEIWYDLTGNRTDKITIGSDGYATFPVNGGSVSVWVQQ

SEQ ID NO: 36421 - protein, 480 aa, Cytophaga sp.
NGTMMQYFEWYVPNDGQQWNRLRTDAPYLSSVGITAVWTPPAYKGTSQADVGYGPYDLYDLGEFNQKGTVRTKYGTKGELKSAVNTLHSNGIQVYGDVVMNHKAGADYTENVTAVEVNPSNRNQESSGEYNIQAWTGFNFPGRGTTYSNFKWQWFHFDGTDWDQSRSLSRIFKFTGKAWDWEVSSENGNYDYLMYADIDYDHPDVVNEMKKWGVWYANEVGLDGYRLDAVKHIKFSFLKDWVDNARAATGKEMFTVGEYWQNDLGALNNYLAKVNYNQSLFDAPLHYNFYAASTGGGYYDMRNILNNTLVASNPTKAVTLVENHDTQPGQSLESTVQPWFKPLAYAFILTRSGGYPSVFYGDMYGTKGTTTREIPALKSKIEPLLKARKDYAYGTQRDYIDNPDVIGWTREGDSTKAKSGLATVITDGPGGSKRMYVGTSNAGEIWYDLTGNRTDKITIGSDGYATFPVNGGSVSVWVQQ

SEQ ID NO: 36422 - protein, 480 aa, Cytophaga sp.
NGTMMQYFEWYVPNDGQQWNRLRTDAPYLSSVGITAVWTPPAYKGTSQADVGYGPYDLYDLGEFNQKGTVRTKYGTKGELKSAVNTLHSNGIQVYGDVVMNHKAGADYTENVTAVEVNPSNRNQETSGEYNIQAWTGFNFPGRGTTYSNFKWQWFHFDGTDWDQSRSLSRIFKFTGHAWDWEVSSENGNYDYLMYADIDYDHPDVVNEMKKWGVWYANEVGLDGYRLDAVKHIKFSFLKDWVDNARAATGKEMFTVGEYWQNDLGALNNYLAKVNYNQSLFDAPLHYNFYAASTGGGYYDMRNILNNTLVASNPTKAVTLVENHDTQPGQSLESTVQPWFKPLAYAFILTRSGGYPSVFYGDMYGTKGTTTREIPALKSKIEPLLKARKDYAYGTQRDYIDNPDVIGWTREGDSTKAKSGLATVITDGPGGSKRMYVGTSNAGEIWYDLTGNRTDKITIGSDGYATFPVNGGSVSVWVQQ

SEQ ID NO: 36423 - protein, 480 aa, Cytophaga sp.
NGTMMQYFEWYVPNDGQQWNRLRTDAPYLSSVGITAVWTPPAYKGTSQADVGYGPYDLYDLGEFNQKGTVRTKYGTKGELKSAVNTLHSNGIQVYGDVVMNHKAGADYTENVTAVEVNPSNRNQETSGEYNIQAWTGFNFPGRGTTYSNFKWQWFHFDGTDWDQSRSLSRIFKFTGKAWDWEVSSENGNYDYLMYADIDYDHPDVVNEMKKWGVWYANEVGLDGYRLDAVKHIKFSFLKDWVDNARAATGKEMFTVGEYWQNDLGALNNYLAKVNYNQSLFDAPLHYNFYAASTGGGYYDMRNILNNTLVASNPTKAVTLVENHDTQPGQSLESTVQPWFKPLAYAFILTRSGGYPSVFYGDMYGTKGTTTREIPALKSKIEPLLKARKDYAYGTQRDYIDNPDVIGWTREGDSTKAKSGLATVITDGPGGQKRMYVGTSNAGEIWYDLTGNRTDKITIGSDGYATFPVNGGSVSVWVQQ

SEQ ID NO: 36424 - protein, 480 aa, Cytophaga sp.
NGTMMQYFEWYVPNDGQQWNRLRTDAPYLSSVGITAVWTPPAYKGTSQADVGYGPYDLYDLGEFNQKGTVRTKYGTKGELKSAVNTLHSNGIQVYGDVVMNHKAGADYTENVTAVEVNPSNRNQETSGEYNIQAWTGFNFPGRGTTYSNFKWQWFHFDGTDWDQTRSLSRIFKFTGKAWDWEVSSENGNYDYLMYADIDYDHPDVVNEMKKWGVWYANEVGLDGYRLDAVKHIKFSFLKDWVDNARAATGKEMFTVGEYWQNDLGALNNYLAKVNYNQSLFDAPLHYNFYAASTGGGYYDMRNILNNTLVASNPTKAVTLVENHDTQPGQSLESTVQPWFKPLAYAFILTRSGGYPSVFYGDMYGTKGTTTREIPALKSKIEPLLKARKDYAYGTQRDYIDNPDVIGWTREGDSTKAKSGLATVITDGPGGSKRMYVGTSNAGEIWYDLTGNRTDKITIGSDGYATFPVNGGSVSVWVQQ

SEQ ID NO: 36425 - protein, 480 aa, Cytophaga sp.
NGTMMQYFEWYVPNDGQQWNRLRTDAPYLSSVGITAVWTPPAYKGTSQADVGYGPYDLYDLGEFNQKGTVRTKYGTKGELKSAVNTLHSNGIQVYGDVVMNHKAGADYTENVTAVEVNPSNRNQETSGEYNIQAWTGFNFPGRGTTYSNFKWQWFHFDGTDWDQSRSLSRIFKFTGKAWDWEVSSENGNYDYLMYADIDYDHPDVVNEMKKWGVWYANEVGLDGYRLDAVKHIKFSFLKDWVDNARAATGKEMFTVGEYWQNDLGALNNYLAKVNYNQSLFDAPLHYNFYAASTGAGYYDMRNILNNTLVASNPTKAVTLVENHDTQPGQSLESTVQPWFKPLAYAFILTRSGGYPSVFYGDMYGTKGTTTREIPALKSKIEPLLKARKDYAYGTQRDYIDNPDVIGWTREGDSTKAKSGLATVITDGPGGSKRMYVGTSNAGEIWYDLTGNRTDKITIGSDGYATFPVNGGSVSVWVQQ

SEQ ID NO: 36426 - protein, 480 aa, Cytophaga sp.
NGTMMQYFEWYVPNDGQQWNRLRTDAPYLSSVGITAVWTPPAYKGTSQADVGYGPYDLYDLGEFNQKGTVRTKYGTKGELKSAVNTLHSNGIQVYGDVVMNHKAGADYTENVTAVEVNPSNRNQETSGEYNIQAWTGFNFPGRGTTYSNFKWQWFHFDGTDWDQSRSLSRIFKFTGKAWDWEVSSENGNYDYLMYADIDYDHPDVVNEMKKWGVWYANEVGLDGYRLDAVKHIKFSFLKDWVDNARAATGKEMFTVGEYWQNDLGALNNYLAKVNYNQSLFDAPLHYNFYAASTGGGYYDMRNILNNTLVASNPTKAVTLVENHDTQPGQSLESTVQPWFKPLAYAFILTRSGGYPSVFYGDMYGTKGTTTREIPALKSKIEPLLVARKDYAYGTQRDYIDNPDVIGWTREGDSTKAKSGLATVITDGPGGSKRMYVGTSNAGEIWYDLTGNRTDKITIGSDGYATFPVNGGSVSVWVQQ

SEQ ID NO: 36427 - protein, 480 aa, Cytophaga sp.
NGTMMQYFEWYVPNDGQQWNRLRTDAPYLSSVGITAVWTPPAYKGTSQADVGYGPYDLYDLGEFNQKGTVRTKYGTKGELKSAVNTLHSNGIQVYGDVVMNHKAGADYTENVTAVEVNPSNRNQETSGEYNIQAWTGFNFPGRGTTYSNFKWQWFHFDGTDWDQSRSLSRIFKFTGKAWDWEVSSENGNYDYLMYADIDYDHPDVVNEMKKWGVWYANEVGLDGYRLDAVKHIKFSFLKDWVDNARAATGKEMFTVGEYWQNDLGALNNYLAKVNYNQSLFDAPLHYNFYQASTGGGYYDMRNILNNTLVASNPTKAVTLVENHDTQPGQSLESTVQPWFKPLAYAFILTRSGGYPSVFYGDMYGTKGTTTREIPALKSKIEPLLKARKDYAYGTQRDYIDNPDVIGWTREGDSTKAKSGLATVITDGPGGSKRMYVGTSNAGEIWYDLTGNRTDKITIGSDGYATFPVNGGSVSVWVQQ

SEQ ID NO: 36428 - protein, 480 aa, Cytophaga sp.
NGTMMQYFEWYVPNDGQQWNRLRTDAPYLSSVGITAVWTPPAYKGTSQADVGYGPYDLYDLGEFNQKGTVRTKYGTKGELKSAVNTLHSNGIQVYGDVVMNHKAGADYTENVTAVEVNPSNRNQETSGEYNIQAWTGFNFPGRGTTYSNFKWQWFHFDGTDWDQSRSLSRIFKFTGKAWDWEVSSENGNYDYLMYADIDYDHPDVVNEMKKWGVWYANEVGLDGYRLDAVKHMKFSFLKDWVDNARAATGKEMFTVGEYWQNDLGALNNYLAKVNYNQSLFDAPLHYNFYAASTGGGYYDMRNILNNTLVASNPTKAVTLVENHDTQPGQSLESTVQPWFKPLAYAFILTRSGGYPSVFYGDMYGTKGTTTREIPALKSKIEPLLKARKDYAYGTQRDYIDNPDVIGWTREGDSTKAKSGLATVITDGPGGSKRMYVGTSNAGEIWYDLTGNRTDKITIGSDGYATFPVNGGSVSVWVQQ

SEQ ID NO: 36429 - protein, 480 aa, Cytophaga sp.
NGTMFQYFEWYVPNDGQQWNRLRTDAPYLSSVGITAVWTPPAYKGTSQADVGYGPYDLYDLGEFNQKGTVRTKYGTKGELKSAVNTLHSNGIQVYGDVVMNHKAGADYTENVTAVEVNPSNRNQETSGEYNIQAWTGFNFPGRGTTYSNFKWQWFHFDGTDWDQSRSLSRIFKFTGKAWDWEVSSENGNYDYLMYADIDYDHPDVVNEMKKWGVWYANEVGLDGYRLDAVKHIKFSFLKDWVDNARAATGKEMFTVGEYWQNDLGALNNYLAKVNYNQSLFDAPLHYNFYAASTGGGYYDMRNILNNTLVASNPTKAVTLVENHDTQPGQSLESTVQPWFKPLAYAFILTRSGGYPSVFYGDMYGTKGTTTREIPALKSKIEPLLKARKDYAYGTQRDYIDNPDVIGWTREGDSTKAKSGLATVITDGPGGSKRMYVGTSNAGEIWYDLTGNRTDKITIGSDGYATFPVNGGSVSVWVQQ

SEQ ID NO: 36430 - protein, 480 aa, Cytophaga sp.
NGTMMQYFEWYVPNDGQQWNRLRTDAPYLSSVGITAVWTPPAYKGTSQADVGYGPYDLYDLGEFNQKGTVRTKYGTKGELKSAVNTLHSNGIQVYGDVVMNHKAGADYTENVTAVEVNPSNRNQETSGEYNIQAWTGFNFPGRGTTYSNFKWQWFHFDGTDWDQSRSLSRIFKFTGKAWDWEVSSENGNYDYLMYADIDYDHPDVVNEMKKWGVWYANEVGLDGYRLDAVKHIKFSFLKDWVDNARAATGKEMFTVGEYWQNDLYALNNYLAKVNYNQSLFDAPLHYNFYAASTGGGYYDMRNILNNTLVASNPTKAVTLVENHDTQPGQSLESTVQPWFKPLAYAFILTRSGGYPSVFYGDMYGTKGTTTREIPALKSKIEPLLKARKDYAYGTQRDYIDNPDVIGWTREGDSTKAKSGLATVITDGPGGSKRMYVGTSNAGEIWYDLTGNRTDKITIGSDGYATFPVNGGSVSVWVQQ

SEQ ID NO: 36431 - protein, 480 aa, Cytophaga sp.
NGTMMQYFEWYVPNDGQQWNRLRTDAPYLSSVGITAVWTPPAYKGTSQADVGYGPYDLYDLGEFNQKGTVRTKYGTKGELKSAVNTLHSNGIQVYGDVVMNHKAGADYTENVTAVEVNPSNRNQETSGEYNIQAWTGFNFPGRGTTYSNFKWQWFHFDGTDWDQSRSLSRIFKFTGKAWDWEVSSENGNYDYLMYADIDYDHPDVVNEMKKWGVWYANEVGLDGYRLDAVKHLKFSFLKDWVDNARAATGKEMFTVGEYWQNDLGALNNYLAKVNYNQSLFDAPLHYNFYAASTGGGYYDMRNILNNTLVASNPTKAVTLVENHDTQPGQSLESTVQPWFKPLAYAFILTRSGGYPSVFYGDMYGTKGTTTREIPALKSKIEPLLKARKDYAYGTQRDYIDNPDVIGWTREGDSTKAKSGLATVITDGPGGSKRMYVGTSNAGEIWYDLTGNRTDKITIGSDGYATFPVNGGSVSVWVQQ

SEQ ID NO: 36432 - protein, 480 aa, Cytophaga sp.
NGTMMQYFEWYVPNDGQQWNRLRTDAPYLSSVGITAVWTPPAYKGTSQADVGYGPYDLYDLGEFNQKGTVRTKYGTKGELKSAVNTLHSNGIQVYGDVVMNHKAGADYTENVTAVEVNPSNRNQETSGEYNIQAWTGFNFPGRGTTYSNFKWQWFHFDGTDWDQSRSLSRIFKFTGKAWDWEVSSENGNYDYLMYADIDYDHPDVVNEMKKWGVWYANEVGLDGYRLDAVKHIKDSFLKDWVDNARAATGKEMFTVGEYWQNDLGALNNYLAKVNYNQSLFDAPLHYNFYAASTGGGYYDMRNILNNTLVASNPTKAVTLVENHDTQPGQSLESTVQPWFKPLAYAFILTRSGGYPSVFYGDMYGTKGTTTREIPALKSKIEPLLKARKDYAYGTQRDYIDNPDVIGWTREGDSTKAKSGLATVITDGPGGSKRMYVGTSNAGEIWYDLTGNRTDKITIGSDGYATFPVNGGSVSVWVQQ

SEQ ID NO: 36433 - protein, 480 aa, Cytophaga sp.
NGTMMQYFEWYVPNDGQQWNRLRTDAPYLSSVGITAVWTPPAYKGTSQADVGYGPYDLYDLGEFNQKGTVRTKYGTKGELKSAVNTLHSNGIQVYGDVVMNHKAGADYTENVTAVEVNPSNRNQETSGEYNIQAWTGFNFPGRGTTYSNFKWQWFHFDGTDWDQSRSLSRIFKFTGKAWDWEVSSENGNYDYLMYADIDYDHPDVVNEMKKWGVWYANEVGLDGYRLDAVKHIKFSFLKDWVDNARAATGKEMFTVGEYWQNDLGALNNYLAKVNYNQSLFDAPLHYNFYAASTGGGYYDMRNILNNTLVASNPTKAVTLVENHDTQPGQSLESTVQPWFKPLAYAFILTRSGGYPSVFYGDMYGTKGTTTREIPALKSKIEPLLKARKDYAYGTQRDYIDNPDVIGWTREGDSTKAKSGLATVITDGPVGSKRMYVGTSNAGEIWYDLTGNRTDKITIGSDGYATFPVNGGSVSVWVQQ

SEQ ID NO: 36434 - protein, 480 aa, Cytophaga sp.
NGTMMQYFEWYVPNDGQQWNRLRTDAPYLSSVGITAVWTPPAYKGTSQADVGYGPYDLYDLGEFNQKGTVRTKYGTKGELKSAVNTLHSNGIQVYGDVVMNHKAGADYTENVIAVEVNPSNRNQETSGEYNIQAWTGFNFPGRGTTYSNFKWQWFHFDGTDWDQSRSLSRIFKFTGKAWDWEVSSENGNYDYLMYADIDYDHPDVVNEMKKWGVWYANEVGLDGYRLDAVKHIKFSFLKDWVDNARAATGKEMFTVGEYWQNDLGALNNYLAKVNYNQSLFDAPLHYNFYAASTGGGYYDMRNILNNTLVASNPTKAVTLVENHDTQPGQSLESTVQPWFKPLAYAFILTRSGGYPSVFYGDMYGTKGTTTREIPALKSKIEPLLKARKDYAYGTQRDYIDNPDVIGWTREGDSTKAKSGLATVITDGPGGSKRMYVGTSNAGEIWYDLTGNRTDKITIGSDGYATFPVNGGSVSVWVQQ

SEQ ID NO: 36435 - protein, 480 aa, Cytophaga sp.
NGTMMQYFEWYVPNDGQQWNRLRTDAPYLSSVGITAVWTPPAYKGTSQADVGYGPYDLYDLGEFNQKGTVRTKYGTKGELKSAVNTLHSNGIQVYGDVVMNHKAGADYTENVTAVEVNPSNRNQETSGEYNIQAWTGFNFPGRGTTYSNFKWQWFHFDGTDWDQSRSLSRIFKFTGKAWDWEVSSMNGNYDYLMYADIDYDHPDVVNEMKKWGVWYANEVGLDGYRLDAVKHIKFSFLKDWVDNARAATGKEMFTVGEYWQNDLGALNNYLAKVNYNQSLFDAPLHYNFYAASTGGGYYDMRNILNNTLVASNPTKAVTLVENHDTQPGQSLESTVQPWFKPLAYAFILTRSGGYPSVFYGDMYGTKGTTTREIPALKSKIEPLLKARKDYAYGTQRDYIDNPDVIGWTREGDSTKAKSGLATVITDGPGGSKRMYVGTSNAGEIWYDLTGNRTDKITIGSDGYATFPVNGGSVSVWVQQ

SEQ ID NO: 36436 - protein, 480 aa, Cytophaga sp.
NFTMMQYFEWYVPNDGQQWNRLRTDAPYLSSVGITAVWTPPAYKGTSQADVGYGPYDLYDLGEFNQKGTVRTKYGTKGELKSAVNTLHSNGIQVYGDVVMNHKAGADYTENVTAVEVNPSNRNQETSGEYNIQAWTGFNFPGRGTTYSNFKWQWFHFDGTDWDQSRSLSRIFKFTGKAWDWEVSSENGNYDYLMYADIDYDHPDVVNEMKKWGVWYANEVGLDGYRLDAVKHIKFSFLKDWVDNARAATGKEMFTVGEYWQNDLGALNNYLAKVNYNQSLFDAPLHYNFYAASTGGGYYDMRNILNNTLVASNPTKAVTLVENHDTQPGQSLESTVQPWFKPLAYAFILTRSGGYPSVFYGDMYGTKGTTTREIPALKSKIEPLLKARKDYAYGTQRDYIDNPDVIGWTREGDSTKAKSGLATVITDGPGGSKRMYVGTSNAGEIWYDLTGNRTDKITIGSDGYATFPVNGGSVSVWVQQ

SEQ ID NO: 36437 - protein, 480 aa, Cytophaga sp.
NGTMMQYFEWYVPNDGQQWNRLRTDAPYLSSVGITAVWTPPAYKGTSQADVGYGPYDLYDLGEFNQKGTVRTKYGTKGELKSAVNTLHSNGIQVYGDVVMNHKAGADYTENVTAVEVNPSNRNQETSGEYNIQAWTGFNFPGRGTTYSNFKWQWFHFDGTDWDQSRSLSRIFKFTGKAWDWEVSSENGNYDYCMYADIDYDHPDVVNEMKKWGVWYANEVGLDGYRLDAVKHIKFSFLKDWVDNARAATGKEMFTVGEYWQNDLGALNNYLAKVNYNQSLFDAPLHYNFYAASTGGGYYDMRNILNNTLVASNPTKAVTLVENHDTQPGQSLESTVQPWFKPLAYAFILTRSGGYPSVFYGDMYGTKGTTTREIPALKSKIEPLLKARKDYAYGTQRDYIDNPDVIGWTREGDSTKAKSGLATVITDGPGGSKRMYVGTSNAGEIWYDLTGNRTDKITIGSDGYATFPVNGGSVSVWVQQ

SEQ ID NO: 36438 - protein, 480 aa, Cytophaga sp.
NGTMMQYFEWYVPNDGQQWNRLRTDAPYLSSVGITAVWTPPAYKGTSQADVGYGPYDLYDLGEFNQKGTVRTKYGTKGELKSAVNTLHSNGIQVYGDVVMNHKAGADYTENVTAVEVNPSNRNQETSGEYNIQAWTGFNFPGRGTTYSNFKWQWFHFDGTDWDQSRSLSRIFKFTGKAWDWEVSSENGNYDYLMYADIDYDHPDVVNEMKKWGVWYANEVGLDGYRLDAVKHIKFSFLKDWVDNARAATGKEMFTVGEYWQNDLGALNNYLAKVNYNQSLFDAPLHYNFYAASTGGGYYDMRNILNNTLVASNPTKAVTLVENHDTQPGQSLESTVQPWFKPLAYAFILTRSGGYPSVFYGDMYGTKGTTTREIPALKSKIEPLLKARKDYAYGTQRDYIDNPDVIGWTREGDSTKAKSGLATVITDGPGGSKRMYVGTSNAGEIWYDLTGNRTDKITIGSDGYATFPVNGGSHSVWVQQ

SEQ ID NO: 36439 - protein, 480 aa, Cytophaga sp.
NGTMMQYFEWYVPNDGQQWNRLRTDAPYLSSVGITAVWTPPAYKGTSQADVGYGPYDLYDLGEFNQKGTVRTKYGTKGELKSAVNTLHSNGIQVYGDVVMNHKAGADYTENVTAVEVNPSNRNQETSGEYNIQAWTGFNFPGRGTTYSNFKWQWFHFDGTDWDQSRSLSRIFKFTGKAWDWEVSSENGNYDYLMYADIDYDHPDVVNEMKKWGVWYANEVGLDGYRLDAVKHIKFCFLKDWVDNARAATGKEMFTVGEYWQNDLGALNNYLAKVNYNQSLFDAPLHYNFYAASTGGGYYDMRNILNNTLVASNPTKAVTLVENHDTQPGQSLESTVQPWFKPLAYAFILTRSGGYPSVFYGDMYGTKGTTTREIPALKSKIEPLLKARKDYAYGTQRDYIDNPDVIGWTREGDSTKAKSGLATVITDGPGGSKRMYVGTSNAGEIWYDLTGNRTDKITIGSDGYATFPVNGGSVSVWVQQ

SEQ ID NO: 36440 - protein, 480 aa, Cytophaga sp.
NGTMMQYFEWYVPNDGQQWNRLRTDAPYLGSVGITAVWTPPAYKGTSQADVGYGPYDLYDLGEFNQKGTVRTKYGTKGELKSAVNTLHSNGIQVYGDVVMNHKAGADYTENVTAVEVNPSNRNQETSGEYNIQAWTGFNFPGRGTTYSNFKWQWFHFDGTDWDQSRSLSRIFKFTGKAWDWEVSSENGNYDYLMYADIDYDHPDVVNEMKKWGVWYANEVGLDGYRLDAVKHIKFSFLKDWVDNARAATGKEMFTVGEYWQNDLGALNNYLAKVNYNQSLFDAPLHYNFYAASTGGGYYDMRNILNNTLVASNPTKAVTLVENHDTQPGQSLESTVQPWFKPLAYAFILTRSGGYPSVFYGDMYGTKGTTTREIPALKSKIEPLLKARKDYAYGTQRDYIDNPDVIGWTREGDSTKAKSGLATVITDGPGGSKRMYVGTSNAGEIWYDLTGNRTDKITIGSDGYATFPVNGGSVSVWVQQ

SEQ ID NO: 36441 - protein, 480 aa, Cytophaga sp.
NGTMMQYFEWYVPNDGQQWNRLRTDAPYLSSVGITAVWTPPAYKGTSQADVGYGPYDLYDLGEFNQKGTVRTKYGTKGELKSAVNTLHSNGIQVYGDVVMNHKAGADYTENVTAVEVNPSNRNQETSGEYNIQAWTGFNFPGRGTTYSNFKWQWFHFDGTDWDQSRSLSRIFKFTGKAWDWEVSSENGNYDYLMYADIDYDHPDVVNEMKKWGVWYANEVGLDGYRLDAVKHIKFSFLKDWVDNARAATGKEMFTVGEYWQNDLGALNNYLAKVNYNQSLFDAPLHYNFYAASTGGGYYDMRNILNNTLVASNPTKAVTLVENHDTQPGQSLESTVQPWFKPLAYAFILTRSGGYPSVFYGDMYGTKGTTTREIPALKSKIEPLLYARKDYAYGTQRDYIDNPDVIGWTREGDSTKAKSGLATVITDGPGGSKRMYVGTSNAGEIWYDLTGNRTDKITIGSDGYATFPVNGGSVSVWVQQ

SEQ ID NO: 36442 - protein, 480 aa, Cytophaga sp.
NGTMMQYFEWYVPNDGQQWNRLRTDAPYLSSVGITAVWTPPAYKGTSQADVGYGPYDLYDLGEFNQKGTVRTKYGTKGELKSAVNTLHSNGIQVYGDVVMNHKAGADYTENVTAVEVNPSNRNQETSGEYNIQAWTGFNFPGRGTTYSNFKWQWFHFDGTDWDQSRSLSRIFKFTGKAWDWEVSSENGNYDYLMYADIDYDHPDVVNEMKKWGVWYANEVGLDGYRLDAVKHIKFSFLKDWVDNARAATGKEMFTVGEYWQNDLGALNNYLAKVNYNQSLFDAPLHYNFYAASTGGGYYDMRNILNNTLVASNPTKAVTLVENHDTQPGQSLESTVQPWFKPLAYAFILTRSGGYPSVFYGDMYGTKGTTTREIPALKSKIEPLLKARKDYAYGTQRDYIDNPDVIGWTRFGDSTKAKSGLATVITDGPGGSKRMYVGTSNAGEIWYDLTGNRTDKITIGSDGYATFPVNGGSVSVWVQQ

SEQ ID NO: 36443 - protein, 480 aa, Cytophaga sp.
NGTMMQYFEWYVPNDGQQWNRLRTDAPYLSSVGITAVWTPPAYKGTSQADVGYGPYDLYDLGEFNQKGTVRTKYGTKGELKSAVNTLHSNGIQVYGDVVMNHKAGADYTENVTAVEVNPSNRNQETSGEYNIQAWTGFNFPGRGTTYSNFKWQWFHFDGTDWDQSRSLSRIFKFTGKAWDWEVSSENGNYDYLMYADIDYDHPDVVNEMKKWGVWYANEVGLDGYRLDAVKHIKFSFLKDWVDNARAATGKEMFTVGEYWQNDLGALNNYLAKVNYNQSLFDAPLHYNFYAASTGGGYYDMRNILNNTLVASNPTKAVTLVENHDTQPGQSLESTVQPWFKPLAYAFILTRSGGYPSVFYGDMYGTKGTTTREIPALKSKIEPLLKARKDYAYGTQRDYIDNPDVIGWTREGDSTKAKSGLATVITDGPGGSKRMYVGTSNAGEIWYDLTGNWTDKITIGSDGYATFPVNGGSVSVWVQQ

SEQ ID NO: 36444 - protein, 480 aa, Cytophaga sp.
NGTMMQYFEWYVPNDGQQWNRLRTDAPYLSSVGITAVWTPPAYKGTSQADVGYGPYDLYDLGEFNQKGTVRTKYGTKGELKSAVNTLHSNGIQVYGDVVMNHKAGADYTENVTAVEVNPSNRNQETSGEYNIQAWTGFNFYGRGTTYSNFKWQWFHFDGTDWDQSRSLSRIFKFTGKAWDWEVSSENGNYDYLMYADIDYDHPDVVNEMKKWGVWYANEVGLDGYRLDAVKHIKFSFLKDWVDNARAATGKEMFTVGEYWQNDLGALNNYLAKVNYNQSLFDAPLHYNFYAASTGGGYYDMRNILNNTLVASNPTKAVTLVENHDTQPGQSLESTVQPWFKPLAYAFILTRSGGYPSVFYGDMYGTKGTTTREIPALKSKIEPLLKARKDYAYGTQRDYIDNPDVIGWTREGDSTKAKSGLATVITDGPGGSKRMYVGTSNAGEIWYDLTGNRTDKITIGSDGYATFPVNGGSVSVWVQQ

SEQ ID NO: 36445 - protein, 480 aa, Cytophaga sp.
NGTMMQYFEWYVPNDGQQWNRLRTDAPYLSSVGITAVWTPPAYKGTSQADVGYGPYDLYDLGEFNQKGTVRTKYGTKGELKSAVNTLHSNGIQVYGDVVMNHKAGADYTENVTAVEVNPSNRNQETSGEYNIQAWTGFNFGGRGTTYSNFKWQWFHFDGTDWDQSRSLSRIFKFTGKAWDWEVSSENGNYDYLMYADIDYDHPDVVNEMKKWGVWYANEVGLDGYRLDAVKHIKFSFLKDWVDNARAATGKEMFTVGEYWQNDLGALNNYLAKVNYNQSLFDAPLHYNFYAASTGGGYYDMRNILNNTLVASNPTKAVTLVENHDTQPGQSLESTVQPWFKPLAYAFILTRSGGYPSVFYGDMYGTKGTTTREIPALKSKIEPLLKARKDYAYGTQRDYIDNPDVIGWTREGDSTKAKSGLATVITDGPGGSKRMYVGTSNAGEIWYDLTGNRTDKITIGSDGYATFPVNGGSVSVWVQQ

SEQ ID NO: 36446 - protein, 480 aa, Cytophaga sp.
NGTMMQYFEWYVPNDGQQWNRLRTDAPYLSSVGITAVWTPPAYKATSQADVGYGPYDLYDLGEFNQKGTVRTKYGTKGELKSAVNTLHSNGIQVYGDVVMNHKAGADYTENVTAVEVNPSNRNQETSGEYNIQAWTGFNFPGRGTTYSNFKWQWFHFDGTDWDQSRSLSRIFKFTGKAWDWEVSSENGNYDYLMYADIDYDHPDVVNEMKKWGVWYANEVGLDGYRLDAVKHIKFSFLKDWVDNARAATGKEMFTVGEYWQNDLGALNNYLAKVNYNQSLFDAPLHYNFYAASTGGGYYDMRNILNNTLVASNPTKAVTLVENHDTQPGQSLESTVQPWFKPLAYAFILTRSGGYPSVFYGDMYGTKGTTTREIPALKSKIEPLLKARKDYAYGTQRDYIDNPDVIGWTREGDSTKAKSGLATVITDGPGGSKRMYVGTSNAGEIWYDLTGNRTDKITIGSDGYATFPVNGGSVSVWVQQ

SEQ ID NO: 36447 - protein, 480 aa, Cytophaga sp.
NGTMMQYFEWYVPNDGQQWNRLRTDAPYLSSVGITAVWTPPAYKGTSQADVGYGPYDLYDLGEFNQKGTVRTKYGTKGELKSAVNTLHSNGIQVYGDVVMNHKAGADYTENVTAVEVNPSNRNQETSGEYNIQAWTGFNFPGRGTTYSNFKWQWFHFDGTDWDQSRSLSRIFKFTGKAWDWEVSSENGNYDYLMYADIDYDHSDVVNEMKKWGVWYANEVGLDGYRLDAVKHIKFSFLKDWVDNARAATGKEMFTVGEYWQNDLGALNNYLAKVNYNQSLFDAPLHYNFYAASTGGGYYDMRNILNNTLVASNPTKAVTLVENHDTQPGQSLESTVQPWFKPLAYAFILTRSGGYPSVFYGDMYGTKGTTTREIPALKSKIEPLLKARKDYAYGTQRDYIDNPDVIGWTREGDSTKAKSGLATVITDGPGGSKRMYVGTSNAGEIWYDLTGNRTDKITIGSDGYATFPVNGGSVSVWVQQ

SEQ ID NO: 36448 - protein, 480 aa, Cytophaga sp.
NGTMMQYFEWYVPNDGQQWNRLRTDAPYLSSVGITAVWTPPAYKGTSQADVGYGPYDLYDLGEFNQKGTVRTKYGTKGELKSAVNTLHSNGIQVYGDVVMNHKAGADYTENVTAVEVNPSNRNQETSGEYNIQAWTGFNFPGRGTTYSNFKWQWFHFDGTDWDQSRSLSRIFKFTGKAWDWEVSSENGNYDYLMYADIDYDHPDVVNEMKKWGVWYANEVGLDGYRLDAVKHIKFSFLKDWVDNARARTGKEMFTVGEYWQNDLGALNNYLAKVNYNQSLFDAPLHYNFYAASTGGGYYDMRNILNNTLVASNPTKAVTLVENHDTQPGQSLESTVQPWFKPLAYAFILTRSGGYPSVFYGDMYGTKGTTTREIPALKSKIEPLLKARKDYAYGTQRDYIDNPDVIGWTREGDSTKAKSGLATVITDGPGGSKRMYVGTSNAGEIWYDLTGNRTDKITIGSDGYATFPVNGGSVSVWVQQ

SEQ ID NO: 36449 - protein, 480 aa, Cytophaga sp.
NGTMMQYFEWYVPNDGQQWNRLRTDAPYLSSVGITAVWTPPAYKGTSQADVGYGPYDLYDLGEFNQKGTVRTKYGTKGELKSAVNTLHSNGIQVYGDVVMNHKAGADYTENVTAVEVNPSNRNQETSGEYNIQAWTGFNFPGRGTTYSNFKWQWFHFDGTDWDQSRSLSRIFKFTGKAWDWEVSSENGNYDYLMYADIDYDHPDVVNEMKKWGVWYANEVGLDGYRLDAVKHIKFSFLKDWVDNARAATGKEMFTVGEYWQNDLGALNNYLAKVNYNQSLFDAPLHYNFYAASTGGGYYDMRNILNNTLVASNPTKAVTLVENHDTQPGQSLESTVQPWFKPLAYAFILTRSGGYPSVFYGDMYGTKGTTTREIPALKSKIEPLLKARHDYAYGTQRDYIDNPDVIGWTREGDSTKAKSGLATVITDGPGGSKRMYVGTSNAGEIWYDLTGNRTDKITIGSDGYATFPVNGGSVSVWVQQ

SEQ ID NO: 36450 - protein, 480 aa, Cytophaga sp.
NGTMMQYFEWYVPNDGQQWNRLRTDAPYLSSVGITAVWTPPAYKGTSQADVGYGPYDLYDLGEFNQKGTVRTKYGTKGELKSAVNTLHSNGIQVYGDVVMNHKAGADYTENVTAVEVNPSNRNQETSGEYNIQAWTGFNFPGRGTTYSNFKWQWFHFDGTDWDQSRSLSRIFKFTGKAWDWEVSSENGNYDYLMYADIDYDHPDVVNEMKKWGVWYANEVGLDGYRLDAVKHIKFSFLKDWVDNARAATGKEMFTVGEYWQNDLGALNNYLAKVNYNQSLFDAPLHYNFYAASTGGGYYDMRNILNNTLVASNPTKAVTLVENHDTQPGQSLESTVLPWFKPLAYAFILTRSGGYPSVFYGDMYGTKGTTTREIPALKSKIEPLLKARKDYAYGTQRDYIDNPDVIGWTREGDSTKAKSGLATVITDGPGGSKRMYVGTSNAGEIWYDLTGNRTDKITIGSDGYATFPVNGGSVSVWVQQ

SEQ ID NO: 36451 - protein, 480 aa, Cytophaga sp.
NGTMMQYFEWYVPNDGQQWNRLRTDAPYLDSVGITAVWTPPAYKGTSQADVGYGPYDLYDLGEFNQKGTVRTKYGTKGELKSAVNTLHSNGIQVYGDVVMNHKAGADYTENVTAVEVNPSNRNQETSGEYNIQAWTGFNFPGRGTTYSNFKWQWFHFDGTDWDQSRSLSRIFKFTGKAWDWEVSSENGNYDYLMYADIDYDHPDVVNEMKKWGVWYANEVGLDGYRLDAVKHIKFSFLKDWVDNARAATGKEMFTVGEYWQNDLGALNNYLAKVNYNQSLFDAPLHYNFYAASTGGGYYDMRNILNNTLVASNPTKAVTLVENHDTQPGQSLESTVQPWFKPLAYAFILTRSGGYPSVFYGDMYGTKGTTTREIPALKSKIEPLLKARKDYAYGTQRDYIDNPDVIGWTREGDSTKAKSGLATVITDGPGGSKRMYVGTSNAGEIWYDLTGNRTDKITIGSDGYATFPVNGGSVSVWVQQ

SEQ ID NO: 36452 - protein, 480 aa, Cytophaga sp.
NGTMMQYFEWYVPNDGQQWNRLRTDAPYLSSVGITAVWTPPAYKGTSQADVGYGPYDLYDLGEFNQKGTVRTKYGTKGELKSAVNTLHSNGIQVYGDVVMNHKAGADYTENVTAVEVNPSNRNQETSGEYNIQAWTGFNFPGRGTNYSNFKWQWFHFDGTDWDQSRSLSRIFKFTGKAWDWEVSSENGNYDYLMYADIDYDHPDVVNEMKKWGVWYANEVGLDGYRLDAVKHIKFSFLKDWVDNARAATGKEMFTVGEYWQNDLGALNNYLAKVNYNQSLFDAPLHYNFYAASTGGGYYDMRNILNNTLVASNPTKAVTLVENHDTQPGQSLESTVQPWFKPLAYAFILTRSGGYPSVFYGDMYGTKGTTTREIPALKSKIEPLLKARKDYAYGTQRDYIDNPDVIGWTREGDSTKAKSGLATVITDGPGGSKRMYVGTSNAGEIWYDLTGNRTDKITIGSDGYATFPVNGGSVSVWVQQ

SEQ ID NO: 36453 - protein, 480 aa, Cytophaga sp.
NGTMMQYFEWYVPNDGQQWNRLRTDAPYLSSVGITAVWTPPAYKGTSQADVGYGPYDLYDLGEFNQKGTVRTKYGTKGELKSAVNTLHSNGIQVYGDVVMNHKAGADYTENVTAVEVNPSNRNQETSGEYNIQAWTGFNFPGRGTTYSNFKWQWFHFDGTDWDQSRSLSRILKFTGKAWDWEVSSENGNYDYLMYADIDYDHPDVVNEMKKWGVWYANEVGLDGYRLDAVKHIKFSFLKDWVDNARAATGKEMFTVGEYWQNDLGALNNYLAKVNYNQSLFDAPLHYNFYAASTGGGYYDMRNILNNTLVASNPTKAVTLVENHDTQPGQSLESTVQPWFKPLAYAFILTRSGGYPSVFYGDMYGTKGTTTREIPALKSKIEPLLKARKDYAYGTQRDYIDNPDVIGWTREGDSTKAKSGLATVITDGPGGSKRMYVGTSNAGEIWYDLTGNRTDKITIGSDGYATFPVNGGSVSVWVQQ

SEQ ID NO: 36454 - protein, 480 aa, Cytophaga sp.
NGTMMQYFEWYVPNDGQQWNRLRTDAPYLSSVGITAVWTPPAYKGTSQADVGYGPYDLYDLGEFNQKGTVRTKYGTKGELKSAVNTLHSNGIQVYGDVVMNHKAGADYTENVTAVEVNPSNRNQETSGEYNIQAWTGFNFPGRGTTYSNFKWQWFHFDGTDWDQSRSLSRIFKFTGKAWDWEVSSENGNYDYLMYADIDYDHPDVVNEMKKWGVWYANEVGLDGYRLDAVKHIKFSFLKDWVDNARAATGKEMFTVGEYWCNDLGALNNYLAKVNYNQSLFDAPLHYNFYAASTGGGYYDMRNILNNTLVASNPTKAVTLVENHDTQPGQSLESTVQPWFKPLAYAFILTRSGGYPSVFYGDMYGTKGTTTREIPALKSKIEPLLKARKDYAYGTQRDYIDNPDVIGWTREGDSTKAKSGLATVITDGPGGSKRMYVGTSNAGEIWYDLTGNRTDKITIGSDGYATFPVNGGSVSVWVQQ

SEQ ID NO: 36455 - protein, 480 aa, Cytophaga sp.
NGTMMQYFEWYVPNDGQQWNRLRTDAPYLSSVGITAVWTPPAYKGTSQADVGYGPYDLYDLGEFNQKGTVRTKYGTKGELKSAVNTLHSNGIQVYGDVVMNHKAGADYTENVTAVEVNPSNRNQETSGEYNIQAWTGFNFPGRGTTYSNFKWQWFHFDGTDWDQSRSLSRIFKFTGKAWDWEVSSENGNYDYLMYADIDYDHPDVVNEMKKWGVWYANEVGLDGYRLDAVKHIKFSFLKDWVDNARAATGKEMFTVGEYWQNDLGALNNYLAKVNYNQSLFDAPLHYNFYAASTGGGYYDMRNILNNTLVASNPTKAVTLVENHDTQPGQSLESTVQPWFKPLAYAFILTRSGGYPSVFYGDMYGTKGTTTREIPALKSKIEPLLKARKDYAYGTQRDYIDNPDVIGWTREGDSTKAKSGLATVITDGPGGSKRMYVGTSNAGEIWYDLTGNRTDKITIGSDGYATFPVPGGSVSVWVQQ

SEQ ID NO: 36456 - protein, 480 aa, Cytophaga sp.
NGTMMQYFEWYVPNDGQQWNRLRTDAPYLSSVGITAVWTPPAYKGTSQADVGYGPYDLYDLGEFNQKGTVRTKYGTKGELKSAVNTLHSNGIQVYGDVVMNHKAGADYTENVTAVEVNPSNRNQETSGEYNIQAWTGFNFPGRGTTYSNFKWQWFHFDGTDWDQSRSLSRIFKFTGKAWDWEVSSENGNYDYLMYADIDYDHPDVVNEMKKWGVWYANEVGLDGYRLDAVKHIKFSFLKDWVDNARAATGKEMFTVGEYWQNDLGALNNYLAKVNYNQSLFDAPLHYNFYAASTGGGYYDMRNILNNTLVASNPTKAVTLVENHDTQPGQSLESTVQPWFKPLAYAFILTRSGGYPSVFYGDMYGTKGTTTREIPALKSKIEPLLKARKDCAYGTQRDYIDNPDVIGWTREGDSTKAKSGLATVITDGPGGSKRMYVGTSNAGEIWYDLTGNRTDKITIGSDGYATFPVNGGSVSVWVQQ

SEQ ID NO: 36457 - protein, 480 aa, Cytophaga sp.
NGTMMQYFEWYVPNDGQQWNRLRTDAPYLSSVGITAVWTPPAYKGTSQADVGYGPYDLYDLGEFNQKGTVRTKYGTKGELKSAVNTLHSNGIQVYGDVVMNHKAGADYTENVTAVEVNPSNRNQETSGEYNIQAWTGFNFPGRGTTYSNFKWQWFHFDGTDWDQSRSLSRIFKFTGKAWDWEVSSANGNYDYLMYADIDYDHPDVVNEMKKWGVWYANEVGLDGYRLDAVKHIKFSFLKDWVDNARAATGKEMFTVGEYWQNDLGALNNYLAKVNYNQSLFDAPLHYNFYAASTGGGYYDMRNILNNTLVASNPTKAVTLVENHDTQPGQSLESTVQPWFKPLAYAFILTRSGGYPSVFYGDMYGTKGTTTREIPALKSKIEPLLKARKDYAYGTQRDYIDNPDVIGWTREGDSTKAKSGLATVITDGPGGSKRMYVGTSNAGEIWYDLTGNRTDKITIGSDGYATFPVNGGSVSVWVQQ

SEQ ID NO: 36458 - protein, 480 aa, Cytophaga sp.
NGTMMQYFEWYVPNDGQQWNRLRTDAPYLSSVGITAVWTPPAYKGTSQADVGYGPYDLYDLGEFNQKGTVRTKYGTKGELKSAVNTLHSNGIQVYGDVVMNHKAGADYTENVTAVEVNPSNRNQETSGEYNIQAWTGFNFPGRGTTYSNFKWQWFHFDGTDWDQSRSLSRIFKFTGKAWDWEVSSENGNYDYLMYADIDYDHPDVVNEMKKWGVWYANEVGLDGYRLDAVKHIKFYFLKDWVDNARAATGKEMFTVGEYWQNDLGALNNYLAKVNYNQSLFDAPLHYNFYAASTGGGYYDMRNILNNTLVASNPTKAVTLVENHDTQPGQSLESTVQPWFKPLAYAFILTRSGGYPSVFYGDMYGTKGTTTREIPALKSKIEPLLKARKDYAYGTQRDYIDNPDVIGWTREGDSTKAKSGLATVITDGPGGSKRMYVGTSNAGEIWYDLTGNRTDKITIGSDGYATFPVNGGSVSVWVQQ

SEQ ID NO: 36459 - protein, 480 aa, Cytophaga sp.
NGTMMQYFEWYVPNDGQQWNRLRTDAPYLSSVGITAVWTPPAYKGTSQADVGYGPYDLYDLGEFNQKGTVRTKYGTKGELKSAVNTLHSNGIQVYGDVVMNHKAGADYTENVTAVEVNPSNRNQETSGEYNIQAWTGFNFPGRGTTYSNFKWQWFHFDGTDWDQSRSLSRIFKFTGKAWDWEVSSENGNYDYLMYADIDYDHPDVVNEMKKWGVWYANEVGLDGYRLDAVKHIKFSFLKDWVDNARAATGKEMFTVGEYWQNDLGALNNYLAKVNYNQSLFDAPLHYNFYAASTGGGYYDMRNILNNTLVASNPTKAVTLVENHDTQPGQSLESTVQPWFKPLAYAFILTRSGGIPSVFYGDMYGTKGTTTREIPALKSKIEPLLKARKDYAYGTQRDYIDNPDVIGWTREGDSTKAKSGLATVITDGPGGSKRMYVGTSNAGEIWYDLTGNRTDKITIGSDGYATFPVNGGSVSVWVQQ

SEQ ID NO: 36460 - protein, 480 aa, Cytophaga sp.
NDTMMQYFEWYVPNDGQQWNRLRTDAPYLSSVGITAVWTPPAYKGTSQADVGYGPYDLYDLGEFNQKGTVRTKYGTKGELKSAVNTLHSNGIQVYGDVVMNHKAGADYTENVTAVEVNPSNRNQETSGEYNIQAWTGFNFPGRGTTYSNFKWQWFHFDGTDWDQSRSLSRIFKFTGKAWDWEVSSENGNYDYLMYADIDYDHPDVVNEMKKWGVWYANEVGLDGYRLDAVKHIKFSFLKDWVDNARAATGKEMFTVGEYWQNDLGALNNYLAKVNYNQSLFDAPLHYNFYAASTGGGYYDMRNILNNTLVASNPTKAVTLVENHDTQPGQSLESTVQPWFKPLAYAFILTRSGGYPSVFYGDMYGTKGTTTREIPALKSKIEPLLKARKDYAYGTQRDYIDNPDVIGWTREGDSTKAKSGLATVITDGPGGSKRMYVGTSNAGEIWYDLTGNRTDKITIGSDGYATFPVNGGSVSVWVQQ

SEQ ID NO: 36461 - protein, 480 aa, Cytophaga sp.
NGTMMQYFEWYVPNDGQQWNRLRTDAPYLSSVGITAVWTPPAYKGTSQADVGYGPYDLYDLGEFNQKGTVRTKYGTKGELKSAVNTLHSNGIQVYGDVVMNHKAGADYTENVTAVEVNPSNRNQETSGEYNIQAWTGFNFPGRGTTYSNFKWQWFHFDGTDWDQSRSLSRIFKFTGKAWDWEVSSENGNYDYLMYADIDYDHPDVVNEMKKWGVWYANEVGLDGYRLDAVKHIKFSFLKDWVDNARAATGKEMFTVGEYWQNDLGALNNYLAKVNYNQSLFDAPLHYNFYAASTGGGYYDMRNILNNTLVASNPTKAVTLVENHDTQPGQSLESTVQPWFKPLAYAFILTRSGGYPSVFYGDMYGTKGTTTREIPALKSKIEPLLKARKDYAYGTQRDYIDNPDVIGWTREGYSTKAKSGLATVITDGPGGSKRMYVGTSNAGEIWYDLTGNRTDKITIGSDGYATFPVNGGSVSVWVQQ

SEQ ID NO: 36462 - protein, 480 aa, Cytophaga sp.
NGTMMQYFEWYVPNDGQQWNRLRTDAPYLSSVGITAVWTPPAYKGTSQADVGYGPYDLYDLGEFNQKGTVRTKYGTKGELKSAVNTLHSNGIQVYGDVVMNHKAGADYTENVTAVEVNPSNRNQETSGEYNIQAWTGFNFPGRGTTYSNFKWQWFHFDGTDWDQSRSLSRIFKFTGKAWDWEVSSENGNYDYLMYADIDYDHPDVVNEMKKWGVWYANEVGLDGYRLDAVKHIKFSFLKDWVDNARAATGKEMFTVGEYWQNDLGALNNYLAKVNYNQSLFDAPLHYNFYAASTGGGYYDMRNILNNTLVASNPTKAVTLVENHDTQPGQSLESTVQPWFKPLSYAFILTRSGGYPSVFYGDMYGTKGTTTREIPALKSKIEPLLKARKDYAYGTQRDYIDNPDVIGWTREGDSTKAKSGLATVITDGPGGSKRMYVGTSNAGEIWYDLTGNRTDKITIGSDGYATFPVNGGSVSVWVQQ

SEQ ID NO: 36463 - protein, 480 aa, Cytophaga sp.
NGTMMQYFEWYVPNDGQQWNRLRTDAPYLSSVGITAVWTPPAYKGTSQADVGYGPYDLYDLGEFNQKGTVRTKYGTKGELKSAVNTLHSNGIQVYGDVVMNHKAGADYTENVTAVEVNPSNRNQETSGEYNIQAWTGFNFPGRGTTYSNFKWQWFHFDGTDWDQSRSLSRIFKFTGKAWDWEVSSENGNYDYLMYADIDYYHPDVVNEMKKWGVWYANEVGLDGYRLDAVKHIKFSFLKDWVDNARAATGKEMFTVGEYWQNDLGALNNYLAKVNYNQSLFDAPLHYNFYAASTGGGYYDMRNILNNTLVASNPTKAVTLVENHDTQPGQSLESTVQPWFKPLAYAFILTRSGGYPSVFYGDMYGTKGTTTREIPALKSKIEPLLKARKDYAYGTQRDYIDNPDVIGWTREGDSTKAKSGLATVITDGPGGSKRMYVGTSNAGEIWYDLTGNRTDKITIGSDGYATFPVNGGSVSVWVQQ

SEQ ID NO: 36464 - protein, 480 aa, Cytophaga sp.
NGTMMQYFEWYVPNDGQQWNRLRTDAPYLSSVGITAVWTPPAYKGTSQADVGYGPYDLYDLGEFNQKGTVRTKYGTKGELKSAVNTLHSNGIQVYGDVVMNHKAGADYTENVTAVEVNPSNRNQETSGEYNIQAWTGFNFPGRGTTYSNFKWQWFHFDGTDWDQSRSLSRIFKFTGKAWDWEVSSENGNYDYLMYADIDYDHPDVVNEMKKWGVWYANEVGLDGYRLDAVKHIKFSFLKDWVDNARAATGKEMFTVGEYWQNDLGALNNYLAKVNYNQSLFDAPLHYNFYAASTGGGYYDMRNILNNTLVASNPTKAVTLVENHDTQPGQSLESTVQPWFKPLAYAFILTRSGGYPSVFYGDMYGTKGTTTREIPALKSKIEPLLKARKDYAYGTQRDYIDNPDVIGWTREGDSTKAKSGLATVITDGDGGSKRMYVGTSNAGEIWYDLTGNRTDKITIGSDGYATFPVNGGSVSVWVQQ

SEQ ID NO: 36465 - protein, 480 aa, Cytophaga sp.
NGTMMQYFEWYVPNDGQQWNRLRTDAPYLSSVGITAVWTPPAYKGTSQADVGYGPYDLYDLGEFNQKGTVRTKYGTKGELKSAVNTLHSNGIQVYGDVVMNHKAGADYTENVTAVEVNPSNRNQETSGEYNIQAWTGFNFPGRGTTYSNFKWQWFHFDGTDWDQSRSLSRIFKFTGKAWDWEVSSENGNYDYLMYADIDYDHPDVVNEMKKWGVWYANEVGLDGYRLDAVKHIKFSFLKDWVDNARAATGKEQFTVGEYWQNDLGALNNYLAKVNYNQSLFDAPLHYNFYAASTGGGYYDMRNILNNTLVASNPTKAVTLVENHDTQPGQSLESTVQPWFKPLAYAFILTRSGGYPSVFYGDMYGTKGTTTREIPALKSKIEPLLKARKDYAYGTQRDYIDNPDVIGWTREGDSTKAKSGLATVITDGPGGSKRMYVGTSNAGEIWYDLTGNRTDKITIGSDGYATFPVNGGSVSVWVQQ

SEQ ID NO: 36466 - protein, 480 aa, Cytophaga sp.
NGTMMQYFEWYVPNDGQQWNRLRTDAPYLSSVGITAVWTPPAYKGTSQADVGYGPYDLYDLGEFNQKGTVRTKYGTKGELKSAVNTLHSNGIQVYGDVVMNHKAGADYTENVTAVEVNPSNRNQETSGEYNIQAWTGFNFPGRGTTYSNFKWQWFHFDGTDWDQSRSLSRIFKFTGKAWDWEVSSENANYDYLMYADIDYDHPDVVNEMKKWGVWYANEVGLDGYRLDAVKHIKFSFLKDWVDNARAATGKEMFTVGEYWQNDLGALNNYLAKVNYNQSLFDAPLHYNFYAASTGGGYYDMRNILNNTLVASNPTKAVTLVENHDTQPGQSLESTVQPWFKPLAYAFILTRSGGYPSVFYGDMYGTKGTTTREIPALKSKIEPLLKARKDYAYGTQRDYIDNPDVIGWTREGDSTKAKSGLATVITDGPGGSKRMYVGTSNAGEIWYDLTGNRTDKITIGSDGYATFPVNGGSVSVWVQQ

SEQ ID NO: 36467 - protein, 480 aa, Cytophaga sp.
NGTMMQYFEWYVPNDGQQWNRLRTDAPYLSSVGITAVWTPPAYKGTSQADVGYGPYDLYDLGEFNQKGTVRTKYGTKGELKSAVNTLHSNGIQVYGDVVMNHKAGADYTENVTAVEVNPSNRNQETSGEYNIQAWTGFNFPGRGTTYSNFKWQWFHFDGTDWDQSRSLSRIFKFTGKAWDWEVSSENGNYDYLMYADIDYDHPDVVNEMKKWGVWYANEVGLDGYRLDAVKHIKFSFLKDWVDNARAATGKAMFTVGEYWQNDLGALNNYLAKVNYNQSLFDAPLHYNFYAASTGGGYYDMRNILNNTLVASNPTKAVTLVENHDTQPGQSLESTVQPWFKPLAYAFILTRSGGYPSVFYGDMYGTKGTTTREIPALKSKIEPLLKARKDYAYGTQRDYIDNPDVIGWTREGDSTKAKSGLATVITDGPGGSKRMYVGTSNAGEIWYDLTGNRTDKITIGSDGYATFPVNGGSVSVWVQQ

SEQ ID NO: 36468 - protein, 480 aa, Cytophaga sp.
NGTMMQYFEWYVPNDGQQWNRLRTDAPYLSSVGITAVWTPPAYKGTSQADVGYGPYDLYDLGEFNQKGTVRTKYGTKGELKSAVNTLHSNGIQVYGDVVMNHKAGADYTENVTAVEVNPSNRNQETSGEYNIQAWTGFNFPGRGTTYSNFKWQWFHFDGTDWDQLRSLSRIFKFTGKAWDWEVSSENGNYDYLMYADIDYDHPDVVNEMKKWGVWYANEVGLDGYRLDAVKHIKFSFLKDWVDNARAATGKEMFTVGEYWQNDLGALNNYLAKVNYNQSLFDAPLHYNFYAASTGGGYYDMRNILNNTLVASNPTKAVTLVENHDTQPGQSLESTVQPWFKPLAYAFILTRSGGYPSVFYGDMYGTKGTTTREIPALKSKIEPLLKARKDYAYGTQRDYIDNPDVIGWTREGDSTKAKSGLATVITDGPGGSKRMYVGTSNAGEIWYDLTGNRTDKITIGSDGYATFPVNGGSVSVWVQQ

SEQ ID NO: 36469 - protein, 480 aa, Cytophaga sp.
NGTMMQYFEWYVPNDGQQWNRLRTDAPYLSSVGITAVWTPPAYKGTSQADVGYGPYDLYDLGEFNQKGTVRTKYGTKGELKSAVNTLHSNGIQVYGDVVMNHKAGADYTENVTAVEVNPSNRNQETSGEYNIQAWTGFNFPGRGTTYSNFKWQWFHFDGTDWDQSRSLSRIFKFTGKAWDWEVSSENGNYDYLMYADIDYDHPDVVNEMKKWGVWYANEVGLDGYRLDAVKHIKFSFLKDWVDNARAATGKEMFTVGEYWQNDLGALNNYLAKVNYNQELFDAPLHYNFYAASTGGGYYDMRNILNNTLVASNPTKAVTLVENHDTQPGQSLESTVQPWFKPLAYAFILTRSGGYPSVFYGDMYGTKGTTTREIPALKSKIEPLLKARKDYAYGTQRDYIDNPDVIGWTREGDSTKAKSGLATVITDGPGGSKRMYVGTSNAGEIWYDLTGNRTDKITIGSDGYATFPVNGGSVSVWVQQ

SEQ ID NO: 36470 - protein, 480 aa, Cytophaga sp.
NGTMMQYFEWYVPNDGQQWNRLRTDAPYLSSVGITAVWTPPAYKGTSQADVGYGPYDLYDLGEFNQKGTVRTKYGTKGELKSAVNTLHSNGIQVYGDVVMNHKAGADYTENVTAVEVNPSNRNQETSGEYNIQAWTGFNFPGRGTIYSNFKWQWFHFDGTDWDQSRSLSRIFKFTGKAWDWEVSSENGNYDYLMYADIDYDHPDVVNEMKKWGVWYANEVGLDGYRLDAVKHIKFSFLKDWVDNARAATGKEMFTVGEYWQNDLGALNNYLAKVNYNQSLFDAPLHYNFYAASTGGGYYDMRNILNNTLVASNPTKAVTLVENHDTQPGQSLESTVQPWFKPLAYAFILTRSGGYPSVFYGDMYGTKGTTTREIPALKSKIEPLLKARKDYAYGTQRDYIDNPDVIGWTREGDSTKAKSGLATVITDGPGGSKRMYVGTSNAGEIWYDLTGNRTDKITIGSDGYATFPVNGGSVSVWVQQ

SEQ ID NO: 36471 - protein, 480 aa, Cytophaga sp.
NGTMMQYFEWYVPNDGQQWNRLRTDAPYLSSVGITAVWTPPAYKGTSQADVGYGPYDLYDLGEFNQKGTVRTKYGTKGELKSAVNTLHSNGIQVYGDVVMNHKAGADYTENVTAVEVNPSNRNQETSGEYNIQAWTGFNFPGRGTTYSNFKWQWFHFDGTDWDQSRSLSRIFKFTGKAWDWEVSSENGNYDYLMYADIDYDHPDVVNEMKKWGVWYANEVGLDGYRLDAVKHIKFSFLKDWVDNARAATGKEMFTVGEYWQNDLGALNNYLAKVNYNQSLFDAPLHYNFYAASTGGGYYDMRNILNNTLVASNPTKAVTLVENHDTQPGQSLESTVQPWFKPLAYAFILTRSGGYPSVFYGDMYGTKGTTTREIPALKSKIEPLLKARKDYAYGTQRDYIDNPDVIGWTREGDSTKAKSGLATVITDGMGGSKRMYVGTSNAGEIWYDLTGNRTDKITIGSDGYATFPVNGGSVSVWVQQ

SEQ ID NO: 36472 - protein, 480 aa, Cytophaga sp.
NGTMMQYFEWYVPNDGQQWNRLRTDAPYLSSVGITAVWTPPAYKGTSQADVGYGPYDLYDLGEFNQKGTVRTKYGTKGELKSAVNTLHSNGIQVYGDVVMNHKAGADYTENVTAVEVNPSNRNQETSGEYNIQAWTGFNFPGRGTTYSNFKWQWFHFDGTDWDQSRSLSRIFKFTGKAWDWEVSSENGNYDYLMYADIDYDHPDVVNEMKKWGVWYANEVGLDGYRLDAVKHIKFSFLKDWVDNARAATGKEMFTVGEYWQNDLGALNNYLAKVNYNQSLFDAPLHYNFYAASTGGGYYDMRNILNNTLVASNPTKAVTLVENHDTQPGQSLESTVQPWFKPLAYAFILTRSGGEPSVFYGDMYGTKGTTTREIPALKSKIEPLLKARKDYAYGTQRDYIDNPDVIGWTREGDSTKAKSGLATVITDGPGGSKRMYVGTSNAGEIWYDLTGNRTDKITIGSDGYATFPVNGGSVSVWVQQ

SEQ ID NO: 36473 - protein, 480 aa, Cytophaga sp.
NGTMMQYFEWYVPNDGQQWNRLRTDAPYLSSVGITAVWTPPAYKGTSQADVGYGPYDLYDLGEFNQKGTVRTKYGTKGELKSAVNTLHSNGIQVYGDVVMNHKAGADYTENVNAVEVNPSNRNQETSGEYNIQAWTGFNFPGRGTTYSNFKWQWFHFDGTDWDQSRSLSRIFKFTGKAWDWEVSSENGNYDYLMYADIDYDHPDVVNEMKKWGVWYANEVGLDGYRLDAVKHIKFSFLKDWVDNARAATGKEMFTVGEYWQNDLGALNNYLAKVNYNQSLFDAPLHYNFYAASTGGGYYDMRNILNNTLVASNPTKAVTLVENHDTQPGQSLESTVQPWFKPLAYAFILTRSGGYPSVFYGDMYGTKGTTTREIPALKSKIEPLLKARKDYAYGTQRDYIDNPDVIGWTREGDSTKAKSGLATVITDGPGGSKRMYVGTSNAGEIWYDLTGNRTDKITIGSDGYATFPVNGGSVSVWVQQ

SEQ ID NO: 36474 - protein, 480 aa, Cytophaga sp.
NGTMMQYFEWYVPNDGQQWNRLRTDAPYLSSVGITAVWTPPAYKGTSQADVGYGPYDLYDLGEFNQKGTVRTKYGTKGELKSAVNTLHSNGIQVYGDVVMNHKAGADYTENVTAVEVNPSNRNQVTSGEYNIQAWTGFNFPGRGTTYSNFKWQWFHFDGTDWDQSRSLSRIFKFTGKAWDWEVSSENGNYDYLMYADIDYDHPDVVNEMKKWGVWYANEVGLDGYRLDAVKHIKFSFLKDWVDNARAATGKEMFTVGEYWQNDLGALNNYLAKVNYNQSLFDAPLHYNFYAASTGGGYYDMRNILNNTLVASNPTKAVTLVENHDTQPGQSLESTVQPWFKPLAYAFILTRSGGYPSVFYGDMYGTKGTTTREIPALKSKIEPLLKARKDYAYGTQRDYIDNPDVIGWTREGDSTKAKSGLATVITDGPGGSKRMYVGTSNAGEIWYDLTGNRTDKITIGSDGYATFPVNGGSVSVWVQQ

SEQ ID NO: 36475 - protein, 480 aa, Cytophaga sp.
NGTMMQYFEWYVPNDGQQWNRLRTDAPYLSSVGITAVWTPPAYKGTSQADVGYGPYDLYDLGEFNQKGTVRTKYGTKGELKSAVNTLHSNGIQVYGDVVMNHKAGADYTENVTAVEVNASNRNQETSGEYNIQAWTGFNFPGRGTTYSNFKWQWFHFDGTDWDQSRSLSRIFKFTGKAWDWEVSSENGNYDYLMYADIDYDHPDVVNEMKKWGVWYANEVGLDGYRLDAVKHIKFSFLKDWVDNARAATGKEMFTVGEYWQNDLGALNNYLAKVNYNQSLFDAPLHYNFYAASTGGGYYDMRNILNNTLVASNPTKAVTLVENHDTQPGQSLESTVQPWFKPLAYAFILTRSGGYPSVFYGDMYGTKGTTTREIPALKSKIEPLLKARKDYAYGTQRDYIDNPDVIGWTREGDSTKAKSGLATVITDGPGGSKRMYVGTSNAGEIWYDLTGNRTDKITIGSDGYATFPVNGGSVSVWVQQ

SEQ ID NO: 36476 - protein, 480 aa, Cytophaga sp.
NGTMMQYFEWYVPNDGQQWNRLRTDAPYLSSVGITAVWTPPAYKGTSQADVGYGPYDLYDLGEFNQKGTVRTKYGTKGELKSAVNTLHSNGIQVYGDVVMNHKAGADYTENVTAVEVNPSNRNQETSGEYNIQAWTGFNFPGRGTTYSNFKWQWFHFDGTDWDQSRSLSRIFKFTGKAWDWEVSSENGNYDYLMYADIDYDHPDVVNEMKKWGVWYANEVGLDGYRLDAVKHIKFSFLKDWVDNARAATGKEMFTVGEYWQNDLGALNNYLAKVNYNQSLFDAPLHYNFYAASTGGGYYDMRNILNNTLVASNPTKAVTLVENHDTQPGQSLESTVQPWFKPLAYAFILTRSGGYPSVFYGDMYGTKGTTTREIPALKSKIEPLLKARKDYAYGTQRDYIDNPDVIGWTREGDSTKAESGLATVITDGPGGSKRMYVGTSNAGEIWYDLTGNRTDKITIGSDGYATFPVNGGSVSVWVQQ

SEQ ID NO: 36477 - protein, 480 aa, Cytophaga sp.
NGTMMQYFEWYVPNDGQQWNRLRTDAPYLSSVGITAVWTPPAYKGTSQADVGYGPYDLYDLGEFNQKGTVRTKYGTKGELKSAVNTLHSNGIQVYGDVVMNHKAGPDYTENVTAVEVNPSNRNQETSGEYNIQAWTGFNFPGRGTTYSNFKWQWFHFDGTDWDQSRSLSRIFKFTGKAWDWEVSSENGNYDYLMYADIDYDHPDVVNEMKKWGVWYANEVGLDGYRLDAVKHIKFSFLKDWVDNARAATGKEMFTVGEYWQNDLGALNNYLAKVNYNQSLFDAPLHYNFYAASTGGGYYDMRNILNNTLVASNPTKAVTLVENHDTQPGQSLESTVQPWFKPLAYAFILTRSGGYPSVFYGDMYGTKGTTTREIPALKSKIEPLLKARKDYAYGTQRDYIDNPDVIGWTREGDSTKAKSGLATVITDGPGGSKRMYVGTSNAGEIWYDLTGNRTDKITIGSDGYATFPVNGGSVSVWVQQ

SEQ ID NO: 36478 - protein, 480 aa, Cytophaga sp.
NGTMMQYFEWYVPNDGQQWNRLRTDAPYLSSVGITAVWTPPAYKGTSQADVGYGPYDLYDLGEFNQKGTVRTKYGTKGELKSAVNTLHSNGIQVYGDVVMNHKAGADYTENVTAVEVNPSNRNQETSGEYNIQAWTGFNFPGRGTTYSNFKWQWFHFDGTDWDQSRSLSRIFKFTGKAWDWEVSSENGNYDYLMYADIDYDHPDVQNEMKKWGVWYANEVGLDGYRLDAVKHIKFSFLKDWVDNARAATGKEMFTVGEYWQNDLGALNNYLAKVNYNQSLFDAPLHYNFYAASTGGGYYDMRNILNNTLVASNPTKAVTLVENHDTQPGQSLESTVQPWFKPLAYAFILTRSGGYPSVFYGDMYGTKGTTTREIPALKSKIEPLLKARKDYAYGTQRDYIDNPDVIGWTREGDSTKAKSGLATVITDGPGGSKRMYVGTSNAGEIWYDLTGNRTDKITIGSDGYATFPVNGGSVSVWVQQ

SEQ ID NO: 36479 - protein, 480 aa, Cytophaga sp.
NGTMMQYFEWYVPNDGQQWNRLRTDAPYLSSVGITAVWTPPAYKGTSQADVGYGPYDLYDLGEFNQKGTVRTKYGTKGELKSAVNTLHSNGIQVYGDVVMNHKAGADYTENVTAVEVNPSNRNQETSGYYNIQAWTGFNFPGRGTTYSNFKWQWFHFDGTDWDQSRSLSRIFKFTGKAWDWEVSSENGNYDYLMYADIDYDHPDVVNEMKKWGVWYANEVGLDGYRLDAVKHIKFSFLKDWVDNARAATGKEMFTVGEYWQNDLGALNNYLAKVNYNQSLFDAPLHYNFYAASTGGGYYDMRNILNNTLVASNPTKAVTLVENHDTQPGQSLESTVQPWFKPLAYAFILTRSGGYPSVFYGDMYGTKGTTTREIPALKSKIEPLLKARKDYAYGTQRDYIDNPDVIGWTREGDSTKAKSGLATVITDGPGGSKRMYVGTSNAGEIWYDLTGNRTDKITIGSDGYATFPVNGGSVSVWVQQ

SEQ ID NO: 36480 - protein, 480 aa, Cytophaga sp.
NGTMMQYFEWYVPNDGQQWNRLRTDAPYLSSVGITAVWTPPAYKGTSQADVGYGPYDLYDLGEFNQKGTVRTKYGTKGELKSAVNTLHSNGIQVYGDVVMNHKAGADYTENVTAVEVNPSNRNQETSGEYNIQAWTGFNFPGRGTTYSNFKWQWFHFDGTDWDQSRSLRRIFKFTGKAWDWEVSSENGNYDYLMYADIDYDHPDVVNEMKKWGVWYANEVGLDGYRLDAVKHIKFSFLKDWVDNARAATGKEMFTVGEYWQNDLGALNNYLAKVNYNQSLFDAPLHYNFYAASTGGGYYDMRNILNNTLVASNPTKAVTLVENHDTQPGQSLESTVQPWFKPLAYAFILTRSGGYPSVFYGDMYGTKGTTTREIPALKSKIEPLLKARKDYAYGTQRDYIDNPDVIGWTREGDSTKAKSGLATVITDGPGGSKRMYVGTSNAGEIWYDLTGNRTDKITIGSDGYATFPVNGGSVSVWVQQ

SEQ ID NO: 36481 - protein, 480 aa, Cytophaga sp.
NGTMMQYFEWYVPNDGQQWNRLRTDAPYLSSVGITAVWTPPAYKGTSQADVGYGPYDLYDLGEFNQKGTVRTKYGTKGELKSAVNTLHSNGIQVYGDVVMNHKAGADYTENVTAVEVNPSNRNQETSGEYNIQAWTGFNFPGRGTTYSNFKWQWFHFDGTDWDQSRSLSRIFKFTGKAWDWEVSSENGNYDYLMYADIDYDHPDVVNEMKKWGVWYANEVGLDGYRLDAVKHIKFSFLKDWVDNARAATGKEMFTVGEYWQNDLGALNNYLAKVNYNQSLFDAPLHYNFYAASTGGGYYDMRNILNNTLVASNPTKAVTLVENHDTQPGQSLESTVQPWFKPLAYAFILTRSGGYPSVFYGDMYGTKGTTTREIPALKSKIEPLLKARMDYAYGTQRDYIDNPDVIGWTREGDSTKAKSGLATVITDGPGGSKRMYVGTSNAGEIWYDLTGNRTDKITIGSDGYATFPVNGGSVSVWVQQ

SEQ ID NO: 36482 - protein, 480 aa, Cytophaga sp.
NGTMMQYFEWYVPNDGQQWNRLRTDAPYLSSVGITAVWTPPAYKGTSQADVGYGPYDLYDLGEFNQKGTVRTKYGTKGELKSAVNTLHSNGIQVYGDVVMNHKAGADYTENVTAVEVNPSNRNQETHGEYNIQAWTGFNFPGRGTTYSNFKWQWFHFDGTDWDQSRSLSRIFKFTGKAWDWEVSSENGNYDYLMYADIDYDHPDVVNEMKKWGVWYANEVGLDGYRLDAVKHIKFSFLKDWVDNARAATGKEMFTVGEYWQNDLGALNNYLAKVNYNQSLFDAPLHYNFYAASTGGGYYDMRNILNNTLVASNPTKAVTLVENHDTQPGQSLESTVQPWFKPLAYAFILTRSGGYPSVFYGDMYGTKGTTTREIPALKSKIEPLLKARKDYAYGTQRDYIDNPDVIGWTREGDSTKAKSGLATVITDGPGGSKRMYVGTSNAGEIWYDLTGNRTDKITIGSDGYATFPVNGGSVSVWVQQ

SEQ ID NO: 36483 - protein, 480 aa, Cytophaga sp.
NGTMMQYFEWYVPNDGQQWNRLRTDAPYLSSVGITAVWTPPAYKGTSQADVGYGPYDLYDLGEFNQKGTVRTKYGTKGELKSAVNTLHSNGIQVYGDVVMNHKAGADYTENVTAVEVNPSNRNQETSGEYNIQAWTGFNFPGRGTTYSNFKWQWFHFDGTDWDQSRSLSRIFKFTGKAWDWEVSSENGNYDYLMYADIDYDHPDVVNEMKKWGVWYANEVGLDGYRLDAVKHIKFSFIKDWVDNARAATGKEMFTVGEYWQNDLGALNNYLAKVNYNQSLFDAPLHYNFYAASTGGGYYDMRNILNNTLVASNPTKAVTLVENHDTQPGQSLESTVQPWFKPLAYAFILTRSGGYPSVFYGDMYGTKGTTTREIPALKSKIEPLLKARKDYAYGTQRDYIDNPDVIGWTREGDSTKAKSGLATVITDGPGGSKRMYVGTSNAGEIWYDLTGNRTDKITIGSDGYATFPVNGGSVSVWVQQ

SEQ ID NO: 36484 - protein, 480 aa, Cytophaga sp.
NGTMMQYFEWYVPNDGQQWNRLRTDAPYLSSVGITAVWTPPAYKGTSQADVGYGPYDLYDLGEFNQKGTVRTKYGTKGELKSAVNTLHSNGIQVYGDVVMNHKAGADYTENVTAVEVNPSNRNQETSGEYNIQAWTGFNFPGRGTTYSNFKWQWFHFDGTDWDQSRSLSRIFKFTGKAWDWEVSSENGNYDYLMYADIDYDHPDVVNEMKKWGVWYANEVGLDGYRLDAVKHIKFSFLKDWVDNARAATGREMFTVGEYWQNDLGALNNYLAKVNYNQSLFDAPLHYNFYAASTGGGYYDMRNILNNTLVASNPTKAVTLVENHDTQPGQSLESTVQPWFKPLAYAFILTRSGGYPSVFYGDMYGTKGTTTREIPALKSKIEPLLKARKDYAYGTQRDYIDNPDVIGWTREGDSTKAKSGLATVITDGPGGSKRMYVGTSNAGEIWYDLTGNRTDKITIGSDGYATFPVNGGSVSVWVQQ

SEQ ID NO: 36485 - protein, 480 aa, Cytophaga sp.
NGTMMQYFEWYVPNDGQQWNRLRTDAPYLSSVGITAVWTPPAYKGTSQADVGYGPYDLYDLGEFNQKGTVRTKYGTKGELKSAVNTLHSNGIQVYGDVVMNHKAGADYTENVTAVEVNPSNRNQETSGEYNIQAGTGFNFPGRGTTYSNFKWQWFHFDGTDWDQSRSLSRIFKFTGKAWDWEVSSENGNYDYLMYADIDYDHPDVVNEMKKWGVWYANEVGLDGYRLDAVKHIKFSFLKDWVDNARAATGKEMFTVGEYWQNDLGALNNYLAKVNYNQSLFDAPLHYNFYAASTGGGYYDMRNILNNTLVASNPTKAVTLVENHDTQPGQSLESTVQPWFKPLAYAFILTRSGGYPSVFYGDMYGTKGTTTREIPALKSKIEPLLKARKDYAYGTQRDYIDNPDVIGWTREGDSTKAKSGLATVITDGPGGSKRMYVGTSNAGEIWYDLTGNRTDKITIGSDGYATFPVNGGSVSVWVQQ

SEQ ID NO: 36486 - protein, 480 aa, Cytophaga sp.
NGTMMQYFEWYVPNDGQQWNRLRTDAPYLSSVGITAVWTPPAYKGTSQADVGYGPYDLYDLGEFNQKGTVRTKYGTKGELKSAVNTLHSNGIIVYGDVVMNHKAGADYTENVTAVEVNPSNRNQETSGEYNIQAWTGFNFPGRGTTYSNFKWQWFHFDGTDWDQSRSLSRIFKFTGKAWDWEVSSENGNYDYLMYADIDYDHPDVVNEMKKWGVWYANEVGLDGYRLDAVKHIKFSFLKDWVDNARAATGKEMFTVGEYWQNDLGALNNYLAKVNYNQSLFDAPLHYNFYAASTGGGYYDMRNILNNTLVASNPTKAVTLVENHDTQPGQSLESTVQPWFKPLAYAFILTRSGGYPSVFYGDMYGTKGTTTREIPALKSKIEPLLKARKDYAYGTQRDYIDNPDVIGWTREGDSTKAKSGLATVITDGPGGSKRMYVGTSNAGEIWYDLTGNRTDKITIGSDGYATFPVNGGSVSVWVQQ

SEQ ID NO: 36487 - protein, 480 aa, Cytophaga sp.
NGTMMQYFEWYVPNDGQQWNRLRTDAPYLSSVGITAVWTPPAYKGTSQADVGYGPYDLYDLGEFNQKGTVRTKYGTKGELKSAVNTLHSNGIQVYGDVVMNHKAGADYTENVTAVEVNPSNRNQETSGEYNIQAWTGFNFPGRGTTYSNFKWQWFHFDGTDWDQSRSLSRIFKFTGKAWDWEVSSENGNYDYLMYADIDYDHPDVVNEMKKWGVWYANEVGLDGYRLDAVKHIKFSFLKDWVDNARAATGKEYFTVGEYWQNDLGALNNYLAKVNYNQSLFDAPLHYNFYAASTGGGYYDMRNILNNTLVASNPTKAVTLVENHDTQPGQSLESTVQPWFKPLAYAFILTRSGGYPSVFYGDMYGTKGTTTREIPALKSKIEPLLKARKDYAYGTQRDYIDNPDVIGWTREGDSTKAKSGLATVITDGPGGSKRMYVGTSNAGEIWYDLTGNRTDKITIGSDGYATFPVNGGSVSVWVQQ

SEQ ID NO: 36488 - protein, 480 aa, Cytophaga sp.
NGTMMQYFEWYVPNDGQQWNRLRTDAPYLSSVGITAVWTPPAYKGTSQADVGYGPYDLYDLGEFNQKGTVRTKYGTKGELKSAVNTLHSNGIQVYGDVVMNHKAGADYTENVTAVEVNPSNRNQETSGEYNIQAWTGFNFPGRGTTYSNFKWQWFHFDGTDWDQSRSLSRIFKFTGKAWDWEVSSENGNYDYLMYADIDYDHPDVVNEMTKWGVWYANEVGLDGYRLDAVKHIKFSFLKDWVDNARAATGKEMFTVGEYWQNDLGALNNYLAKVNYNQSLFDAPLHYNFYAASTGGGYYDMRNILNNTLVASNPTKAVTLVENHDTQPGQSLESTVQPWFKPLAYAFILTRSGGYPSVFYGDMYGTKGTTTREIPALKSKIEPLLKARKDYAYGTQRDYIDNPDVIGWTREGDSTKAKSGLATVITDGPGGSKRMYVGTSNAGEIWYDLTGNRTDKITIGSDGYATFPVNGGSVSVWVQQ

SEQ ID NO: 36489 - protein, 480 aa, Cytophaga sp.
NGTMMQYFEWYVPNDGQQWNRLRTDAPYLSSVGITAVWTPPAYKGTSQADVGYGPYDLYDLGEFNQKGTVRTKYGTKGELKSAVNTLHSNGIQVYGDVVMNHKAGADYTENVTAVEVNPSNRNQETSGEYNIQAWTGFNFPGRGTTYSNFKWQWFHFDGTDWDQSRSLSRIFKFTGKAWDWEVSSENGNYDYLMYADIDYDHRDVVNEMKKWGVWYANEVGLDGYRLDAVKHIKFSFLKDWVDNARAATGKEMFTVGEYWQNDLGALNNYLAKVNYNQSLFDAPLHYNFYAASTGGGYYDMRNILNNTLVASNPTKAVTLVENHDTQPGQSLESTVQPWFKPLAYAFILTRSGGYPSVFYGDMYGTKGTTTREIPALKSKIEPLLKARKDYAYGTQRDYIDNPDVIGWTREGDSTKAKSGLATVITDGPGGSKRMYVGTSNAGEIWYDLTGNRTDKITIGSDGYATFPVNGGSVSVWVQQ

SEQ ID NO: 36490 - protein, 480 aa, Cytophaga sp.
NGTMMQYFEWYVPNDGQQWNRLRTDAPYLSSVGITAVWTPPAYKGTSQADVGYGPYDLYDLGEFNQKGTVRTKYGTKGELKSAVNTLHSNGIQVYGDVVMNHKAGADYTENVTAVEVNPSNRNQETSGEYNIQAWTGFNFPGRGTTYSNFKWQWFHFDGTDWDQSRSLSRIFKFTGKAWDWEVSSENGNYDYLMYADIDYDHPDVVNEMKKWGVWYANEVGLDGYRLDAVKHIKFSFLKDWVDNARAATGKEMFTVGEYWQNDLGALNNYLAKVNYNQSLFDAPLHYNFYAASTGGGYYDMRNILNNTLVASNPTKAVTLVENHDTQPGQSLESTVQPWFKPLAYAFILTRSGGYPSVFYGDMYGTKGTTTREIPALKSKIEPLLKARKDYAYGTMRDYIDNPDVIGWTREGDSTKAKSGLATVITDGPGGSKRMYVGTSNAGEIWYDLTGNRTDKITIGSDGYATFPVNGGSVSVWVQQ

SEQ ID NO: 36491 - protein, 480 aa, Cytophaga sp.
NGTMMQYFEWYVPNDGQQWNRLRTDAPYLSSVGITAVWTPPAYKGTSQADVGYGPYDLYDLGEFNQKGTVRTKYGTKGELKSAVNTLHSNGIQVYGDVVMNHKAGADYTENVTAVEVNPSNRNQEFSGEYNIQAWTGFNFPGRGTTYSNFKWQWFHFDGTDWDQSRSLSRIFKFTGKAWDWEVSSENGNYDYLMYADIDYDHPDVVNEMKKWGVWYANEVGLDGYRLDAVKHIKFSFLKDWVDNARAATGKEMFTVGEYWQNDLGALNNYLAKVNYNQSLFDAPLHYNFYAASTGGGYYDMRNILNNTLVASNPTKAVTLVENHDTQPGQSLESTVQPWFKPLAYAFILTRSGGYPSVFYGDMYGTKGTTTREIPALKSKIEPLLKARKDYAYGTQRDYIDNPDVIGWTREGDSTKAKSGLATVITDGPGGSKRMYVGTSNAGEIWYDLTGNRTDKITIGSDGYATFPVNGGSVSVWVQQ

SEQ ID NO: 36492 - protein, 480 aa, Cytophaga sp.
NQTMMQYFEWYVPNDGQQWNRLRTDAPYLSSVGITAVWTPPAYKGTSQADVGYGPYDLYDLGEFNQKGTVRTKYGTKGELKSAVNTLHSNGIQVYGDVVMNHKAGADYTENVTAVEVNPSNRNQETSGEYNIQAWTGFNFPGRGTTYSNFKWQWFHFDGTDWDQSRSLSRIFKFTGKAWDWEVSSENGNYDYLMYADIDYDHPDVVNEMKKWGVWYANEVGLDGYRLDAVKHIKFSFLKDWVDNARAATGKEMFTVGEYWQNDLGALNNYLAKVNYNQSLFDAPLHYNFYAASTGGGYYDMRNILNNTLVASNPTKAVTLVENHDTQPGQSLESTVQPWFKPLAYAFILTRSGGYPSVFYGDMYGTKGTTTREIPALKSKIEPLLKARKDYAYGTQRDYIDNPDVIGWTREGDSTKAKSGLATVITDGPGGSKRMYVGTSNAGEIWYDLTGNRTDKITIGSDGYATFPVNGGSVSVWVQQ

SEQ ID NO: 36493 - protein, 480 aa, Cytophaga sp.
NGTMMQYFEWYVPNDGQQWNRLRTDAPYLSSVGITAVWTPPAYKGTSQADVGYGPYDLYDLGEFNQKGTVRTKYGTKGELKSAVNTLHSNGIQVYGDVVMNHKAGADYTENVTAVEVNPSNRNQETSGEYNIQAPTGFNFPGRGTTYSNFKWQWFHFDGTDWDQSRSLSRIFKFTGKAWDWEVSSENGNYDYLMYADIDYDHPDVVNEMKKWGVWYANEVGLDGYRLDAVKHIKFSFLKDWVDNARAATGKEMFTVGEYWQNDLGALNNYLAKVNYNQSLFDAPLHYNFYAASTGGGYYDMRNILNNTLVASNPTKAVTLVENHDTQPGQSLESTVQPWFKPLAYAFILTRSGGYPSVFYGDMYGTKGTTTREIPALKSKIEPLLKARKDYAYGTQRDYIDNPDVIGWTREGDSTKAKSGLATVITDGPGGSKRMYVGTSNAGEIWYDLTGNRTDKITIGSDGYATFPVNGGSVSVWVQQ

SEQ ID NO: 36494 - protein, 480 aa, Cytophaga sp.
NGTMMQYFEWYVPNDGQQWNRLRTDAPYLSSVGITAVWTPPAYKGTSQADVGYGPYDLYDLGEFNQKGTVRTKYGTKGELKSAVNTLHSNGIQVYGDVVMNHKAGADYTENVTAVEVNPSNRNQETSGEYNIQAWTGFNFPGRGTTYSNFKWQWFHFDGTDWDQSRSLSRIFKFTGKAWDWEVSSENGNYDYLMYADIDYDHPDVVNEMKKWGVWYANEVGLDGYRLDAVKHIKFSFAKDWVDNARAATGKEMFTVGEYWQNDLGALNNYLAKVNYNQSLFDAPLHYNFYAASTGGGYYDMRNILNNTLVASNPTKAVTLVENHDTQPGQSLESTVQPWFKPLAYAFILTRSGGYPSVFYGDMYGTKGTTTREIPALKSKIEPLLKARKDYAYGTQRDYIDNPDVIGWTREGDSTKAKSGLATVITDGPGGSKRMYVGTSNAGEIWYDLTGNRTDKITIGSDGYATFPVNGGSVSVWVQQ

SEQ ID NO: 36495 - protein, 480 aa, Cytophaga sp.
NETMMQYFEWYVPNDGQQWNRLRTDAPYLSSVGITAVWTPPAYKGTSQADVGYGPYDLYDLGEFNQKGTVRTKYGTKGELKSAVNTLHSNGIQVYGDVVMNHKAGADYTENVTAVEVNPSNRNQETSGEYNIQAWTGFNFPGRGTTYSNFKWQWFHFDGTDWDQSRSLSRIFKFTGKAWDWEVSSENGNYDYLMYADIDYDHPDVVNEMKKWGVWYANEVGLDGYRLDAVKHIKFSFLKDWVDNARAATGKEMFTVGEYWQNDLGALNNYLAKVNYNQSLFDAPLHYNFYAASTGGGYYDMRNILNNTLVASNPTKAVTLVENHDTQPGQSLESTVQPWFKPLAYAFILTRSGGYPSVFYGDMYGTKGTTTREIPALKSKIEPLLKARKDYAYGTQRDYIDNPDVIGWTREGDSTKAKSGLATVITDGPGGSKRMYVGTSNAGEIWYDLTGNRTDKITIGSDGYATFPVNGGSVSVWVQQ

SEQ ID NO: 36496 - protein, 480 aa, Cytophaga sp.
NGTMMQYFEWYVPNDGQQWNRLRTDAPYLSSVGITAVWTPPAYKGTSQADVGYGPYDLYDLGEFNQKGTVRTKYGTKGELKSAVNTLHSNGIQVYGDVVMNHKAGADYTENVDAVEVNPSNRNQETSGEYNIQAWTGFNFPGRGTTYSNFKWQWFHFDGTDWDQSRSLSRIFKFTGKAWDWEVSSENGNYDYLMYADIDYDHPDVVNEMKKWGVWYANEVGLDGYRLDAVKHIKFSFLKDWVDNARAATGKEMFTVGEYWQNDLGALNNYLAKVNYNQSLFDAPLHYNFYAASTGGGYYDMRNILNNTLVASNPTKAVTLVENHDTQPGQSLESTVQPWFKPLAYAFILTRSGGYPSVFYGDMYGTKGTTTREIPALKSKIEPLLKARKDYAYGTQRDYIDNPDVIGWTREGDSTKAKSGLATVITDGPGGSKRMYVGTSNAGEIWYDLTGNRTDKITIGSDGYATFPVNGGSVSVWVQQ

SEQ ID NO: 36497 - protein, 480 aa, Cytophaga sp.
NGTMMQYFEWYVPNDGQQWNRLRTDAPYLSSVGITAVWTPPAYKGTSQADVGYGPYDLYDLGEFNQKGTVRTKYGTKGELKSAVNTLHSNGIQVYGDVVMNHKAGADYTENVTAVEVNPSNRNQETSGEYNIQARTGFNFPGRGTTYSNFKWQWFHFDGTDWDQSRSLSRIFKFTGKAWDWEVSSENGNYDYLMYADIDYDHPDVVNEMKKWGVWYANEVGLDGYRLDAVKHIKFSFLKDWVDNARAATGKEMFTVGEYWQNDLGALNNYLAKVNYNQSLFDAPLHYNFYAASTGGGYYDMRNILNNTLVASNPTKAVTLVENHDTQPGQSLESTVQPWFKPLAYAFILTRSGGYPSVFYGDMYGTKGTTTREIPALKSKIEPLLKARKDYAYGTQRDYIDNPDVIGWTREGDSTKAKSGLATVITDGPGGSKRMYVGTSNAGEIWYDLTGNRTDKITIGSDGYATFPVNGGSVSVWVQQ

SEQ ID NO: 36498 - protein, 480 aa, Cytophaga sp.
NGTMMQYFEWYVPNDGQQWNRLRTDAPYLSSVGITAVWTPPAYKGTSQADVGYGPYDLYDLGEFNQKGTVRTKYGTKGELKSAVNTLHSNGIQVYGDVVMNHKAGADYTENVTAVEVNPSNRNQETSGEYNIQAWTGFNFPGRGTTYSNFKWQWFHFDGTDWDQSRSLSRIFKFTGKAWDWEVSSENGNYDYLMYADIDYDHPDVLNEMKKWGVWYANEVGLDGYRLDAVKHIKFSFLKDWVDNARAATGKEMFTVGEYWQNDLGALNNYLAKVNYNQSLFDAPLHYNFYAASTGGGYYDMRNILNNTLVASNPTKAVTLVENHDTQPGQSLESTVQPWFKPLAYAFILTRSGGYPSVFYGDMYGTKGTTTREIPALKSKIEPLLKARKDYAYGTQRDYIDNPDVIGWTREGDSTKAKSGLATVITDGPGGSKRMYVGTSNAGEIWYDLTGNRTDKITIGSDGYATFPVNGGSVSVWVQQ

SEQ ID NO: 36499 - protein, 480 aa, Cytophaga sp.
NGTMMQYFEWYVPNDGQQWNRLRTDAPYLSSVGITAVWTPPAYKGTSQADVGYGPYDLYDLGEFNQKGTVRTKYGTKGELKSAVNTLHSNGIQVYGDVVMNHKAGADYTENVTAVEVNPSNRNQETSGEYNIQAWTGFNFPGRGTTYSNFKWQWFHFDGTDWDQSRSLSRIFKFTGKAWDWEVSSENGNYDYLMYADIDYDHPDVVNEMRKWGVWYANEVGLDGYRLDAVKHIKFSFLKDWVDNARAATGKEMFTVGEYWQNDLGALNNYLAKVNYNQSLFDAPLHYNFYAASTGGGYYDMRNILNNTLVASNPTKAVTLVENHDTQPGQSLESTVQPWFKPLAYAFILTRSGGYPSVFYGDMYGTKGTTTREIPALKSKIEPLLKARKDYAYGTQRDYIDNPDVIGWTREGDSTKAKSGLATVITDGPGGSKRMYVGTSNAGEIWYDLTGNRTDKITIGSDGYATFPVNGGSVSVWVQQ

SEQ ID NO: 36500 - protein, 480 aa, Cytophaga sp.
NGTMMQYFEWYVPNDGQQWNRLRTDAPYLSSVGITAVWTPPAYKGTSQADVGYGPYDLYDLGEFNQKGTVRTKYGTKGELKSAVNTLHSNGIQVYGDVVMNHKAGADYTENVTAVEVNPSNRNQETSGEYNIQAWTGFNFPGRGTTYSNFKWQWFHFDGTDWDQSRSLSRIFKFTGKAWDWEVSSENGNYDYLMYADIDYDHPDVVNEMKKWGVWYANEVGLDGYRLDAVKHIKFSFLKDWVDNARAATGKEMFTVGEYWQNDLGALNNYLAKVNYNQSLFDAPLHYNFYAASTGGGYYDMRNILNNTLVASNPTKAVTLVENHDTQPGQSLESTVQPWFKPLAYAFILTRSGGYPSVFYGDMYGTKGTTTREIPALKSKIEPLLKARKDYAYGTQRDYIDNPDVIGWTRSGDSTKAKSGLATVITDGPGGSKRMYVGTSNAGEIWYDLTGNRTDKITIGSDGYATFPVNGGSVSVWVQQ

SEQ ID NO: 36501 - protein, 480 aa, Cytophaga sp.
NGTMMQYFEWYVPNDGQQWNRLRTDAPYLSSVGITAVWTPPAYKGTSQADVGYGPYDLYDLGEFNQKGTVRTKYGTKGELKSAVNTLHSNGIQVYGDVVMNHKAGADYTENVTAVEVNPSNRNQETSGEYNIQAWTGFNFPGRGTTYSNFKWQWFHFDGTDWDQSRSLSRIFKFTGKAWDWEVSSENGNYDYLMYADIDYDHPDVVNEMKKWGVWYANEVGLDGYRLDAVKHIKFSFLKDWVDNARAATGKEMFTVGEYWQNDLGALNNYLAKVNYNQSLFDAPLHYNFYAASTGGGYYDMRNILNNTLVASNPTKAVTLVENHDTQPGQSLESTVQPWFKPLAYAFILTRSGGYPSVFYGDMYGTKGTTTREIPALKSKIEPLLKARKDYAYGTQRDYIDNPDVIGWTREGDSTKRKSGLATVITDGPGGSKRMYVGTSNAGEIWYDLTGNRTDKITIGSDGYATFPVNGGSVSVWVQQ

SEQ ID NO: 36502 - protein, 480 aa, Cytophaga sp.
NGTMMQYFEWYVPNDGQQWNRLRTDAPYLSSVGITAVWTPPAYKGTSQADVGYGPYDLYDLGEFNQKGTVRTKYGTKGELKSAVNTLHSNGIQVYGDVVMNHKAGADYTENVTAVEVNPSNRNQETSGEYNIQAWTGFNFPTRGTTYSNFKWQWFHFDGTDWDQSRSLSRIFKFTGKAWDWEVSSENGNYDYLMYADIDYDHPDVVNEMKKWGVWYANEVGLDGYRLDAVKHIKFSFLKDWVDNARAATGKEMFTVGEYWQNDLGALNNYLAKVNYNQSLFDAPLHYNFYAASTGGGYYDMRNILNNTLVASNPTKAVTLVENHDTQPGQSLESTVQPWFKPLAYAFILTRSGGYPSVFYGDMYGTKGTTTREIPALKSKIEPLLKARKDYAYGTQRDYIDNPDVIGWTREGDSTKAKSGLATVITDGPGGSKRMYVGTSNAGEIWYDLTGNRTDKITIGSDGYATFPVNGGSVSVWVQQ

SEQ ID NO: 36503 - protein, 480 aa, Cytophaga sp.
NGTMMQYFEWYVPNDGQQWNRLRTDAPYLSSVGITAVWTPPAYKGTSQADVGYGPYDLYDLGEFNQKGTVRTKYGTKGELKSAVNTLHSNGIQVYGDVVMNHKAGADYTENVTAVEVNPSNRNQETSGEYNIQAWTGFNFPGRGTTYSNFKWQWFHFDGTDWDQSRSLSRIFKFTGKAWDWEVSSENGNYDYLMYADIDYDHPDVVNEMKKWGVWYANEVGLDGYRLDAVKHIKFSFLKDWVDNARAATGKEMFTVGEYWFNDLGALNNYLAKVNYNQSLFDAPLHYNFYAASTGGGYYDMRNILNNTLVASNPTKAVTLVENHDTQPGQSLESTVQPWFKPLAYAFILTRSGGYPSVFYGDMYGTKGTTTREIPALKSKIEPLLKARKDYAYGTQRDYIDNPDVIGWTREGDSTKAKSGLATVITDGPGGSKRMYVGTSNAGEIWYDLTGNRTDKITIGSDGYATFPVNGGSVSVWVQQ

SEQ ID NO: 36504 - protein, 480 aa, Cytophaga sp.
NGTMMQYFEWYVPNDGQQWNRLRTDAPYLSSVGITAVWTPPAYKGTSQADVGYGPYDLYDLGEFNQKGTVRTKYGTKGELKSAVNTLHSNGIQVYGDVVMNHKAGADYTENVTAVEVNPSNRNQETSGEYNIQAWTGFNFPGRGTTYSNFKWQWFHFDGTDWDQSRSLSRIFKFTGKAWDWEVSSENGNYDYLMYADIDYDHPDVVNEMKKWGVWYANEVGLDGYRLDAVKHIKFSFLKDWVDNARAATGKEMFTVGEYWQNDLGALNNYLAKVNYNQSLFDAPLHYNFYAASTGGGYYDMRNILNNTLVASNPTKAVTLVENHDTQPGQSLESTVQPWFKPLAYAFILTRSGGYPSVFYGDMYGTKGTTTREIPALKSKIEPLLKARKDYAYGTQRDYIDNPDVIGWTREGNSTKAKSGLATVITDGPGGSKRMYVGTSNAGEIWYDLTGNRTDKITIGSDGYATFPVNGGSVSVWVQQ

SEQ ID NO: 36505 - protein, 480 aa, Cytophaga sp.
NGTMMQYFEWYVPNDGQQWNRLRTDAPYLSSVGITAVWTPPAYKGTSQADVGYGPYDLYDLGEFNQKGTVRTKYGTKGELKSAVNTLHSNGIQVYGDVVMNHKAGADYTENVTAVEVNPSNRNQETSGEYNIQAWTGFNFPGRGTTYSNFKWQWFHFDGTDWDQSRSLSRIFKFTGKAWDWEVSSENGNYDYLMYADIDYDHPDVVNEMKKWGVWYANEVGLDGYRLDAVKHIKFSFLKDWVDNARAATGKEMFTVGEYWQNDLGALNNYLAKVNYNQSLFDAPLHYNFYAASTGGGYYDMRNILNNTLVASNPTKAVTLVENHDTQPGQSLESTVQPWFKPLAYAFILTRSGGYPSVFYGDMYGTKGTTTREIPALKSKIEPLLKARKDYAYGTQRSYIDNPDVIGWTREGDSTKAKSGLATVITDGPGGSKRMYVGTSNAGEIWYDLTGNRTDKITIGSDGYATFPVNGGSVSVWVQQ

SEQ ID NO: 36506 - protein, 480 aa, Cytophaga sp.
NGTMMQYFEWYVPNDGQQWNRLRTDAPYLSSVGITAVWTPPAYKGTSQADVGYGPYDLYDLGEFNQKGTVRTKYGTKGELKSAVNTLHSNGIQVYGDVVMNHKAGADYTENVTAVEVNPSNRNQETSGEYNIQAWTGFNFPGRGTTYSNFKWQWFHFDGTDWDQSRSLSRIFKFTGKAWDWEVSSENGNYDYLMYADIDYDHPDVVNEMKKWGVWYANEVGLDGYRLDAVKHIKFSFLKDWVDNARAATGKEMFTVGEYWQNDLGALNNYLAKVNYNQSLFDAPLHYNFYAASTGGGYYDMRNILNNTLVASNPTKAVTLVENHDTQPGQSLESTVQPWFKPLAYAFILTRSGGYPSVFYGDMYGTKGTTTREIPALKSKIEPLLKARKDYAYGTQRDYIDNPDVIGWAREGDSTKAKSGLATVITDGPGGSKRMYVGTSNAGEIWYDLTGNRTDKITIGSDGYATFPVNGGSVSVWVQQ

SEQ ID NO: 36507 - protein, 480 aa, Cytophaga sp.
NGTMMQYFEWYVPNDGQQWNRLRTDAPYLSSVGITAVWTPPAYKGTSQADVGYGPYDLYDLGEFNQKGTVRTKYGTKGELKSAVNTLHSNGIQVYGDVVMNHKAGADYTENVTAVEVNPSNRNQETSGEYNIQAWTGFNFPGRGTTYSNFKWQWFHFDGTDWDQSRSLSRIFKFTGKAWDWEVSSENGNYDYLMYADIDYDHPDVVNEMKKWGVWYANEVGLDGYRLDAVKHIKFSFLKDWVDNARAATGKEMFTVGEYWQNDLGALNNYLAKVNYNQSLFDAPLHYNFYAASTGGGYYDMRNILNNTLVASNPTKAVTLVENHDTQPGQSLESTVQPWFKPLAYAFILTRSGGYPSVFYGDMYGTDGTTTREIPALKSKIEPLLKARKDYAYGTQRDYIDNPDVIGWTREGDSTKAKSGLATVITDGPGGSKRMYVGTSNAGEIWYDLTGNRTDKITIGSDGYATFPVNGGSVSVWVQQ

SEQ ID NO: 36508 - protein, 480 aa, Cytophaga sp.
NGTMMQYFEWYVPNDGQQWNRLRTDAPYLSSVGITAVWTPPAYKGTSQADVGYGPYDLYDLGEFNQKGTVRTKYGTKGELKSAVNTLHSNGIQVYGDVVMNHKAGADYTENVTAVEVNPSNRNQETSGEYNIQAWTGFNFPGRGTTYSNFKWQWFHFDGTDWDQSRSLSRIFKFTGKAWDWEVSSENGNYDYLMYADIDYDHPDVVNEMKKWGVWYANEVGLDGYRLDAVKHIKFIFLKDWVDNARAATGKEMFTVGEYWQNDLGALNNYLAKVNYNQSLFDAPLHYNFYAASTGGGYYDMRNILNNTLVASNPTKAVTLVENHDTQPGQSLESTVQPWFKPLAYAFILTRSGGYPSVFYGDMYGTKGTTTREIPALKSKIEPLLKARKDYAYGTQRDYIDNPDVIGWTREGDSTKAKSGLATVITDGPGGSKRMYVGTSNAGEIWYDLTGNRTDKITIGSDGYATFPVNGGSVSVWVQQ

SEQ ID NO: 36509 - protein, 480 aa, Cytophaga sp.
NGTMMQYFEWYVPNDGQQWNRLRTDAPYLSSVGITAVWTPPAYKGTSQADVGYGPYDLYDLGEFNQKGTVRTKYGTKGELKSAVNTLHSNGIQVYGDVVMNHKAGADYTENVTAVEVNPSNRNQETSGEYNIQAWTGFNFPGRGTTYSNFKWQWFHFDGTDWDQSRSLSRIFKFTGKAWDWEVSSENGNYDYLMYADIDYDHPDVNNEMKKWGVWYANEVGLDGYRLDAVKHIKFSFLKDWVDNARAATGKEMFTVGEYWQNDLGALNNYLAKVNYNQSLFDAPLHYNFYAASTGGGYYDMRNILNNTLVASNPTKAVTLVENHDTQPGQSLESTVQPWFKPLAYAFILTRSGGYPSVFYGDMYGTKGTTTREIPALKSKIEPLLKARKDYAYGTQRDYIDNPDVIGWTREGDSTKAKSGLATVITDGPGGSKRMYVGTSNAGEIWYDLTGNRTDKITIGSDGYATFPVNGGSVSVWVQQ

SEQ ID NO: 36510 - protein, 480 aa, Cytophaga sp.
NGTMMQYFEWYVPNDGQQWNRLRTDAPYLSSVGITAVWTPPAYKGTSQADVGYGPYDLYDLGEFNQKGTVRTKYGTKGELKSAVNTLHSNGIQVYGDVVMNHKAGADYTENVTAVEVNPSNRNQETSGEYNIQAWTGFNFPGRGTTYSNFKWQWFHFDGTDWDQSRSLSRIFKFTGKAWDWEVSSENGNYDYLMYADIDYDHPDVVNEMKKWGVWYANEVGLDGYRLDAVKHIKFSFLKDWVDNARAATGKEMFTVGEYWQNDLGALNNYLAKVNYNQSLFDAPLHYNFYAASTGGGYYDMRNILNNTLVASNPTKAVTLVENHDTQPGQSLESTVQPWFKPLAYAFILTRSGGYPSVFYGDMYGTKGTTTREIPALKSKIEPLLKARKDYAYGTQRDYIDNPDVIGWTREGDSTKAKSGLATVITDGPGGSKRMYVGTSNAGEIWYDLTGNRTDKITIGSDGYATFPVVGGSVSVWVQQ

SEQ ID NO: 36511 - protein, 480 aa, Cytophaga sp.
NGTMMQYFEWYVPNDGQQWNRLRTDAPYLSSVGITAVWTPPAYKGTSQADVGYGPYDLYDLGEFNQKGTVRTKYGTKGELKSAVNTLHSNGIQVYGDVVMNHKAGADYTENVTAVEVNPSNRNQETSGEYNIQAWTGFNFPGRGTTYSNFKWQWFHFDGTDWDQSRSLSRIFKFTGKAWDWEVSSENGNYDYLMYADIDYDHPDVVNEMKKWGVWYANEVGLDGYRLDAVKHIKFSFLKDWVDNARAATGKEMFTVGEYWQNDLGALNNYLAKVNYNQSLFDAPLHYNFYAASTGGGYYDMRNILNNTLVASNPTKAVTLVENHDTQPGQSLESTVQPWFKPLAYAFILTRSGGYPSVFYGDMYGTKGTTTREIPALKSKIEPLLKARKDYAYGTQRDYIDNPDVIGWTREGDSTKQKSGLATVITDGPGGSKRMYVGTSNAGEIWYDLTGNRTDKITIGSDGYATFPVNGGSVSVWVQQ

SEQ ID NO: 36512 - protein, 480 aa, Cytophaga sp.
NGTMMQYFEWYVPNDGQQWNRLRTDAPYLSSVGITAVWTPPAYKGTSQADVGYGPYDLYDLGEFNQKGTVRTKYGTKGELKSAVNTLHSNGIQVYGDVVMNHKAGADYTENVTAVEVNPSNRNQETSGEYNIQAWTGFNFPGRGTTYSNFKWQWFHFDGTDWDQSRSLSRIFKFTGKAWDWEVSSENGNYDYLMYADIDYDHPDVVNEMKKWGVWYANEVGLDGYRLDAVKHIKFSFLKEWVDNARAATGKEMFTVGEYWQNDLGALNNYLAKVNYNQSLFDAPLHYNFYAASTGGGYYDMRNILNNTLVASNPTKAVTLVENHDTQPGQSLESTVQPWFKPLAYAFILTRSGGYPSVFYGDMYGTKGTTTREIPALKSKIEPLLKARKDYAYGTQRDYIDNPDVIGWTREGDSTKAKSGLATVITDGPGGSKRMYVGTSNAGEIWYDLTGNRTDKITIGSDGYATFPVNGGSVSVWVQQ

SEQ ID NO: 36513 - protein, 480 aa, Cytophaga sp.
NGTMMQYFEWYVPNDGQQWNRLRTDAPYLSSVGITAVWTPPAYKGTSQADVGYGPYDLYDLGEFNQKGTVRTKYGTKGELKSAVNTLHSNGIQVYGDVVMNHKAGADYTENVTAVEVNPSNRNQETSGEYNIQAWTGFNFPGRGTTQSNFKWQWFHFDGTDWDQSRSLSRIFKFTGKAWDWEVSSENGNYDYLMYADIDYDHPDVVNEMKKWGVWYANEVGLDGYRLDAVKHIKFSFLKDWVDNARAATGKEMFTVGEYWQNDLGALNNYLAKVNYNQSLFDAPLHYNFYAASTGGGYYDMRNILNNTLVASNPTKAVTLVENHDTQPGQSLESTVQPWFKPLAYAFILTRSGGYPSVFYGDMYGTKGTTTREIPALKSKIEPLLKARKDYAYGTQRDYIDNPDVIGWTREGDSTKAKSGLATVITDGPGGSKRMYVGTSNAGEIWYDLTGNRTDKITIGSDGYATFPVNGGSVSVWVQQ

SEQ ID NO: 36514 - protein, 480 aa, Cytophaga sp.
NGTMMQYFEWYVPNDGQQWNRLRTDAPYLSSVGITAVWTPPAYKGTSQADVGYGPYDLYDLGEFNQKGTVRTKYGTKGELKSAVNTLHSNGIQVYGDVVMNHKAGADYTENVTAVEVNPSNRNQETSGEYNIQAWTGFNFPGRGTTYSNFKWQWFHFDGTDWDQSRSLSRIFKFTGKAWDWEVSSENGNYDYLMYADIDYDHPDVVNEMKKWGVWYANEVGLDGYRLDAVKHIKFSFLKDWVDNARAATGKEMFTVGEYWQNDLGALNNYLAKVNYNQSLFDAPLHYNFYAASTGGGYYDMRNILNNTLVASNPTKAVTLVENHDTQPGQSLESTVQPWFKPLAYAFILTRSGGYPSVFYGDMYGTKGTTTREIPALKSKIEPLLKARKDYAYGTQRDYIDNPDVIGWTREGDSTKAKSGLATVITDGNGGSKRMYVGTSNAGEIWYDLTGNRTDKITIGSDGYATFPVNGGSVSVWVQQ

SEQ ID NO: 36515 - protein, 480 aa, Cytophaga sp.
NGTMMQYFEWYVPNDGQQWNRLRTDAPYLSSVGITAVWTPPAYKGTSQADVGYGPYDLYDLGEFNQKGTVRTKYGTKGELKSAVNTLHSNGIQVYGDVVMNHKAGADYTENVTAVEVNPSNRNQETSGEYNIQAWTGFNFPGRGTTYSNFKWQWFHFDGTDWDQSRSLSRIFKFTGKAWDWEVSSENGNYDYLMYADIDYDHPDVVNEMKKWGVWYANEVGLDGYRLDAVKHIKFSFMKDWVDNARAATGKEMFTVGEYWQNDLGALNNYLAKVNYNQSLFDAPLHYNFYAASTGGGYYDMRNILNNTLVASNPTKAVTLVENHDTQPGQSLESTVQPWFKPLAYAFILTRSGGYPSVFYGDMYGTKGTTTREIPALKSKIEPLLKARKDYAYGTQRDYIDNPDVIGWTREGDSTKAKSGLATVITDGPGGSKRMYVGTSNAGEIWYDLTGNRTDKITIGSDGYATFPVNGGSVSVWVQQ

SEQ ID NO: 36516 - protein, 480 aa, Cytophaga sp.
NGTMMQYFEWYVPNDGQQWNRLRTDAPYLSSVGITAVWTPPAYKGTSQADVGYGPYDLYDLGEFNQKGTVRTKYGTKGELKSAVNTLHSNGIQVYGDVVMNHKAGADYTENVAAVEVNPSNRNQETSGEYNIQAWTGFNFPGRGTTYSNFKWQWFHFDGTDWDQSRSLSRIFKFTGKAWDWEVSSENGNYDYLMYADIDYDHPDVVNEMKKWGVWYANEVGLDGYRLDAVKHIKFSFLKDWVDNARAATGKEMFTVGEYWQNDLGALNNYLAKVNYNQSLFDAPLHYNFYAASTGGGYYDMRNILNNTLVASNPTKAVTLVENHDTQPGQSLESTVQPWFKPLAYAFILTRSGGYPSVFYGDMYGTKGTTTREIPALKSKIEPLLKARKDYAYGTQRDYIDNPDVIGWTREGDSTKAKSGLATVITDGPGGSKRMYVGTSNAGEIWYDLTGNRTDKITIGSDGYATFPVNGGSVSVWVQQ

SEQ ID NO: 36517 - protein, 480 aa, Cytophaga sp.
NGTMMQYFEWYVPNDGQQWNRLRTDAPYLSSVGITAVWTPPAYKGTSQADVGYGPYDLYDLGEFNQKGTVRTKYGTKGELKSAVNTLHSNGIQVYGDVVMNHKAGADYTENVTAVEVNPSNRNQETSGEYNIQAWTGFNFPGRGTMYSNFKWQWFHFDGTDWDQSRSLSRIFKFTGKAWDWEVSSENGNYDYLMYADIDYDHPDVVNEMKKWGVWYANEVGLDGYRLDAVKHIKFSFLKDWVDNARAATGKEMFTVGEYWQNDLGALNNYLAKVNYNQSLFDAPLHYNFYAASTGGGYYDMRNILNNTLVASNPTKAVTLVENHDTQPGQSLESTVQPWFKPLAYAFILTRSGGYPSVFYGDMYGTKGTTTREIPALKSKIEPLLKARKDYAYGTQRDYIDNPDVIGWTREGDSTKAKSGLATVITDGPGGSKRMYVGTSNAGEIWYDLTGNRTDKITIGSDGYATFPVNGGSVSVWVQQ

SEQ ID NO: 36518 - protein, 480 aa, Cytophaga sp.
NGTMMQYFEWYVPNDGQQWNRLRTDAPYLSSVGITAVWTPPAYKGTSQADVGYGPYDLYDLGEFNQKGTVRTKYGTKGELKSAVNTLHSNGIQVYGDVVMNHKAGADYTENVTAVEVNPSNRNQETSGEYNIQAWTGFNFPGRGTTYSNFKWQWFHFDGTDWDQSRSLSRIFKFTGKAWDWEVSSENGNYDYLMYADIDYDHPDVVNEMKKWGVWYANEVGLDGYRLDAVKHIKFSFLKDWVDNAMAATGKEMFTVGEYWQNDLGALNNYLAKVNYNQSLFDAPLHYNFYAASTGGGYYDMRNILNNTLVASNPTKAVTLVENHDTQPGQSLESTVQPWFKPLAYAFILTRSGGYPSVFYGDMYGTKGTTTREIPALKSKIEPLLKARKDYAYGTQRDYIDNPDVIGWTREGDSTKAKSGLATVITDGPGGSKRMYVGTSNAGEIWYDLTGNRTDKITIGSDGYATFPVNGGSVSVWVQQ

SEQ ID NO: 36519 - protein, 480 aa, Cytophaga sp.
NGTMMQYFEWYVPNDGQQWNRLRTDAPYLSSVGITAVWTPPAYKGTSQADVGYGPYDLYDLGEFNQKGTVRTKYGTKGELKSAVNTLHSNGIQVYGDVVMNHKAGADYTENVTAVEVNPSNRNQETSGEYNIQAWTGFNFPGRGTTYSNFKWQWFHFDGTDWDQSRSLSRIFKFTGKAWDWEVSSENGNYDYLMYADIDYDHPDVVNEMKKWGVWYANEVGLDGYRLDAVKHIKFSFLKDWVDNARAATGKEMFTVGEYWQNDLGALNNYLAKVNYNQSLFDAPLHYNFYAASTGGGYYDMRNILNNTLVASNPTKAVTLVENHDTQPGQSLESTVQPWFKPLAYAFILTRSGGYPSVFYGDMYGTKGTTTREIPALKSKIERLLKARKDYAYGTQRDYIDNPDVIGWTREGDSTKAKSGLATVITDGPGGSKRMYVGTSNAGEIWYDLTGNRTDKITIGSDGYATFPVNGGSVSVWVQQ

SEQ ID NO: 36520 - protein, 480 aa, Bacillus sp.
NGTMMQYFEWHLPNDGNHWNRLRDDASNLRNRGITAIWIPPAWKGTSQNDVGYGAYDLYDLGEFNQKGTVRTKYGTRSQLESAIHALKNNGVQVYGDVVMNHKGGADATENVLAVEVNPNNRNQEISGDYTIEAWTKFDFPGRGNTYSDFKWRWYHFDGVDWDQSRQFQNRIYKFRGDGKAWDWEVDSEFGNYDYLMYADYDMDHPEVVNELRRWGEWYTNTLNLDGFRIDAVKHIKFSFTRDWLTHVRNATGKGMPAVAEFWKNDLGALENYLNKTNWNHSVFDVPLHYNLYNASNGGGNYDMAKLLNGTVVQKHPMHAVTFVDNHDSQPNESLESFVQEWFKPLAYALILTREQGYPSVFYGDYYGIPTHSVPAMKAKIDPILEARQNFAYGPQHDYLDHPDVIGWTREGDSSHPKSGLATLITDGPGGSKRMYAGLKNAGETWYDITGNRSDTVKIGSDGWGEFHVNDGSVSIYVQK

SEQ ID NO: 36521 - protein, 480 aa, Cytophaga sp.
NGTMMQYFEWYVPNDGQQWNRLRTDAPYLSSVGITAVWTPPAYKGTSQADVGYGPYDLYDLGEFNQKGTVRTKYGTKGELKSAVNTLHSNGIQVYGDVVMNHKAGADYTENVTAVEVNPSNRYQETSGEYNIQAWTGFNFPGRGTTYSNWKWQWFHFDGTDWDQSRSLSRIFKFDGKAWDWEVSSENGNYDYLMYADYDYDHPDVVNEMKKWGVWYANEVGLDGYRLDAVKHIKFQFLKDWVDNARAATGKEMFTVGEYWQNDLGALNNYLAKVNYNQSLFDAPLHYNFYAASTGGGYKDMRNILNNTLVASNPTKAVTLVENHDTQPGQSLESTVQPWFKPLAYAFILTRSGGYPSVFYGDMYGTKGTTTREIPALKSKIEPLLKARKDYAYGTQRDYIDNPDVIGWTREGDSTKAKSGLATVITDGPGGSKRMYVGTSNAGEIWYDLTGNRTDKITIGSDGYATFPVNGGSVSVWVQQ

SEQ ID NO: 36522 - protein, 475 aa, Thermoascus aurantiacus
ATPAQWRSRSVYFLLTDRFARSDGSTTAACDTSARQYCGGTWQGIIDHLDYIQGMGFTAIWISPVTEQLPQDTGDGTAYHGYWQQDIYSLNPNFGTADDLRALADALHARGMYLMVDVVANHMGYAGPGNSVDYSVFNPFNKQEYFHPYCEITNYDDQSNVENCWLGDTIVSLPDLNTARSDVEDIWYSWVRALVSNYSVDGLRIDTVKHVQKDFWPGYNDAAGVYCVGEVFDGDPSYTCDYQNYLDGVLNYPMYYPLLRAFSSTSGSISDLYNMINTVKSQCADSTLLGTFVENHDVPRFASYTSDIALAKNAIAFTILSDGIPIIYAGQEQHYSGGNDPANREAVWLSGYSTTSELYQFIAVSNQIRNYAIYVDEGYLTYKAWPIYQDSHTLAIRKGFDGNQVITVLSNLGSSGSSYTLSLSGTGYAAGQQVTEIYSCTDVTADSNGNIAVSMGGGLPKAFFPTAKLAGSGIC

SEQ ID NO: 36523 - protein, 477 aa, Synthetic construct
NGTMMQYFEWYLPNDGNHWNRLNSDASNLASKGITAVWIPPAWKGTSQADVGYGAYDLYDLGEFNQKGTVRTKYGTRSQLQAAVTSLKNNGIQVYGDVVMNHKAGADATEMVTAVEVNPNNRNQEVTGEYTIEAYTRFDFPGRGNTHSSFKWRWYHFDGVDWDQSRSLNRIYKFQGKAWDWPVDTENGNYDYLMYADLDMDHPEVVNELRNWGVWYTNTLGLDGFRLDAVKHIKFSFTRDWINHVRSATGKNMFAVAEYWKNDLGAIENYLNFTNWNHSVFDVPLHYNLYAASTSGGNYDMRNIFNGTVVQKHPSHAVTFVDNHDTQPEESLESFVQPWFKPLAYALTLTREQGYPSVFYGDYYGIPTHGVPAMRSKIDPILEARQKYAYGPQHDYLDHPDIIGWTREGDSSHPKSGLATLITDGPGGSKRMYAGLKNAGETWYDITGNRSDTVKIGSDGWGEFHVNDGSVSIYVQK

SEQ ID NO: 36524 - protein, 478 aa, Bacillus sp.
NGTLMQYFEWYLPNDGNHWNRLNSDASNLKSKGITAVWIPPAWKGASQNDVGYGAYDLYDLGEFNQKGTVRTKYGTRSQLQAAVTSLKNNGIQVYGDVVMNHKGGADATEMVKAVEVNPNNRNQEVTGEYTIEAWTRFDFPGRANTHSSFKWRWYHFDGVDWDQSRRLNNRIYKFRTKAWDWEVDTEFGNYDYLMYADIDMDHPEVVNELRNWGVWYTNTLGLDGFRIDAVKHIKYSFVRDWINHVRSAIGKNMFAVAEFWKNDLGAIENYLQKTNWNHSVFDVPLHFNLYYASKSGGNYDMRNIFNGTVVQRHPSHAVTFVDNHDSQPEESLESFVREWFKPLAYALTLTREQGYPSVFYGDYYGIPTHGVPAMRSKIDPILEARQKYAYGPQHDYIDHPDVIGWTREGDSSAAKSGLAALITDGPGGSKRMYAGLKNAGETWYDITGNKSDTVKIGSDGWGEFHVNDGSVSIYVQK

SEQ ID NO: 36525 - protein, 478 aa, Bacillus sp.
NGTMMQYFEWYLPNDGNHWNRLNSDASNLKSKGITAVWIPPAWKGASQNDVGYGAYDLYDLGEFNQKGTVRTKYGTRSQLQAAVTSLKNNGIQVYGDVVLNHKGGADATEMVRAVEVNPNNRNQEVTGEYTIEAWTRFDFPGRGNTHSSFKWRWYHFDGVDWDQSRRLNNRIYKFRGKAWDWEVDTENGNYDYLMYADIDYDHPEVVNELRNWGVWYTNTLGLDGFRIDAVKHIKYSFTRDWINHVRSATGKNMFAVAEFWKNDLGAIENYLQKTNWNHSVFDVPLHYNLYNASKSGGNYDMRNIFNGTVVQRHPSHAVTFVDNHDSQPEEALESFVEEWFKPLAYALTLTREQGYPSVFYGDYYGIPTHGVPAMRSKIDPILEARQKYAYGPQHDYLDHPDVIGWTREGDSSHPKSGLATLITDGPGGSKRMYAGLKNAGETWYDITGNRSDTVKIGSDGWGEFHVNDGSVSIYVQK

SEQ ID NO: 36526 - protein, 478 aa, Bacillus sp.
NGTMMQYFEWYLPNDGNHWNRLNSDASNLKSKGITAVWIPPAWKGASQNDVGYGAYDLYDLGEFNQKGTVRTKYGTRSQLQAAVTSLKNNGIQVYGDVVMNHKGGADATEMVRAVEVNPNNRNQEVTGEYTIEAWTRFDFPGRGNTHSSFKWRWYHFDGVDWDQSRKISNRIYKFRGKAWDWEVDTEFGNYDYLMYADYDMDHPEVVNELRNWGVWYTNTLGLDGFRIDAVKHIKYSFTRDWINHVRSATGKNMFAVAEFWKNDLGAIENYLQKTNWNHSVFDVPLHYNLYNASKSGGNYDMRNIFNGTVVQRHPSHAVTFVDNHDSQPEEALESFVEEWFKPLAYALTLTREQGYPSVFYGDYYGIPTHGVPAMRSKIDPILEARQKYAYGPQHDYLDHPDVIGWTREGDSSHPKSGLATLITDGPGGSKRMYAGLKNAGETWYDITGNRSDTVKIGSDGWGEFHVNDGSVSIYVQK

SEQ ID NO: 36527 - protein, 478 aa, Bacillus sp.
NGTMMQYFEWYLPNDGNHWNRLNSDASNLKSKGITAVWIPPAWKGTSQNDVGYGAYDLYDLGEFNQKGTVRTKYGTRSQLQAAVTSLKNNGIQVYGDVVMNHKGGADATEMVRAVEVNPNNRNQEVTGEYTIEAWTRFDFPGRGNTHSSFKWRWYHFDGVDWDQSRKISNRIYKFRGKAWDWEVDTEFGNYDYLMYADYDMDHPEVVNELRNWGVWYTNTLGLDGFRIDAVKHIKYSFTRDWINHVRSATGKNMFAVAEFWKNDLGAIENYLQKTNWNHSVFDVPLHYNLYNASKSGGNYDMRNIFNGTVVQRHPSHAVTFVDNHDSQPEEALESFVEEWFKPLAYALTLTREQGYPSVFYGDYYGIPTHGVPAMRSKIDPILEARQKYAYGPQHDYLDHPDVIGWTREGDSSHPKSGLATLITDGPGGSKRMYAGLKNAGETWYDITGNRSDTVKIGSDGWGEFHVNDGSVSIYVQK

SEQ ID NO: 36528 - protein, 478 aa, Bacillus sp.
NGTMMQYFEWYLPNDGNHWNRLNSDASNLKSKGITAVWIPPAWKGASQNDVGYGAYDLYDLGEFNQKGTVRTKYGTRSQLQAAVTSLKNNGIQVYGDVVLNHKGGADATEMVRAVEVNPNNRNQEVTGEYTIEAWTRFDFPGRGNTHSSFKWRWYHFDGVDWDQSRRLNNRIYKFRGKAWDWEVDTENGNYDYLMYADIDYDHPEVVNELRIWGVWYTNTLGLDGFRIDAVKHIKYSFTRDWINHVRSATGKNMFAVAEFWKNDLGAIENYLQKTNWNHSVFDVPLHYNLYNASKSGGNYDMRNIFNGTVVQRHPSHAVTFVDNHDSQPEEALESFVEEWFKPLAYALTLTREQGYPSVFYGDYYGIPTHGVPAMRSKIDPILEARQKYAYGPQHDYLDHPDVIGWTREGDSSHPKSGLATLITDGPGGSKRMYAGLKNAGETWYDITGNRSDTVKIGSDGWGEFHVNDGSVSIYVQK

SEQ ID NO: 36529 - protein, 482 aa, Cytophaga sp.
NGTMMQYFEWYVPNDGQQWNRLRTDAPYLSSVGITAVWTPPAYKGTSQADVGYGPYDLYDLGEFNQKGTVRTKYGTKGELKSAVNTLHSNGIQVYGDVVMNHKAGADYTENVTAVEVNPSNRNQETSGEYNIQAWTGFNFPGRGTTYSNFKWQWFHFDGTDWDQSRSLSRIFKFRGTGKAWDWPVSSENGNYDYLMYADYDYDHPDVVNEMKKWGVWYANEVGLDGYRLDAVKHIKFSFLKDWVDNARAATGKEMFTVGEYWQNDLGALNNYLAKVNYNQSLFDAPLHYNFYAASTGGGYYDMRNILNNTLVASNPTKAVTLVENHDTQPGQSLESTVQPWFKPLAYAFILTRSGGYPSVFYGDMYGTKGTTTREIPALKSKIEPLLKARKDYAYGTQRDYIDNPDVIGWTREGDSTKAKSGLATVITDGPGGSKRMYVGTSNAGEIWYDLTGNNSTKITIGSDGYATFPVNKGSVSVWVQQ

SEQ ID NO: 36530 - protein, 482 aa, Synthetic construct
NGTMMQYFEWYVPNDGQQWNRLRTDAPYLSSVGITAVWTPPAYKGTSQADVGYGPYDLYDLGEFNQKGTVRTKYGTKGELKSAVNTLHSNGIQVYGDVVMNHKAGADSTEWVDAVEVNPSNRNQETSGTYQIQAWTKFDFPGRGNTYSSFKWRWYHFDGTDWDESRKLNRIYKFRGTGKAWDWEVDTENGNYDYLMFADLDYDHPDVVNEMKKWGVWYANEVGLDGYRLDAVKHIKFSFLKDWVDNARAATGKEMFTVGEYWQNDLGALNNYLAKVNYNQSLFDAPLHYNFYAASTGGGYYDMRNILNNTLVASNPTKAVTLVENHDTQPGQSLESTVQPWFKPLAYAFILTRSGGYPSVFYGDMYGTKGTTTREIPALKSKIEPLLKARKDYAYGTQRDYIDNPDVIGWTREGDSTKAKSGLATVITDGPGGSKRMYVGTSNAGEIWYDLTGNRTDKITIGSDGYATFPVNGGSVSVWVQQ

SEQ ID NO: 36531 - protein, 482 aa, Cytophaga sp.
NGTMMQYFEWYVPNDGQQWNRLRTDAPYLSSVGITAVWTPPAYKGTSQADVGYGPYDLYDLGEFNQKGTVRTKYGTKGELKSAVNTLHSNGIQVYGDVVMNHKAGADYTENVTAVEVNPSNRYQETSGEYNIQAWTGFNFPGRGTTYSNFKWQWFHFDGTDWDQSRSLSRIFKFRGTGKAWDWPVSSENGNYDYLMYADYDYDHPDVVNEMKKWGVWYANEVGLDGYRLDAVKHIKFSFLKDWVDNARAATGKEMFTVGEYWQNDLGALNNYLAKVNYNQSLFDAPLHYNFYAASTGGGYYDMRNILNNTLVASNPTKAVTLVENHDTQPGQSLESTVQPWFKPLAYAFILTRSGGYPSVFYGDMYGTKGTTTREIPALKSKIEPLLKARKDYAYGTQRDYIDNPDVIGWTREGDSTKAKSGLATVITDGPGGSKRMYVGTSNAGEIWYDLTGNRTDKITIGSDGYATFPVNGGSVSVWVQQ

SEQ ID NO: 36532 - protein, 482 aa, Cytophaga sp.
NGTMMQYFEWYVPNDGQQWNRLRTDAPYLSSVGITAVWTPPAYKGTSQADVGYGPYDLYDLGEFNQKGTVRTKYGTKGELKSAVNTLHSNGIQVYGDVVMNHKAGADYTENVTAVEVNPSNRNQYTSGEYEIQAWTGFNFPGRGTTYSNFKWQWFHFDGTDWDQSRSLSRIFKFRGHGKAWDWPVSSENGNYDYLMYADIDYDHPDVVNEMKKWGVWYANEVGLDGYRLDAVKHIKFSFLKDWVDNARAATGKEMFTVGEYWQNDLGALNNYLAKVNYNQSLFDAPLHYNFYAASTGGGYYDMRNILNNTLVASNPTKAVTLVENHDTQPGQSLESTVQPWFKPLAYAFILTRSGGYPSVFYGDMYGTKGTTTREIPALKSKIEPLLKARKDYAYGTQRDYIDNPDVIGWTREGDSTKAKSGLATVITDGPGGSKRMYVGTSNAGEIWYDLTGNRTDKITIGSDGYATFRVNGGSVSVWVQQ

SEQ ID NO: 36533 - protein, 482 aa, Cytophaga sp.
NGTMMQYFEWYVPNDGQQWNRLRTDAPYLSSVGITAVWTPPAYKGTSQADVGYGPYDLYDLGEFNQKGTVRTKYGTKGELKSAVNTLHSNGIQVYGDVVMNHKAGADYTENVTAVEVNPSNRYQETSGEYNIQAWTGFNFPGRGTTYSNFKWQWFHFDGTDWDQSRSLSRIFKFRGDGKAWDWPVSSENGNYDYLMYADYDYDHPDVVNEMKKWGVWYANEVGLDGYRLDAVKHIKFSFLKDWVDNARAATGKEMFTVGEYWQNDLGALNNYLAKVNYNQSLFDAPLHYNFYAASTGGGYYDMRNILNNTLVASNPTKAVTLVENHDTQPGQSLESTVQPWFKPLAYAFILTRSGGYPSVFYGDMYGTKGTTTREIPALKSKIEPLLKARKDYAYGTQRDYIDNPDVIGWTREGDSTKAKSGLATVITDGPGGSKRMYVGTSNAGEIWYDLTGNRTDKITIGSDGYATFPVNKGSVSVWVQQ

SEQ ID NO: 36534 - protein, 482 aa, Cytophaga sp.
NGTMMQYFEWYVPNDGQQWNRLRTDAPYLSSVGITAVWTPPAYKGTSQADVGYGPYDLYDLGEFNQKGTVRTKYGTKGELKSAVNTLHSNGIQVYGDVVMNHKAGADYTENVTAVEVNPSNRNQETSGEYNIQAWTGFNFPGRGTTYSNFKWQWFHFDGTDWDQSRSLSRIFKFRGTGKAWDWPVSSENGNYDYLMYADIDYDHPDVVNEMKKWGVWYANEVGLDGYRLDAVKHIKFQFLKDWVDNARAATGKEMFTVGEYWQNDLGALNNYLAKVNYNQSLFDAPLHYNFYAASTGGGYYDMRNILNNTLVASNPTKAVTLVENHDTQPGQSLESTVQPWFKPLAYAFILTRSGGYPSVFYGDMYGTKGTTTREIPALKSKIEPLLKARKDYAYGTQRDYIDNPDVIGWTREGDSTKAKSGLATVITDGPGGSKRMYVGTSNAGEIWYDLTGNRTDKITIGSDGYATFPVNGGSVSVWVQQ

SEQ ID NO: 36535 - protein, 482 aa, Cytophaga sp.
NGTMMQYFEWYVPNDGQQWNRLRTDAPYLSSVGITAVWTPPAYKGTSQADVGYGPYDLYDLGEFNQKGTVRTKYGTKGELKSAVNTLHSNGIQVYGDVVMNHKAGADYTENVTAVEVNPSNRYQETSGEYNIQAWTGFNFPGRGTTYSNFKWQWFHFDGTDWDQSRSLSRIFKFRGTGKAWDWPVSSENGNYDYLMYADIDYDHPDVVNEMKKWGVWYANEVGLDGYRLDAVKHIKFSFLKDWVDNARAATGKEMFTVGEYWQNDLGALNNYLAKVNYNQSLFDAPLHYNFYAASTGGGYYDMRNILNNTLVASNPTKAVTLVENHDTQPGQSLESTVQPWFKPLAYAFILTRSGGYPSVFYGDMYGTKGTTTREIPALKSKIEPLLKARKDYAYGTQRDYIDNPDVIGWTREGDSTKAKSGLATVITDGPGGSKRMYVGTSNAGEIWYDLTGNRTDKITIGSDGYATFPVNKGSVSVWVQQ

SEQ ID NO: 36536 - protein, 482 aa, Cytophaga sp.
NGTMMQYFEWYVPNDGQQWNRLRTDAPYLSSVGITAVWTPPAYKGTSQADVGYGPYDLYDLGEFNQKGTVRTKYGTKGELKSAVNTLHSNGIQVYGDVVMNHKAGADYTENVTAVEVNPSNRNQETSGEYNIQAWTGFNFPGRGTTYSNFKWQWFHFDGTDWDQSRSLSRIFKFRGTGKAWDWPVSSENGNYDYLMYADIDYDHPDVVNEMKKWGVWYANEVGLDGYRLDAVKHIKFSFLKDWVDNARAATGKEMFTVGEYWQNDLGALNNYLAWVNYNQSLFDAPLHYNFYAASTGGGYYDMRNILNNTLVASNPTKAVTLVENHDTQPGQSLESTVQPWFKPLAYAFILTRSGGYPSVFYGDMYGTKGTTTREIPALKSKIEPLLKARKDYAYGTQRDYIDNPDVIGWTREGDSTKAKSGLATVITDGPGGSKRMYVGTSNAGEIWYDLTGNRTDKITIGSDGYATFPVNGGSVSVWVQQ

SEQ ID NO: 36537 - protein, 482 aa, Cytophaga sp.
NGTMMQYFEWYVPNDGQQWNRLRTDAPYLSSVGITAVWTPPAYKGTSQADVGYGPYDLYDLGEFNQKGTVRTKYGTKGELKSAVNTLHSNGIQVYGDVVMNHKAGADYTENVTAVEVNPSNRYQETSGEYNIQAWTGFNFPGRGTTYSNFKWQWFHFDGTDWDQSRSLSRIFKFRGHGKAWDWEVSSENGNYDYLMYADYDYDHPDVVNEMKKWGVWYANEVGLDGYRLDAVKHIKFQFLKDWVDNARAATGKEMFTVGEYWQNDLGALNNYLAKVNYNQSLFDAPLHYNFYAASTGGGYYDMRNILNNTLVASNPTKAVTLVENHDTQPGQSLESTVQPWFKPLAYAFILTRSGGYPSVFYGDMYGTKGTTTREIPALKSKIEPLLKARKDYAYGTQRDYIDNPDVIGWTREGDSTKAKSGLATVITDGPGGSKRMYVGTSNAGEIWYDLTGNRTDKITIGSDGYATFPVNGGSVSVWVQQ

SEQ ID NO: 36538 - protein, 483 aa, Synthetic construct
NGTMMQYFEWYVPNDGQQWNRLRTDAPYLSSVGITAVWTPPAYKGTSQADVGYGPYDLYDLGEFNQKGTVRTKYGTKGELKSAVNTLHSNGIQVYGDVVMNHKGGADATENVLAVEVNPNNRNQEISGDYTIEAWTKFDFPGRGNTYSDFKWRWYHFDGVDWDQSRQFQNRIYKFRGDGKAWDWEVDSENGNYDYLMYADVDYDHPDVVNEMKKWGVWYANEVGLDGYRLDAVKHIKFSFLKDWVDNARAATGKEMFTVGEYWQNDLGALNNYLAKVNYNQSLFDAPLHYNFYAASTGGGYYDMRNILNNTLVASNPTKAVTLVENHDTQPGQSLESTVQPWFKPLAYAFILTRSGGYPSVFYGDMYGTKGTTTREIPALKSKIEPLLKARKDYAYGTQRDYIDNPDVIGWTREGDSTKAKSGLATVITDGPGGSKRMYVGTSNAGEIWYDLTGNRTDKITIGSDGYATFPVNGGSVSVWVQQ

SEQ ID NO: 36539 - protein, 482 aa, Cytophaga sp.
NGTMMQYFEWYVPNDGQQWNRLRTDAPYLSSVGITAVWTPPAYKGTSQADVGYGPYDLYDLGEFNQKGTVRTKYGTKGELKSAVNTLHSNGIQVYGDVVMNHKAGADYTENVTAVEVNPSNRNQETSGEYNIQAWTGFNFPGRGTTYSNFKWQWFHFDGTDWDQSRSLSRIFKFRGTGKAWDWPVSSENGNYDYLMYADIDYDHPDVVNEMKKWGVWYANEVGLDGYRLDAVKHIKFSFLKDWVDNARAATGKEMFTVGEYWQNDLGALNNYLAIVNYNQSLFDAPLHYNFYAASTGGGYYDMRNILNNTLVASNPTKAVTLVENHDTQPGQSLESTVQPWFKPLAYAFILTRSGGYPSVFYGDMYGTKGTTTREIPALKSKIEPLLKARKDYAYGTQRDYIDNPDVIGWTREGDSTKAKSGLATVITDGPGGSKRMYVGTSNAGEIWYDLTGNRTDKITIGSDGYATFPVNGGSVSVWVQQ

SEQ ID NO: 36540 - protein, 482 aa, Cytophaga sp.
NGTMMQYFEWYVPNDGQQWNRLRTDAPYLSSVGITAVWTPPAYKGTSQADVGYGPYDLYDLGEFNQKGTVRTKYGTKGELKSAVNTLHSNGIQVYGDVVMNHKAGADYTENVTAVEVNPSNRNQETSGEYNIQAWTGFNFPGRGTTYSNFKWQWFHFDGTDWDQSRSLSRIFKFRGTGKAWDWPVSSENGNYDYLMYADIDYDHPDVVNEMKKWGVWYANEVGLDGYRLDAVKHIKFYFLKDWVDNARAATGKEMFTVGEYWQNDLGALNNYLAKVNYNQSLFDAPLHYNFYAASTGGGYYDMRNILNNTLVASNPTKAVTLVENHDTQPGQSLESTVQPWFKPLAYAFILTRSGGYPSVFYGDMYGTKGTTTREIPALKSKIEPLLKARKDYAYGTQRDYIDNPDVIGWTREGDSTKAKSGLATVITDGPGGSKRMYVGTSNAGEIWYDLTGNRTDKITIGSDGYATFPVNGGSVSVWVQQ

SEQ ID NO: 36541 - protein, 482 aa, Cytophaga sp.
NGTMMQYFEWYVPNDGQQWNRLRTDAPYLSSVGITAVWTPPAYKGTSQADVGYGPYDLYDLGEFNQKGTVRTKYGTKGELKSAVNTLHSNGIQVYGDVVMNHKAGADYTENVTAVEVNPSNRNQETSGEYNIQAWTGFNFPGRGTTYSNFKWQWFHFDGTDWDQSRSLSRIFKFRGTGKAWDWPVSSENGNYDYLMYADIDYDHPDVVNEMKKWGVWYANEVGLDGYRLDAVKHIKFFFLKDWVDNARAATGKEMFTVGEYWQNDLGALNNYLAKVNYNQSLFDAPLHYNFYAASTGGGYYDMRNILNNTLVASNPTKAVTLVENHDTQPGQSLESTVQPWFKPLAYAFILTRSGGYPSVFYGDMYGTKGTTTREIPALKSKIEPLLKARKDYAYGTQRDYIDNPDVIGWTREGDSTKAKSGLATVITDGPGGSKRMYVGTSNAGEIWYDLTGNRTDKITIGSDGYATFPVNGGSVSVWVQQ

SEQ ID NO: 36542 - protein, 482 aa, Cytophaga sp.
NGTMMQYFEWYVPNDGQQWNRLRTDAPYLSSVGITAVWTPPAYKGTSQADVGYGPYDLYDLGEFNQKGTVRTKYGTKGELKSAVNTLHSNGIQVYGDVVMNHKAGADYTENVTAVEVNPSNRYQETSGEYNIQAWTGFNFPGRGTTYSNFKWQWFHFDGTDWDQSRSLSRIFKFRGHGKAWDWPVSSENGNYDYLMYADYDYDHPDVVNEMKKWGVWYANEVGLDGYRLDAVKHIKFSFLKDWVDNARAATGKEMFTVGEYWQNDLGALNNYLAKVNYNQSLFDAPLHYNFYAASTGGGYYDMRNILNNTLVASNPTKAVTLVENHDTQPGQSLESTVQPWFKPLAYAFILTRSGGYPSVFYGDMYGTKGTTTREIPALKSKIEPLLKARKDYAYGTQRDYIDNPDVIGWTREGDSTKAKSGLATVITDGPGGSKRMYVGTSNAGEIWYDLTGNRTDKITIGSDGYATFPVNGGSVSVWVQQ

SEQ ID NO: 36543 - protein, 482 aa, Cytophaga sp.
NGTMMQYFEWYVPNDGQQWNRLRTDAPYLSSVGITAVWTPPAYKGTSQADVGYGPYDLYDLGEFNQKGTVRTKYGTKGELKSAVNTLHSNGIQVYGDVVMNHKAGADYTENVTAVEVNPSNRYQETSGEYNIQAWTGFNFPGRGTTYSNFKWQWFHFDGTDWDQSRSLSRIFKFRGTGKAWDWEVSSENGNYDYLMYADYDYDHPDVVNEMKKWGVWYANEVGLDGYRLDAVKHIKFQFLKDWVDNARAATGKEMFTVGEYWQNDLGALNNYLAKVNYNQSLFDAPLHYNFYAASTGGGYYDMRNILNNTLVASNPTKAVTLVENHDTQPGQSLESTVQPWFKPLAYAFILTRSGGYPSVFYGDMYGTKGTTTREIPALKSKIEPLLKARKDYAYGTQRDYIDNPDVIGWTREGDSTKAKSGLATVITDGPGGSKRMYVGTSNAGEIWYDLTGNRTDKITIGSDGYATFPVNGGSVSVWVQQ

SEQ ID NO: 36544 - protein, 482 aa, Cytophaga sp.
NGTMMQYFEWYVPNDGQQWNRLRTDAPYLSSVGITAVWTPPAYKGTSQADVGYGPYDLYDLGEFNQKGTVRTKYGTKGELKSAVNTLHSNGIQVYGDVVMNHKAGADYTENVTAVEVNPSNRNQETSGEYNIQAWTGFNFPGRGTTYSNFKWQWFHFDGTDWDQSRSLSRIFKFRGTGKAWDWPVSSENGNYDYLMYADIDYDHPDVVNEMKKWGVWYANEVGLDGYRLDAVKHIKFHFLKDWVDNARAATGKEMFTVGEYWQNDLGALNNYLAKVNYNQSLFDAPLHYNFYAASTGGGYYDMRNILNNTLVASNPTKAVTLVENHDTQPGQSLESTVQPWFKPLAYAFILTRSGGYPSVFYGDMYGTKGTTTREIPALKSKIEPLLKARKDYAYGTQRDYIDNPDVIGWTREGDSTKAKSGLATVITDGPGGSKRMYVGTSNAGEIWYDLTGNRTDKITIGSDGYATFPVNGGSVSVWVQQ

SEQ ID NO: 36545 - protein, 482 aa, Synthetic construct
NGTMMQYFEWYVPNDGQQWNRLRTDAPYLSSVGITAVWTPPAYKGTSQADVGYGPYDLYDLGEFNQKGTVRTKYGTKGELKSAVNTLHSNGIQVYGDVVMNHKAGADGTEFVDAVEVNPSNRNQETSGTYQIQAWTKFDFPGRGNTYSSFKWRWYHFDGTDWDESRKLNRIYKFRGTGKAWDWEVDTENGNYDYLMFADLDYDHPDVVNEMKKWGVWYANEVGLDGYRLDAVKHIKFSFLKDWVDNARAATGKEMFTVGEYWQNDLGALNNYLAKVNYNQSLFDAPLHYNFYAASTGGGYYDMRNILNNTLVASNPTKAVTLVENHDTQPGQSLESTVQPWFKPLAYAFILTRSGGYPSVFYGDMYGTKGTTTREIPALKSKIEPLLKARKDYAYGTQRDYIDNPDVIGWTREGDSTKAKSGLATVITDGPGGSKRMYVGTSNAGEIWYDLTGNRTDKITIGSDGYATFPVNGGSVSVWVQQ

SEQ ID NO: 36546 - protein, 482 aa, Cytophaga sp.
NGTMMQYFEWYVPNDGQQWNRLRTDAPYLSSVGITAVWTPPAYKGTSQADVGYGPYDLYDLGEFNQKGTVRTKYGTKGELKSAVNTLHSNGIQVYGDVVMNHKAGADYTENVTAVEVNPSNRNQETSGEYNIQAWTGFNFPGRGTTYSNFKWQWFHFDGTDWDQSRSLSRIFKFRGTGKAWDWPVSSENGNYDYLMYADIDYDHPDVVNEMKKWGVWYANEVGLDGYRLDAVKHIKFSFLKDWVDNARAATGKEMFTVGEYWQNDLGALNNYLAFVNYNQSLFDAPLHYNFYAASTGGGYYDMRNILNNTLVASNPTKAVTLVENHDTQPGQSLESTVQPWFKPLAYAFILTRSGGYPSVFYGDMYGTKGTTTREIPALKSKIEPLLKARKDYAYGTQRDYIDNPDVIGWTREGDSTKAKSGLATVITDGPGGSKRMYVGTSNAGEIWYDLTGNRTDKITIGSDGYATFPVNGGSVSVWVQQ

SEQ ID NO: 36547 - protein, 479 aa, Thermoascus crustaceus
VVGTALAATPAQWRSQSVYFLLTDRFARTDGSTTAACDTDARAYCGGTWQGIIDHLDYIQGMGFTAIWITPVTENLPQDTGDGTSYHGYWQQDVYSLNSNYGTPDDLRALSSALHDRGMYLMVDVVANHMGYAGPGSSVDYTVFTPFNDQKYFHPYCSISNYDDQSNVEDCWLGDSTVSLPDLDTTRSDVQDMWYSWVKGLVANYSVDGLRIDTVKHVQKDFWPGYNDAAGVYCVGEVFDGDPSSTCDYQNYLDGVLNYPMYYPLLRAFSSTSGSISDLYNMINTVKSECADSTLLGTFVENHDNPRFASYTSDISLAKNALAFTILSDGIPIIYAGQEQHYSGGNDPANREAVWLSGYSTTSELYKFIAVSNQIRNHAISVDGDDYLTYKTYPIYQDTTTLAVRKGSLITVLSNLGSSGSSYTLSLGGTGYSSGQELMEIYSCTTVTADSSGNIAVPMGSGLPKAFYPTANLGGSGIC

SEQ ID NO: 36548 - protein, 479 aa, Aspergillus niger
ATPAEWRSQSIYFLLTDRFARTDNSTTASCDLSARQYCGGSWQGIINQLDYIQGMGFTAIWITPVTAQIPQDTGYGQAYHGYWQQDAYALNSHYGTADDLKALASALHSRGMYLMVDVVANHMGHNGTGSSVDYSVYRPFNSQKYFHNLCWISDYNNQTNVEDCWLGDNTVALPDLDTTSTEVKNMWYDWVESLVSNYSVDGLRVDTVKNVQKNFWPGYNNASGVYCIGEVFDGDASYTCPYQEDLDGVLNYPMYYPLLRAFESTNGSISDLYNMINTVKSTCRDSTLLGTFVENHDNPRFANYTSDMSLAKNAATFTILADGIPIIYAGQEQHYSGGNDPYNREATWLSGYKTTSELYTHIAASNKIRTHAIKQDTGYLTYKNYPIYQDTSTLAMRKGYNGTQTITVLSNLGASGSSYTLSLPGTGYTAGQKITEIYTCTNLTVNSNGSVPVPMKSGLPRILYPADKLVNGSSFCSSA

SEQ ID NO: 36549 - protein, 477 aa, Bacillus sp.
NGTLMQYFEWYLPNDGNHWNRLNSDASNLKSKGITAVWIPPAWKGASQNDVGYGAYDLYDLGEFNQKGTVRTKYGTRSQLQAAVTSLKNNGIQVYGDVVMNHKGGADATEMVKAVEVNPNNRNQEVTGEYTIEAWTRFDFPGRANTHSSFKWRWYHFDGVDWDQSRRLNNRIYKFRTKAWDWEVDTEFGNYDYLLYADIDMDHPEVVNELRNWGVWYTNTLGLDGFRIDAVKHIKYSFTRDWINHVRSAGKNMFAVAEFWKNDLGAIENYLQKTNWNHSVFDVPLHFNLYYASKSGGNYDMRNIFNGTVVQRHPSHAVTFVDNHDSQPEESLESFVREWFKPLAYALTLTREQGYPSVFYGDYYGIPTHGVPAMRSKIDPILEARQKYAYGPQHDYIDHPDVIGWTREGDSSAAKSGLAALITDGPGGSKRMYAGLKNAGETWYDITGNKSDTVKIGSDGWGEFHVNDGSVSIYVQK

SEQ ID NO: 36550 - protein, 462 aa, Thermoascus aurantiacus
ATPAQWRSRSVYFLLTDRFARSDGSTTAACDTSARLDYIQGMGFTAIWISPVTEQLPQDTGDGTAYHGYWQQDIYSLNPNFGTADDLRALADALHARGMYLMVDVVANHMGYAGPGNSVDYSVFNPFNKQEYFHPYCEITNYDDQSNVEDCWLGDTIVSLPDLNTTRSDVEDIWYSWVRALVSNYSVDGLRIDTVKHVQKDFWPGYNDAAGVYCVGEVFDGDPSYTCDYQNYLDGVLNYPMYYPLLRAFSSTSGSISDLYNMINTVKAQCADSTLLGTFVENHDVPRFASYTSDIALAKNAIAFTILSDGIPIIYAGQEQHYSGGNDPANREAVWLSGYSTTSELYQFIAVSNQIRNYAIYVDEGYLTYKAWPIYQDSHTLAIRKGFDGNQVITVLSNLGSSGSSYTLSLSGTGYAAGQQVTEIYSCTDVTADSNGNIAVSMGGGLPKAFFPTAKLAGSGIC

SEQ ID NO: 36551 - protein, 478 aa, Bacillus sp.
NGTIMQYFEWNVPNDGQHWNRLHNNAQNLKNAGITAIWIPPAWKGTSQSDTGYGAYDLYDLGEFNQKGTVRTKYGTKAELERAIRSLKANGIQVYGDVVMNHKAGADFTERVQAVEVNPQNRNQEVSGTYQIEAWTGFNFPGRGNQHSSFKWRWYHFDGTDWDQSRQLSNRIYKFRGKAWDWEVDTEFGNYDYLMYADIDMDHPEVINELNRWGVWYANTLNLDGFRLDAVKHIKFSFMRDWLGHVRGQTGKNLFAVAEYWKNDLGALENYLSKTNWTMSAFDVPLHYNLYQASNSSGNYDMRNLLNGTLVQRHPSHAVTFVDNHDTQPGEALESFVQGWFKPLAYATILTREQGYPQVFYGDYYGIPSDGVPSYRQQIDPLLKARQQYAYGPQHDYLDHPDVIGWTREGDSSHPKSGLATLITDGPGGSKRMYAGLKNAGETWYDITGNRSDTVKIGSDGWGEFHVNDGSVSIYVQK

SEQ ID NO: 36552 - protein, 478 aa, Bacillus sp.
NGTIMQYFEWNVPNDGQHWNRLHNNAQNLKNAGITAIWIPPAWKGTSQSDTGYGAYDLYDLGEFNQKGTVRTKYGTKAELERAIRSLKANGIQVYGDVVMNHKAGADQTEHVQAVEVNPQNRNQEVSGTYQIEAWTGFNFPGRGNQHSSFKWRWYHFDGGDWDQSRGLSNRIYKFRGKAWDWEVDTEFGNYDYLMYADLDMDHPEVINELNRWGVWYANTLNLDGFRLDAVKHIKFSFMRDWLGHVRGQTGKNLFAVAEYWKNDLGALENYLSKTNWTMSAFDVPLHYNLYQASNSSGNYDMRNLLNGTLVQRHPSHAVTFVDNHDTQPGEALESFVQGWFKPLAYATILTREQGYPQVFYGDYYGIPSDGVPSYRQQIDPLLKARQQYAYGPQHDYLDHPDVIGWTREGDSSHPKSGLATLITDGPGGSKRMYAGLKNAGETWYDITGNRSDTVKIGSDGWGEFHVNDGSVSIYVQK

SEQ ID NO: 36553 - protein, 478 aa, Bacillus sp.
NGTIMQYFEWNVPNDGQHWNRLHNNAQNLKNAGITAIWIPPAWKGTSQSDTGYGAYDLYDLGEFNQKGTVRTKYGTKAELERAIRSLKANGIQVYGDVVMNHKAGADFTEQVQAVEVNPQNRNQEVSQTYQIEAWTGFNFPGRGNQHSSFKWRWYHFDGGDWDQSRGLSNRIYKFRGKAWDWEVDTEFGNYDYLMYADLDMDHPEVINELNRWGVWYANTLNLDGFRLDAVKHIKFSFMRDWLGHVRGQTGKNLFAVAEYWKNDLGALENYLSKTNWTMSAFDVPLHYNLYQASNSSGNYDMRNLLNGTLVQRHPSHAVTFVDNHDTQPGEALESFVQGWFKPLAYATILTREQGYPQVFYGDYYGIPSDGVPSYRQQIDPLLKARQQYAYGPQHDYLDHPDVIGWTREGDSSHPKSGLATLITDGPGGSKRMYAGLKNAGETWYDITGNRSDTVKIGSDGWGEFHVNDGSVSIYVQK

SEQ ID NO: 36554 - protein, 478 aa, Bacillus sp.
NGTIMQYFEWNVPNDGQHWNRLHNNAQNLKNAGITAIWIPPAWKGTSQSDTGYGAYDLYDLGEFNQRGTVRTKYGTKAELERAIRSLKANGIQVYGDVVMNHKAGADQTERVQAVEVNPQNRNQEVSGEYQIEAWTGFNFPGRGNQHSSFKWRWYHFDGTDWDQSRQLSNRIYKFRGKAWDWEVDTEFGNYDYLMYADLDMDHPEVINELNRWGVWYANTLNLDGFRLDAVKHIKFSFMRDWLGHVRAQTGKNLFAVAEYWKNDLGALENYLSKTNWTMSAFDVPLHYNLYQASNSSGNYDMRNLLNGTLVQRHPSHAVTFVDNHDTQPGEALESFVQGWFKPLAYATILTREQGYPQVFYGDYYGIPSDGVPSYRQQIDPLLKARQQYAYGPQHDYLDHPDVIGWTREGDSSHPKSGLATLITDGPGGSKRMYAGLKNAGETWYDITGNRSDTVKIGSDGWGEFHVNDGSVSIYVQK

SEQ ID NO: 36555 - protein, 478 aa, Bacillus sp.
NGTIMQYFEWNVPNDGQHWNRLHNNAQNLKNAGITAIWIPPAWKGTSQSDTGYGAYDLYDLGEFNQKGTVRTKYGTKAELERAIRSLKANGIQVYGDVVMNHKAGADQTEHVQAVEVNPQNRNQEVSGTYQIEAWTGFNFPGRGNQHSSFKWRWYHFDGTDWDQSRGLSNRIYKFRGKAWDWEVDTEFGNYDYLMYADLDMDHPEVINELNRWGVWYANTLNLDGFRLDAVKHIKFSFMRDWLGHVRGQTGKNLFAVAEYWKNDLGALENYLSKTNWTMSAFDVPLHYNLYQASNSSGNYDMRNLLNGTLVQRHPSHAVTFVDNHDTQPGEALESFVQGWFKPLAYATILTREQGYPQVFYGDYYGIPSDGVPSYRQQIDPLLKARQQYAYGPQHDYLDHPDVIGWTREGDSSHPKSGLATLITDGPGGSKRMYAGLKNAGETWYDITGNRSDTVKIGSDGWGEFHVNDGSVSIYVQK

SEQ ID NO: 36556 - protein, 480 aa, Bacillus sp.
NGTMMQYFEWYLPNDGNHWNRLNSDASNLKSKGITAVWIPPAWKGTSQNDVGYGAYDLYDLGEFNQKGTVRTKYGTRSQLQAAVTSLKNNGIQVYGDVVMNHKGGADATEMVRAVEVNPNNRNQEVTGEYTIEAWTRFDFPGRGNTHSSFKWRWYHFDGVDWDQSRKISNRIYKFRGHGKAWDWEVDTEFGNYDYLMYADYDMDHPEVVNELRNWGVWYTNTLGLDGFRIDAVKHIKYSFTRDWINHVRSATGKNMFAVAEFWKNDLGAIENYLQKTNWNHSVFDVPLHYNLYNASKSGGNYDMRNIFNGTVVQRHPSHAVTFVDNHDSQPEEALESFVEEWFKPLAYALTLTREQGYPSVFYGDYYGIPTHGVPAMRSKIDPILEARQKYAYGPQHDYLDHPDVIGWTREGDSSHPKSGLATLITDGPGGSKRMYAGLKNAGETWYDITGNRSDTVKIGSDGWGEFHVNDGSVSIYVQK

SEQ ID NO: 36557 - protein, 480 aa, Bacillus sp.
NGTMMQYFEWYLPNDGNHWNRLNSDASNLKSKGITAVWIPPAWKGASQNDVGYGAYDLYDLGEFNQKGTVRTKYGTRSQLQAAVTSLKNNGIQVYGDVVMNHKGGADATEMVRAVEVNPNNRNQEVTGEYTIEAWTRFDFPGRGNTHSSFKWRWYHFDGVDWDQSRKISNRIYKFRGHGKAWDWEVDTEFGNYDYLMYADYDMDHPEVVNELRNWGVWYTNTLGLDGFRIDAVKHIKYSFTRDWINHVRSATGKNMFAVAEFWKNDLGAIENYLQKTNWNHSVFDVPLHYNLYNASKSGGNYDMRNIFNGTVVQRHPSHAVTFVDNHDSQPEEALESFVEEWFKPLAYALTLTREQGYPSVFYGDYYGIPTHGVPAMRSKIDPILEARQKYAYGPQHDYLDHPDVIGWTREGDSSHPKSGLATLITDGPGGSKRMYAGLKNAGETWYDITGNRSDTVKIGSDGWGEFHVNDGSVSIYVQK

SEQ ID NO: 36558 - protein, 480 aa, Cytophaga sp.
NGTMMQYFEWYVPNDGQQWNRLRTDAPYLSSVGITAVWTPPAYKGTSQADVGYGPYDLYDLGEFNQKGTVRTKYGTKGELKSAVNTLHSNGIQVYGDVVMNHKAGADYTENVTAVEVNPSNRNQETSGEYNIQAWTGFNFPGRGTTYSNFKWQWFHFDGTDWDQSRSLSRIFKFTGKAWDWPVSSENGNYDYLMYADIDYDHPDVVNEMKKWGVWYANEVGLDGYRLDAVKHIKFSFLKDWVDNARAATGKEMFTVGEYWQNDLGALNNYLAFVNYNQSLFDAPLHYNFYAASTGGGYYDMRNILNNTLVASNPTKAVTLVENHDTQPGQSLESTVQPWFKPLAYAFILTRSGGYPSVFYGDMYGTKGTTTREIPALKSKIEPLLKARKDYAYGTQRDYIDNPDVIGWTREGDSTKAKSGLATVITDGPGGSKRMYVGTSNAGEIWYDLTGNRTDKITIGSDGYATFPVNGGSVSVWVQQ

SEQ ID NO: 36559 - protein, 480 aa, Cytophaga sp.
NGTMMQYFEWYVPNDGQQWNRLRTDAPYLSSVGITAVWTPPAYKGTSQADVGYGPYDLYDLGEFNQKGTVRTKYGTKGELKSAINTLHSNGIQVYGDVVMNHKAGADYTENVTAVEVNPSNRYQETSGEYNIQAWTGFNFPGRGTTYSNWKWQWFHFDGTDWDQSRSLSRIFKFDGKAWDWEVSSENGNYDYLMYADYDYDHPDVVNEMKKWGVWYANEVGLDGYRLDAVKHIKFQFLKDWVDNARAATGKEMFTVGEYWQNDLGALNNYLAKVNYNQSLFDAPLHYNFYAASTGGGYYDMRNILNNTLVASNPTKAVTLVENHDTQPGQSLESTVQPWFKPLAYAFILTRSGGYPSVFYGDMYGTKGTTTREIPALKSKIEPLLKARKDYAYGTQRDYIDNPDVIGWTREGDSTKAKSGLATVITDGPGGSKRMYVGTSNAGEIWYDLTGNRTDKITIGSDGYATFPVNGGSVSVWVQQ

SEQ ID NO: 36560 - protein, 480 aa, Cytophaga sp.
NGTMMQYFEWYVPNDGQQWNRLRTDAPYLSSVGITAVWTPPAYKGTSQSDVGYGPYDLYDLGEFNQKGTVRTKYGTKGELKSAVNTLHSNGIQVYGDVVMNHKAGADYTENVTAVEVNPSNRYQETSGEYNIQAWTGFNFPGRGTTYSNWKWQWFHFDGTDWDQSRSLSRIFKFDGKAWDWEVSSENGNYDYLMYADYDYDHPDVVNEMKKWGVWYANEVGLDGYRLDAVKHIKFQFLKDWVDNARAATGKEMFTVGEYWQNDLGALNNYLAKVNYNQSLFDAPLHYNFYAASTGGGYYDMRNILNNTLVASNPTKAVTLVENHDTQPGQSLESTVQPWFKPLAYAFILTRSGGYPSVFYGDMYGTKGTTTREIPALKSKIEPLLKARKDYAYGTQRDYIDNPDVIGWTREGDSTKAKSGLATVITDGPGGSKRMYVGTSNAGEIWYDLTGNRTDKITIGSDGYATFPVNGGSVSVWVQQ

SEQ ID NO: 36561 - protein, 480 aa, Cytophaga sp.
NGTMMQYFEWYTPNDGQQWNRLRTDAPYLSSVGITAVWTPPAYKGTSQADVGYGPYDLYDLGEFNQKGTVRTKYGTKGELKSAVNTLHSNGIQVYGDVVMNHKAGADYTENVTAVEVNPSNRYQETSGEYNIQAWTGFNFPGRGTTYSNWKWQWFHFDGTDWDQSRSLSRIFKFDGKAWDWEVSSENGNYDYLMYADYDYDHPDVVNEMKKWGVWYANEVGLDGYRLDAVKHIKFQFLKDWVDNARAATGKEMFTVGEYWQNDLGALNNYLAKVNYNQSLFDAPLHYNFYAASTGGGYYDMRNILNNTLVASNPTKAVTLVENHDTQPGQSLESTVQPWFKPLAYAFILTRSGGYPSVFYGDMYGTKGTTTREIPALKSKIEPLLKARKDYAYGTQRDYIDNPDVIGWTREGDSTKAKSGLATVITDGPGGSKRMYVGTSNAGEIWYDLTGNRTDKITIGSDGYATFPVNGGSVSVWVQQ

SEQ ID NO: 36562 - protein, 480 aa, Cytophaga sp.
NGTMMQYFEWYVPNDGQQWNRLRTDAPYLSSVGITAVWTPPAYKGTSQADVGYGPYDLYDLGEFNQKGTVRTKYGTKGELKSAVNTLHSNGIQVYGDVVMNHKAGADYTENVTAVEVNPSNRYQETSGEYNIQAWTGFNFPGRGTTYSNWKWQWFHFDGTDWDQSRSLSRIFKFDGKAWDWEVSSENGNYDYLMYADVDYDHPDVVNEMKKWGVWYANEVGLDGYRLDAVKHIKFQFLKDWVDNARAATGKEMFTVGEYWQNDLGALNNYLAKVNYNQSLFDAPLHYNFYAASTGGGYYDMRNILNNTLVASNPTKAVTLVENHDTQPGQSLESTVQPWFKPLAYAFILTRSGGYPSVFYGDMYGTKGTTTREIPALKSKIEPLLKARKDYAYGTQRDYIDNPDVIGWTREGDSTKAKSGLATVITDGPGGSKRMYVGTSNAGEIWYDLTGNRTDKITIGSDGYATFPVNGGSVSVWVQQ

SEQ ID NO: 36563 - protein, 480 aa, Cytophaga sp.
NGTMMQYFEWYVPNDGQQWNRLRTDAPYLSSVGITAVWTPPAYKGTSQADVGYGPYDLYDLGEFNQKGTVRTKYGTKGELKSAVNTLHSNGIQVYGDVVMNHKAGADYTENVTAVEVNPSNRNQETSGEYNIQAWTGFNFPGRGTTYSNWKWQWFHFDGTDWDQSRSLSRIFKFDGKAWDWEVSSENGNYDYLMYADYDYDHPDVVNEMKKWGVWYANEVGLDGYRLDAVKHIKFQFLKDWVDNARAATGKEMFTVGEYWQNDLGALNNYLAKVNYNQSLFDAPLHYNFYAASTGGGYYDMRNILNNTLVASNPTKAVTLVENHDTQPGQSLESTVQPWFKPLAYAFILTRSGGYPSVFYGDMYGTKGTTTREIPALKSKIEPLLKARKDYAYGTQRDYIDNPDVIGWTREGDSTKAKSGLATVITDGPGGSKRMYVGTSNAGEIWYDLTGNRTDKITIGSDGYATFPVNGGSVSVWVQQ

SEQ ID NO: 36564 - protein, 480 aa, Cytophaga sp.
NGTMMQYFEWYVPNDGQQWNRLRTDAPYLSSVGITAVWTPPAYKGTSQADVGYGPYDLYDLGEFNQKGTVRTKYGTKGELKSAVNTLHSNGIQVYGDVVMNHKAGADYTENVTAVEVNPSNRYQETSGEYNIQAWTGFNFPGRGTTYSNWKWQWFHFDGTDWDQSRSLSRIFKFDGKAWDWEVSSENGNYDYLMYADYDYDHPDVVNEMKKWGVWYANEVGLDGYRLDAVKHIKFQFLKDWVDNARAATGKEMFTVGEYWQNDLGALNNYLAKVNYNQSLFDAPLHYNFYAASTGGGYYDMRNILNNTLVASNPTKAVTLVENHDTQPGQSLESTVQPWFKPLAYAFILTRSGGYPSVFYGDMYGTKGTTTREIPALKSKIEPLLKARKDYAYGTQRDYIDNPDVIGWTREGDSTKAKSGLATVITDGPGGSKRMYVGTSNAGETWYDLTGNRTDKITIGSDGYATFPVNGGSVSVWVQQ

SEQ ID NO: 36565 - protein, 480 aa, Cytophaga sp.
NGTMMQYFEWYVPNDGQQWNRLRTDAPYLSSVGITAVWTPPAYKGTSQADVGYGPYDLYDLGEFNQKGTVRTKYGTKGELKSAVNTLHSNGIQVYGDVVMNHKAGADYTENVTAVEVNPSNRNQETSGEYNIQAWTGFNFPGRGTTYSNFKWQWFHFDGTDWDQSRSLSRIFKFTGKAWDWPVSSENGNYDYLLYADYDYDHPDVVNEMKKWGVWYANEVGLDGYRLDAVKHIKFSFLKDWVDNARAATGKEMFTVGEYWQNDLGALNNYLAKVNYNQSLFDAPLHYNFYAASTGGGYYDMRNILNNTLVASNPTKAVTLVENHDTQPGQSLESTVQPWFKPLAYAFILTRSGGYPSVFYGDMYGTKGTTTREIPALKSKIEPLLKARKDYAYGTQRDYIDNPDVIGWTREGDSTKAKSGLATVITDGPGGSKRMYVGTSNAGEIWYDLTGNRTDKITIGSDGYATFPVNKGSVSVWVQQ

SEQ ID NO: 36566 - protein, 480 aa, Cytophaga sp.
NGTMMQYFEWYVPNDGQQWNRLRTDAPYLSSVGITAVWIPPAYKGTSQADVGYGPYDLYDLGEFNQKGTVRTKYGTKGELKSAVNTLHSNGIQVYGDVVMNHKAGADYTENVTAVEVNPSNRYQETSGEYNIQAWTGFNFPGRGTTYSNWKWQWFHFDGTDWDQSRSLSRIFKFDGKAWDWEVSSENGNYDYLMYADYDYDHPDVVNEMKKWGVWYANEVGLDGYRLDAVKHIKFQFLKDWVDNARAATGKEMFTVGEYWQNDLGALNNYLAKVNYNQSLFDAPLHYNFYAASTGGGYYDMRNILNNTLVASNPTKAVTLVENHDTQPGQSLESTVQPWFKPLAYAFILTRSGGYPSVFYGDMYGTKGTTTREIPALKSKIEPLLKARKDYAYGTQRDYIDNPDVIGWTREGDSTKAKSGLATVITDGPGGSKRMYVGTSNAGEIWYDLTGNRTDKITIGSDGYATFPVNGGSVSVWVQQ

SEQ ID NO: 36567 - protein, 480 aa, Cytophaga sp.
NGTMMQYFEWYVPNDGQQWNRLRTDAPYLSSVGITAVWTPPAYKGTSQADVGYGPYDLYDLGEFNQKGTVRTKYGTKGELKSAVNTLHSNGIQVYGDVVMNHKAGADYTENVTAVEVNPSNRYQETSGEYNIQAWTGFNFPGRGTTYSNWKWQWFHFDGTDWDQSRSLSRIFKFDGKAWDWEVSSENGNYDYLMYADYDYDHPDVVNEMKKWGVWYANEVGLDGYRLDAVKHIKFQFLKDWVDNVRAATGKEMFTVGEYWQNDLGALNNYLAKVNYNQSLFDAPLHYNFYAASTGGGYYDMRNILNNTLVASNPTKAVTLVENHDTQPGQSLESTVQPWFKPLAYAFILTRSGGYPSVFYGDMYGTKGTTTREIPALKSKIEPLLKARKDYAYGTQRDYIDNPDVIGWTREGDSTKAKSGLATVITDGPGGSKRMYVGTSNAGEIWYDLTGNRTDKITIGSDGYATFPVNGGSVSVWVQQ

SEQ ID NO: 36568 - protein, 480 aa, Cytophaga sp.
NGTMMQYFEWYVPNDGQQWNRLRTDAPYLSSVGITAVWTPPAYKGTSQADVGYGPYDLYDLGEFNQKGTVRTKYGTKGELKSAVNTLHSNGIQVYGDVVMNHKAGADYTENVTAVEVNPSNRNQETSGEYNIQAWTGFNFPGRGTTYSNFKWQWFHFDGTDWDQSRSLSRIFKFTGKAWDWPVSSENGNYDYLMYADIDYDHPDVVNEMKKWGVWYANEVGLDGYRLDAVKHIKFHFLKDWVDNARAATGKEMFTVGEYWQNDLGALNNYLAKVNYNQSLFDAPLHYNFYAASTGGGYYDMRNILNNTLVASNPTKAVTLVENHDTQPGQSLESTVQPWFKPLAYAFILTRSGGYPSVFYGDMYGTKGTTTREIPALKSKIEPLLKARKDYAYGTQRDYIDNPDVIGWTREGDSTKAKSGLATVITDGPGGSKRMYVGTSNAGEIWYDLTGNRTDKITIGSDGYATFPVNGGSVSVWVQQ

SEQ ID NO: 36569 - protein, 480 aa, Cytophaga sp.
NGTMMQYFEWYVPNDGQQWNRLRTDAPYLSSVGITAVWTPPAYKGTSQADVGYGPYDLYDLGEFNQKGTVRTKYGTKGELKSAVNTLHSNGIQVYGDVVMNHKAGADYTENVTAVEVNPSNRYQETSGEYNIQAWTGFNFPGRGTTYSNWKWQWFHFDGTDWDQSRSLSRIFKFDGKAWDWEVSSENGNYDYLMYADYDYDHPDVVNEMKKWGVWYANEVGLDGYRLDAAKHIKFQFLKDWVDNARAATGKEMFTVGEYWQNDLGALNNYLAKVNYNQSLFDAPLHYNFYAASTGGGYYDMRNILNNTLVASNPTKAVTLVENHDTQPGQSLESTVQPWFKPLAYAFILTRSGGYPSVFYGDMYGTKGTTTREIPALKSKIEPLLKARKDYAYGTQRDYIDNPDVIGWTREGDSTKAKSGLATVITDGPGGSKRMYVGTSNAGEIWYDLTGNRTDKITIGSDGYATFPVNGGSVSVWVQQ

SEQ ID NO: 36570 - protein, 480 aa, Cytophaga sp.
NGTMMQYFEWYVPNDGQQWNRLRTDAPYLSSVGITAVWTPPAYKGTSQADVGYGPYDLYDLGEFNQKGTVRTKYGTKGELKSAVNTLHSNGIQVYGDVVMNHKAGADYTENVTAVEVNPSNRYQETSGEYNIQAWTGFNFPGRGTTYSNWKWQWFHFDGTDWDQSRSLSRIFKFDGKAWDWEVSSENGNYDYLMYADYDYDHPDVVNEMKKWGVWYANEVGLDGYRLDAVKHIKFQFLKDWVDNARAATGKEMFTVGEYWQNDLGALNNYLAKVNYNQSLFDAPLHYNFYAASTGGGYYDMRNILNNTLVASNPTKAVTLVENHDTQPGQSLESTVQPWFKPLAYAFILTRSGGYPSVFYGDMYGTKGTTTREIPALKSKIEPLLKARKDYAYGTQRDYIDNPDVIGWTREGDSTAAKSGLATVITDGPGGSKRMYVGTSNAGEIWYDLTGNRTDKITIGSDGYATFPVNGGSVSVWVQQ

SEQ ID NO: 36571 - protein, 480 aa, Cytophaga sp.
NGTMMQYFEWYVPNDGQQWNRLRTDAPYLSSVGITAVWTPPAYKGTSQADVGYGPYDLYDLGEFNQKGTVRTKYGTKGELKSAVNTLHSNGIQVYGDVVMNHKAGADYTENVTAVEVNPSNRYQETSGEYNIQAWTGFNFPGRGTTYSNWKWQWFHFDGTDWDESRSLSRIFKFDGKAWDWEVSSENGNYDYLMYADYDYDHPDVVNEMKKWGVWYANEVGLDGYRLDAVKHIKFQFLKDWVDNARAATGKEMFTVGEYWQNDLGALNNYLAKVNYNQSLFDAPLHYNFYAASTGGGYYDMRNILNNTLVASNPTKAVTLVENHDTQPGQSLESTVQPWFKPLAYAFILTRSGGYPSVFYGDMYGTKGTTTREIPALKSKIEPLLKARKDYAYGTQRDYIDNPDVIGWTREGDSTKAKSGLATVITDGPGGSKRMYVGTSNAGEIWYDLTGNRTDKITIGSDGYATFPVNGGSVSVWVQQ

SEQ ID NO: 36572 - protein, 480 aa, Cytophaga sp.
NGTMMQYFEWYVPNDGQQWNRLRTDAPYLSSVGITAVWTPPAYKGTSQADVGYGPYDLYDLGEFNQKGTVRTKYGTKGELKSAVNTLHSNGIQVYGDVVMNHKAGADYTENVTAVEVNPSNRYQETSGEYNIQAWTGFNFPGRGTTYSNWKWQWFHFDGTDWDQSRSLSRIFKFDGKAWDWEVSSENGNYDYLMYADYDYDHPDVVNEMKKWGVWYANEVGLDGYRLDAVKHIKFQFLKDWVDNARAATGKEMFTVGEYWQNDLGKLNNYLAKVNYNQSLFDAPLHYNFYAASTGGGYYDMRNILNNTLVASNPTKAVTLVENHDTQPGQSLESTVQPWFKPLAYAFILTRSGGYPSVFYGDMYGTKGTTTREIPALKSKIEPLLKARKDYAYGTQRDYIDNPDVIGWTREGDSTKAKSGLATVITDGPGGSKRMYVGTSNAGEIWYDLTGNRTDKITIGSDGYATFPVNGGSVSVWVQQ

SEQ ID NO: 36573 - protein, 480 aa, Cytophaga sp.
NGTMMQYFEWYVPNDGQQWNRLRTDAPYLSSVGITAVWTPPAYKGTSQADVGYGPYDLYDLGEFNQKGTVRTKYGTKGELKSAVNTLHSNGIQVYGDVVMNHKAGADYTENVTAVEVNPSNRYQETSGEYNIQAWTGFNFPGRGTTYSDWKWQWFHFDGTDWDQSRSLSRIFKFDGKAWDWEVSSENGNYDYLMYADYDYDHPDVVNEMKKWGVWYANEVGLDGYRLDAVKHIKFQFLKDWVDNARAATGKEMFTVGEYWQNDLGALNNYLAKVNYNQSLFDAPLHYNFYAASTGGGYYDMRNILNNTLVASNPTKAVTLVENHDTQPGQSLESTVQPWFKPLAYAFILTRSGGYPSVFYGDMYGTKGTTTREIPALKSKIEPLLKARKDYAYGTQRDYIDNPDVIGWTREGDSTKAKSGLATVITDGPGGSKRMYVGTSNAGEIWYDLTGNRTDKITIGSDGYATFPVNGGSVSVWVQQ

SEQ ID NO: 36574 - protein, 480 aa, Cytophaga sp.
NGTMMQYFEWYVPNDGQQWNRLRTDAPYLSSVGITAVWTPPAYKGTSQADVGYGPYDLYDLGEFNQKGTVRTKYGTKGELKSAVNTLHSNGIQVYGDVVMNHKAGADYTENVTAVEVNPANRYQETSGEYNIQAWTGFNFPGRGTTYSNWKWQWFHFDGTDWDQSRSLSRIFKFDGKAWDWEVSSENGNYDYLMYADYDYDHPDVVNEMKKWGVWYANEVGLDGYRLDAVKHIKFQFLKDWVDNARAATGKEMFTVGEYWQNDLGALNNYLAKVNYNQSLFDAPLHYNFYAASTGGGYYDMRNILNNTLVASNPTKAVTLVENHDTQPGQSLESTVQPWFKPLAYAFILTRSGGYPSVFYGDMYGTKGTTTREIPALKSKIEPLLKARKDYAYGTQRDYIDNPDVIGWTREGDSTKAKSGLATVITDGPGGSKRMYVGTSNAGEIWYDLTGNRTDKITIGSDGYATFPVNGGSVSVWVQQ

SEQ ID NO: 36575 - protein, 480 aa, Cytophaga sp.
NGTMMQYFEWYVPNDGQQWNRLRTDAPYLSSVGITAVWTPPAYKGTSQADVGYGPYDLYDLGEFNQKGTVRTKYGTKGELKSAVNTLHSNGIQVYGDVVMNHKAGADYTENVTAVEVNPSNRYQETSGEYNIQAWTGFNFPGRGTTYSNWKWQWFHFDGTDWDQSRSLSRIFKFDGKAWDWEVSSENGNYDYLMYADYDYDHPDVVNEMKKWGVWYANEVGLDGYRLDAVKHIKFQFLKDWVDNARAATGKEMFTVGEYWQNDLGALNNYLAKVNYNQSLFDAPLHYNFYAASTGGGYYDMRNILNNTLVASNPTKAVTLVENHDTQPGQSLESTVQPWFKPLAYAFILTRSGGYPSVFYGDMYGTKGTTTREIPALKSKIEPLLKARKDYAYGTQRDYIDNPDVIGWTREGDSSKAKSGLATVITDGPGGSKRMYVGTSNAGEIWYDLTGNRTDKITIGSDGYATFPVNGGSVSVWVQQ

SEQ ID NO: 36576 - protein, 480 aa, Cytophaga sp.
NGTMMQYFEWYVPNDGQQWNRLRTDAPYLSSVGITAVWTPPAYKGTSQADVGYGPYDLYDLGEFNQKGTVRTKYGTKGELKSAVNTLHSNGIQVYGDVVMNHKAGADYTENVTAVEVNPSNRYQETSGEYNIQAWTGFNFPGRGTTYSNWKWQWFHFDGTDWDQSRSLSRIFKFDGKAWDWEVSSENGNYDYLMYADYDYDHPDVVNEMKKWGVWYANEVGLDGYRLDAVKHIKFQFLKDWVDNARAATGKEMFTVGEYWQNDLGALNNYLAKVNYNQSLFDAPLHYNFYAASTGGGYYDMRNILNNTLVASNPEKAVTLVENHDTQPGQSLESTVQPWFKPLAYAFILTRSGGYPSVFYGDMYGTKGTTTREIPALKSKIEPLLKARKDYAYGTQRDYIDNPDVIGWTREGDSTKAKSGLATVITDGPGGSKRMYVGTSNAGEIWYDLTGNRTDKITIGSDGYATFPVNGGSVSVWVQQ

SEQ ID NO: 36577 - protein, 480 aa, Cytophaga sp.
NGTMMQYFEWYVPNDGQQWNRLRTDAPYLSSVGITAVWTPPAYKGTSQADVGYGPYDLYDLGEFNQKGTVRTKYGTKGELKSAVNTLHSNGIQVYGDVVMNHKAGADYTENVTAVEVNPSNRYQETSGEYNIQAWTGFNFPGRGTTYSNWKWQWFHFDGTDWDQSRSLSRIFKFDGKAWDWEVSSENGNYDYLMYADYDYDHPDVVNEMKKWGVWYANEVGLDGYRLDAVKHIKFQFLKDWVDNARAATGKEMFTVGEYWQNDLGALNNYLAKVNYNQSLFDAPLHYNFYAASTGGGYYDMRNILNNTLVASNPTKAVTFVENHDTQPGQSLESTVQPWFKPLAYAFILTRSGGYPSVFYGDMYGTKGTTTREIPALKSKIEPLLKARKDYAYGTQRDYIDNPDVIGWTREGDSTKAKSGLATVITDGPGGSKRMYVGTSNAGEIWYDLTGNRTDKITIGSDGYATFPVNGGSVSVWVQQ

SEQ ID NO: 36578 - protein, 480 aa, Cytophaga sp.
NGTMMQYFEWYVPNDGQQWNRLRTDAPYLSSVGITAVWTPPAYKGTSQADVGYGPYDLYDLGEFNQKGTVRTKYGTKGELKSAVNTLHSNGIQVYGDVVMNHKAGADYTENVTAVEVNPSNRYQETSGEYNIQAWTGFNFPGRGTTYSNWKWQWFHFDGTDWDQSRSLSRIFKFDGKAWDWEVSSENGNYDYLMYADYDYDHPDVVNEMKKWGVWYANEVGLDGYRLDAVKHIKFSFLKDWVDNARAATGKEMFTVGEYWQNDLGALNNYLAKVNYNQSLFDAPLHYNFYAASTGGGYYDMRNILNNTLVASNPTKAVTLVENHDTQPGQSLESTVQPWFKPLAYAFILTRSGGYPSVFYGDMYGTKGTTTREIPALKSKIEPLLKARKDYAYGTQRDYIDNPDVIGWTREGDSTKAKSGLATVITDGPGGSKRMYVGTSNAGEIWYDLTGNRTDKITIGSDGYATFPVNGGSVSVWVQQ

SEQ ID NO: 36579 - protein, 480 aa, Cytophaga sp.
NGTMMQYFEWYVPNDGQQWNRLRTDAPYLSSVGITAVWTPPAYKGTSQADVGYGPYDLYDLGEFNQKGTVRTKYGTKGELKSAVNTLHSNGIQVYGDVVMNHKAGADYTENVTAVEVNPSNRNQETSGEYNIQAWTGFNFPGRGTTYSNFKWQWFHFDGTDWDQSRSLSRIFKFTGKAWDWPVSSENGNYDYLMYADIDYDHPDVVNEMKKWGVWYANEVGLDGYRLDAVKHIKFYFLKDWVDNARAATGKEMFTVGEYWQNDLGALNNYLAKVNYNQSLFDAPLHYNFYAASTGGGYYDMRNILNNTLVASNPTKAVTLVENHDTQPGQSLESTVQPWFKPLAYAFILTRSGGYPSVFYGDMYGTKGTTTREIPALKSKIEPLLKARKDYAYGTQRDYIDNPDVIGWTREGDSTKAKSGLATVITDGPGGSKRMYVGTSNAGEIWYDLTGNRTDKITIGSDGYATFPVNGGSVSVWVQQ

SEQ ID NO: 36580 - protein, 480 aa, Cytophaga sp.
NGTMMQYFEWYVPNDGQQWNRLRTDAPYLSSVGITAVWTPPAYKGTSQADVGYGPYDLYDLGEFNQKGTVRTKYGTKGELKSAVNTLHSNGIQVYGDVVMNHKAGADYTENVTAVEVNPSNRYQETSGEYNIQAWTGFNFPGRGTTYSNWKWQWFHFDGTDWDQSRSLSRIFKFDGKAWDWEVSSENGNYDYLMYADYDYDHPDVVNEMKKWGIWYANEVGLDGYRLDAVKHIKFQFLKDWVDNARAATGKEMFTVGEYWQNDLGALNNYLAKVNYNQSLFDAPLHYNFYAASTGGGYYDMRNILNNTLVASNPTKAVTLVENHDTQPGQSLESTVQPWFKPLAYAFILTRSGGYPSVFYGDMYGTKGTTTREIPALKSKIEPLLKARKDYAYGTQRDYIDNPDVIGWTREGDSTKAKSGLATVITDGPGGSKRMYVGTSNAGEIWYDLTGNRTDKITIGSDGYATFPVNGGSVSVWVQQ

SEQ ID NO: 36581 - protein, 480 aa, Cytophaga sp.
NGTMMQYFEWYVPNDGQQWNRLRTDAPYLSSVGITAVWTPPAYKGTSQADNGYGPYDLYDLGEFNQKGTVRTKYGTKGELKSAVNTLHSNGIQVYGDVVMNHKAGADYTENVTAVEVNPSNRYQETSGEYNIQAWTGFNFPGRGTTYSNWKWQWFHFDGTDWDQSRSLSRIFKFDGKAWDWEVSSENGNYDYLMYADYDYDHPDVVNEMKKWGVWYANEVGLDGYRLDAVKHIKFQFLKDWVDNARAATGKEMFTVGEYWQNDLGALNNYLAKVNYNQSLFDAPLHYNFYAASTGGGYYDMRNILNNTLVASNPTKAVTLVENHDTQPGQSLESTVQPWFKPLAYAFILTRSGGYPSVFYGDMYGTKGTTTREIPALKSKIEPLLKARKDYAYGTQRDYIDNPDVIGWTREGDSTKAKSGLATVITDGPGGSKRMYVGTSNAGEIWYDLTGNRTDKITIGSDGYATFPVNGGSVSVWVQQ

SEQ ID NO: 36582 - protein, 480 aa, Cytophaga sp.
NGTMMQYFEWYVPNDGQQWNRLRTDAPYLSSVGITAVWTPPAYKGTSQADVGYGPYDLYDLGEFNQKGTVRTKYGTKGELKSAVNTLHSNGIQVYGDVVMNHKAGADYTENVTAVEVNPSNRYQETSGEYNIQAWTGFNFPGRGTTYSNWKWQWFHFDGTDWDQSRSLSRIFKFRGKAWDWEVSSENGNYDYLMYADYDYDHPDVVNEMKKWGVWYANEVGLDGYRLDAVKHIKFQFLKDWVDNARAATGKEMFTVGEYWQNDLGALNNYLAKVNYNQSLFDAPLHYNFYAASTGGGYYDMRNILNNTLVASNPTKAVTLVENHDTQPGQSLESTVQPWFKPLAYAFILTRSGGYPSVFYGDMYGTKGTTTREIPALKSKIEPLLKARKDYAYGTQRDYIDNPDVIGWTREGDSTKAKSGLATVITDGPGGSKRMYVGTSNAGEIWYDLTGNRTDKITIGSDGYATFPVNGGSVSVWVQQ

SEQ ID NO: 36583 - protein, 480 aa, Cytophaga sp.
NGTMMQYFEWYVPNDGQQWNRLRTDAPYLSSVGITAVWTPPAYKGTSQADVGYGPYDLYDLGEFNQKGTVRTKYGTKGELKSAVNTLHSNGIQVYGDVVMNHKAGADYTENVTAVEVNPSNRYQETSGEYNIKAWTGFNFPGRGTTYSNWKWQWFHFDGTDWDQSRSLSRIFKFDGKAWDWEVSSENGNYDYLMYADYDYDHPDVVNEMKKWGVWYANEVGLDGYRLDAVKHIKFQFLKDWVDNARAATGKEMFTVGEYWQNDLGALNNYLAKVNYNQSLFDAPLHYNFYAASTGGGYYDMRNILNNTLVASNPTKAVTLVENHDTQPGQSLESTVQPWFKPLAYAFILTRSGGYPSVFYGDMYGTKGTTTREIPALKSKIEPLLKARKDYAYGTQRDYIDNPDVIGWTREGDSTKAKSGLATVITDGPGGSKRMYVGTSNAGEIWYDLTGNRTDKITIGSDGYATFPVNGGSVSVWVQQ

SEQ ID NO: 36584 - protein, 480 aa, Cytophaga sp.
NGTMMQYFEWYVPNDGQQWNRLRTDAPYLSSVGITAVWTPPAYKGTSQADVGYGPYDLYDLGEFNQKGTVRTKYGTKGELKSAVNTLHSNGIQVYGDVVMNHKAGADYTENVTAVEVNPSNRYQETSGEYNIQAWTGFNFPGRGTTYSNFKWQWFHFDGTDWDQSRSLSRIFKFDGKAWDWPVSSENGNYDYLMYADYDYDHPDVVNEMKKWGVWYANEVGLDGYRLDAVKHIKFSFLKDWVDNARAATGKEMFTVGEYWQNDLGALNNYLAKVNYNQSLFDAPLHYNFYAASTGGGYYDMRNILNNTLVASNPTKAVTLVENHDTQPGQSLESTVQPWFKPLAYAFILTRSGGYPSVFYGDMYGTKGTTTREIPALKSKIEPLLKARKDYAYGTQRDYIDNPDVIGWTREGDSTKAKSGLATVITDGPGGSKRMYVGTSNAGEIWYDLTGNRTDKITIGSDGYATFPVNKGSVSVWVQQ

SEQ ID NO: 36585 - protein, 480 aa, Cytophaga sp.
NGTMMQYFEWYVPNDGQQWNRLRTDAPYLSSVGITAVWTPPAYKGTSQADVGYGPYDLYDLGEFQQKGTVRTKYGTKGELKSAVNTLHSNGIQVYGDVVMNHKAGADYTENVTAVEVNPSNRYQETSGEYNIQAWTGFNFPGRGTTYSNWKWQWFHFDGTDWDQSRSLSRIFKFDGKAWDWEVSSENGNYDYLMYADYDYDHPDVVNEMKKWGVWYANEVGLDGYRLDAVKHIKFQFLKDWVDNARAATGKEMFTVGEYWQNDLGALNNYLAKVNYNQSLFDAPLHYNFYAASTGGGYYDMRNILNNTLVASNPTKAVTLVENHDTQPGQSLESTVQPWFKPLAYAFILTRSGGYPSVFYGDMYGTKGTTTREIPALKSKIEPLLKARKDYAYGTQRDYIDNPDVIGWTREGDSTKAKSGLATVITDGPGGSKRMYVGTSNAGEIWYDLTGNRTDKITIGSDGYATFPVNGGSVSVWVQQ

SEQ ID NO: 36586 - protein, 480 aa, Cytophaga sp.
NGTMMQYFEWYVPNDGQQWNRLRTDAPYLSSVGITAVWTPPAYKGTSQADVGYGPYDLYDLGEFNQKGTVRTKYGTKGELKSAVNTLHSNGIQVYGDVVMNHKAGADYTENVTAVEVNPSNRYQETSGEYNIQAWTGFNFPGRGTTYSNWKWQWFHFDGTDWDQSRSLSRIFKFDGKAWDWEVSSENGNYDYLMYADYDYDHPDVVNEMKKWGVWYANEVGLDGYRLDAVKHIKFQFLKDWVDNARAATGKEMFTVGEYWQNDLGALNNYLAKVNYNQSLFDAPLHYNFYAASTGGGYYDMRNILNNTLVASNPTKAVTLVENHDTQPGQSLESTVQPWFKPLAYAFILTRSGGYPSVFYGDMYGTKGTTTREIPALKSKIEPLLKARKDYAYGTQRDYIDNPDVIGWTREGDSTKAKSGLATLITDGPGGSKRMYVGTSNAGEIWYDLTGNRTDKITIGSDGYATFPVNGGSVSVWVQQ

SEQ ID NO: 36587 - protein, 480 aa, Cytophaga sp.
NGTMMQYFEWYVPNDGQQWNRLRTDAPYLSSVGITAVWTPPAYKGTSQADVGYGPYDLYDLGEFNQKGTVRTKYGTKGELKSAVNTLHSNGIQVYGDVVMNHKAGADYTENVTAVEVNPSNRYQETSGEYNIQAWTGFNFPGRGTTYSNWKWQWFHFDGTDWDQSRSLSRIFKFDGKAWDWEVSSENGNYDYLMYADYDYDHPDVVNEMKKWGVWYANEVGLDGYRLDAVKHIKFQFLKDWVDNARAATGKEMFTVGEYWQNNLGALNNYLAKVNYNQSLFDAPLHYNFYAASTGGGYYDMRNILNNTLVASNPTKAVTLVENHDTQPGQSLESTVQPWFKPLAYAFILTRSGGYPSVFYGDMYGTKGTTTREIPALKSKIEPLLKARKDYAYGTQRDYIDNPDVIGWTREGDSTKAKSGLATVITDGPGGSKRMYVGTSNAGEIWYDLTGNRTDKITIGSDGYATFPVNGGSVSVWVQQ

SEQ ID NO: 36588 - protein, 480 aa, Cytophaga sp.
NGTMMQYFEWYVPNDGQQWNRLRTDAPYLSSVGITAVWTPPAYKGTSQADVGYGPYDLYDLGEFNQKGTVRTKYGTKGELKSAVNTLHSNGIQVYGDVVMNHKAGADYTENVTAVEVNPSNRYQETSGEYNIQAWTGFNFPGRGTTYSNWKWQWFHFDGTDWDQSRSLSRIFKFDGKAWDWEVSSENGNYDYLMYADYDYDHPDVVNEMKKWGVWYANEVSLDGYRLDAVKHIKFQFLKDWVDNARAATGKEMFTVGEYWQNDLGALNNYLAKVNYNQSLFDAPLHYNFYAASTGGGYYDMRNILNNTLVASNPTKAVTLVENHDTQPGQSLESTVQPWFKPLAYAFILTRSGGYPSVFYGDMYGTKGTTTREIPALKSKIEPLLKARKDYAYGTQRDYIDNPDVIGWTREGDSTKAKSGLATVITDGPGGSKRMYVGTSNAGEIWYDLTGNRTDKITIGSDGYATFPVNGGSVSVWVQQ

SEQ ID NO: 36589 - protein, 480 aa, Cytophaga sp.
NGTMMQYFEWYVPNDGQQWNRLRTDAPYLSSVGITAVWTPPAYKGTSQADVGYGPYDLYDLGEFNQKGTVRTKYGTKGELKSAVNTLHSNGIQVYGDVVMNHKAGADYTENVTAVEVNPSNRYQETSGEYNIQAWTGFNFPGRGTTYSNWKWQWFHFDGTDWDQSRSLSRIFKFDGKAWDWEVSSENGNYDYLMYADYDYDHPDVVNEMKKWGVWYANEVGLDGYRLDAVKHIKFQFLKDWVDNARAATGKEMFTVGEYWQNDLGALNNYLAKVNYNQSLFDAPLHYNFYAASTGGGYYDMRNILNNTLVASNPTKAVTLVENHDTQPGQSLESTVQPWFKPLAYAFILTRSGGYPSVFYGDMYGTKGTTTREIPALKSKIEPLLKARKDYAYGTQRDYIDNPDVIGWTREGDSTKAKSGLATVITDGPGGSKRMYVGTSNAGEIWYDLTGNRTDKITIGSDGWATFPVNGGSVSVWVQQ

SEQ ID NO: 36590 - protein, 480 aa, Cytophaga sp.
NGTMMQYFEWYVPNDGQQWNRLRTDAPYLSSVGITAVWTPPAYKGTSQADVGYGPYDLYDLGEFNQKGTVRTKYGTKGELKSAVNTLHSNGIQVYGDVVMNHKAGADYTENVTAVEVNPSNRYQETSGEYNIQAWTGFNFPGRGTTYSNWKWQWFHFDGTDWDQSRSLSRIFKFDGKAWDWEVSSENGNYDYLMYADYDYDHPDVVNEMKKWGVWYANEVGLDGYRLDAVKHIKFQFLKDWVDNARAATGKEMFTVGEYWQNDLGALNNYLAKVNYNQSVFDAPLHYNFYAASTGGGYYDMRNILNNTLVASNPTKAVTLVENHDTQPGQSLESTVQPWFKPLAYAFILTRSGGYPSVFYGDMYGTKGTTTREIPALKSKIEPLLKARKDYAYGTQRDYIDNPDVIGWTREGDSTKAKSGLATVITDGPGGSKRMYVGTSNAGEIWYDLTGNRTDKITIGSDGYATFPVNGGSVSVWVQQ

SEQ ID NO: 36591 - protein, 480 aa, Cytophaga sp.
NGTMMQYFEWYVPNDGQQWNRLRTDAPYLSSVGITAVWTPPAYKGTSQADVGYGPYDLYDLGEFNQKGTVRTKYGTKGELKSAVNTLHSNNIQVYGDVVMNHKAGADYTENVTAVEVNPSNRYQETSGEYNIQAWTGFNFPGRGTTYSNWKWQWFHFDGTDWDQSRSLSRIFKFDGKAWDWEVSSENGNYDYLMYADYDYDHPDVVNEMKKWGVWYANEVGLDGYRLDAVKHIKFQFLKDWVDNARAATGKEMFTVGEYWQNDLGALNNYLAKVNYNQSLFDAPLHYNFYAASTGGGYYDMRNILNNTLVASNPTKAVTLVENHDTQPGQSLESTVQPWFKPLAYAFILTRSGGYPSVFYGDMYGTKGTTTREIPALKSKIEPLLKARKDYAYGTQRDYIDNPDVIGWTREGDSTKAKSGLATVITDGPGGSKRMYVGTSNAGEIWYDLTGNRTDKITIGSDGYATFPVNGGSVSVWVQQ

SEQ ID NO: 36592 - protein, 480 aa, Cytophaga sp.
NGTMMQYFEWYVPNDGQQWNRLRTDAPYLSSVGITAVWTPPAYKGTSQADVGYGPYDLYDLGEFNQKGTVRTKYGTKGELKSAVNTLHSNGIQVYGDVVMNHKAGADYTENVTAVEVNPSNRYQETSGEYNIQAWTGFNFPGRGTTYSNWKWQWFHFDGTDWDQSRSISRIFKFDGKAWDWEVSSENGNYDYLMYADYDYDHPDVVNEMKKWGVWYANEVGLDGYRLDAVKHIKFQFLKDWVDNARAATGKEMFTVGEYWQNDLGALNNYLAKVNYNQSLFDAPLHYNFYAASTGGGYYDMRNILNNTLVASNPTKAVTLVENHDTQPGQSLESTVQPWFKPLAYAFILTRSGGYPSVFYGDMYGTKGTTTREIPALKSKIEPLLKARKDYAYGTQRDYIDNPDVIGWTREGDSTKAKSGLATVITDGPGGSKRMYVGTSNAGEIWYDLTGNRTDKITIGSDGYATFPVNGGSVSVWVQQ

SEQ ID NO: 36593 - protein, 480 aa, Cytophaga sp.
NGTMMQYFEWYVPNDGQQWNRLRTDAPYLSSVGITAVWTPPAYKGTSQADVGYGPYDLYDLGEFNQKGTVRTKYGTKGELKSAVGTLHSNGIQVYGDVVMNHKAGADYTENVTAVEVNPSNRYQETSGEYNIQAWTGFNFPGRGTTYSNWKWQWFHFDGTDWDQSRSLSRIFKFDGKAWDWEVSSENGNYDYLMYADYDYDHPDVVNEMKKWGVWYANEVGLDGYRLDAVKHIKFQFLKDWVDNARAATGKEMFTVGEYWQNDLGALNNYLAKVNYNQSLFDAPLHYNFYAASTGGGYYDMRNILNNTLVASNPTKAVTLVENHDTQPGQSLESTVQPWFKPLAYAFILTRSGGYPSVFYGDMYGTKGTTTREIPALKSKIEPLLKARKDYAYGTQRDYIDNPDVIGWTREGDSTKAKSGLATVITDGPGGSKRMYVGTSNAGEIWYDLTGNRTDKITIGSDGYATFPVNGGSVSVWVQQ

SEQ ID NO: 36594 - protein, 480 aa, Cytophaga sp.
NGTMMQYFEWYVPNDGQQWNRLRTDAPYLSSVGITAVWTPPAYKGTSQADVGYGPYDLYDLGEFNQKGTVRTKYGTKGELKSAVNTLHSNGIQVYGDVVMNHKAGADYTENVTAVEVNPSNRNQETSGEYNIQAWTGFNFPGRGTTYSNFKWQWFHFDGTDWDQSRSLSRIFKFTGKAWDWPVSSENGNYDYLMYADIDYDHPDVVNEMKKWGVWYANEVGLDGYRLDAVKHIKFQFLKDWVDNARAATGKEMFTVGEYWQNDLGALNNYLAKVNYNQSLFDAPLHYNFYAASTGGGYYDMRNILNNTLVASNPTKAVTLVENHDTQPGQSLESTVQPWFKPLAYAFILTRSGGYPSVFYGDMYGTKGTTTREIPALKSKIEPLLKARKDYAYGTQRDYIDNPDVIGWTREGDSTKAKSGLATVITDGPGGSKRMYVGTSNAGEIWYDLTGNRTDKITIGSDGYATFPVNGGSVSVWVQQ

SEQ ID NO: 36595 - protein, 480 aa, Cytophaga sp.
NGTMMQYFEWYVPNDGQQWNRLRTDAPYLSSVGITAVWTPPAYKGTSQADVGYGPYDLYDLGEFNQKGTVRTKYGTKGELKSAVNTLHSNGIQVYGDVVMNHKAGADYTENVTAVEVNPSNRYQETSGEYNIQAWTGFNFPGRGTTYSNWKWQWFHFDGTDWDQSRSLSRIFKFGGKAWDWEVSSENGNYDYLMYADYDYDHPDVVNEMKKWGVWYANEVGLDGYRLDAVKHIKFQFLKDWVDNARAATGKEMFTVGEYWQNDLGALNNYLAKVNYNQSLFDAPLHYNFYAASTGGGYYDMRNILNNTLVASNPTKAVTLVENHDTQPGQSLESTVQPWFKPLAYAFILTRSGGYPSVFYGDMYGTKGTTTREIPALKSKIEPLLKARKDYAYGTQRDYIDNPDVIGWTREGDSTKAKSGLATVITDGPGGSKRMYVGTSNAGEIWYDLTGNRTDKITIGSDGYATFPVNGGSVSVWVQQ

SEQ ID NO: 36596 - protein, 480 aa, Cytophaga sp.
NGTMMQYFEWYVPNDGQQWNRLRTDAPYLSSVGITAVWTPPAYKGTSQADVGYGPYDLYDLGEFNQKGTVRTKYGTKGELQSAVNTLHSNGIQVYGDVVMNHKAGADYTENVTAVEVNPSNRYQETSGEYNIQAWTGFNFPGRGTTYSNWKWQWFHFDGTDWDQSRSLSRIFKFDGKAWDWEVSSENGNYDYLMYADYDYDHPDVVNEMKKWGVWYANEVGLDGYRLDAVKHIKFQFLKDWVDNARAATGKEMFTVGEYWQNDLGALNNYLAKVNYNQSLFDAPLHYNFYAASTGGGYYDMRNILNNTLVASNPTKAVTLVENHDTQPGQSLESTVQPWFKPLAYAFILTRSGGYPSVFYGDMYGTKGTTTREIPALKSKIEPLLKARKDYAYGTQRDYIDNPDVIGWTREGDSTKAKSGLATVITDGPGGSKRMYVGTSNAGEIWYDLTGNRTDKITIGSDGYATFPVNGGSVSVWVQQ

SEQ ID NO: 36597 - protein, 480 aa, Cytophaga sp.
NGTMMQYFEWYVPNDGQQWNRLRTDAPYLSSVGITAVWTPPAYKGTSQADVGYGPYDLYDLGEFNQKGTVRTKYGTKGELKSAVNTLHSNGIQVYGDVVMNHKAGADYTENVTAVEVNPSNRYQETSGEYNIQAWTGFNFPGRGTTYSNWKWQWFHFDGTDWDQSRSLSRIFKFDGKAWDWEVSSENGNYDYLMYADYDYDHPDVVNEMKKWGVWYANEVGLDGYRLDAVKHIKFQFLKDWVDNARAATGKEMFTVGEYWQNDLGALNNYLAKVNYNQSLFDAPLHYNFYAASTGGGYYDMRNILNNTLVASNPTKAVTLVENHDTQPGQSLESTVQPWFKPLAYAFILTRSGGYPSVFYGDMYGTKGTTTREIPALKSKIEPLLKARKEYAYGTQRDYIDNPDVIGWTREGDSTKAKSGLATVITDGPGGSKRMYVGTSNAGEIWYDLTGNRTDKITIGSDGYATFPVNGGSVSVWVQQ

SEQ ID NO: 36598 - protein, 480 aa, Cytophaga sp.
NGTMMQYFEWYVPNDGQQWNRLRTDAPYLSSVGITAVWTPPAYKGTSQADVGYGPYDLYDLGEFNQKGTVRTKYGTKGELKSAVNTLHSNGIQVYGDVVMNHKAGADYTENVTAVEVNPSNRYQETSGEYNIQAWTGFNFPGRGTTYSNWKWQWFHFDGTDWDQSRSLSRIFKFDGKAWDWEVSSENGNYDYLMYADYDYDHPDVVNEMKKWGVWYANEVGLDGYRLDAVKHIKFQFLKDWVDNARAATGKEMFTVGEYWQNDLGALNNYLAKVNYNQSLFDAPLHYNFYAASTGGGYYDMRNILNNTLVASNPTKAVTLVENHDTQPGQSLESTVQPWFKPLAYAFILTRSGGYPSVFYGDMYGTKGTTTREIPALKSKIEPLLKARKDYAYGTQRDYIDNPDVIGWTREGDSTKAKSGLATVITDGPGGSKRMYVGTSNAGEIWYDLTGNRTDTITIGSDGYATFPVNGGSVSVWVQQ

SEQ ID NO: 36599 - protein, 480 aa, Cytophaga sp.
NGTMMQYFEWYVPNDGQQWNRLRTDAPYLSSVGITAVWTPPAYKGTSQADVGYGPYDLYDLGEFNQKGTVRTKYGTKGELKSAVNTLHSNGIQVYGDVVMNHKAGADYTENVTAVEVNPSNRYQETSGEYNIQAWTGFNFPGRGTTYSNWKWQWFHFDGTDWDQSRSLSRIFKFDGKAWDWEVSSENGNYDYLMYADYDYDHPDVVNEMKKWGVWYANEVGLDGYRLDAVKHIKFQFLKDWVDNARAATGKEMFTVGEYWQNDLGALNNYLAKVNYNQSLFDAPLHYNFYAASTGGGYYDMRNILNNTLVASNPTKAVTLVENHDTQPGQSLESTVQPWFKPLAYAFILTRSGGYPSVFYGDMYGTKGTTTREIPALKSKIEPLLKARKDYAYGTQRDYIDNPDVIGWTREGDSTKAKSGLATVITDGPGGSKRMYVGTSNAGEIWYDLTGNRTDKVTIGSDGYATFPVNGGSVSVWVQQ

SEQ ID NO: 36600 - protein, 480 aa, Cytophaga sp.
NGTMMQYFEWYVPNDGQQWNRLRTDAPYLSSVGITAVWTPPAYKGTSQADVGYGPYDLYDLGEFNQKGTVRTKYGTKGELKSAVNTLHSNGIQVYGDVVMNHKAGADYTENVTAVEVNPSNRYQETSGEYNIQAWTGFNFPGRGTTYSNWKWQWFHFDGTDWDQSRSLSRIFKFDGKAWDWEVSSENGNYDYLMYADYDYDHPDVVNEMKKWGVWYANEVGLDGYRLDAVKHIKFQFLKDWVDNARAATGKEMFTVAEYWQNDLGALNNYLAKVNYNQSLFDAPLHYNFYAASTGGGYYDMRNILNNTLVASNPTKAVTLVENHDTQPGQSLESTVQPWFKPLAYAFILTRSGGYPSVFYGDMYGTKGTTTREIPALKSKIEPLLKARKDYAYGTQRDYIDNPDVIGWTREGDSTKAKSGLATVITDGPGGSKRMYVGTSNAGEIWYDLTGNRTDKITIGSDGYATFPVNGGSVSVWVQQ

SEQ ID NO: 36601 - protein, 480 aa, Cytophaga sp.
NGTMMQYFEWYVPNDGQQWNRLRTDAPYLSSVGITAVWTPPAYKGTSQADVGYGPYDLYDLGEFNQKGTVRTKYGTKGELKSAVNTLHSNGIQVYGDVVMNHKAGADYTENVTAVEVNPSNRYQETSGEYNIQAWTGFNFPGRGTTYSNWKWQWFHFDGTDWDQSRSLSRIFKFDGKAWDWEVSSENGNYDYLMYADYDYDHPDVVNEMKKWGVWYANEVGLDGYRLDAVKHIKFQFLKDWVDNARAATGKEMFTVGEYWQNDLGALNNYLAKVNYNQSLFDAPLHYNFYAASTGGGYYDMRNILNNTLVASNPTKAVTLVENHDTQPGQSLESTVQPWFKPLAYAFILTRSGGYPSVFYGDMYGTKGTTTREIPALKSKIEPLLKARKDYAYGTQRDYIDNPDVIGWTREGDSTKAKSGLATVITDGPGGSKRMYVGLSNAGEIWYDLTGNRTDKITIGSDGYATFPVNGGSVSVWVQQ

SEQ ID NO: 36602 - protein, 480 aa, Cytophaga sp.
NGTMMQYFEWYVPNDGQQWNRLRTDAPYLSSVGITAVWTPPAYKGTSQADVGYGPYDLYDLGEFNQKGTVRTKYGTKGELKSAVNTLHSNGIQVYGDVVMNHKAGADYTENVTAVEVNPSNRNQETSGEYNIQAWTGFNFPGRGTTYSNFKWQWFHFDGTDWDQSRSLSRIFKFTGKAWDWPVSSENGNYDYLMYADYDYDHPDVVNEMKKWGVWYANEVGLDGYRLDAVKHIKFSFLKDWVDNARAATGKEMFTVGEYWQNDLGALNNYLAKVNYNQSLFDAPLHYNFYAASTGGGYYDMRNILNNTLVASNPTKAVTLVENHDTQPGQSLESTVQPWFKPLAYAFILTRSGGYPSVFYGDMYGTKGTTTREIPALKSKIEPLLKARKDYAYGTQRDYIDNPDVIGWTREGDSTKAKSGLATVITDGPGGSKRMYVGTSNAGEIWYDLTGNNSTKITIGSDGYATFPVNKGSVSVWVQQ

SEQ ID NO: 36603 - protein, 480 aa, Cytophaga sp.
NGTMMQYFEWYVPNDGQQWNRLRTDAPYLSSVGITAVWTPPAYKGTSQADVGYGPYDLYDLGEFNQKGTVRTKYGTKGELKSAVNTLHSNGIQVYGDVVMNHKAGADYTENVTAVEVNPSNRYQETSGEYNIQAWTGFNFPGRGTTYSNWKWQWFHFDGTDWDQSRSLSRIFKFDGKAWDWEVSSENGNYDYLMYADYDYDHPDVVNEMKKWGVWYANEVGLDGYRLDAVKHIKFQFLKDWVDNARAATGKEMFTVGEYWQNDLGALNNYLAKTNYNQSLFDAPLHYNFYAASTGGGYYDMRNILNNTLVASNPTKAVTLVENHDTQPGQSLESTVQPWFKPLAYAFILTRSGGYPSVFYGDMYGTKGTTTREIPALKSKIEPLLKARKDYAYGTQRDYIDNPDVIGWTREGDSTKAKSGLATVITDGPGGSKRMYVGTSNAGEIWYDLTGNRTDKITIGSDGYATFPVNGGSVSVWVQQ

SEQ ID NO: 36604 - protein, 480 aa, Cytophaga sp.
NGTMMQYFEWYVPNDGQQWNRLRTDAPYLSSVGITAVWTPPAYKGTSQADVGYGPYDLYDLGEFNQKGTVRTKYGTKGELKSAVNTLHSNGIQVYGDVVMNHKAGADYTENVTAVEVNPSNRYQETSGEYNIQAWTGFNFPGRGTTYSNWKWQWFHFDGTDWDQSRSLSRIFKFDGKAWDWEVSSENGNYDYLMYADYDYDHPDVVNEMKKWGVWYANEVGLDGYRLDAVKHIKFQFLKDWVDNARAATGKEMFTVGEYWQNDLGALNNYLAKVNYNQSLFDAPLHYNFYAASTGGGYYDMRNILNNTLVASNPTKAVTLVENHDTQPGQSLESTVQPWFKPLAYAFILTREGGYPSVFYGDMYGTKGTTTREIPALKSKIEPLLKARKDYAYGTQRDYIDNPDVIGWTREGDSTKAKSGLATVITDGPGGSKRMYVGTSNAGEIWYDLTGNRTDKITIGSDGYATFPVNGGSVSVWVQQ

SEQ ID NO: 36605 - protein, 480 aa, Cytophaga sp.
NGTMMQYFEWYVPNDGQQWNRLRTDAPYLSSVGITAVWTPPAYKGTSQADVGYGPYDLYDLGEFNQKGTVRTKYGTKGELKSAVNTLHSNGIQVYGDVVMNHKAGADYTENVTAVEVNPSNRYQETSGEYNIQAWTGFNFPGRGTTYSNWKWQWFHFDGTDWDQSRSLSRIFKFDGKAWDWEVSSENGNYDYLMYADYDYDHPDVVNEMKKWGVWYANEVGLDGYRLDAVKHIKFQFLKDWVDNARQATGKEMFTVGEYWQNDLGALNNYLAKVNYNQSLFDAPLHYNFYAASTGGGYYDMRNILNNTLVASNPTKAVTLVENHDTQPGQSLESTVQPWFKPLAYAFILTRSGGYPSVFYGDMYGTKGTTTREIPALKSKIEPLLKARKDYAYGTQRDYIDNPDVIGWTREGDSTKAKSGLATVITDGPGGSKRMYVGTSNAGEIWYDLTGNRTDKITIGSDGYATFPVNGGSVSVWVQQ

SEQ ID NO: 36606 - protein, 480 aa, Cytophaga sp.
NGTMMQYFEWYVPNDGQQWNRLRTDAPYLSSVGITAVWTPPAYKGTSQADVGYGPYDLYDLGEFNQKGTVRTKYGTKSELKSAVNTLHSNGIQVYGDVVMNHKAGADYTENVTAVEVNPSNRYQETSGEYNIQAWTGFNFPGRGTTYSNWKWQWFHFDGTDWDQSRSLSRIFKFDGKAWDWEVSSENGNYDYLMYADYDYDHPDVVNEMKKWGVWYANEVGLDGYRLDAVKHIKFQFLKDWVDNARAATGKEMFTVGEYWQNDLGALNNYLAKVNYNQSLFDAPLHYNFYAASTGGGYYDMRNILNNTLVASNPTKAVTLVENHDTQPGQSLESTVQPWFKPLAYAFILTRSGGYPSVFYGDMYGTKGTTTREIPALKSKIEPLLKARKDYAYGTQRDYIDNPDVIGWTREGDSTKAKSGLATVITDGPGGSKRMYVGTSNAGEIWYDLTGNRTDKITIGSDGYATFPVNGGSVSVWVQQ

SEQ ID NO: 36607 - protein, 480 aa, Cytophaga sp.
NGTMMQYFEWYVPNDGQQWNRLRTDAPYLSSVGITAVWTPPAYKGTSQADVGYGPYDLYDLGEFNQKGTVRTKYGTKGELKSAVNTLHSNGIQVYGDVVMNHKAGADYTENVTAVEVNPSNRNQETSGEYNIQAWTGFNFPGRGTTYSNFKWQWFHFDGTDWDQSRSLSRIFKFDGKAWDWPVSSENGNYDYLMYADYDYDHPDVVNEMKKWGVWYANEVGLDGYRLDAVKHIKFSFLKDWVDNARAATGKEMFTVGEYWQNDLGALNNYLAKVNYNQSLFDAPLHYNFYAASTGGGYYDMRNILNNTLVASNPTKAVTLVENHDTQPGQSLESTVQPWFKPLAYAFILTRSGGYPSVFYGDMYGTKGTTTREIPALKSKIEPLLKARKDYAYGTQRDYIDNPDVIGWTREGDSTKAKSGLATVITDGPGGSKRMYVGTSNAGEIWYDLTGNNSTKITIGSDGYATFPVNKGSVSVWVQQ

SEQ ID NO: 36608 - protein, 480 aa, Cytophaga sp.
NGTMMQYFEWYVPNDGQQWNRLRTDAPYLSSVGITAVWTPPAYKGTSQADVGYGPYDLYDLGEFNQKGTVRTKYGTKGELKSAVNTLHSNGIQVYGDVVMNHKAGADYTENVTAVEVNPSNRYQETSGEYNIQAWTGFNFPGRGTTYSNWKWQWFHFDGTDWDQSRSLSRIFKFDGKAWDWEVSSENGNYDYLMYADYDYDHPDVVNEMKKWGVWYANEVGLDGYRLDAVKHIKFQFLKDWVDNARAATGKEMFTVGEYWQNDLGALNNYLAKVNYNQSLFDAPLHYNFYAASTGGGYYDMRNILNGTLVASNPTKAVTLVENHDTQPGQSLESTVQPWFKPLAYAFILTRSGGYPSVFYGDMYGTKGTTTREIPALKSKIEPLLKARKDYAYGTQRDYIDNPDVIGWTREGDSTKAKSGLATVITDGPGGSKRMYVGTSNAGEIWYDLTGNRTDKITIGSDGYATFPVNGGSVSVWVQQ

SEQ ID NO: 36609 - protein, 480 aa, Cytophaga sp.
NGTMMQYFEWYVPNDGQQWNRLRTDAPYLSSVGITAVWTPPAYKGTSQADVGYGPYDLYDLGEFNQKGTVRTKYGTKGELKSAVNTLHSNGIQVYGDVVMNHKAGADYTENVTAVEVNPSNRYQETSGEYNIQAWTGFNFPGRGTTYSNFKWQWFHFDGTDWDQSRSLSRIFKFTGKAWDWPVSSENGNYDYLMYADYDYDHPDVVNEMKKWGVWYANEVGLDGYRLDAVKHIKFSFLKDWVDNARAATGKEMFTVGEYWQNDLGALNNYLAKVNYNQSLFDAPLHYNFYAASTGGGYYDMRNILNNTLVASNPTKAVTLVENHDTQPGQSLESTVQPWFKPLAYAFILTRSGGYPSVFYGDMYGTKGTTTREIPALKSKIEPLLKARKDYAYGTQRDYIDNPDVIGWTREGDSTKAKSGLATVITDGPGGSKRMYVGTSNAGEIWYDLTGNRTDKITIGSDGYATFPVNGGSVSVWVQQ

SEQ ID NO: 36610 - protein, 480 aa, Cytophaga sp.
NGTMMQYFEWYVPNDGQQWNRLRTDAPYLSSVGITAVWTPPAYKGTSQADVGYGPYDLYDLGEFNQKGTVRTKYGTKGELKSAVNTLHSNGIQVYGDVVMNHKAGADYTENVTAVEVNPSNRYQETSGEYNIQAWTGFNFPGRGTTYSNWKWQWFHFDGTDWDQSRSLSRIFKFDGKAWDWEVSSENGNYDYLMYADYDYDHPDVVNEMKKWGVWYANEVGLDGYRLDAVKHIKFQFLKDWVDNARAATGKEMFTVGEYWQNDLGALNNYLAKVNYNQSLFDAPLHYNFYAASTQGGYYDMRNILNNTLVASNPTKAVTLVENHDTQPGQSLESTVQPWFKPLAYAFILTRSGGYPSVFYGDMYGTKGTTTREIPALKSKIEPLLKARKDYAYGTQRDYIDNPDVIGWTREGDSTKAKSGLATVITDGPGGSKRMYVGTSNAGEIWYDLTGNRTDKITIGSDGYATFPVNGGSVSVWVQQ

SEQ ID NO: 36611 - protein, 480 aa, Cytophaga sp.
NGTMMQYFEWYVPNDGQQWNRLRTDAPYLSSVGITAVWTPPAYKGTSQADVGYGPYDLYDLGEFNQKGTVRTKYGTKGELKSAVNTLHSNGIQVYGDVVMNHKAGADYTEDVTAVEVNPSNRYQETSGEYNIQAWTGFNFPGRGTTYSNWKWQWFHFDGTDWDQSRSLSRIFKFDGKAWDWEVSSENGNYDYLMYADYDYDHPDVVNEMKKWGVWYANEVGLDGYRLDAVKHIKFQFLKDWVDNARAATGKEMFTVGEYWQNDLGALNNYLAKVNYNQSLFDAPLHYNFYAASTGGGYYDMRNILNNTLVASNPTKAVTLVENHDTQPGQSLESTVQPWFKPLAYAFILTRSGGYPSVFYGDMYGTKGTTTREIPALKSKIEPLLKARKDYAYGTQRDYIDNPDVIGWTREGDSTKAKSGLATVITDGPGGSKRMYVGTSNAGEIWYDLTGNRTDKITIGSDGYATFPVNGGSVSVWVQQ

SEQ ID NO: 36612 - protein, 480 aa, Cytophaga sp.
NGTMMQYFEWYVPNDGQQWNRLRTDAPYLSSVGITAVWTPPAYKGTSQADVGYGPYDLYDLGEFNQKGTVRTKYGTKGELKSAVNTLHSNGIQVYGDVVMNHKAGADYTENVTAVEVNPSNRYQETSGEYNIQAWTGFNFPGRGTTYSNWKWQWFHFDGTDWDQSRSLSRIFKFDGKAWDWEVSSENGNYDYLMYADYDYDHPDVVNEMKKWGVWYANEVGLDGYRLDAVKHIKFQFLKDWVDNARAATGKEMFTVGEYWQNDLGALNNYLAKVNYNQSLFDAPLHYNFYAASTGGGYYDMRNILNNTLVASNPTKAVTLVENHDTQPGQSLESTVQPWFKPLAYAFILTRSGGYPSVFYGDMYGTKGTTTREIPALKSKIEPLLKARKDYAYGTQRDYIDNPDVIGWTREGDSTKAKSGLATVITDGPGGSKRMYVGTSNAGEIWYDLTGNRTDKITIGSDGYATFPVNDGSVSVWVQQ

SEQ ID NO: 36613 - protein, 480 aa, Cytophaga sp.
NGTMMQYFEWYVPNDGQQWKRLRTDAPYLSSVGITAVWTPPAYKGTSQADVGYGPYDLYDLGEFNQKGTVRTKYGTKGELKSAVNTLHSNGIQVYGDVVMNHKAGADYTENVTAVEVNPSNRYQETSGEYNIQAWTGFNFPGRGTTYSNWKWQWFHFDGTDWDQSRSLSRIFKFDGKAWDWEVSSENGNYDYLMYADYDYDHPDVVNEMKKWGVWYANEVGLDGYRLDAVKHIKFQFLKDWVDNARAATGKEMFTVGEYWQNDLGALNNYLAKVNYNQSLFDAPLHYNFYAASTGGGYYDMRNILNNTLVASNPTKAVTLVENHDTQPGQSLESTVQPWFKPLAYAFILTRSGGYPSVFYGDMYGTKGTTTREIPALKSKIEPLLKARKDYAYGTQRDYIDNPDVIGWTREGDSTKAKSGLATVITDGPGGSKRMYVGTSNAGEIWYDLTGNRTDKITIGSDGYATFPVNGGSVSVWVQQ

SEQ ID NO: 36614 - protein, 480 aa, Cytophaga sp.
NGTMMQYFEWYVPNDGQQWNRLRTDAPYLSSVGITAVWTPPAYKGTSQADVGYGPYDLYDLGEFNQKGTVRTKYGTKGELKSAVNTLHSNGIQVYGDVVMNHKAGADYTENVTAVEVNPSNRYQETSGEYNIQAWTGFNFPGRGTTYSNWKWQWFHFDGTDWDQSRSLSRIFKFDGKAWDWEVSSENGNYDYLMYADYDYDHPDVVNEMKKWGVWYANEVGLDGYRLDAVKHIKFQFLKDWVDNARAATGKEMFTVGEYWQNDLGALNNYLAKVNYNQSLFDAPLHYNFYAASTGGGYYDMRNILNNTLVASNPTKAVTLVENHDTQPGQSLESTVQPWFKPLAYAFILTRSGGYPSVFYGDMYGTKGTTTKEIPALKSKIEPLLKARKDYAYGTQRDYIDNPDVIGWTREGDSTKAKSGLATVITDGPGGSKRMYVGTSNAGEIWYDLTGNRTDKITIGSDGYATFPVNGGSVSVWVQQ

SEQ ID NO: 36615 - protein, 480 aa, Cytophaga sp.
NGTMMQYFEWYVPNDGQQWNRLRTDAPYLSSVGITAVWTPPAYKGTSQADVGYGPYDLYDLGEFNQKGTVRTKYGTKGELKSAVNTLHSNGIQVYGDVVMNHKAGADYTENVTAVEVNPSNRYQETSGEYNIQAWTGFNFPGRGTTYSNFKWQWFHFDGTDWDQSRSLSRIFKFDGKAWDWEVSSENGNYDYLMYADYDYDHPDVVNEMKKWGVWYANEVGLDGYRLDAVKHIKFQFLKDWVDNARAATGKEMFTVGEYWQNDLGALNNYLAKVNYNQSLFDAPLHYNFYAASTGGGYYDMRNILNNTLVASNPTKAVTLVENHDTQPGQSLESTVQPWFKPLAYAFILTRSGGYPSVFYGDMYGTKGTTTREIPALKSKIEPLLKARKDYAYGTQRDYIDNPDVIGWTREGDSTKAKSGLATVITDGPGGSKRMYVGTSNAGEIWYDLTGNRTDKITIGSDGYATFPVNGGSVSVWVQQ

SEQ ID NO: 36616 - protein, 480 aa, Cytophaga sp.
NGTMMQYFEWYVPNDGQQWNRLRTDAPYLSSVGITAVWTPPAYKGTSQADVGYGPYDLYDLGEFNQKGTVRTKYGTKGELKDAVNTLHSNGIQVYGDVVMNHKAGADYTENVTAVEVNPSNRYQETSGEYNIQAWTGFNFPGRGTTYSNWKWQWFHFDGTDWDQSRSLSRIFKFDGKAWDWEVSSENGNYDYLMYADYDYDHPDVVNEMKKWGVWYANEVGLDGYRLDAVKHIKFQFLKDWVDNARAATGKEMFTVGEYWQNDLGALNNYLAKVNYNQSLFDAPLHYNFYAASTGGGYYDMRNILNNTLVASNPTKAVTLVENHDTQPGQSLESTVQPWFKPLAYAFILTRSGGYPSVFYGDMYGTKGTTTREIPALKSKIEPLLKARKDYAYGTQRDYIDNPDVIGWTREGDSTKAKSGLATVITDGPGGSKRMYVGTSNAGEIWYDLTGNRTDKITIGSDGYATFPVNGGSVSVWVQQ

SEQ ID NO: 36617 - protein, 480 aa, Cytophaga sp.
NGTMMQYFEWYVPNDGQQWNRLRNDAPYLSSVGITAVWTPPAYKGTSQADVGYGPYDLYDLGEFNQKGTVRTKYGTKGELKSAVNTLHSNGIQVYGDVVMNHKAGADYTENVTAVEVNPSNRYQETSGEYNIQAWTGFNFPGRGTTYSNWKWQWFHFDGTDWDQSRSLSRIFKFDGKAWDWEVSSENGNYDYLMYADYDYDHPDVVNEMKKWGVWYANEVGLDGYRLDAVKHIKFQFLKDWVDNARAATGKEMFTVGEYWQNDLGALNNYLAKVNYNQSLFDAPLHYNFYAASTGGGYYDMRNILNNTLVASNPTKAVTLVENHDTQPGQSLESTVQPWFKPLAYAFILTRSGGYPSVFYGDMYGTKGTTTREIPALKSKIEPLLKARKDYAYGTQRDYIDNPDVIGWTREGDSTKAKSGLATVITDGPGGSKRMYVGTSNAGEIWYDLTGNRTDKITIGSDGYATFPVNGGSVSVWVQQ

SEQ ID NO: 36618 - protein, 480 aa, Cytophaga sp.
NGTMMQYFEWYVPNDGQQWNRLRTDAPYLSSVGITAVWTPPAYKGTSQADVGYGPYDLYDLGEFNQKGTVRTKYGTKGELKSAVNTLHSNGIQVYGDVVMNHKAGADYTENVTAVEVNPSNRYQETSGEYNIQAWTGFNFPGRGTTYSNWKWQWFHFDGTDWDQSRSLSRIFKFDGKAWDWEVSSENGNYDYLMYADYDYDHPDVVNEMKKWGVWYANEVGLDGYRLDAVKHIKFQFLKDWVDNARAATGKEMFTVGEYWQNDLGALNNYLAKVNYNQSLFDAPLHYNFYAASTGGGYYDMRNILNNTLVASNPTKAVTLVENHDTQPGQSLESTVQPWFKPLAYAFILTRSGGYPSVFYGDMYGTKGTTTREIPALKSKIEPLLKARKDYAYGTQRDYIDNPDVIGWTREGDSTKAKSGLATVITDGPGGSKRMYAGTSNAGEIWYDLTGNRTDKITIGSDGYATFPVNGGSVSVWVQQ

SEQ ID NO: 36619 - protein, 480 aa, Cytophaga sp.
NGTMMQYFEWYVPNDGQQWNRLRTDAPYLSSVGITAVWTPPAYKGTSQADVGYGPYDLYDLGEFNQKGTVRTKYGTKGELKSAVNTLHSNGIQVYGDVVMNHKAGADYTENVTAVEVNPSNRYQETSGEYNIQAWTGFNFPGRGTTYSNWKWQWFHFDGTDWDQSRSLSRIFKFDGKAWDWEVSSENGNYDYLMYADYDYDHPDVVNEMKKWGVWYANEVGLDGYRLDAVKHIKFQFLKDWVDNARAATGKEMFTVGEYWQNDLGALNNYLAKVNYNQSLFDAPLHYNFYAASTGGGYYDMRNILNNTLVASNPTKAVTLVENHDTQPGQSLESTVQPWFKPLAYAFILTRSGGYPSVFYGDMYGTKGTTTREIPALKSKIEPLLKARKDYAYGTQRDYIDNPDVIGWTREGDSTKAKSGLATVITDGPGGSKRMYVGTSNAGEIWYDLTGNRTDKITIGSDGYATFPVNGGSVSVYVQQ

SEQ ID NO: 36620 - protein, 480 aa, Cytophaga sp.
NGTMMQYFEWYVPNDGQQWNRLRTDAPYLSSVGITAVWTPPAYKGTSQADVGYGPYDLYDLGEFNQKGTVRTKYGTKGELKSAVNTLHSNGIQVYGDVVMNHKAGADYTENVTAVEVNPSNRYQETSGEYNIQAWTGFNFPGRGTTYSNWKWQWFHFDGTDWDQSRSLSRIFKFDGKAWDWEVSSENGNYDYLMYADYDYDHPDVVNEMKKWGVWYANEVGLDGYRLDAVKHIKFQFLKDWVDNARAATGKEMFTVGEYWQNDLGALNNYLNKVNYNQSLFDAPLHYNFYAASTGGGYYDMRNILNNTLVASNPTKAVTLVENHDTQPGQSLESTVQPWFKPLAYAFILTRSGGYPSVFYGDMYGTKGTTTREIPALKSKIEPLLKARKDYAYGTQRDYIDNPDVIGWTREGDSTKAKSGLATVITDGPGGSKRMYVGTSNAGEIWYDLTGNRTDKITIGSDGYATFPVNGGSVSVWVQQ

SEQ ID NO: 36621 - protein, 480 aa, Cytophaga sp.
NGTMMQYFEWYVPNDGQQWNRLRTDAPYLSSVGITAVWTPPAYKGTSQADVGYGPYDLYDLGEFNQKGTVRTKYGTKGELKSAVNTLHSNGIQVYGDVVMNHKAGADYTENVTAVEVNPSNRYQETSGEYNIQAWTGFNFPGRGTTYSNWKWQWFHFDGTDWDQSRSLSRIFKFDGKAWDWEVSSENGNYDYLMYADYDYDHPDVVNEMKKWGVWYANEVGLDGYRLDAVKHIKFQFLKDWVDNARAATGKEMFTVGEYWQNDLGALNNYLAKVNYNQSLFDAPLHYNFYAASTGGGYYDMRNILNNTLVASNPTKAVTLVENHDTQPGQSLESTVQPWFKPLAYAFILTRSGGYPSVFYGDMYGTKGTTTREIPALKDKIEPLLKARKDYAYGTQRDYIDNPDVIGWTREGDSTKAKSGLATVITDGPGGSKRMYVGTSNAGEIWYDLTGNRTDKITIGSDGYATFPVNGGSVSVWVQQ

SEQ ID NO: 36622 - protein, 480 aa, Cytophaga sp.
NGTMMQYFEWYVPNDGQQWNRLRTDAPYLSSVGITAVWTPPAYKGTSQADVGYGPYDLYDLGEFNQKGTVRTKYGTKGELKSAVNTLHSNGIQVYGDVVMNHKAGADYTENVTAVEVNPSNRYQETSGEYNIQAWTGFNFPGRGTTYSNWKWQWFHFDGTDWDQSRSLSRIFKFDGKAWDWEVSSENGNYDYLMYADYDYDHPDVVNEMKKWGVWYANEVGLDGYRLDAVKHIKFQFLKDWVDNARAATGKEMFTVGEYWQNDLGALNNYLAKVNYNQSLFDAPLHYNFYAASTGGGYYDMRNILNNTLVASNPTKAVTLVENHDTQPGQSLESTVQPWFKPLAYAFILTRSGGYPSVFYGDMYGTKGTTTREIPALKSKIEPLLKARKDYAYGTQRDYIDNPDVIGWTREGDSTKAKSGLATVITDGPGGSKRMYVGTSNAGEIWYDLTGNRTDKITIGSDGYAEFPVNGGSVSVWVQQ

SEQ ID NO: 36623 - protein, 480 aa, Cytophaga sp.
NGTMMQYFEWYVPNDGQQWNRLRTDAPYLSSVGITAVWTPPAYKGTSQADVGYGPYDLYDLGEFNQKGTVRTKYGTKGELKSAVNTLHSNGIQVYGDVVMNHKAGADYTENVTAVEVNPSNRYQETSGEYNIQAWTGFNFPGRGTTYSNWKWQWFHFDGTDWDQSRSLSRIFKFDGKAWDWEVSSENGNYDYLMYADYDYDHPDVVNEMKKWGVWYANEVGLDGYRLDAVKHIKFQFLKDWVDNARAATGKEMFTVGEYWQNDLGALNNYLAKVNYNQSLFDAPLHYNFYAASTGGGGYDMRNILNNTLVASNPTKAVTLVENHDTQPGQSLESTVQPWFKPLAYAFILTRSGGYPSVFYGDMYGTKGTTTREIPALKSKIEPLLKARKDYAYGTQRDYIDNPDVIGWTREGDSTKAKSGLATVITDGPGGSKRMYVGTSNAGEIWYDLTGNRTDKITIGSDGYATFPVNGGSVSVWVQQ

SEQ ID NO: 36624 - protein, 480 aa, Cytophaga sp.
NGTMMQYFEWYVPNDGQQWNRLRTDAPYLSSVGITAVWTPPAYKGTSQADVGYGPYDLYDLGEFNQKGTVRTKYGTKGELKSAVNTLHSNGIQVYGDVVMNHKAGADYTENVTAVEVNPSNRYQETSGEYNIQAWTGFNFPGRGTTYSNWKWQWFHFDGTDWDQSRSLSRIFKFDGKAWDWEVSSENGNYDYLMYADYDYDHPDVVNEMKKWGVWYANELGLDGYRLDAVKHIKFQFLKDWVDNARAATGKEMFTVGEYWQNDLGALNNYLAKVNYNQSLFDAPLHYNFYAASTGGGYYDMRNILNNTLVASNPTKAVTLVENHDTQPGQSLESTVQPWFKPLAYAFILTRSGGYPSVFYGDMYGTKGTTTREIPALKSKIEPLLKARKDYAYGTQRDYIDNPDVIGWTREGDSTKAKSGLATVITDGPGGSKRMYVGTSNAGEIWYDLTGNRTDKITIGSDGYATFPVNGGSVSVWVQQ

SEQ ID NO: 36625 - protein, 480 aa, Cytophaga sp.
NGTMMQYFEWYVPNDGQQWNRLRTDAPYLSSVGITAVWTPPAYKGTSQADVGYGPYDLYDLGEFNQKGTVRTKYGTKGELKSAVNTLHSNGIQVYGDVVMNHKAGADYTENVTAVEVNPSNRNQETSGEYNIQAWTGFNFPGRGTTYSNFKWQWFHFDGTDWDQSRSLSRIFKFTGKAWDWPVSSENGNYDYLMYADIDYDHPDVVNEMKKWGVWYANEVGLDGYRLDAVKHIKFSFLKDWVDNARAATGKEMFTVGEYWQNDLGALNNYLAIVNYNQSLFDAPLHYNFYAASTGGGYYDMRNILNNTLVASNPTKAVTLVENHDTQPGQSLESTVQPWFKPLAYAFILTRSGGYPSVFYGDMYGTKGTTTREIPALKSKIEPLLKARKDYAYGTQRDYIDNPDVIGWTREGDSTKAKSGLATVITDGPGGSKRMYVGTSNAGEIWYDLTGNRTDKITIGSDGYATFPVNGGSVSVWVQQ

SEQ ID NO: 36626 - protein, 480 aa, Cytophaga sp.
NGTMMQYFEWYVPNDGQQWNRLRTDAPYLSSVGITAVWTPPAYKGTSQADVGYGPYDLYDLGEFNQKGTVRTKYGTKGELKSAVNSLHSNGIQVYGDVVMNHKAGADYTENVTAVEVNPSNRYQETSGEYNIQAWTGFNFPGRGTTYSNWKWQWFHFDGTDWDQSRSLSRIFKFDGKAWDWEVSSENGNYDYLMYADYDYDHPDVVNEMKKWGVWYANEVGLDGYRLDAVKHIKFQFLKDWVDNARAATGKEMFTVGEYWQNDLGALNNYLAKVNYNQSLFDAPLHYNFYAASTGGGYYDMRNILNNTLVASNPTKAVTLVENHDTQPGQSLESTVQPWFKPLAYAFILTRSGGYPSVFYGDMYGTKGTTTREIPALKSKIEPLLKARKDYAYGTQRDYIDNPDVIGWTREGDSTKAKSGLATVITDGPGGSKRMYVGTSNAGEIWYDLTGNRTDKITIGSDGYATFPVNGGSVSVWVQQ

SEQ ID NO: 36627 - protein, 480 aa, Cytophaga sp.
NGTMMQYFEWYVPNDGQQWNRLRTDAPYLSSVGITAVWTPPAYKGTSQADVGYGPYDLYDLGEFNQKGTVRTKYGTKGELKSAVNTLHSNGIQVYGDVVMNHKAGADYTENVTAVEVNPSNRNQETSGEYNIQAWTGFNFPGRGTTYSNFKWQWFHFDGTDWDQSRSLSRIFKFTGKAWDWPVSSENGNYDYLMYADIDYDHPDVVNEMKKWGVWYANEVGLDGYRLDAVKHIKFSFLKDWVDNARAATGKEMFTVGEYWQNDLGALNNYLAYVNYNQSLFDAPLHYNFYAASTGGGYYDMRNILNNTLVASNPTKAVTLVENHDTQPGQSLESTVQPWFKPLAYAFILTRSGGYPSVFYGDMYGTKGTTTREIPALKSKIEPLLKARKDYAYGTQRDYIDNPDVIGWTREGDSTKAKSGLATVITDGPGGSKRMYVGTSNAGEIWYDLTGNRTDKITIGSDGYATFPVNGGSVSVWVQQ

SEQ ID NO: 36628 - protein, 480 aa, Cytophaga sp.
NGTMMQYFEWYVPNDGQQWNRLRTDAPYLSSVGITAVWTPPAYKGTSQADVGYGPYDLYDLGEFNQKGTVRTKYGTKGELKSAVNTLHSNGIQVYGDVVMNHKAGADYTENVTAVEVNPSNRYQETSGEYNIQAWTGFNFPGRGTTYSNWKWQWFHFDGTDWDQSRSLSRIFKFDGKAWDWEVSSENGNYDYLMYADYDYDHPDVVNEMKKWGVWYANEVGLDGYRLDAVKHIKFQFLKDWVDAARAATGKEMFTVGEYWQNDLGALNNYLAKVNYNQSLFDAPLHYNFYAASTGGGYYDMRNILNNTLVASNPTKAVTLVENHDTQPGQSLESTVQPWFKPLAYAFILTRSGGYPSVFYGDMYGTKGTTTREIPALKSKIEPLLKARKDYAYGTQRDYIDNPDVIGWTREGDSTKAKSGLATVITDGPGGSKRMYVGTSNAGEIWYDLTGNRTDKITIGSDGYATFPVNGGSVSVWVQQ

SEQ ID NO: 36629 - protein, 480 aa, Synthetic construct
NGTMMQYFEWYVPNDGQQWNRLRTDAPYLSSVGITAVWTPPAYKGTSQADVGYGPYDLYDLGEFNQKGTVRTKYGTKGELKSAVNTLHSNGIQVYGDVVMNHKGGADATEDVTAVEVDPADRNRVISGEHLIKAWTHFHFPGRGSTYSDFKWHWYHFDGTDWDESRKLNRIYKFQGKAWDWEVSNEFGNYDYLMYADIDYDHPDVVNEMKKWGVWYANEVGLDGYRLDAVKHIKFSFLKDWVDNARAATGKEMFTVGEYWQNDLGALNNYLAKVNYNQSLFDAPLHYNFYAASTGGGYYDMRNILNNTLVASNPTKAVTLVENHDTQPGQSLESTVQPWFKPLAYAFILTRSGGYPSVFYGDMYGTKGTTTREIPALKSKIEPLLKARKDYAYGTQRDYIDNPDVIGWTREGDSTKAKSGLATVITDGPGGSKRMYVGTSNAGEIWYDLTGNRTDKITIGSDGYATFPVNGGSVSVWVQQ

SEQ ID NO: 36630 - protein, 480 aa, Cytophaga sp.
NGTMMQYFEWYVPNDGQQWNRLRTDAPYLSSVGITAVWTPPAYKGTSQADVGYGPYDLYDLGEFNQKGTVRTKYGTKGELKSAVNTLHSNGIQVYGDVVMNHKAGADYTENVTAVEVNPSNRYQETSGEYNIQAWTGFNFPGRGTTYSNWKWQWFHFDGTDWDQSRSLSRIFKFDGKAWDWEVSSENGNYDYLMYADYDYDHPDVVNEMKKWGVWYANEVGLDGYRLDAVKHIKFQFLKDWVDNARAATGKEMFTVGEYWQNDLGALNNYLAKVNYNQSLFDAPLHYNFYAASSGGGYYDMRNILNNTLVASNPTKAVTLVENHDTQPGQSLESTVQPWFKPLAYAFILTRSGGYPSVFYGDMYGTKGTTTREIPALKSKIEPLLKARKDYAYGTQRDYIDNPDVIGWTREGDSTKAKSGLATVITDGPGGSKRMYVGTSNAGEIWYDLTGNRTDKITIGSDGYATFPVNGGSVSVWVQQ

SEQ ID NO: 36631 - protein, 480 aa, Cytophaga sp.
NGTMMQYFEWYVPNDGQQWNRLRTDAPYLSSVGITAVWTPPAYKGTSQADVGYGPYDLYDLGEFNQKGTVRTKYGTKGELKSAVNTLHSNGIQVYGDVVMNHKAGADYTENVTAVEVNPSNRYQETSGEYNIQAWTGFNFPGRGTTYSNWKWQWFHFDGTDWDQSRSLSRIFKFDGKAWDWEVSSENGNYDYLMYADYDYDHPDVVNEMKKWGVWYANEVGLDGYRLDAVKHIKFQFLKDWVDNARAATGKEMFTVGEYWQNDLGALNNYLAKVNYNQSLFDAPLHYNFYAASTGGGYYDMRNILNNTLVARNPTKAVTLVENHDTQPGQSLESTVQPWFKPLAYAFILTRSGGYPSVFYGDMYGTKGTTTREIPALKSKIEPLLKARKDYAYGTQRDYIDNPDVIGWTREGDSTKAKSGLATVITDGPGGSKRMYVGTSNAGEIWYDLTGNRTDKITIGSDGYATFPVNGGSVSVWVQQ

SEQ ID NO: 36632 - protein, 480 aa, Cytophaga sp.
NGTMMQYFEWYVPNDGQQWNRLRTDAPYLSSVGITAVWTPPAYKGTSQADVGYGPYDLYDLGEFNQKGTVRTKYGTKGELKSAVNTLHSNGIQVYGDVVMNHKAGADYTENVTAVEVNPSNRYQETSGEYNIQAWTGFNFPGRGTTYSNFKWQWFHFDGTDWDQSRSLSRIFKFTGKAWDWEVSSENGNYDYLMYADYDYDHPDVVNEMKKWGVWYANEVGLDGYRLDAVKHIKFQFLKDWVDNARAATGKEMFTVGEYWQNDLGALNNYLAKVNYNQSLFDAPLHYNFYAASTGGGYYDMRNILNNTLVASNPTKAVTLVENHDTQPGQSLESTVQPWFKPLAYAFILTRSGGYPSVFYGDMYGTKGTTTREIPALKSKIEPLLKARKDYAYGTQRDYIDNPDVIGWTREGDSTKAKSGLATVITDGPGGSKRMYVGTSNAGEIWYDLTGNRTDKITIGSDGYATFPVNGGSVSVWVQQ

SEQ ID NO: 36633 - protein, 480 aa, Cytophaga sp.
NGTMMQYFEWYVPNDGQQWNRLRTDAPYLSSVGITAVWTPPAYKGTSQADVGYGPYDLYDLGEFNQKGTVRTKYGTKGELKSAVNTLHSNGIQVYGDVVMNHKAGADYTENVTAVEVNPSNRYQETSGEYNIQAWTGFNFPGRGTTYSNWKWQWFHFDGTDWDQSRSLSRIFKFDGKAWDWEVSSENGNYDYLMYADYDYDHPDVVNEMKKWGVWYANEVGLDGYRLDAVKHIKFQFLKDWVDNARAATGKEMFTVGEYWQNDLGALNNYLAKVNYNQSLFDAPLHYNFYAASTGGGYYDMRNILNNTLVASNPTKAVTLVENHDTQPGQSLESTVQPWFKPLAYAFILTRSGGYPSVFYGDMYGTKGTTTREIPALKSKIEPLLKARKDYAYGTQRDYIDNPDVIGWTREGDSTKAKSGLATVITDGPGGSKRMYVGTSNAGEIWYDITGNRTDKITIGSDGYATFPVNGGSVSVWVQQ

SEQ ID NO: 36634 - protein, 480 aa, Cytophaga sp.
NGTMMQYFEWYVPNDGQQWNRLRTDAPYLSSVGITAVWTPPAYKGTSQADVGYGPYDLYDLGEFNQKGTVRTKYGTKGELKSAVNTLHSNGIQVYGDVVMNHKAGADYTENVTAVEVNPSNRYQETSGEYNIQAWTGFNFPGRGTTYSNWKWQWFHFDGTDWDQSRSLSRIFKFDGKAWDWEVSSENGNYDYLMYADYDYDHPDVVNEMKKWGVWYANEVGLDGYRLDAVKHIKFQFLKDWVDNARAATGKEMFTVGEYWQNDLGALNNYLAKVNYNQSLFDAPLHYNFYAASTGGGYYDMRNILNNTLVASNPTKAVTLVENHDTQPGQSLESTVQPWFKPLAYAFILTRSGGYPSVFYGDMYGTKGTTTREIPALKSKIEPLLKARKDYAYGTQRDYIDNPDVIGWTREGDSTKAKSGLATVITDGPGGSKRMYVGTKNAGEIWYDLTGNRTDKITIGSDGYATFPVNGGSVSVWVQQ

SEQ ID NO: 36635 - protein, 480 aa, Cytophaga sp.
NGTMMQYFEWYVPNDGQQWNRLRTDAPYLSSVGITAVWTPPAYKGTSQADVGYGPYDLYDLGEFNQKGTVRTKYGTKGELKSAVNTLHSNGIQVYGDVVMNHKAGADYTENVTAVEVNPSNRYQETSGEYNIQAWTGFNFPGRGTTYSNWKWHWFHFDGTDWDQSRSLSRIFKFDGKAWDWEVSSENGNYDYLMYADYDYDHPDVVNEMKKWGVWYANEVGLDGYRLDAVKHIKFQFLKDWVDNARAATGKEMFTVGEYWQNDLGALNNYLAKVNYNQSLFDAPLHYNFYAASTGGGYYDMRNILNNTLVASNPTKAVTLVENHDTQPGQSLESTVQPWFKPLAYAFILTRSGGYPSVFYGDMYGTKGTTTREIPALKSKIEPLLKARKDYAYGTQRDYIDNPDVIGWTREGDSTKAKSGLATVITDGPGGSKRMYVGTSNAGEIWYDLTGNRTDKITIGSDGYATFPVNGGSVSVWVQQ

SEQ ID NO: 36636 - protein, 480 aa, Cytophaga sp.
NGTMMQYFEWYVPNDGQQWNRLRTDAPYLSSVGITAVWTPPAYKGTSQADVGYGPYDLYDLGEFNQKGTVRTKYGTKGELKSAVNTLHSNGIQVYGDVVMNHKAGADYTENVTAVEVNPSNRNQETSGEYNIQAWTGFNFPGRGTTYSNFKWQWFHFDGTDWDQSRSLSRIFKFTGKAWDWPVSSENGNYDYLMYADIDYDHPDVVNEMKKWGVWYANEVGLDGYRLDAVKHIKFFFLKDWVDNARAATGKEMFTVGEYWQNDLGALNNYLAKVNYNQSLFDAPLHYNFYAASTGGGYYDMRNILNNTLVASNPTKAVTLVENHDTQPGQSLESTVQPWFKPLAYAFILTRSGGYPSVFYGDMYGTKGTTTREIPALKSKIEPLLKARKDYAYGTQRDYIDNPDVIGWTREGDSTKAKSGLATVITDGPGGSKRMYVGTSNAGEIWYDLTGNRTDKITIGSDGYATFPVNGGSVSVWVQQ

SEQ ID NO: 36637 - protein, 480 aa, Cytophaga sp.
NGTMMQYFEWYVPNDGQQWNRLRTDAPYLSSVGITAVWTPPAYKGTSQADVGYGPYDLYDLGEFNQKGTVRTKYGTKGELKSAVNTLHSNGIQVYGDVVMNHKAGADYTENVTAVEVNPSNRNQETSGEYNIQAWTGFNFPGRGTTYSNFKWQWFHFDGTDWDQSRSLSRIFKFTGKAWDWPVSSENGNYDYLMYADIDYDHPDVVNEMKKWGVWYANEVGLDGYRLDAVKHIKFSFLKDWVDNARAATGKEMFTVGEYWQNDLGALNNYLAWVNYNQSLFDAPLHYNFYAASTGGGYYDMRNILNNTLVASNPTKAVTLVENHDTQPGQSLESTVQPWFKPLAYAFILTRSGGYPSVFYGDMYGTKGTTTREIPALKSKIEPLLKARKDYAYGTQRDYIDNPDVIGWTREGDSTKAKSGLATVITDGPGGSKRMYVGTSNAGEIWYDLTGNRTDKITIGSDGYATFPVNGGSVSVWVQQ

SEQ ID NO: 36638 - protein, 480 aa, Cytophaga sp.
NGTMMQYFEWYVPNDGQQWNRLRTDAPYLSSVGITAVWTPPAYKGTSQADVGYGPYDLYDLGEFNQKGTVRTKYGTKGELKSAVNTLHSNGIQVYGDVVMNHKAGADYTENVTAVEVNPSNRYQETSGEYNIQAWTGFNFPGRGTTYSNFKWQWFHFDGTDWDQSRSLSRIFKFHGKAWDWPVSSENGNYDYLMYADYDYDHPDVVNEMKKWGVWYANEVGLDGYRLDAVKHIKFSFLKDWVDNARAATGKEMFTVGEYWQNDLGALNNYLAKVNYNQSLFDAPLHYNFYAASTGGGYYDMRNILNNTLVASNPTKAVTLVENHDTQPGQSLESTVQPWFKPLAYAFILTRSGGYPAVFYGDMYGTKGTTTYEIPALKSKIEPLLKARKDYAYGTQRDYIDNPDVIGWTREGDSTKAKSGLATVITDGPGGSKRMYVGTSNAGEIWYDLTGNRTDKITIGSDGYATFPVNGGSVSVWVQQ

SEQ ID NO: 36639 - protein, 477 aa, Synthetic construct
NGTMMQYFEWYLPNDGNHWNRLNSDASNLKSKGITAVWIPPAWKGTSQADVGYGAYDLYDLGEFNQKGTVRTKYGTRSQLQAAVTSLKNNGINVYGDVVMNHKAGADATEDVQAVEVNPNNRNQVVTGEYLIKAWTHFHFPGRGNTHSDFKWYWYHFDGVDWDQSRRLNRIYKFQGKAWDWPVDTENGNYDYLMYADLDMDHPDVANELKRWGTWYANTLGLDGFRIDAVKHIKYSFTRDWINHVREKTGKNMFAVAEFWKNDLGAIENYLQKTNFNHSVFDVPLHYNLYNASKSGGNYDMRKIFNGTVVQKHPSKAVTFVDNHDTQPEEALESFVEEWFKPLAYALILTRESGYPSVFYGDYYGIPTHGVPAMRSKIDPILEARQKYAYGPQHDYLDHPDIIGWTREGDSSHPKSGLATLITDGPGGSKTMYAGLKNAGETWYDITGNRSDTVKIGSDGNGTFHVNDGSVSIYVQK

SEQ ID NO: 36640 - protein, 478 aa, Synthetic construct
NGTMMQYFEWYLPNDGNHWNRLNSDASNLKSKGITAVWIPPAWKGASQNDVGYGAYDLYDLGEFNQKGTVRTKYGTRSQLQAAVTSLKNNGIQVYGDVVLNHKGGADATEMVRAVEVNPNNRNQEVTGEYTIEAWTRFDFPGRGNTHSSFKWRWYHFDGVDWDQSRRLNNRIYKFRGKAWDWEVDTENGNYDYLMYADYDMDHPEVVNELRNWGVWYTNTLGLDGFRIDAVKHIKYSFTRDWINHVRSATGKNMFAVAEFWKNDLGAIENYLQKTNWNHSVFDVPLHYNLYNASKSGGNYDMRNIFNGTVVQRHPSHAVTFVDNHDSQPEEALESFVEEWFKPLAYALTLTREQGYPSVFYGDYYGIPTHGVPAMRSKIDPILEARQKYAYGPQHDYLDHPDVIGWTREGDSSHPKSGLATLITDGPGGSKRMYAGLKNAGETWYDITGNRSDTVKIGSDGWGEFHVNDGSVSIYVQK

SEQ ID NO: 36641 - protein, 478 aa, Bacillus sp.
NGTMMQYFEWYLPNDGNHWNRLNSDASNLKSKGITAVWIPPAWKGASQNDVGYGAYDVYDLGEFNQKGTVRTKYGTRSQLQAAVTSLKNNGIQVYGDVVLNHKGGADATEMVRAVEVNPNNRNQEVTGEYTIEAWTRFDFPGRGNTHSSFKWRWYHFDGVDWDQSRRLNNRIYKFRGKAWDWEVDTENGNYDYLMYADIDYDHPEVVNELRNWGVWYTNTLGLDGFRIDAVKHIKYSFTRDWINHVRSATGKNMFAVAEFWKNDLGAIENYLQKTNWNHSVFDVPLHYNLYNASKSGGNYDMRNIFNGTVVQRHPSHAVTFVDNHDSQPEEALESFVEEWFKPLAYALTLTREQGYPSVFYGDYYGIPTHGVPAMRSKIDPILEARQKYAYGPQHDYLDHPDVIGWTREGDSSHPKSGLATLITDGPGGSKRMYAGLKNAGETWYDITGNRSDTVKIGSDGWGEFHVNDGSVSIYVQK

SEQ ID NO: 36642 - protein, 478 aa, Bacillus sp.
NGTMMQYFEWYLPNDGNHWNRLNSDASNLKSKGITAVWIPPAWKGASQNDVGYGAYDLYDLGEFNQKGTVRTKYGTRSQLQAAVTSLKNNGIQVYGDVVMNHKGGADATEMVRAVEVNPNNRNQEVTGEYTIEAWTRFDFPGRGNTHSSFKWRWYHFDGVDWDQSRDISNRIYKFRGKAWDWEVDTEFGNYDYLMYADYDMDHPEVVNELRNWGVWYTNTLGLDGFRIDAVKHIKYSFTRDWINHVRSATGKNMFAVAEFWKNDLGAIENYLQKTNWNHSVFDVPLHYNLYNASKSGGNYDMRNIFNGTVVQRHPSHAVTFVDNHDSQPEEALESFVEEWFKPLAYALTLTREQGYPSVFYGDYYGIPTHGVPAMRSKIDPILEARQKYAYGPQHDYLDHPDVIGWTREGDSSHPKSGLATLITDGPGGSKRMYAGLKNAGETWYDITGNRSDTVKIGSDGWGEFHVNDGSVSIYVQK

SEQ ID NO: 36643 - protein, 478 aa, Bacillus sp.
NGTMMQYFEWYLPNDGNHWNRLNSDASNLKSKGITAVWIPPAWKGASQNDVGYGAYDLYDLGEFNQKGTVRTKYGTRSQLQAAVTSLKNNGIQVYGDVVINHKGGADATEMVRAVEVNPNNRNQEVTGEYTIEAWTRFDFPGRGNTHSSFKWRWYHFDGVDWDQSRRLNNRIYKFRGKAWDWEVDTENGNYDYLMYADIDYDHPEVVNELRIWGVWYTNTLGLDGFRIDAVKHIKYSFTRDWINHVRSATGKNMFAVAEFWKNDLGAIENYLQKTNWNHSVFDVPLHYNLYNASKSGGNYDMRNIFNGTVVQRHPSHAVTFVDNHDSQPEEALESFVEEWFKPLAYALTLTREQGYPSVFYGDYYGIPTHGVPAMRSKIDPILEARQKYAYGPQHDYLDHPDVIGWTREGDSSHPKSGLATLITDGPGGSKRMYAGLKNAGETWYDITGNRSDTVKIGSDGWGEFHVNDGSVSIYVQK

SEQ ID NO: 36644 - protein, 478 aa, Bacillus sp.
NGTLMQYFEWYLPNDGNHWNRLNSDASNLKSKGITAVWIPPAWKGASQNDVGYGAYDLYDLGEFNQKGTVRTKYGTRSQLQAAVTSLKNNGIQVYGDVVMNHKGGADATEMVKAVEVNPNNRNQEVTGEYTIEAWTRFDFPGRANTHSSFKWRWYHFDGVDWDQSRRLNNRIYKFRTKAWDWEVDTEFGNYDYLLYADIDMDHPEVVNELRNWGVWYTNTLGLDGFRIDAVKHIKYSFTRDWINHVRSAIGKNMFAVAEFWKNDLGAIENYLQKTNWNHSVFDVPLHFNLYYASKSGGNYDMRNIFNGTVVQRHPSHAVTFVDNHDSQPEESLESFVREWFKPLAYALTLTREQGYPSVFYGDYYGIPTHGVPAMRSKIDPILEARQKYAYGPQHDYIDHPDVIGWTREGDSSAAKSGLAALITDGPGGSKRMYAGLKNAGETWYDITGNKSDTVKIGSDGWGEFHVNDGSVSIYVQK

SEQ ID NO: 36645 - protein, 478 aa, Bacillus sp.
NGTMMQYFEWYLPNDGNHWNRLNSDASNLKSKGITAVWIPPAWKGASQNDVGYGAYDLYDLGEFNQKGTVRTKYGTRSQLQAAVTSLKNNGIQVYGDVVMNHKGGADATEMVRAVEVNPNNRNQEVTGEYTIEAWTRFDFPGRGNTHSSFKWRWYHFDGVDWDQSRRLNNRIYKFRGKAWDWEVDTENGNYDYLMYADIDYDHPEVVNELRVWGVWYTNTLGLDGFRIDAVKHIKYSFTRDWINHVRSATGKNMFAVAEFWKNDLGAIENYLQKTNWNHSVFDVPLHYNLYNASKSGGNYDMRNIFNGTVVQRHPSHAVTFVDNHDSQPEEALESFVEEWFKPLAYALTLTREQGYPSVFYGDYYGIPTHGVPAMRSKIDPILEARQKYAYGPQHDYLDHPDVIGWTREGDSSHPKSGLATLITDGPGGSKRMYAGLKNAGETWYDITGNRSDTVKIGSDGWGEFHVNDGSVSIYVQK

SEQ ID NO: 36646 - protein, 478 aa, Bacillus sp.
NGTMMQYFEWYLPNDGNHWNRLNSDASNLKSKGITAVWIPPAWKGASQNDVGYGAYDLYDLGEFNQKGTVRTKYGTRSQLQAAVTSLKNNGIQVYGDVVMNHKGGADATEMVRAVEVNPNNRNQEVTGEYTIEAWTRFDFPGRGNTHSSFKWRWYHFDGVDWDQSRRYSNRIYKFRGKAWDWEVDTENGNYDYLMYADIDMDHPEVVNELRNWGVWYTNTLGLDGFRIDAVKHIKYSFTRDWINHVRSATGKNMFAVAEFWKNDLGAIENYLQKTNWNHSVFDVPLHYNLYNASKSGGNYDMRNIFNGTVVQRHPSHAVTFVDNHDSQPEEALESFVEEWFKPLAYALTLTREQGYPSVFYGDYYGIPTHGVPAMRSKIDPILEARQKYAYGPQHDYLDHPDVIGWTREGDSSHPKSGLATLITDGPGGSKRMYAGLKNAGETWYDITGNRSDTVKIGSDGWGEFHVNDGSVSIYVQK

SEQ ID NO: 36647 - protein, 478 aa, Bacillus sp.
NGTMMQYFEWYLPNDGNHWNRLNSDASNLKSKGITAVWIPPAWKGASQNDVGYGAYDLYDLGEFNQKGTVRTKYGTRSQLQAAVTSLKNNGIQVYGDVVMNHKGGADATEMVRAVEVNPNNRNQEVTGEYTIEAWTRFDFPGRGNTHSSFKWRWYHFDGVDWDQSRRISNRIYKFRGKAWDWEVDTEFGNYDYLMYADYDMDHPEVVNELRNWGVWYTNTLGLDGFRIDAVKHIKYSFTRDWINHVRSATGKNMFAVAEFWKNDLGAIENYLQKTNWNHSVFDVPLHYNLYNASKSGGNYDMRNIFNGTVVQRHPSHAVTFVDNHDSQPEEALESFVEEWFKPLAYALTLTREQGYPSVFYGDYYGIPTHGVPAMRSKIDPILEARQKYAYGPQHDYLDHPDVIGWTREGDSSHPKSGLATLITDGPGGSKRMYAGLKNAGETWYDITGNRSDTVKIGSDGWGEFHVNDGSVSIYVQK

SEQ ID NO: 36648 - protein, 478 aa, Bacillus sp.
NGTMMQYFEWYLPNDGNHWNRLNSDASNLKSKGITAVWIPPAWKGASQNDVGYGAYDLYDLGEFNQKGTVRTKYGTRSQLQAAVTSLKNNGIQVYGDVVMNHKGGADATEMVKAVEVNPNNRNQEVTGEYTIEAWTRFDFPGRGNTHSSFKWRWYHFDGVDWDQSRRLNNRIYKFRGKAWDWEVDTEFGNYDYLMYADIDMDHPEVVNELRNWGVWYTNTLGLDGFRIDAVKHIKYSFTRDWINHVRSATGKNMFAVAEFWKNDLGAIENYLQKTNWNHSVFDVPLHYNLYNASKSGGNYDMRNIFNGTVVQKHPSHAVTFVDNHDSQPEEALESFVEEWFKPLAYALTLTREQGYPSVFYGDYYGIPTHGVPAMRSKIDPILEARQKYAYGPQHDYIDHPDVIGWTREGDSSAAKSGLAALITDGPGGSKRMYAGLKNAGETWYDITGNKSDTVKIGSDGWGEFHVNDGSVSIYVQK

SEQ ID NO: 36649 - protein, 478 aa, Bacillus sp.
NGTMMQYFEWYLPNDGNHWNRLNSDASNLKSKGITAVWIPPAWKGASQNDVGYGAYDLYDLGEFNQKGTVRTKYGTRSQLQAAVTSLKNNGIQVYGDVVMNHKGGADATEMVRAVEVNPNNRNQEVTGEYTIEAWTRFDFPGRGNTHSSFKWRWYHFDGVDWDQSRRLNNRIYKFRGKAWDWEVDTENGNYDYLMYADIDYDHPEVVNELRIWGVWYTNTLGLDGFRIDAVKHIKYSFTRDWINHVRSATGKNMFAVAEFWKNDLGAIENYLQKTNWNHSVFDVPLHYNLYNASKSGGNYDMRNIFNGTVVQRHPSHAVTFVDNHDSQPEEALESFVEEWFKPLAYALTLTREQGYPSVFYGDYYGIPTHGVPAMRSKIDPILEARQKYAYGPQHDYLDHPDVIGWTREGDSSHPKSGLATLITDGPGGSKRMYAGLKNAGETWYDITGNRSDTVKIGSDGWGEFHVNDGSVSIYVQK

SEQ ID NO: 36650 - protein, 478 aa, Bacillus sp.
NGTMMQYFEWYLPNDGNHWNRLNSDASNLKSKGITAVWIPPAWKGASQNDVGYGAYDLYDLGEFNQKGTVRTKYGTRSQLQAAVTSLKNNGIQVYGDVVLNHKGGADATEMVRAVEVNPNNRNQEVTGEYTIEAWTRFDFPGRGNTHSSFKWRWYHFDGVDWDQSRRLNNRIYKFRGKAWDWEVDTENGNYDYLMYADIDFDHPEVVNELRNWGVWYTNTLGLDGFRIDAVKHIKYSFTRDWINHVRSATGKNMFAVAEFWKNDLGAIENYLQKTNWNHSVFDVPLHYNLYNASKSGGNYDMRNIFNGTVVQRHPSHAVTFVDNHDSQPEEALESFVEEWFKPLAYALTLTREQGYPSVFYGDYYGIPTHGVPAMRSKIDPILEARQKYAYGPQHDYLDHPDVIGWTREGDSSHPKSGLATLITDGPGGSKRMYAGLKNAGETWYDITGNRSDTVKIGSDGWGEFHVNDGSVSIYVQK

SEQ ID NO: 36651 - protein, 478 aa, Bacillus sp.
NGTMMQYFEWYLPNDGNHWNRLNSDASNLKSKGITAVWIPPAWKGASQNDVGYGAYDLYDLGEFNQKGTVRTKYGTRSQLQAAVTSLKNNGIQVYGDVVMNHKGGADATEMVRAVEVNPNNRNQEVTGEYTIEAWTRFDFPGRGNTHSSFKWRWYHFDGVDWDQSRKYENRIYKFRGKAWDWEVDTENGNYDYLMYADIDMDHPEVVNELRNWGVWYTNTLGLDGFRIDAVKHIKYSFTRDWINHVRSATGKNMFAVAEFWKNDLGAIENYLQKTNWNHSVFDVPLHYNLYNASKSGGNYDMRNIFNGTVVQRHPSHAVTFVDNHDSQPEEALESFVEEWFKPLAYALTLTREQGYPSVFYGDYYGIPTHGVPAMRSKIDPILEARQKYAYGPQHDYLDHPDVIGWTREGDSSHPKSGLATLITDGPGGSKRMYAGLKNAGETWYDITGNRSDTVKIGSDGWGEFHVNDGSVSIYVQK

SEQ ID NO: 36652 - protein, 478 aa, Synthetic construct
NGTMMQYFEWYLPNDGNHWNRLNSDASNLKSKGITAVWIPPAWKGASQNDVGYGAYDLYDLGEFNQKGTVRTKYGTRSQLQAAVTSLKNNGIQVYGDVVLNHKGGADATEMVRAVEVNPNNRNQEVTGEYTIEAWTRFDFPGRGNTHSSFKWRWYHFDGVDWDQSRRLNNRIYKFRGKAWDWEVDTENGNYDYLMYADYDMDHPEVVNEIRNWGVWYTNTLGLDGFRIDAVKHIKYSFTRDWINHVRSATGKNMFAVAEFWKNDLGAIENYLQKTNWNHSVFDVPLHYNLYNASKSGGNYDMRNIFNGTVVQRHPSHAVTFVDNHDSQPEEALESFVEEWFKPLAYALTLTREQGYPSVFYGDYYGIPTHGVPAMRSKIDPILEARQKYAYGPQHDYLDHPDVIGWTREGDSSHPKSGLATLITDGPGGSKRMYAGLKNAGETWYDITGNRSDTVKIGSDGWGEFHVNDGSVSIYVQK

SEQ ID NO: 36653 - protein, 478 aa, Synthetic construct
NGTMMQYFEWYLPNDGNHWNRLNSDASNLKSKGITAVWIPPAWKGASQNDVGYGAYDLYDLGEFNQKGTVRTKYGTRSQLQAAVTSLKNNGIQVYGDVVLNHKGGADATEMVRAVEVNPNNRNQEVTGEYTIEAWTRFDFPGRGNTHSSFKWRWYHFDGVDWDQSRRLNNRIYKFRGKAWDWEVDTENGNYDYLMYADFDMDHPEVVNELRNWGVWYTNTLGLDGFRIDAVKHIKYSFTRDWINHVRSATGKNMFAVAEFWKNDLGAIENYLQKTNWNHSVFDVPLHYNLYNASKSGGNYDMRNIFNGTVVQRHPSHAVTFVDNHDSQPEEALESFVEEWFKPLAYALTLTREQGYPSVFYGDYYGIPTHGVPAMRSKIDPILEARQKYAYGPQHDYLDHPDVIGWTREGDSSHPKSGLATLITDGPGGSKRMYAGLKNAGETWYDITGNRSDTVKIGSDGWGEFHVNDGSVSIYVQK

SEQ ID NO: 36654 - protein, 478 aa, Bacillus sp.
NGTMMQYFEWYLPNDGNHWNRLNSDASNLKSKGITAVWIPPAWKGASQNDVGYGAYDLYDLGEFNQKGTVRTKYGTRSQLQAAVTSLKNNGIQVYGDVVMNHKGGADATEMVRAVEVNPNNRNQEVTGEYTIEAWTRFDFPGRGNTHSSFKWRWYHFDGVDWDQSRRLNNRIYKFRGKAWDWEVDTENGNYDYLMYADIDYDHPEVVGELRNWGVWYTNTLGLDGFRIDAVKHIKYSFTRDWINHVRSATGKNMFAVAEFWKNDLGAIENYLQKTNWNHSVFDVPLHYNLYNASKSGGNYDMRNIFNGTVVQRHPSHAVTFVDNHDSQPEEALESFVEEWFKPLAYALTLTREQGYPSVFYGDYYGIPTHGVPAMRSKIDPILEARQKYAYGPQHDYLDHPDVIGWTREGDSSHPKSGLATLITDGPGGSKRMYAGLKNAGETWYDITGNRSDTVKIGSDGWGEFHVNDGSVSIYVQK

SEQ ID NO: 36655 - protein, 478 aa, Bacillus sp.
NGTMMQYFEWYLPNDGNHWNRLNSDASNLKSKGITAVWIPPAWKGASQNDVGYGAYDLYDLGEFNQKGTVRTKYGTRSQLQAAVTSLKNNGIQVYGDVVMNHKGGADATEMVRAVEVNPNNRNQEVTGEYTIEAWTRFDFPGRGNTHSSFKWRWYHFDGVDWDQSRRLNNRIYKFRGKAWDWEVDTENGNYDYLMYADIDYDHPEVVNELRMWGVWYTNTLGLDGFRIDAVKHIKYSFTRDWINHVRSATGKNMFAVAEFWKNDLGAIENYLQKTNWNHSVFDVPLHYNLYNASKSGGNYDMRNIFNGTVVQRHPSHAVTFVDNHDSQPEEALESFVEEWFKPLAYALTLTREQGYPSVFYGDYYGIPTHGVPAMRSKIDPILEARQKYAYGPQHDYLDHPDVIGWTREGDSSHPKSGLATLITDGPGGSKRMYAGLKNAGETWYDITGNRSDTVKIGSDGWGEFHVNDGSVSIYVQK

SEQ ID NO: 36656 - protein, 478 aa, Bacillus sp.
NGTMMQYFEWYLPNDGNHWNRLNSDASNLKSKGITAVWIPPAWKGVSQNDVGYGAYDLYDLGEFNQKGTVRTKYGTRSQLQAAVTSLKNNGIQVYGDVVMNHKGGADATEMVRAVEVNPNNRNQEVTGEYTIEAWTRFDFPGRGNTHSSFKWRWYHFDGVDWDQSRRISNRIYKFRGKAWDWEVDTEFGNYDYLMYADYDMDHPEVVNELRNWGVWYTNTLGLDGFRIDAVKHIKYSFTRDWINHVRSATGKNMFAVAEFWKNDLGAIENYLQKTNWNHSVFDVPLHYNLYNASKSGGNYDMRNIFNGTVVQRHPSHAVTFVDNHDSQPEEALESFVEEWFKPLAYALTLTREQGYPSVFYGDYYGIPTHGVPAMRSKIDPILEARQKYAYGPQHDYLDHPDVIGWTREGDSSHPKSGLATLITDGPGGSKRMYAGLKNAGETWYDITGNRSDTVKIGSDGWGEFHVNDGSVSIYVQK

SEQ ID NO: 36657 - protein, 478 aa, Bacillus sp.
NGTLMQYFEWYLPNDGNHWNRLNSDASNLKSKGITAVWIPPAWKGASQNDVGYGAYDLYDLGEFNQKGTVRTKYGTRSQLQAAVTSLKNNGIQVYGDVVMNHKGGADATEMVKAVEVNPNNRNQEVTGEYTIEAWTRFDFPGRGNTHSSFKWRWYHFDGVDWDQSRRLNNRIYKFRGKAWDWEVDTEFGNYDYLLYADIDMDHPEVVNELRNWGVWYTNTLGLDGFRIDAVKHIKYSFTRDWINHVRSATGKNMFAVAEFWKNDLGAIENYLQKTNWNHSVFDVPLHYNLYNASKSGGNYDMRNIFNGTVVQKHPTHAVTFVDNHDSQPEEALESFVEEWFKPLAYALTLTREQGYPSVFYGDYYGIPTHGVPAMRSKIDPILEARQKYAYGPQHDYIDHPDVIGWTREGDSSAAKSGLAALITDGPGGSKRMYAGLKNAGETWYDITGNKSDTVKIGSDGWGEFHVNDGSVSIYVQK

SEQ ID NO: 36658 - protein, 478 aa, Bacillus sp.
NGTMMQYFEWYLPNDGNHWNRLNSDASNLKSKGITAVWIPPAWKGASQNDVGYGAYDLYDLGEFNQKGTVRTKYGTRSQLQAAVTSLKNNGIQVYGDVVMNHKGGADATEMVRAVEVNPNNRNQEVTGEYTIEAWTRFDFPGRGNTHSSFKWRWYHFDGVDWDQSRRLNNRIYKFRGKAWDWEVDTENGNYDYLMYADIDYDYPEVVAELRMWGVWYTNTLGLDGFRIDAVKHIKYSFTRDWINHVRSATGKNMFAVAEFWKNDLGAIENYLQKTNWNHSVFDVPLHYNLYNASKSGGNYDMRNIFNGTVVQRHPSHAVTFVDNHDSQPEEALESFVEEWFKPLAYALTLTREQGYPSVFYGDYYGIPTHGVPAMRSKIDPILEARQKYAYGPQHDYLDHPDVIGWTREGDSSHPKSGLATLITDGPGGSKRMYAGLKNAGETWYDITGNRSDTVKIGSDGWGEFHVNDGSVSIYVQK

SEQ ID NO: 36659 - protein, 478 aa, Synthetic construct
NGTMMQYFEWYLPNDGNHWNRLNSDASNLKSKGITAVWIPPAWKGASQNDVGYGAYDLYDLGEFNQKGTVRTKYGTRSQLQAAVTSLKNNGIQVYGDVVMNHKGGADATEMVRAVEVNPNNRNQEVTGEYTIEAWTRFDFPGRGNTHSSFKWRWYHFDGVDWDQSRRLNNRIYKFRGKAWDWEVDTENGNYDYLMYADIDMDHPEVVNELRNWGVWYTNTLGLDGFRIDAVKHIKYSFTRDWINHVRSATGKNMFAVAEFWKNDLGAIENYLQKTNWNHSVFDVPLHYNLYNASKSGGNYDMRRIFNGTVVQRHPSHAVTFVDNHDSQPEEALESFVEEWFKPLAYALTLTREQGYPSVFYGDYYGIPTHGVPAMRSKIDPILEARQKYAYGPQHDYLDHPDVIGWTREGDSSHPKSGLATLITDGPGGSKRMYAGLKNAGETWYDITGNRSDTVKIGSDGWGEFHVNDGSVSIYVQK

SEQ ID NO: 36660 - protein, 478 aa, Bacillus sp.
NGTMMQYFEWYLPNDGNHWNRLNSDASNLKSKGITAVWIPPAWKGASQNDVGYGAYDLYDLGEFNQKGTVRTKYGTRSQLQAAVTSLKNNGIQVYGDVVMNHKGGADATEMVRAVEVNPNNRNQEVTGEYTIEAWTRFDFPGRGNTHSSFKWRWYHFDGVDWDQSRRLNNRIYKFRGKAWDWEVDTENGNYDYLMYADIDYDHPEVVSELRNWGVWYTNTLGLDGFRIDAVKHIKYSFTRDWINHVRSATGKNMFAVAEFWKNDLGAIENYLQKTNWNHSVFDVPLHYNLYNASKSGGNYDMRNIFNGTVVQRHPSHAVTFVDNHDSQPEEALESFVEEWFKPLAYALTLTREQGYPSVFYGDYYGIPTHGVPAMRSKIDPILEARQKYAYGPQHDYLDHPDVIGWTREGDSSHPKSGLATLITDGPGGSKRMYAGLKNAGETWYDITGNRSDTVKIGSDGWGEFHVNDGSVSIYVQK

SEQ ID NO: 36661 - protein, 478 aa, unidentified
NGTMMQYFEWYLPNDGNHWNRLRDDAANLKSKGITAVWIPPAWKGTSQNDVGYGAYDLYDLGEFNQKGTVRTKYGTRNQLQAAVTSLKNNGIQVYGDVVMNHKGGADGTEIVNAVEVNRSNRNQETSGEYAIEAWTKFDFPGRGNNHSSFKWRWYHFDGTDWDQSRQLQNKIYKFRGKAWDWEVDTENGNYDYLMYADVDMDHPEVIHELRNWGVWYTNTLNLDGFRIDAVKHIKYSFTRDWLTHVRNTTGKPMFAVAEFWKNDLGAIENYLNKTSWNHSVFDVPLHYNLYNASNSGGYYDMRNILNGSVVQKHPTHAVTFVDNHDSQPGEALESFVQQWFKPLAYALVLTREQGYPSVFYGDYYGIPTHGVPAMKSKIDPLLQARQTFAYGPQHDYLDHPDVIGWTREGDSSAAKSGLAALITDGPGGSKRMYAGLKNAGETWYDITGNRSDTVKIGSDGWGEFHVNDGSVSIYVQK

SEQ ID NO: 36662 - protein, 478 aa, Synthetic construct
NGTMMQYFEWYLPNDGNHWNRLNSDASNLKSKGITAVWIPPAWKGASQNDVGYGAYDLYDLGEFNQKGTVRTKYGTRSQLQAAVTSLKNNGIQVYGDVVMNHKGGADATEMVRAVEVNPNNRNQEVTGEYTIEAWTRFDFPGRGNTHSSFKWRWYHFDGVDWDQSRRLNNRIYKFRGKAWDWEVDTENGNYDYLMYADIDMDHPEVVNELRNWGVWYTNTLGLDGFRIDAVKHIKFSFTRDWINHVRSATGKNMFAVAEFWKNDLGAIENYLQKTNWNHSVFDVPLHYNLYNASKSGGNYDMRNIFNGTVVQRHPSHAVTFVDNHDSQPEEALESFVEEWFKPLAYALTLTREQGYPSVFYGDYYGIPTHGVPAMRSKIDPILEARQKYAYGPQHDYLDHPDVIGWTREGDSSHPKSGLATLITDGPGGSKRMYAGLKNAGETWYDITGNRSDTVKIGSDGWGEFHVNDGSVSIYVQK

SEQ ID NO: 36663 - protein, 478 aa, Synthetic construct
NGTMMQYFEWYLPNDGNHWNRLNSDASNLKSKGITAVWIPPAWKGASQNDVGYGAYDLYDLGEFNQKGTVRTKYGTRSQLQAAVTSLKNNGIQVYGDVVMNHKGGADATEMVRAVEVNPNNRNQEVTGEYTIEAWTRFDFPGRGNTHSSFKWRWYHFDGVDWDQSRRLNNRIYKFRGKAWDWEVDTENGNYDYLMYADIDMDHPEVVNELRNWGVWYTNTLGLDGFRIDAVKHIKYSFTRDWINHVRSATGKEMFAVAEFWKNDLGAIENYLQKTNWNHSVFDVPLHYNLYNASKSGGNYDMRNIFNGTVVQRHPSHAVTFVDNHDSQPEEALESFVEEWFKPLAYALTLTREQGYPSVFYGDYYGIPTHGVPAMRSKIDPILEARQKYAYGPQHDYLDHPDVIGWTREGDSSHPKSGLATLITDGPGGSKRMYAGLKNAGETWYDITGNRSDTVKIGSDGWGEFHVNDGSVSIYVQK

SEQ ID NO: 36664 - protein, 478 aa, Bacillus sp.
NGTMMQYFEWYLPNDGNHWNRLNSDASNLKSKGITAVWIPPAWKGASQNDVGYGAYDLYDLGEFNQKGTVRTKYGTRSQLQAAVTSLKNNGIQVYGDVVMNHKGGADATEMVRAVEVNPNNRNQEVTGEYTIEAWTRFDFPGRGNTHSSFKWRWYHFDGVDWDQSRKLSNRIYKFRGKAWDWEVDTEFGNYDYLMYADYDMDHPEVVNELRNWGVWYTNTLGLDGFRIDAVKHIKYSFTRDWINHVRSATGKNMFAVAEFWKNDLGAIENYLQKTNWNHSVFDVPLHYNLYNASKSGGNYDMRNIFNGTVVQRHPSHAVTFVDNHDSQPEEALESFVEEWFKPLAYALTLTREQGYPSVFYGDYYGIPTHGVPAMRSKIDPILEARQKYAYGPQHDYLDHPDVIGWTREGDSSHPKSGLATLITDGPGGSKRMYAGLKNAGETWYDITGNRSDTVKIGSDGWGEFHVNDGSVSIYVQK

SEQ ID NO: 36665 - protein, 478 aa, Bacillus sp.
NGTMMQYFEWYLPNDGNHWNRLNSDASNLKSKGITAVWIPPAWKGASQNDVGYGAYDLYDLGEFNQKGTVRTKYGTRSQLQAAVTSLKNNGIQVYGDVVINHKGGADATEMVRAVEVNPNNRNQEVTGEYTIEAWTRFDFPGRGNTHSSFKWRWYHFDGVDWDQSRRLNNRIYKFRGKAWDWEVDTENGNYDYLMYADIDYDHPEVVNELRNWGVWYTNTLGLDGFRIDAVKHIKYSFTRDWINHVRSATGKNMFAVAEFWKNDLGAIENYLQKTNWNHSVFDVPLHYNLYNASKSGGNYDMRNIFNGTVVQRHPSHAVTFVDNHDSQPEEALESFVEEWFKPLAYALTLTREQGYPSVFYGDYYGIPTHGVPAMRSKIDPILEARQKYAYGPQHDYLDHPDVIGWTREGDSSHPKSGLATLITDGPGGSKRMYAGLKNAGETWYDITGNRSDTVKIGSDGWGEFHVNDGSVSIYVQK

SEQ ID NO: 36666 - protein, 478 aa, Synthetic construct
NGTMMQYFEWYLPNDGNHWNRLNSDASNLKSKGITAVWIPPAWKGASQNDVGYGAYDLYDLGEFNQKGTVRTKYGTRSQLQAAVTSLKNNGIQVYGDVVMNHKGGADATEMVRAVEVNPNNRNQEVTGEYTIEAWTRFDFPGRGNTHSSFKWRWYHFDGVDWDQSRRLNNRIYKFRGKAWDWEVDTENGNYDYLMYADLDMDHPEVVNEVRNWGVWYTNTLGLDGFRIDAVKHIKYSFLRDWINHVRSATGKNMFAVAEFWKNDLGAIENYLQKTNWNHSVFDVPLHYNLYNASKSGGNYDMRNIFNGTVVQRHPSHAVTFVDNHDSQPEEALESFVEEWFKPLAYALTLTREQGYPSVFYGDYYGIPTHGVPAMRSKIDPILEARQKYAYGPQHDYLDHPDVIGWTREGDSSHPKSGLATLITDGPGGSKRMYAGLKNAGETWYDITGNRSDTVKIGSDGWGEFHVNDGSVSIYVQK

SEQ ID NO: 36667 - protein, 478 aa, Bacillus sp.
NGTMMQYFEWYLPNDGNHWNRLNSDASNLKSKGITAVWIPPAWKGASQNDVGYGAYDLYDLGEFNQKGTVRTKYGTRSQLQAAVTSLKNNGIQVYGDVVFNHKGGADATEMVRAVEVNPNNRNQEVTGEYTIEAWTRFDFPGRGNTHSSFKWRWYHFDGVDWDQSRRLNNRIYKFRGKAWDWEVDTENGNYDYLMYADIDYDHPEVVNELRNWGVWYTNTLGLDGFRIDAVKHIKYSFTRDWINHVRSATGKNMFAVAEFWKNDLGAIENYLQKTNWNHSVFDVPLHYNLYNASKSGGNYDMRNIFNGTVVQRHPSHAVTFVDNHDSQPEEALESFVEEWFKPLAYALTLTREQGYPSVFYGDYYGIPTHGVPAMRSKIDPILEARQKYAYGPQHDYLDHPDVIGWTREGDSSHPKSGLATLITDGPGGSKRMYAGLKNAGETWYDITGNRSDTVKIGSDGWGEFHVNDGSVSIYVQK

SEQ ID NO: 36668 - protein, 478 aa, Bacillus sp.
NGTMMQYFEWYLPNDGNHWNRLNSDASNLKSKGITAVWIPPAWKGASQNDVGYGAYDLYDLGEFNQKGTVRTKYGTRSQLQAAVTSLKNNGIQVYGDVVMNHKGGADATEMVRAVEVNPNNRNQEVTGEYTIEAWTRFDFPGRGNTHSSFKWRWYHFDGVDWDQSRQISNRIYKFRGKAWDWEVDTEFGNYDYLMYADYDMDHPEVVNELRNWGVWYTNTLGLDGFRIDAVKHIKYSFTRDWINHVRSATGKNMFAVAEFWKNDLGAIENYLQKTNWNHSVFDVPLHYNLYNASKSGGNYDMRNIFNGTVVQRHPSHAVTFVDNHDSQPEEALESFVEEWFKPLAYALTLTREQGYPSVFYGDYYGIPTHGVPAMRSKIDPILEARQKYAYGPQHDYLDHPDVIGWTREGDSSHPKSGLATLITDGPGGSKRMYAGLKNAGETWYDITGNRSDTVKIGSDGWGEFHVNDGSVSIYVQK

SEQ ID NO: 36669 - protein, 482 aa, Cytophaga sp.
NGTMMQYFEWYVPNDGQQWNRLRTDAPYLSSVGITAVWTPPAYKGTSQADVGYGPYDLYDLGEFNQKGTVRTKYGTKGELKSAVNTLHSNGIQVYGDVVMNHKAGADYTENVTAVEVNPSNRYQETSGEYNIQAWTGFNFPGRGTTYSNWKWQWFHFDGTDWDQSRSLSRIFKFRGHGKAWDWEVSSENGNYDYLMYADYDYDHPDVVNEMKKWGVWYANEVGLDGYRLDAVKHIKFQFLKDWVDNARAATGKEMFTVGEYWQNDLGALNNYLAKVNYNQSLFDAPLHYNFYAASTGGGYYDMRNILNNTLVASNPTKAVTLVENHDTQPGQSLESTVQPWFKPLAYAFILTRSGGYPSVFYGDMYGTKGTTTREIPALKSKIEPLLKARKDYAYGTQRDYIDNPDVIGWTREGDSTKAKSGLATVITDGPGGSKRMYVGTSNAGEIWYDLTGNRTDKITIGSDGYATFPVNGGSVSVWVQQ

SEQ ID NO: 36670 - protein, 482 aa, Cytophaga sp.
NGTMMQYFEWYVPNDGQQWNRLRTDAPYLSSVGITAVWTPPAYKGTSQADVGYGPYDLYDLGEFNQKGTVRTKYGTKGELKSAVNTLHSNGIQVYGDVVMNHKAGADYTENVTAVEVNPSNRYQETSGEYNIQAWTGFNFPGRGTTYSNWKWQWFHFDGTDWDQSRSLSRIFKFRGHGKAWDWPVSSENGNYDYLMYADYDYDHPDVVNEMKKWGVWYANEVGLDGYRLDAVKHIKFSFLKDWVDNARAATGKEMFTVGEYWQNDLGALNNYLAKVNYNQSLFDAPLHYNFYAASTGGGYYDMRNILNNTLVASNPTKAVTLVENHDTQPGQSLESTVQPWFKPLAYAFILTRSGGYPSVFYGDMYGTKGTTTREIPALKSKIEPLLKARKDYAYGTQRDYIDNPDVIGWTREGDSTKAKSGLATVITDGPGGSKRMYVGTSNAGEIWYDLTGNRTDKITIGSDGYATFPVNGGSVSVWVQQ

SEQ ID NO: 36671 - protein, 482 aa, Cytophaga sp.
NGTMMQYFEWYVPNDGQQWNRLRTDAPYLSSVGITAVWTPPAYKGTSQADVGYGPYDLYDLGEFNQKGTVRTKYGTKGELKSAVNTLHSNGIQVYGDVVMNHKAGADYTENVTAVEVNPSNRYQETSGEYNIQAWTGFNFPGRGTTYSNWKWQWFHFDGTDWDQSRSLSRIFKFRGTGKAWDWPVSSENGNYDYLMYADIDYDHPDVVNEMKKWGVWYANEVGLDGYRLDAVKHIKFSFLKDWVDNARAATGKEMFTVGEYWQNDLGALNNYLAKVNYNQSLFDAPLHYNFYAASTGGGYYDMRNILNNTLVASNPTKAVTLVENHDTQPGQSLESTVQPWFKPLAYAFILTRSGGYPSVFYGDMYGTKGTTTREIPALKSKIEPLLKARKDYAYGTQRDYIDNPDVIGWTREGDSTKAKSGLATVITDGPGGSKRMYVGTSNAGEIWYDLTGNRTDKITIGSDGYATFPVNKGSVSVWVQQ

SEQ ID NO: 36672 - protein, 482 aa, Cytophaga sp.
NGTMMQYFEWYVPNDGQQWNRLRTDAPYLSSVGITAVWTPPAYKGTSQADVGYGPYDLYDLGEFNQKGTVRTKYGTKGELKSAVNTLHSNGIQVYGDVVMNHKAGADYTENVTAVEVNPSNRYQETSGHYNIQAWTGFNFPGRGTTYSNWKWQWFHFDGTDWDESRSLSRIFKFRGDGKAWDWEVSSENGNYDYLMYADYDYDHPDVVNEMKKWGVWYANEVGLDGYRLDAVKHIKFQFLKDWVDNARAATGKEMFTVGEYWQNDLGALNNYLFKVNYNQSLFDAPLHYNFYAASTGGGYYDMRNILNNTLVASNPTKAVTLVENHDTQPGQSLESTVQPWFKPLAYAFILTRSGGYPSVFYGDMYGTKGTTTREIPALKSKIEPLLKARKDYAYGKQRDYIDNPDVIGWTREGDSTKAKSGLATVITDGPGGSKRMYVGTSNAGEIWYDLTGNRTDKITIGSDGYATFPVNGGSVSVWVQQ

SEQ ID NO: 36673 - protein, 482 aa, Cytophaga sp.
NGTMMQYFEWYVPNDGQQWNRLRTDAPYLSSVGITAVWTPPAYKGTSQADVGYGPYDLYDLGEFNQKGTVRTKYGTKGELKSAVNTLHSNGIQVYGDVVMNHKAGADYTENVTAVEVNPSNRYQETSGEYNIQAWTGFNFPGRGTTYSNFKWQWFHFDGTDWDQSRSLSRIFKFRGDGKAWDWPVSSENGNYDYLMYADYDYDHPDVVNEMKKWGVWYANEVGLDGYRLDAVKHIKFSFLKDWVDNARAATGKEMFTVGEYWQNDLGALNNYLAKVNYNQSLFDAPLHYNFYAASTGGGDYDMRNILNNTLVASNPTKAVTLVENHDTQPGQSLESTVQPWFKPLAYAFILTRSGGYPSVFYGDMYGTKGTTTREIPALKSKIEPLLKARKDYAYGTQRDYIDNPDVIGWTREGDSTKAKSGLATVITDGPGGSKRMYVGTSNAGEIWYDLTGNRTDKITIGSDGYATFPVNTESVSVWVQQ

SEQ ID NO: 36674 - protein, 482 aa, Cytophaga sp.
NGTMMQYFEWYVPNDGQQWNRLRTDAPYLSSVGITAVWTPPAYKGTSQADVGYGPYDLYDLGEFNQKGTVRTKYGTKGELKSAVNTLHSNGIQVYGDVVMNHKAGADYTENVTAVEVNPSNRYQETSGEYNIQAWTGFNFPGRGTTYSNWKWQWFHFDGTDWDQSRSLSRIFKFRGDGKAWDWEVSSENGNYDYLMYADYDYDHPDVVNEMKKWGVWYANEVGLDGYRLDAVKHIKFQFLKDWVDNARAATGKEMFTVGEYWQNDLGALNNYLAKVNYNQSLFDAPLHYNFYAASTGGGYYDMRNILNNTLVASNPTKAVTLVENHDTQPGQSLESTVQPWFKPLAYAFILTRSGGYPSVFYGDMYGTKGTTTREIPALKSKIEPLLKARKDYAYGTQRDYIDNPDVIGWTREGDSTKAKSGLATVITDGPGGSKRMYVGTSNAGEIWYDLTGNRTDKITIGSDGYATFPVNGGSVSVWVQQ

SEQ ID NO: 36675 - protein, 482 aa, Cytophaga sp.
NGTMMQYFEWYVPNDGQQWNRLRTDAPYLSSVGITAVWTPPAYKGTSQADVGYGPYDLYDLGEFNQKGTVRTKYGTKGELKSAVNTLHSNGIQVYGDVVMNHKAGADYTENVTAVEVNPSNRYQETSGHYNIQAWTGFNFPGRGTTYSNWKWQWFHFDGTDWDESRSLSRIFKFRGDGKAWDWEVSSENGNYDYLMYADYDYDHPDVVNEMKKWGVWYANEVGLDGYRLDAVKHIKFQFLKDWVDNARAATGKEMFTVGEYWQNDLGALNNYLFKVNYNQSLFDAPLHYNFYAASTGGGYYDMRNILNNTLVASNPTKAVTLVENHDTQPGQSLESTVQPWFKPLAYAFILTRSGGYPSVFYGDMYGTKGTTTREIPALKSKIEPLLKARKDYAYGTQRDYIDNPDVIGWTREGDSTKAKSGLATVITDGPGGSKRMYVGTSNAGEIWYDLTGNRTDKITIGSDGYATFPVNGGSVSVWVQQ

SEQ ID NO: 36676 - protein, 482 aa, Synthetic construct
NGTMMQYFEWYVPNDGQQWNRLRTDAPYLSSVGITAVWTPPAYKGTSQADVGYGPYDLYDLGEFNQKGTVRTKYGTKGELKSAVNTLHSNGIQVYGDVVMNHKAGADGTEFVDAVEVNPSNRNQETSGTYQIQAWTKFDFPGRGNTYSSFKWRWYHFDGTDWDESRKLNRVYKFRGTGKAWDWEVDTENGNYDYLMFADLDYDHPDVVNEMKKWGVWYANEVGLDGYRLDAVKHIKFSFLKDWVDNARAATGKEMFTVGEYWQNDLGALNNYLAKVNYNQSLFDAPLHYNFYAASTGGGYYDMRNILNNTLVASNPTKAVTLVENHDTQPGQSLESTVQPWFKPLAYAFILTRSGGYPSVFYGDMYGTKGTTTREIPALKSKIEPLLKARKDYAYGTQRDYIDNPDVIGWTREGDSTKAKSGLATVITDGPGGSKRMYVGTSNAGEIWYDLTGNRTDKITIGSDGYATFPVNGGSVSVWVQQ

SEQ ID NO: 36677 - protein, 482 aa, Synthetic construct
NGTMMQYFEWYVPNDGQQWNRLRTDAPYLSSVGITAVWTPPAYKGTSQADVGYGPYDLYDLGEFNQKGTVRTKYGTKGELKSAVNTLHSNGIQVYGDVVMNHKAGADGTELVDAVEVNPSDRNQEISGTYQIQAWTKFDFPGRGNTYSSFKWRWYHFDGTDWDESRKLNRIYKFRGTGKAWDWEVDTENGNYDYLMYADLDYDHPDVVNEMKKWGVWYANEVGLDGYRLDAVKHIKFSFLKDWVDNARAATGKEMFTVGEYWQNDLGALNNYLAKVNYNQSLFDAPLHYNFYAASTGGGYYDMRNILNNTLVASNPTKAVTLVENHDTQPGQSLESTVQPWFKPLAYAFILTRSGGYPSVFYGDMYGTKGTTTREIPALKSKIEPLLKARKDYAYGTQRDYIDNPDVIGWTREGDSTKAKSGLATVITDGPGGSKRMYVGTSNAGEIWYDLTGNRTDKITIGSDGYATFPVNGGSVSVWVQQ

SEQ ID NO: 36678 - protein, 478 aa, Cytophaga sp.
NGTMMQYFEWYVPNDGQQWNRLRTDAPYLSSVGITAVWTPPAYKGTSQADVGYGPYDLYDLGEFNQKGTVRTKYGTKGELKSAVNTLHSNGIQVYGDVVMNHKAGADYTENVTAVEVNPSNRYQETSGEYNIQAWTGFNFPGRGTTYSNWKWQWFHFDGTDWDQSRSLSRIFKFDGKAWDWEVSSENGNYDYLMYADYDYDHPDVVNEMKKWGVWYANEVGLDGYRLDAVKHIKFQFLKDWVDNARAATGKEMFTVGEYWQNDLGALNNYLAKVNYNQSLFDAPLHYNFYAASTGGGYYDMRNILNNTLVASNPTKAVTLVENHDTQPGQSLESTVQPWFKPLAYAFILTRSGGYPSVFYGDMYGTKGTTTREIPALKSKIEPLLKARKDYAYGTQRDYIDNPDVIGWTREGDSTKAKSGLATVITDGPGGSKRMYVGTSNAGEIWYDLTGNRTDKITIGSDGYATFPVNGGSVSVWV

SEQ ID NO: 36679 - protein, 479 aa, Bacillus sp.
NGTIMQYFEWNVPNDGQHWNRLHNNAQNLKNAGITAIWIPPAWKGTSQSDTGYGAYDLYDLGEFNQKGTVRTKYGTKAELERAIRSLKANGIQVYGDVVMNHKAGADFTERVQAVEVNPQNRNQEVSGTYQIEAWTGFNFPGRGNQHSSFKWRWYHFDGTDWDQSRQLSNRIYKFRGGKAWDWEVDTEFGNYDYLMYADLDMDHPEVINELNRWGVWYANTLNLDGFRLDAVKHIKFSFMRDWLGHVRGQTGKNLFAVAEYWKNDLGALENYLSKTNWTMSAFDVPLHYNLYQASNSSGNYDMRNLLNGTLVQRHPSHAVTFVDNHDTQPGEALESFVQGWFKPLAYATILTREQGYPQVFYGDYYGIPSDGVPSYRQQIDPLLAARQQYAYGPQHDYLDHPDVIGWTREGDSSHPKSGLATLITDGPGGSKRMYAGLKNAGETWYDITGNRSDTVKIGSDGWGEFHVNDGSVSIYVQK

SEQ ID NO: 36680 - protein, 477 aa, Bacillus sp.
NGTMQYFEWYLPNDGNHWNRLNSDASNLKSKGITAVWIPPAWKGASQNDVGYGAYDLYDLGEFNQKGTVRTKYGTRSQLQAAVTSLKNNGIQVYGDVVMNHKGGADATEMVKAVEVNPNNRNQEVTGEYTIEAWTRFDFPGRGNTHSSFKWRWYHFDGVDWDQSRRLNNRIYKFRGKAWDWEVDTEFGNYDYLLYADIDMDHPEVVNELRNWGVWYTNTLGLDGFRIDAVKHIKYSFTRDWINHVRSATGKNMFAVAEFWKNDLGAIENYLQKTNWNHSVFDVPLHYNLYNASKSGGNYDMRNIFNGTVVQKHPTHAVTFVDNHDSQPEEALESFVEEWFKPLAYALTLTREQGYPSVFYGDYYGIPTHGVPAMRSKIDPILEARQKYAYGPQHDYIDHPDVIGWTREGDSSAAKSGLAALITDGPGGSKRMYAGLKNAGETWYDITGNKSDTVKIGSDGWGEFHVNDGSVSIYVQK

SEQ ID NO: 36681 - protein, 512 aa, Synthetic construct
NGTMMQYFEWHLPXDGXXWXKLXXDAXNLXSXGITALWIPPAWKGTSXXDVGYGXYDLYDLGEFNQKGTVRTKYGTKAQXXXAIXAXXXXGIQVYADVVXXHKGGADGTEXVXAVEVNXSXRNQEISGXYXIXAWTKFDFPGRGNTHSXFKWRWYHFDGXDWDXSRQXXXKIYKFRGXGKAWDWEVDXENGNYDYLMYADIDMDHPEVIXELKNWGXWYXNTXNIDGFRIDAVKHIKFSFXXDWLSHVRXXTGKPLFXVAEFWXXDIXXIXNYIXKTXXXXSLFDXPLHXXXYXASXSGGXFDMRXILXXSLMXXXPXXAVTFVDNHDSXPGXALXSFVXXWFKPLAYAXILTRXXGYPXVFYGDYYGIPXHXIPSLKSKIDPLLXARXXYAYGTQHDYXDHXDIIGWTREGXSXXPXSGLAXIISDGPGGXKWMYVGKXXAGXVFXDITGNRSXTVTINADGWGXFXVNGGAVSVWVXXKTTVSTIARPITTRPWTGEFVRWTEPRLVAWP

SEQ ID NO: 36682 - protein, 512 aa, Geobacillus stearothermophilus
NGTMMQYFEWYLPXDGXXWXKLXXDAXNLXSXGITALWIPPAWKGXSXXDVGYGXYDLYDLGEFNQKGTVRTKYGTKAQXXXAIXAXXXXGIQVYADVVXXHKGGADATEXVXAVEVNPXXRNQEISGXYXIXAWTKFDFPGRGNTHSSFKWRWYHFDGVDWDXSRKLXXRIYKFRGXGKAWDWEVDTENGNYDYLMYADIDMDHPEVVXELKNWGXWYXNTXXIDGFRIDAVKHIKFSFXXDWIXHVRSXTGKXLFXVAEFWXXDIXXIXNYIXKTNXXXSLFDXPLHXXXYXASKSGGXFDMRXIXXXTLMXXXPSXAVTFVDNHDSXPXXALXSFVDXWFKPLAYAXXLTRXXGYPXVFYGDYYGIPXHXIPALKSKIDPILXARXXYAYGXQXDYLDHXXIIGWTREGXTXXPXSGLAXIISDGXGGSKWMFVGKNXAGXVFXDITGNRSXTVTINADGWGXFXVNGGSVSIWVXKKTTVSTIARPITTRPWTGEFVRWTEPRLVAWP

SEQ ID NO: 36683 - protein, 512 aa, Bacillus sp. 707
NGTMMQYFEWYLPXDGXXWXKLXXDAXNLXSXGITALWIPPAWKGXSXXDVGYGXYDLYDLGEFNQKGTVRTKYGTKAQXXXAIXAXXXXGIQVYADVVXXHKGGADATEXVXAVEVNPXXRNQEISGXYXIXAWTKFDFPGRGNTHSSFKWRWYHFDGVDWDXSRKLXNRIYKFRGXGKAWDWEVDTENGNYDYLMYADIDMDHPEVVXELKNWGXWYXNTXXIDGFRIDAVKHIKFSFXXDWIXHVRSXTGKXLFXVAEFWXXDIXXIXNYIXKTNXXXSLFDXPLHXXXYXASKSGGXFDMRXIXXXTLMXXXPSXAVTFVDNHDSXPXXALXSFVDXWFKPLAYAXXLTRXXGYPXVFYGDYYGIPXHXIPALKSKIDPILXARXXYAYGXQXDYLDHXXIIGWTREGXTXXPXSGLAXIISDGXGGSKWMFVGKNXAGXVFXDITGNRSXTVTINADGWGXFXVNGGSVSIWVXKKTTVSTIARPITTRPWTGEFVRWTEPRLVAWP

SEQ ID NO: 36684 - protein, 478 aa, Bacillus sp.
NGTIMQYFEWNVPNDGQHWNRLHNNAQNLKNHGITAIWIPPAWKGTSQSDTGYGVYDLYDLGEFNQKGTVRTKYGTKAELERAIRSLKANGIQVYGDVVMNHKAGADFTEQVQAVEVNPQNRNQEVSGTYQIEAWTGFNFPGRGNQHSSFKWRWYHFDGTDFDQSRRLSNRIYKFRGKAWDWEVDTEFGNYDYLMYADLDMDHPEVINELNRWGVWYANTLNLDGFRLDAVKHIKFSFMRDWLGHVRGQTGKNLFAVAEYWKNDLGALENYLSKTNWTMSAFDVPLHYNLYQASNSSGNYDMRNLLNGTLVQRHPSHAVTFVDNHDTQPGEALESFVQGWFKPLAYATILTREQGYPQVFYGDYYGIPSDGVPSYRQQIDPLLKARQQYAYGPQHDYLDHPDVIGWTREGDSSHPKSGLATLITDGPGGSKRMYAGLKNAGETWYDITGNRSDTVKIGSDGWGEFHVNDGSVSIYVQK

SEQ ID NO: 36685 - protein, 478 aa, Bacillus sp.
NGTIMQYFEWNVPNDGQHWNRLHNNAQNLKNAGITAIWIPPAWKGTSQSDTGYGAYDLYDLGEFNQKGTVRTKYGTKAELERAIRSLKANGIQVYGDVVMNHKAGADQTEQVQAVEVNPQNRNQEVSGTYQIEAWTGFNFPGRGNQHSSFKWRWYHFDGTDWDQSRGLSNRIYKFRGKAWDWEVDTEFGNYDYLMYADLDMDHPEVINELNRWGVWYANTLNLDGFRLDAVKHIKFSFMRDWLGHVRGQTGKNLFAVAEYWKNDLGALENYLSKTNWTMSAFDVPLHYNLYQASNSSGNYDMRNLLNGTLVQRHPSHAVTFVDNHDTQPGEALESFVQGWFKPLAYATILTREQGYPQVFYGDYYGIPSDGVPSYRQQIDPLLKARQQYAYGPQHDYLDHPDVIGWTREGDSSHPKSGLATLITDGPGGSKRMYAGLKNADETWYDITGNRSDTVKIGSDGWGEFHVNDGSVSIYVQK

SEQ ID NO: 36686 - protein, 478 aa, Bacillus sp.
NGTIMQYFEWNVPNDGQHWNRLHNNAQNLKNAGITAIWIPPAWKGTSQSDTGYGVYDLYDLGEFNQKGTVRTKYGTKAELERAIRSLKANGIQVYGDVVMNHKAGADFTEQVQAVEVNPQNRNQEVSGTYQIEAWTGFNFPGRGNQHSSFKWRWYHFDGTDFDQSRNVSNRIYKFRGKAWDWEVDTEFGNYDYLMYADLDMDHPEVINELNRWGVWYANTLNLDGFRLDAVKHIKFSFMRDWLGHVRGQTGKNLFAVAEYWKNDLGALENYLSKTNWTMSAFDVPLHYNLYQASNSSGNYDMRNLLNGTLVQRHPSHAVTFVDNHDTQPGEALESFVQGWFKPLAYATILTREQGYPQVFYGDYYGIPSDGVPSYRQQIDPLLKARQQYAYGPQHDYLDHPDVIGWTREGDSSHPKSGLATLITDGPGGSKRMYAGLKNAGETWYDITGNRSDTVKIGSDGWGEFHVNDGSVSIYVQK

SEQ ID NO: 36687 - protein, 478 aa, Bacillus sp.
NGTIMQYFEWNVPNDGQHWNRLHNNAQNLKNAGITAIWIPPAWKGTSQSDTGYGAYDLYDLGEFNQKGTVRTKYGTKAELERAIRSLKANGIQVYGDVVMNHKAGADQTEHVQAVEVNPQNRNQEVSGTYQIEAWTGFNFPGRGNQHSSFKWRWYHFDGTDFDQSRGVSNRIYKFRGKAWDWEVDTEFGNYDYLMYADLDMDHPEVINELNRWGVWYANTLNLDGFRLDAVKHIKFSFMRDWLGHVRGQTGKNLFAVAEYWKNDLGALENYLSKTNWTMSAFDVPLHYNLYQASNSSGNYDMRNLLNGTLVQRHPSHAVTFVDNHDTQPGEALESFVQGWFKPLAYATILTREQGYPQVFYGDYYGIPSDGVPSYRQQIDPLLKARQQYAYGPQHDYLDHPDVIGWTREGDSSHPKSGLATLITDGPGGSKRMYAGLKNAGETWYDITGNRSDTVKIGSDGWGEFHVNDGSVSIYVQK

SEQ ID NO: 36688 - protein, 478 aa, Bacillus sp.
NGTIMQYFEWNVPNDGQHWNRLHNNAQNLKNAGITAIWIPPAWKGTSQSDTGYGAYDLYDLGEFNQKGTVRTKYGTKAELERAIRSLKANGIQVYGDVVMNHKAGADFTERVQAVEVNPQNRNQEVSGTYQIEAWTGFNFPGRGNQHSSFKWRWYHFDGTDWDQSRQLSNRIYKFRGKAWDWEVDTEFGNYDYLMYADLDMDHPEVINELNRWGVWYANTLNLDGFRLDAVKHIKFSFMRDWLGHVRGQTGKNLFAVAEYWKNDLGALENYLQKTNWTMSAFDVPLHYNLYQASNSSGNYDMRNLLNGTLVQRYPSHAVTFVDNHDTQPGEALESFVQGWFKPLAYATILTREQGYPQVFYGDYYGIPSDGVPSYRQQIDPLLKARQQYAYGPQHDYLDHPDVIGWTREGDSSHPKSGLATLITDGPGGSKRMYAGLKNAGETWYDITGNRSDTVKIGSDGWGEFHVNDGSVSIYVQK

SEQ ID NO: 36689 - protein, 478 aa, Bacillus sp.
NGTIMQYFEWNVPNDGQHWNRLHNNAQNLKNAGITAIWIPPAWKGTSQSDTGYGAYDLYDLGEFNQKGTVRTKYGTKAELERAIRSLKANGIQVYGDVVMNHKAGADFTERVQAVEVNPQNRNQEVSGTYQIEAWTGFNFPGRGNQHSSFKWRWYHFDGTDWDQSRDLSNRIYKFRGKAWDWEVDTEFGNYDYLMYGDLDMDHPEVINELNRWGVWYANTLNLDGFRLDAVKHIKFSFMRDWLGHVRGQTGKNLFAVAEYWKNDLGALENYLSKTNWTMSAFDVPLHYNLYQASNSSGNYDMRNLLNGTLVQRHPSHAVTFVDNHDTQPGEALESFVQGWFKPLAYATILTREQGYPQVFYGDYYGIPSDGVPSYRQQIDPLLKARQQYAYGPQHDYLDHPDVIGWTREGDSSHPKSGLATLITDGPGGSKRMYAGLKNAGETWYDITGNRSDTVKIGSDGWGEFHVNDGSVSIYVQK

SEQ ID NO: 36690 - protein, 478 aa, Bacillus sp.
NGTIMQYFEWNVPNDGQHWNRLHNNAQNLKNAGITAIWIPPAWKGTSQSDTGYGAYDLYDLGEFNQKGTVRTKYGTKAELERAIRSLKANGIQVYGDVVMNHKAGADFTERVQAVEVNPQNRNQEVSGTYQIEAWTGFNFPGRGNQHSSFKWRWYHFDGTDWDQSRQLSNRIYKFRGKAWDWEVDTEFGNYDYLMYADLDMDHPEVINELNRWGVWYANTLNLDGFRLDAVKHIKFSFMRDWLGHVRGQTGKNLFAVAEYWKNDLGALENYLSKTNWTMSAFDVPLHYNLYQASNSNGNYDMRNLLNGTLVQRHPSHAVTFVDNHDTQPGEALESFVQGWFKPLAYATILTREQGYPQVFYGDYYGIPSDGVPSYRQQIDPLLKARQQYAYGPQHDYLDHPDVIGWTREGDSSHPKSGLATLITDGPGGSKRMYAGLKNAGETWYDITGNRSDTVKIGSDGWGEFHVNKGSVSIYVQK

SEQ ID NO: 36691 - protein, 478 aa, Bacillus sp.
NGTIMQYFEWNVPNDGQHWNRLHNNAQNLKNAGITAIWIPPAWKGTSQSDTGYGAYDLYDLGEFNQKGTVRTKYGTKAELERAIRSLKANGIQVYGDVVMNHKAGADQTERVQAVEVNPQNRNQEVSGTYQIEAWTGFNFPGRGNQHSSFKWRWYHFDGTDFDQSRGLSNRIYKFRGKAWDWEVDTEFGNYDYLMYADLDMDHPEVINELNRWGVWYANTLNLDGFRLDAVKHIKFSFMRDWLGHVRGQTGKNLFAVAEYWKNDLGALENYLSKTNWTMSAFDVPLHYNLYQASNSSGNYDMRNLLNGTLVQRHPSHAVTFVDNHDTQPGEALESFVQGWFKPLAYATILTREQGYPQVFYGDYYGIPSDGVPSYRQQIDPLLKARQQYAYGPQHDYLDHPDVIGWTREGDSSHPKSGLATLITDGPGGSKRMYAGLKNAGETWYDITGNRSDTVKIGSDGWGEFHVNDGSVSIYVQK

SEQ ID NO: 36692 - protein, 478 aa, Bacillus sp.
NGTIMQYFEWNVPNDGQHWNRLHNNAQNLKNAGITAIWIPPAWKGTSQSDTGYGAYDLYDLGEFNQRGTVRTKYGTKAELERAIRSLKANGIQVYGDVVMNHKAGADFTERVQAVEVNPQNRNQEVSGEYQIEAWTGFNFPGRGNQHSSFKWRWYHFDGTDWDQSRQLSNRIYKFRGKAWDWEVDTEFGNYDYLMYGDLDMDHPEVINELNRWGVWYANTLNLDGFRLDAVKHIKFSFMRDWLGHVRAQTGKNLFAVAEYWKNDLGALENYLSKTNWTMSAFDVPLHYNLYQASNSSGNYDMRNLLNGTLVQRHPSHAVTFVDNHDTQPGEALESFVQGWFKPLAYATILTREQGYPQVFYGDYYGIPSDGVPSYRQQIDPLLKARQQYAYGPQHDYLDHPDVIGWTREGDSSHPKSGLATLITDGPGGSKRMYAGLKNAGETWYDITGNRSDTVKIGSDGWGEFHVNDGSVSIYVQK

SEQ ID NO: 36693 - protein, 478 aa, Bacillus sp.
NGTIMQYFEWNVPNDGQHWNRLHNNAQNLKNAGIDAIWIPPAWKGTSQSDTGYGAYDLYDLGEFNQKGTVRTKYGTKAELERAIRSLKANGIQVYGDVVMNHKAGADFTERVQAVEVNPQNRNQEVSGTYQIEAWTGFNFPGRGNQHSSFKWRWYHFDGTDWDQSRQLSNRIYKFRGKAWDWEVDTEFGNYDYLMYADLDMDHPEVINELNRWGVWYANTLNLDGFRLDAVKHIKFSFMRDWLGHVRGQTGKNLFAVAEYWKNDLGALENYLSKTNWTMSAFDVPLHYNLYQASNSSGNYDMRNLLNGTLVQRHPSHAVTFVDNHDTQPGEALESFVQGWFKPLAYATILTREQGYPQVFYGDYYGIPSDGVPSYRQQIDPLLKARQQYAYGPQHDYLDHPDVIGWTREGDSSHPKSGLATLITDGPGGSKRMYAGLKNAGETWYDITGNRSDTVKIGSDGWGEFHVNDGSVSIYVQK

SEQ ID NO: 36694 - protein, 478 aa, Bacillus sp.
NGTIMQYFEWNVPNDGQHWNRLHNNAQNLKNAGITAIWIPPAWKGTSQSDTGYGAYDLYDLGEFNQKGTVRTKYGTKAELERAIRSLKANGIQVYGDVVMNHKAGADFTERVQAVEVNPQNRNQEVSGTYQIEAWTGFNFPGRGNQHSSFKWRWYHFDGTDWDQSRQLSNRIYKFRGKAWDWEVDTEFGNYDYLMYADLDMDHPEVINELNRWGVWYANTLNLDGFRLDAVKHIKFSFMRDWLGHVRGQTGKNLFAVAEYWKNDLGALENYLSKTNWTMSAFDVPLHYNLYQASNSSGNYDMRNLLNGTLVQRHPSHAVTFVDNHDTQPGEALESFVQGWFKPLAYATILTREQGYPQVFYGDYYGIPSDGVPSYRQQIDPLLKARQQYAYGPQHDYLDHPDVIGWTREGDSSHPKSGLATLITDGPGGSKRMYAGLKNAGETWYDITGNRSDTVKIGSDGWGEFHVNKGSVSIYVQK

SEQ ID NO: 36695 - protein, 478 aa, Bacillus sp.
NGTIMQYFEWNVPNDGQHWNRLHNNAQNLKNAGITAIWIPPAWKGTSQSDTGYGAYDLYDLGEFNQRGTVRTKYGTKAELERAIRSLKANGIQVYGDVVMNHKAGADFTERVQAVEVNPQNRNQEVSGTYQIEAWTGFNFPGRGNQHSSFKWRWYHFDGTDWDQSRQLSNRIYKFRGKAWDWEVDTEFGNYDYLMYADLDMDHPEVINELNRWGVWYANTLNLDGFRLDAVKHIKFSFMRDWLGHVRAQTGKNLFAVAEYWKNDLGALENYLSKTNWTMSAFDVPLHYNLYQASNSSGNYDMRNLLNGTLVQRHPSHAVTFVDNHDTQPGEALESFVQGWFKPLAYATILTREQGYPQVFYGDYYGIPSDGVPSYRQQIDPLLKARQQYAYGPQHDYLDHPDVIGWTREGDSSHPKSGLATLITDGPGGSKRMYAGLKNAGETWYDITGNRSDTVKIGSDGWGEFHVNDGSVSIYVQK

SEQ ID NO: 36696 - protein, 478 aa, Bacillus sp.
NGTIMQYFEWNVPNDGQHWNRLHNNAQNLKNAGITAIWIPPAWKGTSQSDTGYGAYDLYDLGEFNQRGTVRTKYGTKAELERAIRSLKANGIQVYGDVVMNHKAGADQTERVQAVEVNPQNRNQEVSGEYQIEAWTGFNFPGRGNQHSSFKWRWYHFDGTDFDQSRGLSNRIYKFRGKAWDWEVDTEFGNYDYLMYADLDMDHPEVINELNRWGVWYANTLNLDGFRLDAVKHIKFSFMRDWLGHVRAQTGKNLFAVAEYWKNDLGALENYLSKTNWTMSAFDVPLHYNLYQASNSSGNYDMRNLLNGTLVQRHPSHAVTFVDNHDTQPGEALESFVQGWFKPLAYATILTREQGYPQVFYGDYYGIPSDGVPSYRQQIDPLLKARQQYAYGPQHDYLDHPDVIGWTREGDSSHPKSGLATLITDGPGGSKRMYAGLKNAGETWYDITGNRSDTVKIGSDGWGEFHVNDGSVSIYVQK

SEQ ID NO: 36697 - protein, 480 aa, Synthetic construct
NGTMMQYFEWYLPNDGNHWNRLNSDASNLKSKGITAVWIPPAWKGASQNDVGYGAYDLYDLGEFNQKGTVRTKYGTRSQLQAAVTSLKNNGIQVYGDVVMNHKGGADATEMVRAVEVNPNNRNQEVTGEYTIEAWTRFDFPGRGNTHSSFKWRWYHFDGVDWDQSRRLNNRIYKFRGHGKAWDWEVDTENGNYDYLMYADIDMDHPEVVNELRNWGVWYTNTLGLDGFRIDAVKHIKYSFTRDWINHVRSATGKNMFAVAEFWKNDLGAIENYLQKTNWNHSVFDVPLHYNLYNASKSGGNYDMRNLFNGTVVQRHPSHAVTFVDNHDSQPEEALESFVEEWFKPLAYALTLTREQGYPSVFYGDYYGIPTHGVPAMRSKIDPILEARQKYAYGPQHDYLDHPDVIGWTREGDSSHPKSGLATLITDGPGGSKRMYAGLKNAGETWYDITGNRSDTVKIGSDGWGEFHVNDGSVSIYVQK

SEQ ID NO: 36698 - protein, 480 aa, Synthetic construct
NGTMMQYFEWYLPNDGNHWNRLNNDASNLKSKGITAVWIPPAWKGASQNDVGYGAYDLYDLGEFNQKGTVRTKYGTRSQLQAAVTSLKNNGIQVYGDVVMNHKGGADATEMVRAVEVNPNNRNQEVTGEYTIEAWTRFDFPGRGNTHSSFKWRWYHFDGVDWDQSRRLNNRIYKFRGHGKAWDWEVDTENGNYDYLMYADIDMDHPEVVNELRNWGVWYTNTLGLDGFRIDAVKHIKYSFTRDWINHVRSATGKNMFAVAEFWKNDLGAIENYLQKTNWNHSVFDVPLHYNLYNASKSGGNYDMRNIFNGTVVQRHPSHAVTFVDNHDSQPEEALESFVEEWFKPLAYALTLTREQGYPSVFYGDYYGIPTHGVPAMRSKIDPILEARQKYAYGPQHDYLDHPDVIGWTREGDSSHPKSGLATLITDGPGGSKRMYAGLKNAGETWYDITGNRSDTVKIGSDGWGEFHVNDGSVSIYVQK

SEQ ID NO: 36699 - protein, 480 aa, Synthetic construct
NGTMMQYFEWYLPNDGNHWNRLNSDASNLKSKGITAVWIPPAWKGASQNDVGYGAYDLYDLGEFNQKGTVRTKYGTRSQLQAAVTSLKNNGIQVYGDVVMNHKAGADATEMVRAVEVNPNNRNQEVTGEYTIEAWTRFDFPGRGNTHSSFKWRWYHFDGVDWDQSRRLNNRIYKFRGHGKAWDWEVDTENGNYDYLMYADIDMDHPEVVNELRNWGVWYTNTLGLDGFRIDAVKHIKYSFTRDWINHVRSATGKNMFAVAEFWKNDLGAIENYLQKTNWNHSVFDVPLHYNLYNASKSGGNYDMRNIFNGTVVQRHPSHAVTFVDNHDSQPEEALESFVEEWFKPLAYALTLTREQGYPSVFYGDYYGIPTHGVPAMRSKIDPILEARQKYAYGPQHDYLDHPDVIGWTREGDSSHPKSGLATLITDGPGGSKRMYAGLKNAGETWYDITGNRSDTVKIGSDGWGEFHVNDGSVSIYVQK

SEQ ID NO: 36700 - protein, 480 aa, Synthetic construct
NGTMMQYFEWYLPNDGNHWNRLNSDASNLKSKGITAVWIPPAWKGASQNDVGYGAYDLYDLGEFNQKGTVRTKYGTRSQLQAAVTSLKNNGIQVYGDVVMNHKGGADATEMVRAVEVNPNNRNQEVTGEYTIEAWTRFDFPGRGNTHSSFKWRWYHFDGVDWDQSRRLNNRIYKFRGHGKAWDWEVDTENGNYDYLMYADYDYDHPEVVNELRNWGVWYTNTLGLDGFRIDAVKHIKYSFTRDWINHVRSATGKNMFAVAEFWKNDLGAIENYLQKTNWNHSVFDVPLHYNLYNASKSGGNYDMRNIFNGTVVQRHPSHAVTFVDNHDSQPEEALESFVEEWFKPLAYALTLTREQGYPSVFYGDYYGIPTHGVPAMRSKIDPILEARQKYAYGPQHDYLDHPDVIGWTREGDSSHPKSGLATLITDGPGGSKRMYAGLKNAGETWYDITGNRSDTVKIGSDGWGEFHVNDGSVSIYVQK

SEQ ID NO: 36701 - protein, 480 aa, Synthetic construct
NGTMMQYFEWYLPNDGNHWNRLNSDASNLKSKGITAVWIPPAWKGASQNDVGYGAYDLYDLGEFNQKGTVRTKYGTRSQLQAAVTSLKNNGIQVYGDVVMNHKGGADATEMVRAVEVNPNNRNQEVTGEYTIEAWTRFDFPGRGNTHSSFKWRWYHFDGVDWDQSRRLNNRIYKFRGHGKAWDWEVDTENGNYDYLMYADIDMDHPEVVNELRNWGVWYTNTLGLDGFRIDAVKHIKYSFTRDWINHVRSATGKNMFAVAEFWKNDLGAIENYLQKTNWNHSVFDVPLHYNLYNASKSGGNYDMRNIFNGTVVQRHPSHAVTFVDNHDSQPEEALESFVEEWFKPLAYALTLTREQGYPSVFYGDYYGIPTHGVPAMRSKIEPILEARQKYAYGPQHDYLDHPDVIGWTREGDSSHPKSGLATLITDGPGGSKRMYAGLKNAGETWYDITGNRSDTVKIGSDGWGEFHVNDGSVSIYVQK

SEQ ID NO: 36702 - protein, 480 aa, Synthetic construct
NGTMMQYFEWYLPNDGNHWNRLNSDASNLKSKGITAVWIPPAWKGASQNDVGYGAYDLYDLGEFNQKGTVRTKYGTRSQLQAAVTSLKNNGIQVYGDVVMNHKGGADATEMVRAVEVNPNNRNQEVTGEYTIEAWTRFDFPGRGNTHSSFKWRWYHFDGVDWDQSRRLNNRIYKFRGHGKAWDWEVDTENGNYDYLMYADNDYDHPEVVNEMRNWGVWYTNTLGLDGFRIDAVKHIKYSFTRDWINHVRSATGKNMFAVAEFWKNDLGAIENYLQKTNWNHSVFDVPLHYNLYNASKSGGNYDMRNIFNGTVVQRHPSHAVTFVDNHDSQPEEALESFVEEWFKPLAYALTLTREQGYPSVFYGDYYGIPTHGVPAMRSKIDPILEARQKYAYGPQHDYLDHPDVIGWTREGDSSHPKSGLATLITDGPGGSKRMYAGLKNAGETWYDITGNRSDTVKIGSDGWGEFHVNDGSVSIYVQK

SEQ ID NO: 36703 - protein, 480 aa, Synthetic construct
NGTMMQYFEWYLPNDGNHWNRLNSDASNLKSKGITAVWIPPAWKGASQNDVGYGAYDLYDLGEFNQKGTVRTKYGTRSQLQAAVTSLKNNGIQVYGDVVFNHKGGADATEMVRAVEVNPNNRNQEVTGEYTIEAWTRFDFPGRGNTHSSFKWRWYHFDGVDWDQSRRLNNRIYKFRGHGKAWDWEVDTENGNYDYLMYADYDYDHPEVVNEVRNWGVWYTNTLGLDGFRIDAVKHIKYSFVRDWINHVRSATGKNMFAVAEFWKNDLGAIENYLQKTNWNHSVFDVPLHYNLYNASKSGGNYDMRNIFNGTVVQRHPSHAVTFVDNHDSQPEEALESFVEEWFKPLAYALTLTREQGYPSVFYGDYYGIPTHGVPAMRSKIDPILEARQKYAYGPQHDYLDHPDVIGWTREGDSSHPKSGLATLITDGPGGSKRMYAGLKNAGETWYDITGNRSDTVKIGSDGWGEFHVNDGSVSIYVQK

SEQ ID NO: 36704 - protein, 480 aa, Synthetic construct
NGTMMQYFEWYLPNDGNHWNRLNSDASNLKSKGITAVWIPPAWKGASQNDVGYGAYDLYDLGEFNQKGTVRTKYGTRSQLQAAVTSLKNNGIQVYGDVVMNHKGGADATEMVRAVEVNPNNRNQEVTGEYTIEAWTRFDFPGRGNTHSSFKWRWYHFDGVDWDQSRRLNNRIYKFRGHGKAWDWEVDTENGNYDYLMYADIDMDHPEVVNELRNWGVWYTNTLGLDGFRIDAVKHIKYSFTRDWINHVRSATGKNMFAVAEFWKNDLGAIENYLQKTNWNHSVFDVPLHYNLYNASKSGGNYDMRNIFNGTVVQRHPSHAVTFVDNHDSQPEEALESFVEEWFKPLAYALILTREQGYPSVFYGDYYGIPTHGVPAMRSKIDPILEARQKYAYGPQHDYLDHPDVIGWTREGDSSHPKSGLATLITDGPGGSKRMYAGLKNAGETWYDITGNRSDTVKIGSDGWGEFHVNDGSVSIYVQK

SEQ ID NO: 36705 - protein, 480 aa, Synthetic construct
NGTMMQYFEWYLPNDGNHWNRLNSDASNLKSKGITAVWIPPAWKGASQNDVGYGAYDLYDLGEFNQKGTVRTKYGTRSQLQAAVTSLKNNGIQVYGDVVMNHKGGADATEMVRAVEVNPNNRNQEVTGEYTIEAWTRFDFPGRGNTHSSFKWRWYHFDGVDWDQSRRLNNRIYKFRGHGKAWDWEVDTENGNYDYLMYADIDMDHPDVVNELRNWGVWYTNTLGLDGFRIDAVKHIKYSFTRDWINHVRSATGKNMFAVAEFWKNDLGAIENYLQKTNWNHSVFDVPLHYNLYNASKSGGNYDMRNIFNGTVVQRHPSHAVTFVDNHDSQPEEALESFVEEWFKPLAYALTLTREQGYPSVFYGDYYGIPTHGVPAMRSKIDPILEARQKYAYGPQHDYLDHPDVIGWTREGDSSHPKSGLATLITDGPGGSKRMYAGLKNAGETWYDITGNRSDTVKIGSDGWGEFHVNDGSVSIYVQK

SEQ ID NO: 36706 - protein, 480 aa, Synthetic construct
NGTMMQYFEWYLPNDGNHWNRLNSDASNLKSKGITAVWIPPAWKGASQNDVGYGAYDLYDLGEFNQKGTVRTKYGTRSQLQAAVTSLKNNGIQVYGDVVMNHKGGADATEMVRAVEVNPNNRNQEVTGEYTIEAWTRFDFPGRGNTHSSFKWRWYHFDGVDWDESRRLNNRIYKFRGHGKAWDWEVDTENGNYDYLMYADIDMDHPEVVNELRNWGVWYTNTLGLDGFRIDAVKHIKYSFTRDWINHVRSATGKNMFAVAEFWKNDLGAIENYLQKTNWNHSVFDVPLHYNLYNASKSGGNYDMRNIFNGTVVQRHPSHAVTFVDNHDSQPEEALESFVEEWFKPLAYALTLTREQGYPSVFYGDYYGIPTHGVPAMRSKIDPILEARQKYAYGPQHDYLDHPDVIGWTREGDSSHPKSGLATLITDGPGGSKRMYAGLKNAGETWYDITGNRSDTVKIGSDGWGEFHVNDGSVSIYVQK

SEQ ID NO: 36707 - protein, 480 aa, Synthetic construct
NGTMMQYFEWYLPNDGNHWNRLNSDASNLKSKGITAVWIPPAWKGASQNDVGYGAYDLYDLGEFNQKGTVRTKYGTRSQLQAAVTSLKNNGIQVYGDVVMNHKGGADATEMVRAVEVNPNNRNQEVTGEYTIKAWTRFDFPGRGNTHSSFKWRWYHFDGVDWDQSRRLNNRIYKFRGHGKAWDWEVDTENGNYDYLMYADIDMDHPEVVNELRNWGVWYTNTLGLDGFRIDAVKHIKYSFTRDWINHVRSATGKNMFAVAEFWKNDLGAIENYLQKTNWNHSVFDVPLHYNLYNASKSGGNYDMRNIFNGTVVQRHPSHAVTFVDNHDSQPEEALESFVEEWFKPLAYALTLTREQGYPSVFYGDYYGIPTHGVPAMRSKIDPILEARQKYAYGPQHDYLDHPDVIGWTREGDSSHPKSGLATLITDGPGGSKRMYAGLKNAGETWYDITGNRSDTVKIGSDGWGEFHVNDGSVSIYVQK

SEQ ID NO: 36708 - protein, 480 aa, Synthetic construct
NGTMMQYFEWYLPNDGNHWNRLNSDASNLKSKGITAVWIPPAWKGASQNDVGYGAYDLYDLGEFNQKGTVRTKYGTRSQLQAAVTSLKNNGIQVYGDVVMNHKGGADATEMVRAVEVNPNNRNQEVTGEYTIEAWTRFDFPGRGNTHSSFKWRWYHFDGVDWDQSRRLNNRIYKFRGHGKAWDWEVDTENGNYDYLMYADIDMDHPEVVNELRKWGVWYTNTLGLDGFRIDAVKHIKYSFTRDWINHVRSATGKNMFAVAEFWKNDLGAIENYLQKTNWNHSVFDVPLHYNLYNASKSGGNYDMRNIFNGTVVQRHPSHAVTFVDNHDSQPEEALESFVEEWFKPLAYALTLTREQGYPSVFYGDYYGIPTHGVPAMRSKIDPILEARQKYAYGPQHDYLDHPDVIGWTREGDSSHPKSGLATLITDGPGGSKRMYAGLKNAGETWYDITGNRSDTVKIGSDGWGEFHVNDGSVSIYVQK

SEQ ID NO: 36709 - protein, 480 aa, Synthetic construct
NGTMMQYFEWYLPNDGNHWNRLNSDASNLKSKGITAVWIPPAWKGASQNDVGYGAYDLYDLGEFNQKGTVRTKYGTRSQLQAAVTSLKNNGIQVYGDVVMNHKGGADATEMVRAVEVNPNNRNQEVTGEYTIEAWTRFDFPGRGNTHSSFKWRWYHFDGVDWDQSRRLNNRIYKFRGHGKAWDWEVDTENGNYDYLMYADIDMDHPEVVNELRNWGVWYTNTLGLDGFRIDAVKHIKYSFTRDWINHVRSATGKNMFAVAEFWKNDLGAIENYLQKTNWNHSVFDVPLHYNLYNASKSGGNYDMRNIFNGTVVQRHPSHAVTFVDNHDSQPEEALESFVEEWFKPLAYAFTLTREQGYPSVFYGDYYGIPTHGVPAMRSKIDPILEARQKYAYGPQHDYLDHPDVIGWTREGDSSHPKSGLATLITDGPGGSKRMYAGLKNAGETWYDITGNRSDTVKIGSDGWGEFHVNDGSVSIYVQK

SEQ ID NO: 36710 - protein, 480 aa, Synthetic construct
NGTMMQYFEWYLPNDGNHWNRLNSDASNLKSKGITAVWIPPAWKGASQNDVGYGAYDLYDLGEFNQKGTVRTKYGTRSQLQAAVTSLKNNGIQVYGDVVLNHKGGADATEMVRAVEVNPNNRNQEVTGEYTIEAWTRFDFPGRGNTHSSFKWRWYHFDGVDWDQSRRLNNRIYKFRGHGKAWDWEVDTENGNYDYLMYADYDMDHPEVVNEIRNWGVWYTNTLGLDGFRIDAVKHIKYSFTRDWINHVRSATGKNMFAVAEFWKNDLGAIENYLQKTNWNHSVFDVPLHYNLYNASKSGGNYDMRNIFNGTVVQRHPSHAVTFVDNHDSQPEEALESFVEEWFKPLAYALTLTREQGYPSVFYGDYYGIPTHGVPAMRSKIDPILEARQKYAYGPQHDYLDHPDVIGWTREGDSSHPKSGLATLITDGPGGSKRMYAGLKNAGETWYDITGNRSDTVKIGSDGWGEFHVNDGSVSIYVQK

SEQ ID NO: 36711 - protein, 480 aa, Synthetic construct
NGTMMQYFEWYLPNDGNHWNRLNSDASNLKSKGITAVWIPPAWKGASQNDVGYGAYDLYDLGEFNQKGTVRTKYGTRSQLQAAVTSLKNNGIQVYGDVVMNHKGGADATEMVRAVEVNPNNRNQEVTGEYTIEAWTRFDFPGRGNTHSSFKWRWYHFDGVDWDQSRRLNNRIYKFRGHGKAWDWEVDTENGNYDYLMYADIDMDHPEVVNELRNWGVWYTNTLGLDGFRIDAVKHIKYSFTRDWINHVRSATGKNMFAVAEFWKNDLGAIENYLQKTNWNHSVFDVPLHYNLYNASKSGGNYDMRNIFNGTVVQRHPSHAVTFVDNHDSQPEEALESFVEEWFKPLAYALTLTREQGYPSVFYGDYYGIPTHGVPSMRSKIDPILEARQKYAYGPQHDYLDHPDVIGWTREGDSSHPKSGLATLITDGPGGSKRMYAGLKNAGETWYDITGNRSDTVKIGSDGWGEFHVNDGSVSIYVQK

SEQ ID NO: 36712 - protein, 480 aa, Synthetic construct
NGTMMQYFEWYLPNDGNHWNRLNSDASNLKSKGITAVWIPPAWKGASQNDVGYGAYDLYDLGEFNQKGTVRTKYGTRSQLQAAVTSLKNNGIQVYGDVVMNHKGGADATEMVRAVEVNPNNRNQEVSGEYTIEAWTRFDFPGRGNTHSSFKWRWYHFDGVDWDQSRRLNNRIYKFRGHGKAWDWEVDTENGNYDYLMYADIDMDHPEVVNELRNWGVWYTNTLGLDGFRIDAVKHIKYSFTRDWINHVRSATGKNMFAVAEFWKNDLGAIENYLQKTNWNHSVFDVPLHYNLYNASKSGGNYDMRNIFNGTVVQRHPSHAVTFVDNHDSQPEEALESFVEEWFKPLAYALTLTREQGYPSVFYGDYYGIPTHGVPAMRSKIDPILEARQKYAYGPQHDYLDHPDVIGWTREGDSSHPKSGLATLITDGPGGSKRMYAGLKNAGETWYDITGNRSDTVKIGSDGWGEFHVNDGSVSIYVQK

SEQ ID NO: 36713 - protein, 480 aa, Bacillus sp.
NGTMMQYFEWYLPNDGNHWNRLNSDASNLKSKGITAVWIPPAWKGASQNDVGYGAYDLYDLGEFNQKGTVRTKYGTRSQLQAAVTSLKNNGIQVYGDVVMNHKGGADATEMVRAVEVNPNNRNQEVTGEYTIEAWTRFDFPGRGNTHSSFKWRWYHFDGVDWDQSRKLSNRIYKFRGHGKAWDWEVDTEFGNYDYLMYADYDMDHPEVVNELRNWGVWYTNTLGLDGFRIDAVKHIKYSFTRDWINHVRSATGKNMFAVAEFWKNDLGAIENYLQKTNWNHSVFDVPLHYNLYNASKSGGNYDMRNIFNGTVVQRHPSHAVTFVDNHDSQPEEALESFVEEWFKPLAYALTLTREQGYPSVFYGDYYGIPTHGVPAMRSKIDPILEARQKYAYGPQHDYLDHPDVIGWTREGDSSHPKSGLATLITDGPGGSKRMYAGLKNAGETWYDITGNRSDTVKIGSDGWGEFHVNDGSVSIYVQK

SEQ ID NO: 36714 - protein, 480 aa, Synthetic construct
NGTMMQYFEWYLPNDGNHWNRLNSDASNLKSKGITAVWIPPAWKGASQNDVGYGAYDLYDLGEFNQKGTVRTKYGTRSQLQAAVTSLKNNGIQVYGDVVMNHKGGADATEMVRAVEVNPNNRNQEVTGEYTIEAWTRFDFPGRGNTHSSFKWRWYHFDGVDWDQSRRLNNRIYKFRGHGKAWDWEVDTENGNYDYLMYADIDMDHPEVVNELRNWGVWYTNTLGLDGFRIDAVKHIKYSFTRDWINHVRSATGKNMFAVAEFWKNDLGAIENYLQKTNWNHSVFDVPLHYNLYNASKSGGNYDMRNIFNGTVVQRHPSHAVTFVDNHDSQPEEALESFVEEWFKPLAYALTLTRESGYPSVFYGDYYGIPTHGVPAMRSKIDPILEARQKYAYGPQHDYLDHPDVIGWTREGDSSHPKSGLATLITDGPGGSKRMYAGLKNAGETWYDITGNRSDTVKIGSDGWGEFHVNDGSVSIYVQK

SEQ ID NO: 36715 - protein, 480 aa, Synthetic construct
NGTMMQYFEWYLPNDGNHWNRLQSDASNLKSKGITAVWIPPAWKGASQNDVGYGAYDLYDLGEFNQKGTVRTKYGTRSQLQAAVTSLKNNGIQVYGDVVMNHKGGADATEMVRAVEVNPNNRNQEVTGEYTIEAWTRFDFPGRGNTHSSFKWRWYHFDGVDWDQSRRLNNRIYKFRGHGKAWDWEVDTENGNYDYLMYADIDMDHPEVVNELRNWGVWYTNTLGLDGFRIDAVKHIKYSFTRDWINHVRSATGKNMFAVAEFWKNDLGAIENYLQKTNWNHSVFDVPLHYNLYNASKSGGNYDMRNIFNGTVVQRHPSHAVTFVDNHDSQPEEALESFVEEWFKPLAYALTLTREQGYPSVFYGDYYGIPTHGVPAMRSKIDPILEARQKYAYGPQHDYLDHPDVIGWTREGDSSHPKSGLATLITDGPGGSKRMYAGLKNAGETWYDITGNRSDTVKIGSDGWGEFHVNDGSVSIYVQK

SEQ ID NO: 36716 - protein, 480 aa, Synthetic construct
NGTMMQYFEWYLPNDGNHWNRLNSDASNLKSKGITAVWIPPAWKGASQNDVGYGAYDLYDLGEFNQKGTVRTKYGTRSQLQAAVTSLKNNGIQVYGDVVMNHKGGADATEMVRAVEVNPNNRNQEVTGEYTIEAWTRFDFPGRGNTHSSFKWRWYHFDGVDWDQSRRLNNRIYKFRGHGKAWDWEVSTENGNYDYLMYADIDMDHPEVVNELRNWGVWYTNTLGLDGFRIDAVKHIKYSFTRDWINHVRSATGKNMFAVAEFWKNDLGAIENYLQKTNWNHSVFDVPLHYNLYNASKSGGNYDMRNIFNGTVVQRHPSHAVTFVDNHDSQPEEALESFVEEWFKPLAYALTLTREQGYPSVFYGDYYGIPTHGVPAMRSKIDPILEARQKYAYGPQHDYLDHPDVIGWTREGDSSHPKSGLATLITDGPGGSKRMYAGLKNAGETWYDITGNRSDTVKIGSDGWGEFHVNDGSVSIYVQK

SEQ ID NO: 36717 - protein, 480 aa, Synthetic construct
NGTMMQYFEWYLPNDGQHWNRLNSDASNLKSKGITAVWIPPAWKGASQNDVGYGAYDLYDLGEFNQKGTVRTKYGTRSQLQAAVTSLKNNGIQVYGDVVMNHKGGADATEMVRAVEVNPNNRNQEVTGEYTIEAWTRFDFPGRGNTHSSFKWRWYHFDGVDWDQSRRLNNRIYKFRGHGKAWDWEVDTENGNYDYLMYADIDMDHPEVVNELRNWGVWYTNTLGLDGFRIDAVKHIKYSFTRDWINHVRSATGKNMFAVAEFWKNDLGAIENYLQKTNWNHSVFDVPLHYNLYNASKSGGNYDMRNIFNGTVVQRHPSHAVTFVDNHDSQPEEALESFVEEWFKPLAYALTLTREQGYPSVFYGDYYGIPTHGVPAMRSKIDPILEARQKYAYGPQHDYLDHPDVIGWTREGDSSHPKSGLATLITDGPGGSKRMYAGLKNAGETWYDITGNRSDTVKIGSDGWGEFHVNDGSVSIYVQK

SEQ ID NO: 36718 - protein, 480 aa, Synthetic construct
NGTMMQYFEWYLPNDGNHWNRLNSDASNLKSKGITAVWIPPAWKGASQNDVGYGAYDLYDLGEFNQKGTVRTKYGTRSQLQAAVTSLKNNGIQVYGDVVMNHKGGADATEMVRAVEVNPNNRNQEVTGEYTIEAWTRFDFPGRGNTHSSFKWRWYHFDGVDWDQSRRLNNRIYKFRGHGKAWDWEVDTENGNYDYLMYADIDMDHPEVVNELRNWGVWYTNTLGLDGFRIDAVKHIKYSFTRDWINHVRSATGKNMFAVAEFWKNDLGAIENYLQKTNWNHSVFDVPLHYNLYNASKSGGNYDMRNIFNGTVVQRHPSHAVTFVDNHDSQPEEALESFVEEWFKPLAYALTLTREQGYPSVFYGDMYGIPTHGVPAMRSKIDPILEARQKYAYGPQHDYLDHPDVIGWTREGDSSHPKSGLATLITDGPGGSKRMYAGLKNAGETWYDITGNRSDTVKIGSDGWGEFHVNDGSVSIYVQK

SEQ ID NO: 36719 - protein, 480 aa, Synthetic construct
NGTMMQYFEWYLPNDGNHWNRLNSDASNLKSKGITAVWIPPAWKGASQNDVGYGAYDLYDLGEFNQKGTVRTKYGTRSQLQAAVTSLKNNGIQVYGDVVMNHKGGADATEMVRAVEVNPNNRNQEVTGEYTIEAWTRFDFPGRGNTHSSFKWRWYHFDGVDWDQSRRLNNRIYKFRGHGKAWDWEVDTENGNYDYLMYADIDMDHPEVVNELRNWGVWYTNTLGLDGFRIDAVKHIKYSFTRDWINHVRSATGKNMFAVAEFWKNDLGAIENYLQKTNWNHSVFDVPLHYNLYNASKSGGNYDMRNIFNGTVVQRHPSHAVTFVDNHDSQPEEALESFVQEWFKPLAYALTLTREQGYPSVFYGDYYGIPTHGVPAMRSKIDPILEARQKYAYGPQHDYLDHPDVIGWTREGDSSHPKSGLATLITDGPGGSKRMYAGLKNAGETWYDITGNRSDTVKIGSDGWGEFHVNDGSVSIYVQK

SEQ ID NO: 36720 - protein, 480 aa, Synthetic construct
NGTMMQYFEWYLPNDGNHWNRLNSDASNLKSKGITAVWIPPAWKGASQNDVGYGAYDLYDLGEFNQKGTVRTKYGTRSQLQAAVTSLKNNGIQVYGDVVMNHKGGADATEMVRAVEVNPNNRNQEVTGEYTIEAWTRFDFPGRGNTHSSFKWRWYHFDGVDWDQSRRLNNRIYKFRGHGKAWDWEVDTENGNYDYLMYADIDMDHPEVVNELRNWGVWYTNTLGLDGFRIDAVKHIKYSFTRDWINHVRSATGKNMFTVAEFWKNDLGAIENYLQKTNWNHSVFDVPLHYNLYNASKSGGNYDMRNIFNGTVVQRHPSHAVTFVDNHDSQPEEALESFVEEWFKPLAYALTLTREQGYPSVFYGDYYGIPTHGVPAMRSKIDPILEARQKYAYGPQHDYLDHPDVIGWTREGDSSHPKSGLATLITDGPGGSKRMYAGLKNAGETWYDITGNRSDTVKIGSDGWGEFHVNDGSVSIYVQK

SEQ ID NO: 36721 - protein, 480 aa, Synthetic construct
NGTMMQYFEWYLPNDGNHWNRLNSDASNLKSKGITAVWIPPAWKGASQNDVGYGAYDLYDLGEFNQKGTVRTKYGTRSQLQAAVTSLKNNGIQVYGDVVMNHKGGADATEMVRAVEVNPNNRNQEVTGEYTIEAWTRFDFPGRGNTHSSFKWRWYHFDGVDWDQSRRLNNRIYKFRGHGKAWDWEVDTENGNYDYLMYADIDMDHPEVVNELRNWGVWYTNTLGLDGFRIDAVKHIKYSFTRDWINHVRSATGKNMFAVAEFWKNDLGAIENYLQKTNWNHSVFDVPLHYNLYNASKSGGNYDMRNIFNGTVVQRHPSHAVTFVDNHDSQPEEALESFVEEWFKPLAYALTLTREQGYPSVFYGDYYGIPTHGIPAMRSKIDPILEARQKYAYGPQHDYLDHPDVIGWTREGDSSHPKSGLATLITDGPGGSKRMYAGLKNAGETWYDITGNRSDTVKIGSDGWGEFHVNDGSVSIYVQK

SEQ ID NO: 36722 - protein, 480 aa, Synthetic construct
NGTMMQYFEWYLPNDGNHWNRLNSDASNLKSKGITAVWIPPAWKGASQNDVGYGAYDLYDLGEFNQKGTVRTKYGTRSQLQAAVTSLKNNGIQVYGDVVMNHKGGADATEMVRAVEVNPNNRNQEVTGEYTIEAWTRFDFPGRGNTHSSFKWRWYHFDGVDWDQSRRLNNRIYKFRGHGKAWDWEVDTENGNYDYLMYADIDMDHPEVVNELRNWGVWYTNTLGLDGFRIDAVKHIKYSFTRDWINHVRSATGKEMFAVAEFWKNDLGAIENYLQKTNWNHSVFDVPLHYNLYNASKSGGNYDMRNIFNGTVVQRHPSHAVTFVDNHDSQPEEALESFVEEWFKPLAYALTLTREQGYPSVFYGDYYGIPTHGVPAMRSKIDPILEARQKYAYGPQHDYLDHPDVIGWTREGDSSHPKSGLATLITDGPGGSKRMYAGLKNAGETWYDITGNRSDTVKIGSDGWGEFHVNDGSVSIYVQK

SEQ ID NO: 36723 - protein, 480 aa, Synthetic construct
NGTMMQYFEWYLPNDGNHWNRLNSDASNLKSKGITAVWIPPAWKGASQNDVGYGAYDLYDLGEFNQKGTVRTKYGTRSQLQAAVTSLKNNGIQVYGDVVMNHKGGADATEMVRAVEVNPNNRNQEVTGEYTIEAWTRFDFPGRGNTHSSFKWRWYHFDGVDWDQSRRLNNRIYKFRGHGKAWDWEVDTENGNYDYLMYADIDMDHPEVVNELRNWGVWYTNTLGLDGFRIDAVKHIKYSFTRDWINHVRSATGKNMFAVAEFWKNDLGAIENYLQKTNWNHSVFDVPLHYNLYNASKSGGNYDMRNIFNGTVVQRHPSHAVTFVENHDSQPEEALESFVEEWFKPLAYALTLTREQGYPSVFYGDYYGIPTHGVPAMRSKIDPILEARQKYAYGPQHDYLDHPDVIGWTREGDSSHPKSGLATLITDGPGGSKRMYAGLKNAGETWYDITGNRSDTVKIGSDGWGEFHVNDGSVSIYVQK

SEQ ID NO: 36724 - protein, 480 aa, Synthetic construct
NGTMMQYFEWYLPNDGNHWNRLNSDASNLKSKGITAVWIPPAWKGASQNDVGYGAYDLYDLGEFNQKGTVRTKYGTRSQLQAAVTSLKNNGIQVYGDVVMNHKGGADATEMVRAVEVNPNNRNQEVTGEYTIEAWTRFDFPGRGNTHSSFKWRWYHFDGVDWDQSRRLNNRIYKFRGHGKAWDWEVDTENGNYDYLMYADIDMDHPEVVNELRNWGVWYTNTLGLDGFRIDAVKHIKFSFTRDWINHVRSATGKNMFAVAEFWKNDLGAIENYLQKTNWNHSVFDVPLHYNLYNASKSGGNYDMRNIFNGTVVQRHPSHAVTFVDNHDSQPEEALESFVEEWFKPLAYALTLTREQGYPSVFYGDYYGIPTHGVPAMRSKIDPILEARQKYAYGPQHDYLDHPDVIGWTREGDSSHPKSGLATLITDGPGGSKRMYAGLKNAGETWYDITGNRSDTVKIGSDGWGEFHVNDGSVSIYVQK

SEQ ID NO: 36725 - protein, 480 aa, Synthetic construct
NGTMMQYFEWYLPNDGNHWNRLNSDASNLKSKGITAVWIPPAWKGASQNDVGYGAYDLYDLGEFNQKGTVRTKYGTRSQLQAAVTSLKNNGIQVYGDVVMNHKGGADATEMVRAVEVNPNNRNQEVTGEYTIEAWTRFDFPGRGNTHSSFKWRWYHFDGVDWDQSRRLNNRIYKFRGHGKAWDWEVDTENGNYDYLMYADYDYDHPEVVNEIRNWGVWYTNTLGLDGFRIDAVKHIKYSFTRDWINHVRSATGKNMFAVAEFWKNDLGAIENYLQKTNWNHSVFDVPLHYNLYNASKSGGNYDMRNIFNGTVVQRHPSHAVTFVDNHDSQPEEALESFVEEWFKPLAYALTLTREQGYPSVFYGDYYGIPTHGVPAMRSKIDPILEARQKYAYGPQHDYLDHPDVIGWTREGDSSHPKSGLATLITDGPGGSKRMYAGLKNAGETWYDITGNRSDTVKIGSDGWGEFHVNDGSVSIYVQK

SEQ ID NO: 36726 - protein, 480 aa, Synthetic construct
NGTMMQYFEWYLPNDGNHWNRLNSDASNLKSKGITAVWIPPAWKGASQNDVGYGAYDLYDLGEFNQKGTVRTKYGTRSQLQAAVTSLKNNGIQVYGDVVMNHKGGADATEMVRAVEVNPNNRNQEVTGEYTIEAWTRFDFPGRGNTHSSFKWRWYHFDGVDWDQSRRLNNRIYKFRGHGKAWDWEVDTENGNYDYLMYADIDMDHPEVVNELRNWGVWYTNTLGLDGFRIDAVKHIKYSFTRDWINHVRSATGKNMFAVAEFWKNDLGAIENYLQKTNWNHSVFDVPLHYNLYNASKSGGNYDMRNIFNGTVVQRHPSHAVTFVDNHDSQPEEALESFVEEWFKPLAYALTLTREQGYPSVFYGDYYGIPTHGVPAMRSKIDPILKARQKYAYGPQHDYLDHPDVIGWTREGDSSHPKSGLATLITDGPGGSKRMYAGLKNAGETWYDITGNRSDTVKIGSDGWGEFHVNDGSVSIYVQK

SEQ ID NO: 36727 - protein, 480 aa, Synthetic construct
NGTMMQYFEWYLPNDGNHWNRLNSDASNLKSKGITAVWIPPAWKGASQNDVGYGAYDLYDLGEFNQKGTVRTKYGTRSQLQAAVTSLKNNGIQVYGDVVMNHKGGADATEMVRAVEVNPNNRNQEVTGEYTIEAWTRFDFPGRGNTHSSFKWRWYHFDGVDWDQSRRLNNRIYKFRGHGKAWDWEVDTENGNYDYLMYADIDMDHPEVVNELRNWGVWYTNTLGLDGFRIDAVKHIKYSFTRDWINHVRSATGKNMFAVAEFWKNDLGAIENYLQKTNWNHSVFDVPLHYNLYNASKSGGNYDMRNIFNGTVVQRHPSHAVTFVDNHDSQPEEALESFVEEWFKPLAYALTLTREQGYPSVFYGDYYGIPTHGVPAMRSKIDPILEARKKYAYGPQHDYLDHPDVIGWTREGDSSHPKSGLATLITDGPGGSKRMYAGLKNAGETWYDITGNRSDTVKIGSDGWGEFHVNDGSVSIYVQK

SEQ ID NO: 36728 - protein, 480 aa, Synthetic construct
NGTMMQYFEWYLPNDGNHWNRLNSDASNLKSKGITAVWIPPAWKGASQNDVGYGAYDLYDLGEFNQKGTVRTKYGTRSQLQAAVTSLKNNGIQVYGDVVMNHKGGADATEMVRAVEVNPNNRNQEVTGEYTIEAWTRFDFPGRGNTHSSFKWRWYHFDGVDWDQSRRLNNRIYKFRGHGKAWDWEVDTENGNYDYLMYADIDMDHPEVVNELRNWGVWYTNTLGLDGFRIDAVKHIKYSFTRDWINHVRSATGKNMFAVAEFWQNDLGAIENYLQKTNWNHSVFDVPLHYNLYNASKSGGNYDMRNIFNGTVVQRHPSHAVTFVDNHDSQPEEALESFVEEWFKPLAYALTLTREQGYPSVFYGDYYGIPTHGVPAMRSKIDPILEARQKYAYGPQHDYLDHPDVIGWTREGDSSHPKSGLATLITDGPGGSKRMYAGLKNAGETWYDITGNRSDTVKIGSDGWGEFHVNDGSVSIYVQK

SEQ ID NO: 36729 - protein, 480 aa, Bacillus sp.
NGTMMQYFEWYLPNDGNHWNRLNSDASNLKSKGITAVWIPPAWKGASQNDVGYGAYDLYDLGEFNQKGTVRTKYGTRSQLQAAVTSLKNNGIQVYGDVVMNHKGGADATEMVRAVEVNPNNRNQEVTGEYTIEAWTRFDFPGRGNTHSSFKWRWYHFDGVDWDQSRQISNRIYKFRGHGKAWDWEVDTEFGNYDYLMYADYDMDHPEVVNELRNWGVWYTNTLGLDGFRIDAVKHIKYSFTRDWINHVRSATGKNMFAVAEFWKNDLGAIENYLQKTNWNHSVFDVPLHYNLYNASKSGGNYDMRNIFNGTVVQRHPSHAVTFVDNHDSQPEEALESFVEEWFKPLAYALTLTREQGYPSVFYGDYYGIPTHGVPAMRSKIDPILEARQKYAYGPQHDYLDHPDVIGWTREGDSSHPKSGLATLITDGPGGSKRMYAGLKNAGETWYDITGNRSDTVKIGSDGWGEFHVNDGSVSIYVQK

SEQ ID NO: 36730 - protein, 480 aa, Synthetic construct
NGTMMQYFEWYLPNDGNHWNRLNSDASNLKSKGITAVWIPPAWKGASQNDVGYGAYDLYDLGEFNQKGTVRTKYGTRSQLQAAVTSLKNNGIQVYGDVVMNHKGGADATEMVRAVEVNPNNRNQEVTGEYTIEAWTRFDFPGRGNTHSSFKWRWYHFDGVDWDQSRRLNNRIYKFRGHGKAWDWEVDTENGNYDYLMYADIDMDHPEVVNELRNWGVWYTNTLGLDGFRIDAVKHIKYSFTRDWINHVRSATGKNMFAVAEFWKNDLGAIENYLQKTNWNQSVFDVPLHYNLYNASKSGGNYDMRNIFNGTVVQRHPSHAVTFVDNHDSQPEEALESFVEEWFKPLAYALTLTREQGYPSVFYGDYYGIPTHGVPAMRSKIDPILEARQKYAYGPQHDYLDHPDVIGWTREGDSSHPKSGLATLITDGPGGSKRMYAGLKNAGETWYDITGNRSDTVKIGSDGWGEFHVNDGSVSIYVQK

SEQ ID NO: 36731 - protein, 480 aa, Synthetic construct
NGTMMQYFEWYLPNDGNHWNRLNSDASNLKSKGITAVWIPPAWKGASQNDVGYGAYDLYDLGEFNQKGTVRTKYGTRSQLQAAVTSLKNNGIQVYGDVVMNHKGGADATEMVRAVEVNPNNRNQEVTGEYTIEAWTRFDFPGRGNTHSSFKWRWYHFDGVDWDQSRRLNNRIYKFRGHGKAWDWEVDTENGNYDYLMYADLDMDHPEVVNEVRNWGVWYTNTLGLDGFRIDAVKHIKYSFLRDWINHVRSATGKNMFAVAEFWKNDLGAIENYLQKTNWNHSVFDVPLHYNLYNASKSGGNYDMRNIFNGTVVQRHPSHAVTFVDNHDSQPEEALESFVEEWFKPLAYALTLTREQGYPSVFYGDYYGIPTHGVPAMRSKIDPILEARQKYAYGPQHDYLDHPDVIGWTREGDSSHPKSGLATLITDGPGGSKRMYAGLKNAGETWYDITGNRSDTVKIGSDGWGEFHVNDGSVSIYVQK

SEQ ID NO: 36732 - protein, 480 aa, Synthetic construct
NGTMMQYFEWYLPNDGNHWNRLNSDASNLKSKGITAVWIPPAWKGASQNDVGYGAYDLYDLGEFNQKGTVRTKYGTRSQLQAAVTSLKNNGIQVYGDVVMNHKGGADATEMVRAVEVNPNNRNQEVTGEYTIEAWTRFDFPGRGNTHSSFKWRWYHFDGVDWDQSRRLNNRIYKFRGHGKAWDWEVDTENGNYDYLMYADIDMDHPEVVNELRNWGVWYTNTLGLDGFRIDAVKHIKYSFTRDWINHVRSATGKNMFAVAEYWKNDLGAIENYLQKTNWNHSVFDVPLHYNLYNASKSGGNYDMRNIFNGTVVQRHPSHAVTFVDNHDSQPEEALESFVEEWFKPLAYALTLTREQGYPSVFYGDYYGIPTHGVPAMRSKIDPILEARQKYAYGPQHDYLDHPDVIGWTREGDSSHPKSGLATLITDGPGGSKRMYAGLKNAGETWYDITGNRSDTVKIGSDGWGEFHVNDGSVSIYVQK

SEQ ID NO: 36733 - protein, 480 aa, Synthetic construct
NGTMMQYFEWYLPNDGNHWNRLNSDASNLKSKGITAVWIPPAWKGASQNDVGYGAYDLYDLGEFNQKGTVRTKYGTRSQLQAAVTSLKNNGIQVYGDVVMNHKGGADATEMVRAVEVNPNNRNQEVTGEYTIEAWTRFDFPGRGNTHSSFKWRWYHFDGVDWDQSRRISNRIYKFRGHGKAWDWEVDTEFGNYDYLMYADYDMDHPEVVNELRNWGVWYTNTLGLDGFRIDAVKHIKYSFTRDWINHVRSATGKNMFAVAEFWKNDLGAIENYLQKTNWNHSVFDVPLHYNLYNASKSGGNYDMRNIFNGTVVQRHPSHAVTFVDNHDSQPEEALESFVEEWFKPLAYALTLTREQGYPSVFYGDYYGIPTHGVPAMRSKIDPILEARQKYAYGPQHDYLDHPDVIGWTREGDSSHPKSGLATLITDGPGGSKRMYAGLKNAGETWYDITGNRSDTVKIGSDGWGEFHVNDGSVSIYVQK

SEQ ID NO: 36734 - protein, 480 aa, Synthetic construct
NGTMMQYFEWYLPNDGNHWNRLNSDASNLKSKGITAVWIPPAWKGASQNDVGYGAYDLYDLGEFNQKGTVRTKYGTRSQLQAAVTSLKNNGIQVYGDVVMNHKGGADATEMVTAVEVNPNNRNQEVTGEYTIEAWTRFDFPGRGNTHSSFKWRWYHFDGVDWDQSRRLNNRIYKFRGHGKAWDWEVDTENGNYDYLMYADIDMDHPEVVNELRNWGVWYTNTLGLDGFRIDAVKHIKYSFTRDWINHVRSATGKNMFAVAEFWKNDLGAIENYLQKTNWNHSVFDVPLHYNLYNASKSGGNYDMRNIFNGTVVQRHPSHAVTFVDNHDSQPEEALESFVEEWFKPLAYALTLTREQGYPSVFYGDYYGIPTHGVPAMRSKIDPILEARQKYAYGPQHDYLDHPDVIGWTREGDSSHPKSGLATLITDGPGGSKRMYAGLKNAGETWYDITGNRSDTVKIGSDGWGEFHVNDGSVSIYVQK

SEQ ID NO: 36735 - protein, 480 aa, Synthetic construct
NGTMMQYFEWYLPNDGNHWNRLNSDASNLKSKGITAVWIPPAWKGASQNDVGYGAYDLYDLGEFNQKGTVRTKYGTRSQLQAAVTSLKNNGIQVYGDVVMNHKGGADATEMVRAVEVNPNNRNQEVTGEYTIEAWTRFDFPGRGNTHSSFKWRWYHFDGVDWDQSRRLNNRIYKFRGHGKAWDWEVDTENGNYDYLMYADIDMDHPEVVNELRNWGVWYTNTLGLDGFRIDAVKHIKYSFTRDWINHVRSATGKNMFAVAEFWKNDLGAIENYLNKTNWNHSVFDVPLHYNLYNASKSGGNYDMRNIFNGTVVQRHPSHAVTFVDNHDSQPEEALESFVEEWFKPLAYALTLTREQGYPSVFYGDYYGIPTHGVPAMRSKIDPILEARQKYAYGPQHDYLDHPDVIGWTREGDSSHPKSGLATLITDGPGGSKRMYAGLKNAGETWYDITGNRSDTVKIGSDGWGEFHVNDGSVSIYVQK

SEQ ID NO: 36736 - protein, 480 aa, Synthetic construct
NGTMMQYFEWYLPNDGNHWNRLNSDASNLKSKGITAVWIPPAWKGASQNDVGYGAYDLYDLGEFNQKGTVRTKYGTRSQLQAAVTSLKNNGIQVYGDVVMNHKGGADATEMVRAVEVNPNNRNQEVTGEYTIEAWTRFDFPGRGNTHSSFKWRWYHFDGVDWDQSRRLNNRIYKFRGHGKAWDWEVDTENGNYDYLMYADIDMDHPEVVNELRNWGVWYTNTLGLDGFRIDAVKHIKYSFLRDWINHVRSATGKNMFAVAEFWKNDLGAIENYLQKTNWNHSVFDVPLHYNLYNASKSGGNYDMRNIFNGTVVQRHPSHAVTFVDNHDSQPEEALESFVEEWFKPLAYALTLTREQGYPSVFYGDYYGIPTHGVPAMRSKIDPILEARQKYAYGPQHDYLDHPDVIGWTREGDSSHPKSGLATLITDGPGGSKRMYAGLKNAGETWYDITGNRSDTVKIGSDGWGEFHVNDGSVSIYVQK

SEQ ID NO: 36737 - protein, 480 aa, Synthetic construct
NGTMMQYFEWYLPNDGNHWNRLNSDASNLKSKGITAVWIPPAWKGASQNDVGYGAYDLYDLGEFNQKGTVRTKYGTRSQLQAAVTSLKNNGIQVYGDVVLNHKGGADATEMVRAVEVNPNNRNQEVTGEYTIEAWTRFDFPGRGNTHSSFKWRWYHFDGVDWDQSRRLNNRIYKFRGHGKAWDWEVDTENGNYDYLMYADYDMDHPEVVNELRNWGVWYTNTLGLDGFRIDAVKHIKYSFTRDWINHVRSATGKNMFAVAEFWKNDLGAIENYLQKTNWNHSVFDVPLHYNLYNASKSGGNYDMRNIFNGTVVQRHPSHAVTFVDNHDSQPEEALESFVEEWFKPLAYALTLTREQGYPSVFYGDYYGIPTHGVPAMRSKIDPILEARQKYAYGPQHDYLDHPDVIGWTREGDSSHPKSGLATLITDGPGGSKRMYAGLKNAGETWYDITGNRSDTVKIGSDGWGEFHVNDGSVSIYVQK

SEQ ID NO: 36738 - protein, 480 aa, Synthetic construct
NGTMMQYFEWYLPNDGNHWNRLNSDASNLKSKGITAVWIPPAWKGASQNDVGYGAYDLYDLGEFNQKGTVRTKYGTRSQLQAAVTSLKNNGIQVYGDVVMNHKGGADATEMVRAVEVNPNNRNQEVTGEYTIEAWTRFDFPGRGNTHSSFKWRWYHFDGVDWDQSRRLNNRIYKFRGHGKAWDWEVDTENGNYDYLMYADIDMDHPEVVNELRNWGVWYTNTLGLDGFRIDAVKHIKYSFTRDWINHVRSATGKNMFAVAEFWKNDLGAIENYLQKTNWNHSVFDVPLHYNLYNASKSGGNYDMRNIFNGTVVQRHPSHAVTFVDNHDSQPEQALESFVEEWFKPLAYALTLTREQGYPSVFYGDYYGIPTHGVPAMRSKIDPILEARQKYAYGPQHDYLDHPDVIGWTREGDSSHPKSGLATLITDGPGGSKRMYAGLKNAGETWYDITGNRSDTVKIGSDGWGEFHVNDGSVSIYVQK

SEQ ID NO: 36739 - protein, 480 aa, Bacillus sp.
NGTMMQYFEWYLPNDGNHWNRLNSDASNLKSKGITAVWIPPAWKGASQNDVGYGAYDLYDLGEFNQKGTVRTKYGTRSQLQAAVTSLKNNGIQVYGDVVMNHKGGADATEMVRAVEVNPNNRNQEVTGEYTIEAWTRFDFPGRGNTHSSFKWRWYHFDGVDWDQSRDISNRIYKFRGHGKAWDWEVDTEFGNYDYLMYADYDMDHPEVVNELRNWGVWYTNTLGLDGFRIDAVKHIKYSFTRDWINHVRSATGKNMFAVAEFWKNDLGAIENYLQKTNWNHSVFDVPLHYNLYNASKSGGNYDMRNIFNGTVVQRHPSHAVTFVDNHDSQPEEALESFVEEWFKPLAYALTLTREQGYPSVFYGDYYGIPTHGVPAMRSKIDPILEARQKYAYGPQHDYLDHPDVIGWTREGDSSHPKSGLATLITDGPGGSKRMYAGLKNAGETWYDITGNRSDTVKIGSDGWGEFHVNDGSVSIYVQK

SEQ ID NO: 36740 - protein, 480 aa, Synthetic construct
NGTMMQYFEWYLPNDGNHWNRLNSDASNLKSKGITAVWIPPAWKGASQNDVGYGAYDLYDLGEFNQKGTVRTKYGTRSQLQAAVTSLKNNGIQVYGDVVMNHKGGADATEMVRAVEVNPNNRNQEVTGEYTIEAWTRFDFPGRGNTHSSFKWRWYHFDGVDWDQSRRLNNRIYKFRGHGKAWDWEVDTENGNYDYLMYADYDYDHPEVVNEQRNWGVWYTNTLGLDGFRIDAVKHIKYSFTRDWINHVRSATGKNMFAVAEFWKNDLGAIENYLQKTNWNHSVFDVPLHYNLYNASKSGGNYDMRNIFNGTVVQRHPSHAVTFVDNHDSQPEEALESFVEEWFKPLAYALTLTREQGYPSVFYGDYYGIPTHGVPAMRSKIDPILEARQKYAYGPQHDYLDHPDVIGWTREGDSSHPKSGLATLITDGPGGSKRMYAGLKNAGETWYDITGNRSDTVKIGSDGWGEFHVNDGSVSIYVQK

SEQ ID NO: 36741 - protein, 478 aa, unidentified
NGTIMQYFEWNVPNDGQHWNRLHNNAQNLKNAGITAIWIPPAWKGTSQNDVGYGAYDLYDLGEFNQKGTVRTKYGTKAELERAIRSLKANGIQVYGDVVMNHKGGADFTERVQAVEVNPQNRNQEVSGTYQIEAWTGFNFPGRGNQHSSFKWRWYHFDGTDWDQSRQLANRIYKFRGKAWDWEVDTENGNYDYLMYADVDMDHPEVINELNRWGVWYANTLNLDGFRLDAVKHIKFSFMRDWLGHVRGQTGKNLFAVAEYWKNDLGALENYLSKTNWTMSAFDVPLHYNLYQASNSSGNYDMRNLLNGTLVQRHPSHAVTFVDNHDTQPGEALESFVQGWFKPLAYATILTREQGYPQVFYGDYYGIPSDGVPSYRQQIDPLLKARQQYAYGPQHDYLDHPDVIGWTREGDSSHPKSGLATLITDGPGGSKRMYAGLKNAGETWYDITGNRSDTVKIGSDGWGEFHVNDGSVSIYVQK

SEQ ID NO: 36742 - protein, 480 aa, Synthetic construct
NGTMMQYFEWYLPNDGNHWNRLNSDASNLSSKGITAVWIPPAWKGASQNDVGYGAYDLYDLGEFNQKGTVRTKYGTRSQLQAAVTSLKNNGIQVYGDVVMNHKGGADATEMVRAVEVNPNNRNQEVTGEYTIEAWTRFDFPGRGNTHSSFKWRWYHFDGVDWDQSRRLNNRIYKFRGHGKAWDWEVDTENGNYDYLMYADIDMDHPEVVNELRNWGVWYTNTLGLDGFRIDAVKHIKYSFTRDWINHVRSATGKNMFAVAEFWKNDLGAIENYLQKTNWNHSVFDVPLHYNLYNASKSGGNYDMRNIFNGTVVQRHPSHAVTFVDNHDSQPEEALESFVEEWFKPLAYALTLTREQGYPSVFYGDYYGIPTHGVPAMRSKIDPILEARQKYAYGPQHDYLDHPDVIGWTREGDSSHPKSGLATLITDGPGGSKRMYAGLKNAGETWYDITGNRSDTVKIGSDGWGEFHVNDGSVSIYVQK

SEQ ID NO: 36743 - protein, 480 aa, Synthetic construct
NGTMMQYFEWYLPNDGNHWNRLNSDASNLKSKGITAVWIPPAWKGASQNDVGYGAYDLYDLGEFNQKGTVRTKYGTRSQLQAAVTSLKNNGIQVYGDVVMNHKGGADATEMVRAVEVNPNNRNQEVTGEYTIEAWTRFDFPGRGNTHSSFKWRWYHFDGVDWDQSRRLNNRIYKFRGHGKAWDWEVDTENGNYDYLMYADIDMDHPEVVNELRNWGVWYTNTLGLDGFRIDAVKHIKYSFTRDWINHVRSATGKNMFAVAEFWKNDLGAIENYLQKTNWNHSVFDVPLHYNLYNASKSGGNYDMRNIFNGTVVQRHPSHAVTFVDNHDSQPEEALESFVETWFKPLAYALTLTREQGYPSVFYGDYYGIPTHGVPAMRSKIDPILEARQKYAYGPQHDYLDHPDVIGWTREGDSSHPKSGLATLITDGPGGSKRMYAGLKNAGETWYDITGNRSDTVKIGSDGWGEFHVNDGSVSIYVQK

SEQ ID NO: 36744 - protein, 480 aa, Synthetic construct
NGTMMQYFEWYLPNDGNHWNRLNSDASNLKSKGITAVWIPPAWKGASQNDVGYGAYDLYDLGEFNQKGTVRTKYGTRSQLQAAVTSLKNNGIQVYGDVVMNHKGGADATEMVRAVEVNPNNRNQEVTGEYTIEAWTRFDFPGRGNTHSSFKWRWYHFDGVDWDQSRRYSNRIYKFRGHGKAWDWEVDTENGNYDYLMYADIDMDHPEVVNELRNWGVWYTNTLGLDGFRIDAVKHIKYSFTRDWINHVRSATGKNMFAVAEFWKNDLGAIENYLQKTNWNHSVFDVPLHYNLYNASKSGGNYDMRNIFNGTVVQRHPSHAVTFVDNHDSQPEEALESFVEEWFKPLAYALTLTREQGYPSVFYGDYYGIPTHGVPAMRSKIDPILEARQKYAYGPQHDYLDHPDVIGWTREGDSSHPKSGLATLITDGPGGSKRMYAGLKNAGETWYDITGNRSDTVKIGSDGWGEFHVNDGSVSIYVQK

SEQ ID NO: 36745 - protein, 480 aa, Synthetic construct
NGTMMQYFEWYLPNDGNHWNRLNSDASNLKSKGITAVWIPPAWKGVSQNDVGYGAYDLYDLGEFNQKGTVRTKYGTRSQLQAAVTSLKNNGIQVYGDVVMNHKGGADATEMVRAVEVNPNNRNQEVTGEYTIEAWTRFDFPGRGNTHSSFKWRWYHFDGVDWDQSRRISNRIYKFRGHGKAWDWEVDTEFGNYDYLMYADYDMDHPEVVNELRNWGVWYTNTLGLDGFRIDAVKHIKYSFTRDWINHVRSATGKNMFAVAEFWKNDLGAIENYLQKTNWNHSVFDVPLHYNLYNASKSGGNYDMRNIFNGTVVQRHPSHAVTFVDNHDSQPEEALESFVEEWFKPLAYALTLTREQGYPSVFYGDYYGIPTHGVPAMRSKIDPILEARQKYAYGPQHDYLDHPDVIGWTREGDSSHPKSGLATLITDGPGGSKRMYAGLKNAGETWYDITGNRSDTVKIGSDGWGEFHVNDGSVSIYVQK

SEQ ID NO: 36746 - protein, 480 aa, Synthetic construct
NGTMMQYFEWYLPNDGNHWNRLNSDASNLKSKGITAVWIPPAWKGASQNDVGYGAYDLYDLGEFNQKGTVRTKYGTRSQLQAAVTSLKNNGIQVYGDVVMNHKGGADATEMVRAVEVNPNNRNQEVTGEYTIEAWTRFDFPGRGNTHSSFKWRWYHFDGVDWDQSRRLSNRIYKFRGHGKAWDWEVDTENGNYDYLMYADIDMDHPEVVNELRNWGVWYTNTLGLDGFRIDAVKHIKYSFTRDWINHVRSATGKNMFAVAEFWKNDLGAIENYLQKTNWNHSVFDVPLHYNLYNASKSGGNYDMRNIFNGTVVQRHPSHAVTFVDNHDSQPEEALESFVEEWFKPLAYALTLTREQGYPSVFYGDYYGIPTHGVPAMRSKIDPILEARQKYAYGPQHDYLDHPDVIGWTREGDSSHPKSGLATLITDGPGGSKRMYAGLKNAGETWYDITGNRSDTVKIGSDGWGEFHVNDGSVSIYVQK

SEQ ID NO: 36747 - protein, 480 aa, Synthetic construct
NGTMMQYFEWYLPNDGNHWNRLNSDASNLKSKGITAVWIPPAWKGASQNDVGYGAYDLYDLGEFNQKGTVRTKYGTRSQLQAAVTSLKNNGIQVYGDVVMNHKGGADATEMVRAVEVNPNNRNQEVTGEYTIEAWTRFDFPGRGNTHSSFKWRWYHFDGVDWDQSRRLNNRIFKFRGHGKAWDWEVDTENGNYDYLMYADIDMDHPEVVNELRNWGVWYTNTLGLDGFRIDAVKHIKYSFTRDWINHVRSATGKNMFAVAEFWKNDLGAIENYLQKTNWNHSVFDVPLHYNLYNASKSGGNYDMRNIFNGTVVQRHPSHAVTFVDNHDSQPEEALESFVEEWFKPLAYALTLTREQGYPSVFYGDYYGIPTHGVPAMRSKIDPILEARQKYAYGPQHDYLDHPDVIGWTREGDSSHPKSGLATLITDGPGGSKRMYAGLKNAGETWYDITGNRSDTVKIGSDGWGEFHVNDGSVSIYVQK

SEQ ID NO: 36748 - protein, 480 aa, Synthetic construct
NGTMMQYFEWYLPNDGNHWNRLNSDASNLKSKGITAVWIPPAWKGASQNDVGYGAYDLYDLGEFNQKGTVRTKYGTRSQLQAAVTSLKNNGIQVYGDVVLNHKGGADATEMVRAVEVNPNNRNQEVTGEYTIEAWTRFDFPGRGNTHSSFKWRWYHFDGVDWDQSRRLNNRIYKFRGHGKAWDWEVDTENGNYDYLMYADFDMDHPEVVNELRNWGVWYTNTLGLDGFRIDAVKHIKYSFTRDWINHVRSATGKNMFAVAEFWKNDLGAIENYLQKTNWNHSVFDVPLHYNLYNASKSGGNYDMRNIFNGTVVQRHPSHAVTFVDNHDSQPEEALESFVEEWFKPLAYALTLTREQGYPSVFYGDYYGIPTHGVPAMRSKIDPILEARQKYAYGPQHDYLDHPDVIGWTREGDSSHPKSGLATLITDGPGGSKRMYAGLKNAGETWYDITGNRSDTVKIGSDGWGEFHVNDGSVSIYVQK

SEQ ID NO: 36749 - protein, 480 aa, Synthetic construct
NGTMMQYFEWYLPNDGNHWNRLNSDASNLKSKGITAVWIPPAWKGASQNDVGYGAYDLYDLGEFNQKGTVRTKYGTRSQLQAAITSLKNNGIQVYGDVVMNHKGGADATEMVRAVEVNPNNRNQEVTGEYTIEAWTRFDFPGRGNTHSSFKWRWYHFDGVDWDQSRRLNNRIYKFRGHGKAWDWEVDTENGNYDYLMYADIDMDHPEVVNELRNWGVWYTNTLGLDGFRIDAVKHIKYSFTRDWINHVRSATGKNMFAVAEFWKNDLGAIENYLQKTNWNHSVFDVPLHYNLYNASKSGGNYDMRNIFNGTVVQRHPSHAVTFVDNHDSQPEEALESFVEEWFKPLAYALTLTREQGYPSVFYGDYYGIPTHGVPAMRSKIDPILEARQKYAYGPQHDYLDHPDVIGWTREGDSSHPKSGLATLITDGPGGSKRMYAGLKNAGETWYDITGNRSDTVKIGSDGWGEFHVNDGSVSIYVQK

SEQ ID NO: 36750 - protein, 480 aa, Synthetic construct
NGTMMQYFEWYLPNDGNHWNRLNSDASNLKSKGITAVWIPPAWKGASQNDVGYGAYDLYDLGEFNQKGTVRTKYGTRSQLQAAVTSLKNNGIQVYGDVVMNHKGGADATEMVRAVEVNPNNRNQEVTGEYTIEAWTRFDFPGRGNTHSSFKWRWYHFDGVDWDQSRRLNNRIYKFRGHGKAWDWEVDTENGNYDYLMYADIDMDHPEVVNELRNWGVWYTNTLGLDGFRIDAVKHIKYSFTRDWINHVRSATGKNMFAVAEFWKNDLGAIENYLQKTNWNHSVFDVPLHYNLYNASKSGGNYDMRNIFNGTVVQRHPSHAVTFVDNHDSQPEEALESFVEEWFKPLAYALTLTREQGYPSVFYGDYYGIPTHGVPAMKSKIDPILEARQKYAYGPQHDYLDHPDVIGWTREGDSSHPKSGLATLITDGPGGSKRMYAGLKNAGETWYDITGNRSDTVKIGSDGWGEFHVNDGSVSIYVQK

SEQ ID NO: 36751 - protein, 480 aa, Synthetic construct
NGTMMQYFEWYLPNDGNHWNRLNSDASNLKSKGITAVWIPPAWKGASQNDVGYGAYDLYDLGEFNQKGTVRTKYGTRSQLQAAVTSLKNNGIQVYGDVVMNHKGGADATEMVRAVEVNPNNRNQEVTGEYTIEAWTRFDFPGRGNTHSSFKWRWYHFDGVDWDQSRRLNNRIYKFRGHGKAWDWEVDTENGNYDYLMYADIDYDHPEVVNELRNWGVWYTNTLGLDGFRIDAVKHIKYSFTRDWINHVRSATGKNMFAVAEFWKNDLGAIENYLQKTNWNHSVFDVPLHYNLYNASKSGGNYDMRNIFNGTVVQRHPSHAVTFVDNHDSQPEEALESFVEEWFKPLAYALTLTREQGYPSVFYGDYYGIPTHGVPAMRSKIDPILEARQKYAYGPQHDYLDHPDVIGWTREGDSSHPKSGLATLITDGPGGSKRMYAGLKNAGETWYDITGNRSDTVKIGSDGWGEFHVNDGSVSIYVQK

SEQ ID NO: 36752 - protein, 480 aa, Synthetic construct
NGTMMQYFEWYLPNDGNHWNRLNSDASNLKSKGITAVWIPPAWKGASQNDVGYGAYDLYDLGEFNQKGTVRTKYGTRSQLQAAVTSLKNNGIQVYGDVVMNHKGGADATEMVRAVEVNPNNRNQEVTGEYTIEAWTRFDFPGRGNTHSSFKWRWYHFDGVDWDQSRRLNNRIYKFRGHGKAWDWEVDTENGNYDYLMYADFDYDHPEVVNEVRNWGVWYTNTLGLDGFRIDAVKHIKYSFTRDWINHVRSATGKNMFAVAEFWKNDLGAIENYLQKTNWNHSVFDVPLHYNLYNASKSGGNYDMRNIFNGTVVQRHPSHAVTFVDNHDSQPEEALESFVEEWFKPLAYALTLTREQGYPSVFYGDYYGIPTHGVPAMRSKIDPILEARQKYAYGPQHDYLDHPDVIGWTREGDSSHPKSGLATLITDGPGGSKRMYAGLKNAGETWYDITGNRSDTVKIGSDGWGEFHVNDGSVSIYVQK

SEQ ID NO: 36753 - protein, 480 aa, Synthetic construct
NGTMMQYFEWYLPNDGNHWNRLNSDASNLKSKGITAVWIPPAWKGASQNDVGYGAYDLYDLGEFNQKGTVRTKYGTRSQLQAAVTSLKNNGIQVYGDVVMNHKGGADATEMVRAVEVNPNNRNQEVTGEYTIEAWTRFDFPGRGNTHSSFKWRWYHFDGVDWDQSRRLNNRIYKFRGHGKAWDWEVDTENGNYDYLMYADIDMDHPEVVNELRNWGVWYANTLGLDGFRIDAVKHIKYSFTRDWINHVRSATGKNMFAVAEFWKNDLGAIENYLQKTNWNHSVFDVPLHYNLYNASKSGGNYDMRNIFNGTVVQRHPSHAVTFVDNHDSQPEEALESFVEEWFKPLAYALTLTREQGYPSVFYGDYYGIPTHGVPAMRSKIDPILEARQKYAYGPQHDYLDHPDVIGWTREGDSSHPKSGLATLITDGPGGSKRMYAGLKNAGETWYDITGNRSDTVKIGSDGWGEFHVNDGSVSIYVQK

SEQ ID NO: 36754 - protein, 480 aa, Synthetic construct
NGTMMQYFEWYLPNDGNHWNRLNSDASNLKSKGITAVWIPPAWKGASQNDVGYGAYDLYDLGEFNQKGTVRTKYGTRSQLQAAVTSLKNNGIQVYGDVVMNHKGGADATEMVRAVEVNPNNRNQEVTGEYTIEAWTRFDFPGRGNTHSSFKWRWYHFDGVDWDQSRRLNNRIYKFRGHGKAWDWEVDTENGNYDYLMYADYDYDHPEVVNEVRNWGVWYTNTLGLDGFRIDAVKHIKYSFVRDWINHVRSATGKNMFAVAEFWKNDLGAIENYLQKTNWNHSVFDVPLHYNLYNASKSGGNYDMRNIFNGTVVQRHPSHAVTFVDNHDSQPEEALESFVEEWFKPLAYALTLTREQGYPSVFYGDYYGIPTHGVPAMRSKIDPILEARQKYAYGPQHDYLDHPDVIGWTREGDSSHPKSGLATLITDGPGGSKRMYAGLKNAGETWYDITGNRSDTVKIGSDGWGEFHVNDGSVSIYVQK

SEQ ID NO: 36755 - protein, 480 aa, Synthetic construct
NGTMMQYFEWYLPNDGNHWNRLNSDASNLKSKGITAVWIPPAWKGASQNDVGYGAYDLYDLGEFNQKGTVRTKYGTRSQLQAAVTSLKNNGIQVYGDVVMNHKGGADATEMVRAVEVNPNNRNQEVTGEYTIEAWTRFDFPGRGNTHSSFKWRWYHFDGVDWDQSRRLNNRIYKFRGHGKAWDWEVDTENGNYDYLMYADIDMDHPEVVNELRNWGVWYTNELGLDGFRIDAVKHIKYSFTRDWINHVRSATGKNMFAVAEFWKNDLGAIENYLQKTNWNHSVFDVPLHYNLYNASKSGGNYDMRNIFNGTVVQRHPSHAVTFVDNHDSQPEEALESFVEEWFKPLAYALTLTREQGYPSVFYGDYYGIPTHGVPAMRSKIDPILEARQKYAYGPQHDYLDHPDVIGWTREGDSSHPKSGLATLITDGPGGSKRMYAGLKNAGETWYDITGNRSDTVKIGSDGWGEFHVNDGSVSIYVQK

SEQ ID NO: 36756 - protein, 480 aa, Synthetic construct
NGTMMQYFEWYLPNDGNHWNRLNSDASNLKSKGITAVWIPPAWKGASQNDVGYGAYDLYDLGEFNQKGTVRTKYGTRSQLQAAVTSLKSNGIQVYGDVVMNHKGGADATEMVRAVEVNPNNRNQEVTGEYTIEAWTRFDFPGRGNTHSSFKWRWYHFDGVDWDQSRRLNNRIYKFRGHGKAWDWEVDTENGNYDYLMYADIDMDHPEVVNELRNWGVWYTNTLGLDGFRIDAVKHIKYSFTRDWINHVRSATGKNMFAVAEFWKNDLGAIENYLQKTNWNHSVFDVPLHYNLYNASKSGGNYDMRNIFNGTVVQRHPSHAVTFVDNHDSQPEEALESFVEEWFKPLAYALTLTREQGYPSVFYGDYYGIPTHGVPAMRSKIDPILEARQKYAYGPQHDYLDHPDVIGWTREGDSSHPKSGLATLITDGPGGSKRMYAGLKNAGETWYDITGNRSDTVKIGSDGWGEFHVNDGSVSIYVQK

SEQ ID NO: 36757 - protein, 480 aa, Synthetic construct
NGTMMQYFEWYLPNDGNHWNRLNSDASNLKSKGITAVWIPPAWKGASQNDVGYGAYDLYDLGEFNQKGTVRTKYGTRSQLQAAVTSLKNNGIQVYGDVVMNHKGGADATEMVRAVEVNPNNRNQEVTGEYTIEAWTRFDFPGRGNTHSSFKWRWYHFDGVDWDQSRRLNNRIYKFRGHGKAWDWEVDTENGNYDYLMYADFDYDHPEVVNEQRNWGVWYTNTLGLDGFRIDAVKHIKYSFTRDWINHVRSATGKNMFAVAEFWKNDLGAIENYLQKTNWNHSVFDVPLHYNLYNASKSGGNYDMRNIFNGTVVQRHPSHAVTFVDNHDSQPEEALESFVEEWFKPLAYALTLTREQGYPSVFYGDYYGIPTHGVPAMRSKIDPILEARQKYAYGPQHDYLDHPDVIGWTREGDSSHPKSGLATLITDGPGGSKRMYAGLKNAGETWYDITGNRSDTVKIGSDGWGEFHVNDGSVSIYVQK

SEQ ID NO: 36758 - protein, 480 aa, Synthetic construct
NGTMMQYFEWYLPNDGNHWNRLNSDASNLKSKGITAVWIPPAWKGASQNDVGYGAYDLYDLGEFNQKGTVRTKYGTRSQLQAAVTSLKNNGIQVYGDVVMNHKGGADATEMVRAVEVNPNNRNQEVTGEYTIEAWTRFDFPGRGNTHSSFKWRWYHFDGVDWDQSRRLNNRIYKFRGHGKAWDWEVDTENGNYDYLMYADIDMDHPEVVNELRNWGVWYTNTLGLDGFRIDAVKHIKYSFTRDWVNHVRSATGKNMFAVAEFWKNDLGAIENYLQKTNWNHSVFDVPLHYNLYNASKSGGNYDMRNIFNGTVVQRHPSHAVTFVDNHDSQPEEALESFVEEWFKPLAYALTLTREQGYPSVFYGDYYGIPTHGVPAMRSKIDPILEARQKYAYGPQHDYLDHPDVIGWTREGDSSHPKSGLATLITDGPGGSKRMYAGLKNAGETWYDITGNRSDTVKIGSDGWGEFHVNDGSVSIYVQK

SEQ ID NO: 36759 - protein, 480 aa, Synthetic construct
NGTMMQYFEWYLPNDGNHWNRLNSDASNLKSKGITAVWIPPAWKGASQNDVGYGAYDLYDLGEFNQKGTVRTKYGTKSQLQAAVTSLKNNGIQVYGDVVMNHKGGADATEMVRAVEVNPNNRNQEVTGEYTIEAWTRFDFPGRGNTHSSFKWRWYHFDGVDWDQSRRLNNRIYKFRGHGKAWDWEVDTENGNYDYLMYADIDMDHPEVVNELRNWGVWYTNTLGLDGFRIDAVKHIKYSFTRDWINHVRSATGKNMFAVAEFWKNDLGAIENYLQKTNWNHSVFDVPLHYNLYNASKSGGNYDMRNIFNGTVVQRHPSHAVTFVDNHDSQPEEALESFVEEWFKPLAYALTLTREQGYPSVFYGDYYGIPTHGVPAMRSKIDPILEARQKYAYGPQHDYLDHPDVIGWTREGDSSHPKSGLATLITDGPGGSKRMYAGLKNAGETWYDITGNRSDTVKIGSDGWGEFHVNDGSVSIYVQK

SEQ ID NO: 36760 - protein, 480 aa, Synthetic construct
NGTMMQYFEWYLPNDGNHWNRLNSDASNLKSKGITAVWIPPAWKGASQNDVGYGAYDLYDLGEFNQKGTVRTKYGTRSQLQAAVTSLKNNGIQVYGDVVMNHKGGADATEMVRAVEVNPNNRNQEVTGEYTIEAWTRFDFPGRGNTYSSFKWRWYHFDGVDWDQSRRLNNRIYKFRGHGKAWDWEVDTENGNYDYLMYADIDMDHPEVVNELRNWGVWYTNTLGLDGFRIDAVKHIKYSFTRDWINHVRSATGKNMFAVAEFWKNDLGAIENYLQKTNWNHSVFDVPLHYNLYNASKSGGNYDMRNIFNGTVVQRHPSHAVTFVDNHDSQPEEALESFVEEWFKPLAYALTLTREQGYPSVFYGDYYGIPTHGVPAMRSKIDPILEARQKYAYGPQHDYLDHPDVIGWTREGDSSHPKSGLATLITDGPGGSKRMYAGLKNAGETWYDITGNRSDTVKIGSDGWGEFHVNDGSVSIYVQK

SEQ ID NO: 36761 - protein, 480 aa, Synthetic construct
NGTMMQYFEWYLPNDGNHWNRLNSDASNLKSKGITAVWIPPAWKGASQNDVGYGAYDLYDLGEFNQKGTVRTKYGTRSQLQAAVTSLKNNGIQVYGDVVMNHKGGADATEMVRAVEVNPNNRNQEVTGEYTIEAWTRFDFPGRGNTHSSFKWRWYHFDGVDWDQSRRLNNRIYKFRGHGKAWDWEVDTENGNYDYLMYADIDMDHPEVVNELRNWGVWYTNTLGLDGFRIDAVKHIKYSFTRDWINHVRSATGKNMFAVAEFWKNDLGAIENYLQKTNFNHSVFDVPLHYNLYNASKSGGNYDMRNIFNGTVVQRHPSHAVTFVDNHDSQPEEALESFVEEWFKPLAYALTLTREQGYPSVFYGDYYGIPTHGVPAMRSKIDPILEARQKYAYGPQHDYLDHPDVIGWTREGDSSHPKSGLATLITDGPGGSKRMYAGLKNAGETWYDITGNRSDTVKIGSDGWGEFHVNDGSVSIYVQK

SEQ ID NO: 36762 - protein, 480 aa, Synthetic construct
NGTMMQYFEWYLPNDGNHWNRLNSDASNLKSKGITAVWIPPAWKGASQNDVGYGAYDLYDLGEFNQKGTVRTKYGTRSELQAAVTSLKNNGIQVYGDVVMNHKGGADATEMVRAVEVNPNNRNQEVTGEYTIEAWTRFDFPGRGNTHSSFKWRWYHFDGVDWDQSRRLNNRIYKFRGHGKAWDWEVDTENGNYDYLMYADIDMDHPEVVNELRNWGVWYTNTLGLDGFRIDAVKHIKYSFTRDWINHVRSATGKNMFAVAEFWKNDLGAIENYLQKTNWNHSVFDVPLHYNLYNASKSGGNYDMRNIFNGTVVQRHPSHAVTFVDNHDSQPEEALESFVEEWFKPLAYALTLTREQGYPSVFYGDYYGIPTHGVPAMRSKIDPILEARQKYAYGPQHDYLDHPDVIGWTREGDSSHPKSGLATLITDGPGGSKRMYAGLKNAGETWYDITGNRSDTVKIGSDGWGEFHVNDGSVSIYVQK

SEQ ID NO: 36763 - protein, 480 aa, Synthetic construct
NGTMMQYFEWYLPNDGNHWNRLNSDASNLKSKGITAVWIPPAWKGASQNDVGYGAYDLYDLGEFNQKGTVRTKYGTRSQLQAAVTSLKNNGIQVYGDVVMNHKGGADATEMVRAVEVNPNNRNQEVTGEYTIEAWTRFDFPGRGNTHSSFKWRWYHFDGVDWDQSRRLNNRIYKFRGHGKAWDWEVDTENGNYDYLMYADIDMDHPEVVNELRNWGVWYTNTLGLDGFRIDAVKHIKYSFTRDWINHVRSATGKNMFAVAEFWKNDLGAIENYLQKTNWNHSVFDVPLHYNLYNASKSGGNYDMRNIFNGTVVQRHPSHAVTFVDNHDSQPGEALESFVEEWFKPLAYALTLTREQGYPSVFYGDYYGIPTHGVPAMRSKIDPILEARQKYAYGPQHDYLDHPDVIGWTREGDSSHPKSGLATLITDGPGGSKRMYAGLKNAGETWYDITGNRSDTVKIGSDGWGEFHVNDGSVSIYVQK

SEQ ID NO: 36764 - protein, 480 aa, Synthetic construct
NGTMMQYFEWYLPNDGNHWNRLNSDASNLKSKGITAVWIPPAWKGASQNDVGYGAYDLYDLGEFNQKGTVRTKYGTRSQLQAAVTSLKNNGIQVYGDVVMNHKGGADATEMVRAVEVNPNNRNQEVTGEYTIEAWTRFDFPGRGNTHSSFKWRWYHFDGVDWDQSRRLNNRIYKFRGHGKAWDWEVDTENGNYDYLMYADIDMDHPEVVNELRNWGVWYTNTLGLDGFRIDAVKHIKYSFTRDWINHVRSATGKNMFAVAEFWKNDLGAIENYLQKTNWNHSVFDVPLHYNLYAASKSGGNYDMRNIFNGTVVQRHPSHAVTFVDNHDSQPEEALESFVEEWFKPLAYALTLTREQGYPSVFYGDYYGIPTHGVPAMRSKIDPILEARQKYAYGPQHDYLDHPDVIGWTREGDSSHPKSGLATLITDGPGGSKRMYAGLKNAGETWYDITGNRSDTVKIGSDGWGEFHVNDGSVSIYVQK

SEQ ID NO: 36765 - protein, 480 aa, Synthetic construct
NGTMMQYFEWYLPNDGNHWNRLNSDASNLKSKGITAVWIPPAWKGASQNDVGYGAYDLYDLGEFNQKGTVRTKYGTRSQLQAAVTSLKNNGIQVYGDVVMNHKGGADATEMVRAVEVNPNNRNQEVTGEYTIEAWTRFDFPGRGNTHSSFKWRWYHFDGVDWDQSRKYENRIYKFRGHGKAWDWEVDTENGNYDYLMYADIDMDHPEVVNELRNWGVWYTNTLGLDGFRIDAVKHIKYSFTRDWINHVRSATGKNMFAVAEFWKNDLGAIENYLQKTNWNHSVFDVPLHYNLYNASKSGGNYDMRNIFNGTVVQRHPSHAVTFVDNHDSQPEEALESFVEEWFKPLAYALTLTREQGYPSVFYGDYYGIPTHGVPAMRSKIDPILEARQKYAYGPQHDYLDHPDVIGWTREGDSSHPKSGLATLITDGPGGSKRMYAGLKNAGETWYDITGNRSDTVKIGSDGWGEFHVNDGSVSIYVQK

SEQ ID NO: 36766 - protein, 480 aa, Synthetic construct
NGTMMQYFEWYLPNDGNHWNRLNSDASNLKSKGITAVWIPPAWKGASQNDVGYGAYDLYDLGEFNQKGTVRTKYGTRSQLQAAVTSLKNNGIQVYGDVVMNHKGGADATEMVRAVEVNPNNRNQEVTGEYTIEAWTRFDFPGRGNTHSSFKWRWYHFDGVDWDQSRRLNNRIYKFRGHGKAWDWEVDTENGNYDYLMYADIDMDHPEVVNELRNWGVWYTNTLGLDGFRIDAVKHIKYSFTRDWINHVRSATGKNMFAVAEFWKNDLGAIENYLQKTNWNHSVFDVPLHYNLYNASKSGGNYDMRNIFNGTVVQRHPSHAVTFVDNHDSQPEEALESFVEEWFKPLAYALTLTREQGYPSVFYGDYYGIPTHGVPALRSKIDPILEARQKYAYGPQHDYLDHPDVIGWTREGDSSHPKSGLATLITDGPGGSKRMYAGLKNAGETWYDITGNRSDTVKIGSDGWGEFHVNDGSVSIYVQK

SEQ ID NO: 36767 - protein, 480 aa, Synthetic construct
NGTMMQYFEWYLPNDGNHWNRLNSDASNLKSKGITAVWIPPAWKGASQNDVGYGAYDLYDLGEFNQKGTVRTKYGTRSQLQAAVTSLKNNGIQVYGDVVMNHKGGADATEMVRAVEVNPNNRNQEVTGEYTIEAWTRFDFPGRGNTHSSFKWRWYHFDGVDWDQSRRLNNRIYKFRGHGKAWDWEVDTENGNYDYLMYADIDMDHPEVVNELRNWGVWYTNTLGLDGFRIDAVKHIKYSFTRDWINHVRSATGKNMFAVAEFWKNDLGAIENYLQKTNWNHSVFDVPLHYNLYNASKSGGNYDMRNIFNGTVVSRHPSHAVTFVDNHDSQPEEALESFVEEWFKPLAYALTLTREQGYPSVFYGDYYGIPTHGVPAMRSKIDPILEARQKYAYGPQHDYLDHPDVIGWTREGDSSHPKSGLATLITDGPGGSKRMYAGLKNAGETWYDITGNRSDTVKIGSDGWGEFHVNDGSVSIYVQK

SEQ ID NO: 36768 - protein, 480 aa, Synthetic construct
NGTMMQYFEWYLPNDGNHWNRLNSDASNLKSKGITAVWIPPAWKGASQNDVGYGPYDLYDLGEFNQKGTVRTKYGTRSQLQAAVTSLKNNGIQVYGDVVMNHKGGADATEMVRAVEVNPNNRNQEVTGEYTIEAWTRFDFPGRGNTHSSFKWRWYHFDGVDWDQSRRLNNRIYKFRGHGKAWDWEVDTENGNYDYLMYADIDMDHPEVVNELRNWGVWYTNTLGLDGFRIDAVKHIKYSFTRDWINHVRSATGKNMFAVAEFWKNDLGAIENYLQKTNWNHSVFDVPLHYNLYNASKSGGNYDMRNIFNGTVVQRHPSHAVTFVDNHDSQPEEALESFVEEWFKPLAYALTLTREQGYPSVFYGDYYGIPTHGVPAMRSKIDPILEARQKYAYGPQHDYLDHPDVIGWTREGDSSHPKSGLATLITDGPGGSKRMYAGLKNAGETWYDITGNRSDTVKIGSDGWGEFHVNDGSVSIYVQK

SEQ ID NO: 36769 - protein, 480 aa, Synthetic construct
NGTMMQYFEWYLPNDGNHWNRLNSDASNLKSKGITAVWIPPAWKGASQNDVGYGAYDLYDLGEFNQKGTVRTKYGTRSQLQAAVTSLKNNGIQVYGDVVMNHKGGADATEMVRAVEVNPNNRNQEVTGEYTIEAWTRFDFPGRGNTHSSFKWRWYHFDGVDWDQSRRLNSRIYKFRGHGKAWDWEVDTENGNYDYLMYADIDMDHPEVVNELRNWGVWYTNTLGLDGFRIDAVKHIKYSFTRDWINHVRSATGKNMFAVAEFWKNDLGAIENYLQKTNWNHSVFDVPLHYNLYNASKSGGNYDMRNIFNGTVVQRHPSHAVTFVDNHDSQPEEALESFVEEWFKPLAYALTLTREQGYPSVFYGDYYGIPTHGVPAMRSKIDPILEARQKYAYGPQHDYLDHPDVIGWTREGDSSHPKSGLATLITDGPGGSKRMYAGLKNAGETWYDITGNRSDTVKIGSDGWGEFHVNDGSVSIYVQK

SEQ ID NO: 36770 - protein, 480 aa, Synthetic construct
NGTMMQYFEWYLPNDGNHWNRLNSDASNLKSKGITAVWIPPAWKGASQNDVGYGAYDLYDLGEFNQKGTVRTKYGTRSQLQAAVTSLKNNGIQVYGDVVMNHKGGADATEMVRAVEVNPNNRNQEVTGEYTIEAWTRFDFPGRGNTHSSFKWRWYHFDGVDWDQSRRLNNRIYKFRGHGKAWDWEVDTENGNYDYLMYADIDMDHPEVVNELRNWGVWYTNTLGLDGFRIDAVKHIKYSFTRDWINHVRSATGKNMFAVAEFWKNDLGAIENYLQKTNWNHSVFDVPLHYNLYNASKSGGNYDMRNILNGTVVQRHPSHAVTFVDNHDSQPEEALESFVEEWFKPLAYALTLTREQGYPSVFYGDYYGIPTHGVPAMRSKIDPILEARQKYAYGPQHDYLDHPDVIGWTREGDSSHPKSGLATLITDGPGGSKRMYAGLKNAGETWYDITGNRSDTVKIGSDGWGEFHVNDGSVSIYVQK

SEQ ID NO: 36771 - protein, 480 aa, Synthetic construct
NGTMMQYFEWYLPNDGNHWNRLNSDASNLKSKGITAVWIPPAWKGASQNDVGYGAYDLYDLGEFNQKGTVRTKYGTRSQLQAAVTSLKNNGIQVYGDVVMNHKGGADATEMVRAVEVNPNNRNQEVTGEYTIEAWTRFDFPGRGNTHSSFKWRWYHFDGVDWDQSRRLNNRIYKFRGHGKAWDWEVDSENGNYDYLMYADIDMDHPEVVNELRNWGVWYTNTLGLDGFRIDAVKHIKYSFTRDWINHVRSATGKNMFAVAEFWKNDLGAIENYLQKTNWNHSVFDVPLHYNLYNASKSGGNYDMRNIFNGTVVQRHPSHAVTFVDNHDSQPEEALESFVEEWFKPLAYALTLTREQGYPSVFYGDYYGIPTHGVPAMRSKIDPILEARQKYAYGPQHDYLDHPDVIGWTREGDSSHPKSGLATLITDGPGGSKRMYAGLKNAGETWYDITGNRSDTVKIGSDGWGEFHVNDGSVSIYVQK

SEQ ID NO: 36772 - protein, 480 aa, Synthetic construct
NGTMMQYFEWYLPNDGNHWNRLNSDASNLKSKGITAVWIPPAWKGASQSDVGYGAYDLYDLGEFNQKGTVRTKYGTRSQLQAAVTSLKNNGIQVYGDVVMNHKGGADATEMVRAVEVNPNNRNQEVTGEYTIEAWTRFDFPGRGNTHSSFKWRWYHFDGVDWDQSRRLNNRIYKFRGHGKAWDWEVDTENGNYDYLMYADIDMDHPEVVNELRNWGVWYTNTLGLDGFRIDAVKHIKYSFTRDWINHVRSATGKNMFAVAEFWKNDLGAIENYLQKTNWNHSVFDVPLHYNLYNASKSGGNYDMRNIFNGTVVQRHPSHAVTFVDNHDSQPEEALESFVEEWFKPLAYALTLTREQGYPSVFYGDYYGIPTHGVPAMRSKIDPILEARQKYAYGPQHDYLDHPDVIGWTREGDSSHPKSGLATLITDGPGGSKRMYAGLKNAGETWYDITGNRSDTVKIGSDGWGEFHVNDGSVSIYVQK

SEQ ID NO: 36773 - protein, 480 aa, Synthetic construct
NGTLMQYFEWYLPNDGNHWNRLNSDASNLKSKGITAVWIPPAWKGASQNDVGYGAYDLYDLGEFNQKGTVRTKYGTRSQLQAAVTSLKNNGIQVYGDVVMNHKGGADATEMVRAVEVNPNNRNQEVTGEYTIEAWTRFDFPGRGNTHSSFKWRWYHFDGVDWDQSRRLNNRIYKFRGHGKAWDWEVDTENGNYDYLMYADIDMDHPEVVNELRNWGVWYTNTLGLDGFRIDAVKHIKYSFTRDWINHVRSATGKNMFAVAEFWKNDLGAIENYLQKTNWNHSVFDVPLHYNLYNASKSGGNYDMRNIFNGTVVQRHPSHAVTFVDNHDSQPEEALESFVEEWFKPLAYALTLTREQGYPSVFYGDYYGIPTHGVPAMRSKIDPILEARQKYAYGPQHDYLDHPDVIGWTREGDSSHPKSGLATLITDGPGGSKRMYAGLKNAGETWYDITGNRSDTVKIGSDGWGEFHVNDGSVSIYVQK

SEQ ID NO: 36774 - protein, 480 aa, Synthetic construct
NGTMMQYFEWYLPNDGNHWNRLNSDASNLKSKGITAVWIPPAWKGASQNDVGYGAYDLYDLGEFNQKGTVRTKYGTRSQLQAAVTSLKNNGIQVYGDVVMNHKGGADATEMVRAVEVNPNNRNQEVTGEYTIEAWTRFDFPGRGNTHSSFKWRWYHFDGVDWDQSRRLNNRIYKFRGHGKAWDWEVDTENGNYDYLMYADFDYDHPEVVNEMRNWGVWYTNTLGLDGFRIDAVKHIKYSFTRDWINHVRSATGKNMFAVAEFWKNDLGAIENYLQKTNWNHSVFDVPLHYNLYNASKSGGNYDMRNIFNGTVVQRHPSHAVTFVDNHDSQPEEALESFVEEWFKPLAYALTLTREQGYPSVFYGDYYGIPTHGVPAMRSKIDPILEARQKYAYGPQHDYLDHPDVIGWTREGDSSHPKSGLATLITDGPGGSKRMYAGLKNAGETWYDITGNRSDTVKIGSDGWGEFHVNDGSVSIYVQK

SEQ ID NO: 36775 - protein, 480 aa, Bacillus sp.
NGTMMQYFEWYLPNDGNHWNRLRDDAANLKSKGITAVWIPPAWKGTSQNDVGYGAYDLYDLGEFNQKGTVRTKYGTRNQLQAAVTSLKNNGIQVYGDVVMNHKGGADGTEIVNAVEVNRSNRNQETSGEYAIEAWTKFDFPGRGNNHSSFKWRWYHFDGTDWDQSRQLQNKIYKFRGTGKAWDWEVDTENGNYDYLMYADVDMDHPEVIHELRNWGVWYTNTLNLDGFRIDAVKHIKYSFTRDWLTHVRNTTGKPMFAVAEFWKNDLGAIENYLNKTSWNHSVFDVPLHYNLYNASNSGGYYDMRNILNGSVVQKHPTHAVTFVDNHDSQPGEALESFVQQWFKPLAYALVLTREQGYPSVFYGDYYGIPTHGVPAMKSKIDPLLQARQTFAYGPQHDYLDHPDVIGWTREGDSSAAKSGLAALITDGPGGSKRMYAGLKNAGETWYDITGNRSDTVKIGSDGWGEFHVNDGSVSIYVQK

SEQ ID NO: 36776 - protein, 480 aa, Synthetic construct
NGTMMQYFEWYLPNDGNHWNRLNSDASNLKSKGITAVWIPPAWKGASQNDVGYGAYDLYDLGEFNQKGTVRTKYGTRSQLQAAVTSLKNNGIQVYGDVVMNHKGGADATEMVRAVEVNPNNRNQEVTGEYTIEAWTRFDFPGRGNTHSSFKWRWYHFDGVDWDQSRRLNNRIYKFRGHGKAWDWEVDTENGNYDYLMYADIDMDHPEVVNELRNWGVWYTNTLGLDGFRIDAVKHIKYSFTRDWINHVRSATGKNMFAVAEFWKNDLGAIENYLQKTNWNHSVFDVPLHYNLYNASKSGGNYDMRNIFNGTVVQRHPSKAVTFVDNHDSQPEEALESFVEEWFKPLAYALTLTREQGYPSVFYGDYYGIPTHGVPAMRSKIDPILEARQKYAYGPQHDYLDHPDVIGWTREGDSSHPKSGLATLITDGPGGSKRMYAGLKNAGETWYDITGNRSDTVKIGSDGWGEFHVNDGSVSIYVQK

SEQ ID NO: 36777 - protein, 480 aa, Synthetic construct
NGTMMQYFEWYLPNDGNHWNRLNSDASNLKSKGITAVWIPPAWKGASQNDVGYGAYDLYDLGEFNQKGTVRTKYGTRSQLQAAVTSLKNNGIQVYGDVVMNHKGGADATEMVRAVEVNPNNRNQEVTGEYTIEAWTRFDFPGRGNTHSSFKWRWYHFDGVDWDQSRRLNNRIYKFRGHGKAWDWEVDTENGNYDYLMYADIDMDHPEVVNELRNWGVWYTNTLGLDGFRIDAVKHIKYSFTRDWINHVRSATGKNMFAVAEFWKNDLGAIENYLQKTNWNHSVFDVPLHYNLYNASKSGGNYDMRNIFNGTVVQRHPSHAVTFVDNHDSQPEESLESFVEEWFKPLAYALTLTREQGYPSVFYGDYYGIPTHGVPAMRSKIDPILEARQKYAYGPQHDYLDHPDVIGWTREGDSSHPKSGLATLITDGPGGSKRMYAGLKNAGETWYDITGNRSDTVKIGSDGWGEFHVNDGSVSIYVQK

SEQ ID NO: 36778 - protein, 480 aa, Synthetic construct
NGTMMQYFEWYLPNDGNHWNRLNSDASNLKSKGITAVWIPPAWKGASQNDVGYGAYDLYDLGEFNQKGTVRTKYGTRSQLQAAVTSLKNNGIQVYGDVVMNHKGGADATEMVRAVEVNPNNRNQEVTGEYTIEAWTRFDFPGRGNTHSDFKWRWYHFDGVDWDQSRRLNNRIYKFRGHGKAWDWEVDTENGNYDYLMYADIDMDHPEVVNELRNWGVWYTNTLGLDGFRIDAVKHIKYSFTRDWINHVRSATGKNMFAVAEFWKNDLGAIENYLQKTNWNHSVFDVPLHYNLYNASKSGGNYDMRNIFNGTVVQRHPSHAVTFVDNHDSQPEEALESFVEEWFKPLAYALTLTREQGYPSVFYGDYYGIPTHGVPAMRSKIDPILEARQKYAYGPQHDYLDHPDVIGWTREGDSSHPKSGLATLITDGPGGSKRMYAGLKNAGETWYDITGNRSDTVKIGSDGWGEFHVNDGSVSIYVQK

SEQ ID NO: 36779 - protein, 480 aa, Synthetic construct
NGTMMQYFEWYLPNDGNHWNRLNSDASNLKSKGITAVWIPPAWKGASQNDVGYGAYDLYDLGEFNQKGTVRTKYGTRSQLQAAVTSLKNNGIQVYGDVVINHKGGADATEMVRAVEVNPNNRNQEVTGEYTIEAWTRFDFPGRGNTHSSFKWRWYHFDGVDWDQSRRLNNRIYKFRGHGKAWDWEVDTENGNYDYLMYADYDYDHPEVVNEIRNWGVWYTNTLGLDGFRIDAVKHIKYSFVRDWINHVRSATGKNMFAVAEFWKNDLGAIENYLQKTNWNHSVFDVPLHYNLYNASKSGGNYDMRNIFNGTVVQRHPSHAVTFVDNHDSQPEEALESFVEEWFKPLAYALTLTREQGYPSVFYGDYYGIPTHGVPAMRSKIDPILEARQKYAYGPQHDYLDHPDVIGWTREGDSSHPKSGLATLITDGPGGSKRMYAGLKNAGETWYDITGNRSDTVKIGSDGWGEFHVNDGSVSIYVQK

SEQ ID NO: 36780 - protein, 480 aa, Synthetic construct
NGTMMQYFEWYLPNDGNHWNRLNSDASNLKSKGITAVWIPPAYKGASQNDVGYGAYDLYDLGEFNQKGTVRTKYGTRSQLQAAVTSLKNNGIQVYGDVVMNHKGGADATEMVRAVEVNPNNRNQEVTGEYTIEAWTRFDFPGRGNTHSSFKWRWYHFDGVDWDQSRRLNNRIYKFRGHGKAWDWEVDTENGNYDYLMYADIDMDHPEVVNELRNWGVWYTNTLGLDGFRIDAVKHIKYSFTRDWINHVRSATGKNMFAVAEFWKNDLGAIENYLQKTNWNHSVFDVPLHYNLYNASKSGGNYDMRNIFNGTVVQRHPSHAVTFVDNHDSQPEEALESFVEEWFKPLAYALTLTREQGYPSVFYGDYYGIPTHGVPAMRSKIDPILEARQKYAYGPQHDYLDHPDVIGWTREGDSSHPKSGLATLITDGPGGSKRMYAGLKNAGETWYDITGNRSDTVKIGSDGWGEFHVNDGSVSIYVQK

SEQ ID NO: 36781 - protein, 480 aa, Synthetic construct
NGTMMQYFEWYLPNDGNHWNRLNSDASNLKSKGITAVWIPPAWKGASQNDVGYGAYDLYDLGEFNQKGTVRTKYGTRSQLQAAVTSLKNNGIQVYGDVVMNHKGGADATEMVRAVEVNPNNRNQEVTGEYTIEAWTRFDFPGRGNTHSSFKWRWYHFDGVDWDQSRRLNNRIYKFRGHGKAWDWEVDTENGNYDYLMYADIDMDHPEVVNELKNWGVWYTNTLGLDGFRIDAVKHIKYSFTRDWINHVRSATGKNMFAVAEFWKNDLGAIENYLQKTNWNHSVFDVPLHYNLYNASKSGGNYDMRNIFNGTVVQRHPSHAVTFVDNHDSQPEEALESFVEEWFKPLAYALTLTREQGYPSVFYGDYYGIPTHGVPAMRSKIDPILEARQKYAYGPQHDYLDHPDVIGWTREGDSSHPKSGLATLITDGPGGSKRMYAGLKNAGETWYDITGNRSDTVKIGSDGWGEFHVNDGSVSIYVQK

SEQ ID NO: 36782 - protein, 480 aa, Synthetic construct
NGTMMQYFEWYLPNDGNHWNRLNSDASNLKSKGITAVWIPPAWKGASQNDVGYGAYDLYDLGEFNQKGTVRTKYGTRSQLQAAVTSLKNNGIQVYGDVVMNHKGGADATEMVRAVEVNPNNRNQEVTGEYTIEAWTRFDFPGRGNTHSSFKWRWYHFDGVDWDQSRRLNNRIYKFRGHGKAWDWEVDTENGNYDYLMYADIDMDHPEVVNELRNWGVWYTNTLGLDGFRIDAVKHIKYSFTRDWINHVRSATGKNMFAVAEFWKNDLGAIENYLQKTNWNHSVFDVPLHYNLYNASKSGGNYDMRNIFNGTVVQRHPSHAVTFVDNHDSQPEEALESTVEEWFKPLAYALTLTREQGYPSVFYGDYYGIPTHGVPAMRSKIDPILEARQKYAYGPQHDYLDHPDVIGWTREGDSSHPKSGLATLITDGPGGSKRMYAGLKNAGETWYDITGNRSDTVKIGSDGWGEFHVNDGSVSIYVQK

SEQ ID NO: 36783 - protein, 480 aa, Synthetic construct
NGTMMQYFEWYLPNDGNHWNRLNSDASNLKSKGITAVWIPPAWKGASQNDVGYGAYDLYDLGEFNQKGTVRTKYGTRSQLQAAVTSLKNNGIQVYGDVVMNHKGGADATEMVRAVEVNPNNRNQEVTGEYTIEAWTRFDFPGRGNTHSSFKWRWYHFDGVDWDQSRRLNNRIYKFRGHGKAWDWEVDTENGNYDYLMYADIDMDHPEVVNELRNWGVWYTNTLGLDGFRIDAVKHIKYSFTRDWINHVRSATGKNMFAVAEFWKNDLGALENYLQKTNWNHSVFDVPLHYNLYNASKSGGNYDMRNIFNGTVVQRHPSHAVTFVDNHDSQPEEALESFVEEWFKPLAYALTLTREQGYPSVFYGDYYGIPTHGVPAMRSKIDPILEARQKYAYGPQHDYLDHPDVIGWTREGDSSHPKSGLATLITDGPGGSKRMYAGLKNAGETWYDITGNRSDTVKIGSDGWGEFHVNDGSVSIYVQK

SEQ ID NO: 36784 - protein, 480 aa, Synthetic construct
NGTMMQYFEWYLPNDGNHWNRLNSDASNLKSKGITAVWIPPAWKGASQNDVGYGAYDLYDLGEFNQKGTVRTKYGTRSQLQAAVTSLKNRGIQVYGDVVMNHKGGADATEMVRAVEVNPNNRNQEVTGEYTIEAWTRFDFPGRGNTHSSFKWRWYHFDGVDWDQSRRLNNRIYKFRGHGKAWDWEVDTENGNYDYLMYADIDMDHPEVVNELRNWGVWYTNTLGLDGFRIDAVKHIKYSFTRDWINHVRSATGKNMFAVAEFWKNDLGAIENYLQKTNWNHSVFDVPLHYNLYNASKSGGNYDMRNIFNGTVVQRHPSHAVTFVDNHDSQPEEALESFVEEWFKPLAYALTLTREQGYPSVFYGDYYGIPTHGVPAMRSKIDPILEARQKYAYGPQHDYLDHPDVIGWTREGDSSHPKSGLATLITDGPGGSKRMYAGLKNAGETWYDITGNRSDTVKIGSDGWGEFHVNDGSVSIYVQK

SEQ ID NO: 36785 - protein, 480 aa, Synthetic construct
NGTMMQYFEWYLPNDGNHWNRLNSDASNLKSKGITAVWIPPAWKGASQNDVGYGAYDLYDLGEFNQKGTVRTKYGTRSQLQAAVTSLKNNGIQVYGDVVMNHKGGADATEDVRAVEVNPNNRNQEVTGEYTIEAWTRFDFPGRGNTHSSFKWRWYHFDGVDWDQSRRLNNRIYKFRGHGKAWDWEVDTENGNYDYLMYADIDMDHPEVVNELRNWGVWYTNTLGLDGFRIDAVKHIKYSFTRDWINHVRSATGKNMFAVAEFWKNDLGAIENYLQKTNWNHSVFDVPLHYNLYNASKSGGNYDMRNIFNGTVVQRHPSHAVTFVDNHDSQPEEALESFVEEWFKPLAYALTLTREQGYPSVFYGDYYGIPTHGVPAMRSKIDPILEARQKYAYGPQHDYLDHPDVIGWTREGDSSHPKSGLATLITDGPGGSKRMYAGLKNAGETWYDITGNRSDTVKIGSDGWGEFHVNDGSVSIYVQK

SEQ ID NO: 36786 - protein, 480 aa, Synthetic construct
NGTMMQYFEWYLPNDGNHWNRLNSDASNLKDKGITAVWIPPAWKGASQNDVGYGAYDLYDLGEFNQKGTVRTKYGTRSQLQAAVTSLKNNGIQVYGDVVMNHKGGADATEMVRAVEVNPNNRNQEVTGEYTIEAWTRFDFPGRGNTHSSFKWRWYHFDGVDWDQSRRLNNRIYKFRGHGKAWDWEVDTENGNYDYLMYADIDMDHPEVVNELRNWGVWYTNTLGLDGFRIDAVKHIKYSFTRDWINHVRSATGKNMFAVAEFWKNDLGAIENYLQKTNWNHSVFDVPLHYNLYNASKSGGNYDMRNIFNGTVVQRHPSHAVTFVDNHDSQPEEALESFVEEWFKPLAYALTLTREQGYPSVFYGDYYGIPTHGVPAMRSKIDPILEARQKYAYGPQHDYLDHPDVIGWTREGDSSHPKSGLATLITDGPGGSKRMYAGLKNAGETWYDITGNRSDTVKIGSDGWGEFHVNDGSVSIYVQK

SEQ ID NO: 36787 - protein, 480 aa, Synthetic construct
NGTMMQYFEWYLPNDGNHWNRLNSDASNLKSKGITAVWIPPAWKGASQNDVGYGAYDLYDLGEFNQKGTVRTKYGTRSQLQAAVTSLKNNGIQVYGDVVINHKGGADATEMVRAVEVNPNNRNQEVTGEYTIEAWTRFDFPGRGNTHSSFKWRWYHFDGVDWDQSRRLNNRIYKFRGHGKAWDWEVDTENGNYDYLMYADYDMDHPEVVNELRNWGVWYTNTLGLDGFRIDAVKHIKYSFLRDWINHVRSATGKNMFAVAEFWKNDLGAIENYLQKTNWNHSVFDVPLHYNLYNASKSGGNYDMRNIFNGTVVQRHPSHAVTFVDNHDSQPEEALESFVEEWFKPLAYALTLTREQGYPSVFYGDYYGIPTHGVPAMRSKIDPILEARQKYAYGPQHDYLDHPDVIGWTREGDSSHPKSGLATLITDGPGGSKRMYAGLKNAGETWYDITGNRSDTVKIGSDGWGEFHVNDGSVSIYVQK

SEQ ID NO: 36788 - protein, 480 aa, Synthetic construct
NGTMMQYFEWYLPNDGNHWKRLNSDASNLKSKGITAVWIPPAWKGASQNDVGYGAYDLYDLGEFNQKGTVRTKYGTRSQLQAAVTSLKNNGIQVYGDVVMNHKGGADATEMVRAVEVNPNNRNQEVTGEYTIEAWTRFDFPGRGNTHSSFKWRWYHFDGVDWDQSRRLNNRIYKFRGHGKAWDWEVDTENGNYDYLMYADIDMDHPEVVNELRNWGVWYTNTLGLDGFRIDAVKHIKYSFTRDWINHVRSATGKNMFAVAEFWKNDLGAIENYLQKTNWNHSVFDVPLHYNLYNASKSGGNYDMRNIFNGTVVQRHPSHAVTFVDNHDSQPEEALESFVEEWFKPLAYALTLTREQGYPSVFYGDYYGIPTHGVPAMRSKIDPILEARQKYAYGPQHDYLDHPDVIGWTREGDSSHPKSGLATLITDGPGGSKRMYAGLKNAGETWYDITGNRSDTVKIGSDGWGEFHVNDGSVSIYVQK

SEQ ID NO: 36789 - protein, 480 aa, Synthetic construct
NGTMMQYFEWYLPNDGNHWNRLNSDASNLKSKGITAVWIPPAWKGASQNDVGYGAYDLYDLGEFNQKGTVRTKYGTRSQLQAAVTSLHNNGIQVYGDVVMNHKGGADATEMVRAVEVNPNNRNQEVTGEYTIEAWTRFDFPGRGNTHSSFKWRWYHFDGVDWDQSRRLNNRIYKFRGHGKAWDWEVDTENGNYDYLMYADIDMDHPEVVNELRNWGVWYTNTLGLDGFRIDAVKHIKYSFTRDWINHVRSATGKNMFAVAEFWKNDLGAIENYLQKTNWNHSVFDVPLHYNLYNASKSGGNYDMRNIFNGTVVQRHPSHAVTFVDNHDSQPEEALESFVEEWFKPLAYALTLTREQGYPSVFYGDYYGIPTHGVPAMRSKIDPILEARQKYAYGPQHDYLDHPDVIGWTREGDSSHPKSGLATLITDGPGGSKRMYAGLKNAGETWYDITGNRSDTVKIGSDGWGEFHVNDGSVSIYVQK

SEQ ID NO: 36790 - protein, 480 aa, Synthetic construct
NGTMMQYFEWYLPNDGNHWNRLNSDASNLKSKGITAVWIPPAWKGASQNDVGYGAYDLYDLGEFNQKGTVRTKYGTRSQLQAAVTSLKNNGIQVYGDVVMNHKGGADATEMVRAVEVNPNNRNQEVTGEYTIEAWTRFDFPGRGNTHSSFKWRWYHFDGVDWDQSRRLNNRIYKFRGHGKAWDWEVDTENGNYDYLMYADIDMDHPEVVNELRNWGVWYTNTLGLDGFRIDAVKHIKYSFTRDWINHVRSATGKNMFAVAEFWKNDLGAIENYLQKTNWNHSVFDVPLHYNLYNASKSGGNYDMRNIFNGTVVQRHPSHAVTFVDNHDTQPEEALESFVEEWFKPLAYALTLTREQGYPSVFYGDYYGIPTHGVPAMRSKIDPILEARQKYAYGPQHDYLDHPDVIGWTREGDSSHPKSGLATLITDGPGGSKRMYAGLKNAGETWYDITGNRSDTVKIGSDGWGEFHVNDGSVSIYVQK

SEQ ID NO: 36791 - protein, 483 aa, Rasamsonia emersonii
ATPADWRSQSIYFLLTDRFGRTDNSTTAPCDTNARKYCGGSWQGIINHLDYIQGMGFTAIWITPVTKQLSLDTGDGTSYHGYWQQDIYSLNPNYGTAQDLKNLATALHNRGMYLMVDVVANHLGYAGSGTNMDCSVFNPFNNKEYFHPYCAITNYSNQTNVEDCWLGDNIVALADLNTSRTDVQNIWHSWVGNLVSNYSIDGLRIDTVKHVQKDFWPGYNKAAGVYCVGEILDGDPTYTCSYQNYLDGVLNYPTYFQIISAFQSTNGSISNLYNMINQVKSSCKDSTLLGTFVENHDNPRFASYTSDYSLAKNAIAFVILSDGIPIIYAGQEQHYSGGNDPGNREATWLSGYDISAELYKFIASANGIRSHAISKDSGYLTYKATNCHQNYPIYQDTSTIAMRKGTDGEQVITVLSNLGASGSSYTLSLGGTGYSAGEQLTELLSCTRVTVDSSGNVPVPMASGLPRVLYPTSLLTGSKLCQS

SEQ ID NO: 36792 - protein, 478 aa, Aspergillus terreus NIH2624
ATPAEWRSQSIYFLLTDRFARTDNSTTASCDLSARQYCGGSWQGIINQLDYIQGMGFTAIWITPVTAQIPQDTGYGQAYHGYWQQDAYALNSHYGTADDLKALASALHSRGMYLMVDVVANHMGHNGTGSSVDYSVYRPFNSQKYFHNLCWISDYNNQTNVEDCWLGDNTVALPDLDTTSTEVKNMWYDWVESLVSNYSVDGLRVDTVKNVQKNFWPGYNNASGVYCIGEVFDGDASYTCPYQEDLDGVLNYPMYYPLLRAFESTNGSISDLYNMINTVKSTCRDSTLLGTFVENHDNPRFANYTSDMSLAKNAATFTILADGIPIIYAGQEQHYSGGNDPYNREATWLSGYKTTSELYTHIAASNKIRTHAIKQDTGYLTYKNYPIYQDTSTLAMRKGYNGTQTITVLSNLGASGSSYTLSLPGTGYTAGQKITEIYTCTNLTVNSNGSVPVPMKSGLPRILYPADKLVNGSSFCNT

SEQ ID NO: 36793 - protein, 480 aa, Cytophaga sp.
NGTMMQYFEWYVPNDGQQWNRLRTDAPYLSSVGITAVWTPPAYKGTSQADVGYGPYDLYDLGEFNQKGTVRTKYGTKGELKSAVNTLHSCGIQVYGDVVMNHKAGADYTENVTAVEVNPSNRYQETSGEYNIQAWTGFNFPGRGTTYSNWKWQWFHFDGTDWDQSRSLSRIFKFDGKAWDWEVSSENGNYDYLMYADYDYDHPDVVNEMKKWGVWYANEVGLDGYRLDAVKHIKFQFLKDWVDNARAATGKEMFTVGEYWQNDLGALNNYLAKVNYNQSLFDAPLHYNFYAASTGGGYYDMRNILNNTLVASNPTKAVTLVENHDTQPGQSLESTVQPWFKPLAYAFILTRSGGYPSVFYGDMYGTKGTTTREIPALKSKIEPLLKARKDYAYGTQRDYIDNPDVIGWTREGDSTKAKSGLATVITDGPGGSKRMYVGTSNAGEIWYDLTGNRTDKITIGSDGYATFPVNGGSVSVWVQQ

SEQ ID NO: 36794 - protein, 480 aa, Cytophaga sp.
NGTMMQYFEWYVPNDGQQWNRLRTDAPYLSSVGITAVWTPPAYKGTSQADVGYGPYDLYDLGEFNQKGTVRTKYGTKGELKSAVYTLHSNGIQVYGDVVMNHKAGADYTENVTAVEVNPSNRYQETSGEYNIQAWTGFNFPGRGTTYSNWKWQWFHFDGTDWDQSRSLSRIFKFDGKAWDWEVSSENGNYDYLMYADYDYDHPDVVNEMKKWGVWYANEVGLDGYRLDAVKHIKFQFLKDWVDNARAATGKEMFTVGEYWQNDLGALNNYLAKVNYNQSLFDAPLHYNFYAASTGGGYYDMRNILNNTLVASNPTKAVTLVENHDTQPGQSLESTVQPWFKPLAYAFILTRSGGYPSVFYGDMYGTKGTTTREIPALKSKIEPLLKARKDYAYGTQRDYIDNPDVIGWTREGDSTKAKSGLATVITDGPGGSKRMYVGTSNAGEIWYDLTGNRTDKITIGSDGYATFPVNGGSVSVWVQQ

SEQ ID NO: 36795 - protein, 480 aa, Cytophaga sp.
NGTMMQYFEWYVPNDGQQWNRLRTDAPYLSSVGITAVWTPPAYKGTSQADVGYGPYDLYDLGEFNQKGTVRTKYGTKGELKSAVNTLHSNGIQVYGDVVMNHKAGADYTENVTAVEVNPSNRYQETSGEYNIQAWTGFNFPGRGTTYSNWKWQWFHFDGTDWDQSRSLSRIFKFDGKAWDWEVSSENGNYDYLMYADYDYDHPDVVNEMKKWGVWYANEVGLDGYRLDAVKHIKFQFLKDWVDNARAATGKEMFTVGEYWQNDLGALNNYLAKVNYNQSLFDAPLHYNFYAASTGGGYYDMRNILQNTLVASNPTKAVTLVENHDTQPGQSLESTVQPWFKPLAYAFILTRSGGYPSVFYGDMYGTKGTTTREIPALKSKIEPLLKARKDYAYGTQRDYIDNPDVIGWTREGDSTKAKSGLATVITDGPGGSKRMYVGTSNAGEIWYDLTGNRTDKITIGSDGYATFPVNGGSVSVWVQQ

SEQ ID NO: 36796 - protein, 480 aa, Cytophaga sp.
NGTMMQYFEWYVPNDGQQWNRLRTDAPYLSSVGITAVWTPPAYKGTSQADVGYGPYDLYDLGEFNQKGTVRTKYGTKGELKSAVNTLHSNGIQVYGDVVMNHKAGADYTENVTAVEVNPSNRYQETSGEYIIQAWTGFNFPGRGTTYSNWKWQWFHFDGTDWDQSRSLSRIFKFDGKAWDWEVSSENGNYDYLMYADYDYDHPDVVNEMKKWGVWYANEVGLDGYRLDAVKHIKFQFLKDWVDNARAATGKEMFTVGEYWQNDLGALNNYLAKVNYNQSLFDAPLHYNFYAASTGGGYYDMRNILNNTLVASNPTKAVTLVENHDTQPGQSLESTVQPWFKPLAYAFILTRSGGYPSVFYGDMYGTKGTTTREIPALKSKIEPLLKARKDYAYGTQRDYIDNPDVIGWTREGDSTKAKSGLATVITDGPGGSKRMYVGTSNAGEIWYDLTGNRTDKITIGSDGYATFPVNGGSVSVWVQQ

SEQ ID NO: 36797 - protein, 480 aa, Cytophaga sp.
NGTMMQYFEWYVPNDGQQWNRLRTDAPYLSSVGITAVWTPPAYKGTSQADVGYGPYDLYDLGEFNQKGTVRTKYGTKGELKSAVNTLHSNGIQVYGDVVMNHKAGADYTENVTAVEVNPSNRYQETSGEYNIQAWTGFNFPGRGTTYSNWKWQWFHFDGTDWDQSRSLSRIFKFDGKAWDWEVSSENGNYDYLMYADYDYDHPDVVNEMKKWGVWYANEVGLDGYRLDAVKHIKFQFLKDWVDNARAATGKEMFTVGEYWQNDLGALNNYLAKVNYNQSLFDAPLHYNFYAASTGGGYYDMRNILNNTLVASNPTKAVTLVENHDTQPGQSLESTVQPWFKPLAYAFILTRSGGYPSVFYGDMYGTKGTTTREIPALKSKIEPLLKARKDYAYGTQRDYIDKPDVIGWTREGDSTKAKSGLATVITDGPGGSKRMYVGTSNAGEIWYDLTGNRTDKITIGSDGYATFPVNGGSVSVWVQQ

SEQ ID NO: 36798 - protein, 480 aa, Cytophaga sp.
NGTMMQYFEWYVPNDGQQWNRLRTDAPYLSSVGITAVWTPPAYKGTSQADVGYGPYDLYDLGEFNQKGTVRTKYGTKGELKSAVNTLHSNGIQVYGDVVMNHKAGADYTENVTAVEVNPSNRYQETSGEYNIQAWTGFNFPGRGTTYSNWKWQWFHFDGTDWDQSRSLSRIFKFDGKAWDWEVSSENGNYDYLMYADYDYDHPDVVNEMKKWGVWYANEVGLDGYRLDAVKHIKFQFLKDWVDNARAATGKEMFTVGEYWQNDLGALNNYLAKVNYNQSLFDAPLHYNFYAASTGGGYYDMRNILNNTLVASNPTKAVTLVENHDTQPGQSLESTVQPWFKPLAYAFILTRSGGYPVVFYGDMYGTKGTTTREIPALKSKIEPLLKARKDYAYGTQRDYIDNPDVIGWTREGDSTKAKSGLATVITDGPGGSKRMYVGTSNAGEIWYDLTGNRTDKITIGSDGYATFPVNGGSVSVWVQQ

SEQ ID NO: 36799 - protein, 480 aa, Cytophaga sp.
NGTMMQYFEWYVPNDGQQWNRLRTDAPYLSSVGITAVWTPPAYKGTSQADVGYGPYDLYDLGEFNQKGTVRTKYGTKGELKSAVNTLHSNGIQVYGDVVMNHKAGADYTENVTAVEVNPSNRYQETSGEYNIQAWTGFNFPGRGTTYSNWKWQWRHFDGTDWDQSRSLSRIFKFDGKAWDWEVSSENGNYDYLMYADYDYDHPDVVNEMKKWGVWYANEVGLDGYRLDAVKHIKFQFLKDWVDNARAATGKEMFTVGEYWQNDLGALNNYLAKVNYNQSLFDAPLHYNFYAASTGGGYYDMRNILNNTLVASNPTKAVTLVENHDTQPGQSLESTVQPWFKPLAYAFILTRSGGYPSVFYGDMYGTKGTTTREIPALKSKIEPLLKARKDYAYGTQRDYIDNPDVIGWTREGDSTKAKSGLATVITDGPGGSKRMYVGTSNAGEIWYDLTGNRTDKITIGSDGYATFPVNGGSVSVWVQQ

SEQ ID NO: 36800 - protein, 480 aa, Cytophaga sp.
NGTMMQYFEWYVPNDGQQWNRLRTDAPYLSSVGITAVWTPPAYKGTSQADVGYGPYDLYDLGEFNQKGTVRTKYGTKGELKSAVNTLHSNGIQVYGDVVMNHKAGADYTENVTAVEVNPSNRYQETSGEYNIQAWTGFNFPGRGTTYSNWKWQWCHFDGTDWDQSRSLSRIFKFDGKAWDWEVSSENGNYDYLMYADYDYDHPDVVNEMKKWGVWYANEVGLDGYRLDAVKHIKFQFLKDWVDNARAATGKEMFTVGEYWQNDLGALNNYLAKVNYNQSLFDAPLHYNFYAASTGGGYYDMRNILNNTLVASNPTKAVTLVENHDTQPGQSLESTVQPWFKPLAYAFILTRSGGYPSVFYGDMYGTKGTTTREIPALKSKIEPLLKARKDYAYGTQRDYIDNPDVIGWTREGDSTKAKSGLATVITDGPGGSKRMYVGTSNAGEIWYDLTGNRTDKITIGSDGYATFPVNGGSVSVWVQQ

SEQ ID NO: 36801 - protein, 480 aa, Cytophaga sp.
NGTMMQYFEWYVPNDGQQWNRLRTDAPYLSSVGITAVWTPPAYKGTSQADVGYGPYDLYDLGEFNQKGTVRTKYGTKGELKSAVNTLHSNGIQVYGDVVMNHKAGADYTEHVTAVEVNPSNRYQETSGEYNIQAWTGFNFPGRGTTYSNWKWQWFHFDGTDWDQSRSLSRIFKFDGKAWDWEVSSENGNYDYLMYADYDYDHPDVVNEMKKWGVWYANEVGLDGYRLDAVKHIKFQFLKDWVDNARAATGKEMFTVGEYWQNDLGALNNYLAKVNYNQSLFDAPLHYNFYAASTGGGYYDMRNILNNTLVASNPTKAVTLVENHDTQPGQSLESTVQPWFKPLAYAFILTRSGGYPSVFYGDMYGTKGTTTREIPALKSKIEPLLKARKDYAYGTQRDYIDNPDVIGWTREGDSTKAKSGLATVITDGPGGSKRMYVGTSNAGEIWYDLTGNRTDKITIGSDGYATFPVNGGSVSVWVQQ

SEQ ID NO: 36802 - protein, 480 aa, Cytophaga sp.
NGTMMQYFEWYVPNDGQQWNRLRSDAPYLSSVGITAVWTPPAYKGTSQADVGYGPYDLYDLGEFNQKGTVRTKYGTKGELKSAVNTLHSNGIQVYGDVVMNHKAGADYTENVTAVEVNPSNRYQETSGEYNIQAWTGFNFPGRGTTYSNWKWQWFHFDGTDWDQSRSLSRIFKFDGKAWDWEVSSENGNYDYLMYADYDYDHPDVVNEMKKWGVWYANEVGLDGYRLDAVKHIKFQFLKDWVDNARAATGKEMFTVGEYWQNDLGALNNYLAKVNYNQSLFDAPLHYNFYAASTGGGYYDMRNILNNTLVASNPTKAVTLVENHDTQPGQSLESTVQPWFKPLAYAFILTRSGGYPSVFYGDMYGTKGTTTREIPALKSKIEPLLKARKDYAYGTQRDYIDNPDVIGWTREGDSTKAKSGLATVITDGPGGSKRMYVGTSNAGEIWYDLTGNRTDKITIGSDGYATFPVNGGSVSVWVQQ

SEQ ID NO: 36803 - protein, 480 aa, Cytophaga sp.
NGTMMQYFEWYVPNDGQQWNRLRTDAPYLSSVGITAVWTPPAYKGTSQADVGYGPYDLYDLGEFNQKGTVRTKYGTKGELKSAVNTLHSNGIQVYGDVVMNHKAGADYTENVTAVEVNPSNRYQETSGEYNIQAWTGFNFPGRGTTYSNWKWQWFHFDGTDWDQSRSLSRIFKFDGKAWDWEVSSENGNYDYLMYADYDYDHPDVVNEMKKWGVWYANEVGLDGYRLDAVKHIKFQFLKDWVDEARAATGKEMFTVGEYWQNDLGALNNYLAKVNYNQSLFDAPLHYNFYAASTGGGYYDMRNILNNTLVASNPTKAVTLVENHDTQPGQSLESTVQPWFKPLAYAFILTRSGGYPSVFYGDMYGTKGTTTREIPALKSKIEPLLKARKDYAYGTQRDYIDNPDVIGWTREGDSTKAKSGLATVITDGPGGSKRMYVGTSNAGEIWYDLTGNRTDKITIGSDGYATFPVNGGSVSVWVQQ

SEQ ID NO: 36804 - protein, 480 aa, Cytophaga sp.
NGTMMQYFEWYVPNDGQQWNRLRTDAPYLSSVGITAVWTPPAYKGTSQADVGYGPYDLYDLGEFNQKGTVRTKYGTKGELKSAVNTLHSNGIQVYGDVVMNHKAGADYTENVTAVEVNPSNRYQETSGEYNIQAWTGFNFPGRGTTYSNWKWQWFHFDGTDWDQSRSVSRIFKFDGKAWDWEVSSENGNYDYLMYADYDYDHPDVVNEMKKWGVWYANEVGLDGYRLDAVKHIKFQFLKDWVDNARAATGKEMFTVGEYWQNDLGALNNYLAKVNYNQSLFDAPLHYNFYAASTGGGYYDMRNILNNTLVASNPTKAVTLVENHDTQPGQSLESTVQPWFKPLAYAFILTRSGGYPSVFYGDMYGTKGTTTREIPALKSKIEPLLKARKDYAYGTQRDYIDNPDVIGWTREGDSTKAKSGLATVITDGPGGSKRMYVGTSNAGEIWYDLTGNRTDKITIGSDGYATFPVNGGSVSVWVQQ

SEQ ID NO: 36805 - protein, 480 aa, Cytophaga sp.
NGTMMQYFEWYVPNDGQQWNRLRTDAPYLSSVGITAVWTPPAYKGTSQADVGYGPYDLYDLGEFNQKGTVRTKYGTKGELKSAVNTLHSNGIQVYGDVVMNHKAGADYTEVVTAVEVNPSNRYQETSGEYNIQAWTGFNFPGRGTTYSNWKWQWFHFDGTDWDQSRSLSRIFKFDGKAWDWEVSSENGNYDYLMYADYDYDHPDVVNEMKKWGVWYANEVGLDGYRLDAVKHIKFQFLKDWVDNARAATGKEMFTVGEYWQNDLGALNNYLAKVNYNQSLFDAPLHYNFYAASTGGGYYDMRNILNNTLVASNPTKAVTLVENHDTQPGQSLESTVQPWFKPLAYAFILTRSGGYPSVFYGDMYGTKGTTTREIPALKSKIEPLLKARKDYAYGTQRDYIDNPDVIGWTREGDSTKAKSGLATVITDGPGGSKRMYVGTSNAGEIWYDLTGNRTDKITIGSDGYATFPVNGGSVSVWVQQ

SEQ ID NO: 36806 - protein, 480 aa, Cytophaga sp.
NGTMMQYFEWYVPNDGQQWNRLRTDAPYLSSVGITAVWTPPAYKGTSQADVGYGPYDLYDLGEFNQKGTVRTKYGTKGELKSAVMTLHSNGIQVYGDVVMNHKAGADYTENVTAVEVNPSNRYQETSGEYNIQAWTGFNFPGRGTTYSNWKWQWFHFDGTDWDQSRSLSRIFKFDGKAWDWEVSSENGNYDYLMYADYDYDHPDVVNEMKKWGVWYANEVGLDGYRLDAVKHIKFQFLKDWVDNARAATGKEMFTVGEYWQNDLGALNNYLAKVNYNQSLFDAPLHYNFYAASTGGGYYDMRNILNNTLVASNPTKAVTLVENHDTQPGQSLESTVQPWFKPLAYAFILTRSGGYPSVFYGDMYGTKGTTTREIPALKSKIEPLLKARKDYAYGTQRDYIDNPDVIGWTREGDSTKAKSGLATVITDGPGGSKRMYVGTSNAGEIWYDLTGNRTDKITIGSDGYATFPVNGGSVSVWVQQ

SEQ ID NO: 36807 - protein, 480 aa, Cytophaga sp.
NGTMMQYFEWYVPNDGQQWNRLRTDAPYLSSVGITAVWTPPAYKGTSQADVGYGPYDLYDLGEFNQKGTVRTKYGTKGELKSAVNTLHSNGIQVYGDVVMNHKAGADYTENVTAVEVNPSNRYQETSGEYNIQAWTGFNFPGRGTTYSNWKWQWFHFDGTDWDQSRSLSRIFKFDGKAWDWEVSSENGNYDYLMYADYDYDHPDVVNEMKKWGVWYANEVGLDGYRLDAVKHIKFQFLKDWVDNARAATGKEMFTVGEYWQNDLGALNNYLAKVNYNQSLFDCPLHYNFYAASTGGGYYDMRNILNNTLVASNPTKAVTLVENHDTQPGQSLESTVQPWFKPLAYAFILTRSGGYPSVFYGDMYGTKGTTTREIPALKSKIEPLLKARKDYAYGTQRDYIDNPDVIGWTREGDSTKAKSGLATVITDGPGGSKRMYVGTSNAGEIWYDLTGNRTDKITIGSDGYATFPVNGGSVSVWVQQ

SEQ ID NO: 36808 - protein, 480 aa, Cytophaga sp.
NGTMMQYFEWYVPNDGQQWNRLRTDAPYLSSVGITAVWTPPAYKGTSQADVGYGPYDLYDLGEFNQKGTVRTKYGTKGELKSAVNTLHSNGIQVYGDVVMNHKAGADYTENVTAVEVNPSNRYQETSGEYNIQAWTGFNFPGRGTTYSNWKWQWFHFDGTDWDQSRLLSRIFKFDGKAWDWEVSSENGNYDYLMYADYDYDHPDVVNEMKKWGVWYANEVGLDGYRLDAVKHIKFQFLKDWVDNARAATGKEMFTVGEYWQNDLGALNNYLAKVNYNQSLFDAPLHYNFYAASTGGGYYDMRNILNNTLVASNPTKAVTLVENHDTQPGQSLESTVQPWFKPLAYAFILTRSGGYPSVFYGDMYGTKGTTTREIPALKSKIEPLLKARKDYAYGTQRDYIDNPDVIGWTREGDSTKAKSGLATVITDGPGGSKRMYVGTSNAGEIWYDLTGNRTDKITIGSDGYATFPVNGGSVSVWVQQ

SEQ ID NO: 36809 - protein, 480 aa, Cytophaga sp.
NGTMMQYFEWYVPNDGQQWNRLRTDAPYLSSVGITAVWTPPAYKGTSQADVGYGPYDLYDLGEFNQKGTVRTKYGTKGELKSAVNTLHSNGIQVYGDVVMNHKAGADYTENVTAVEVNPSNRYQETSGEYNIQAWTGFNFPGRGTTYSNWKWQWFHFDGTDWDQSRSLSRIFKFDGKAWDWEVSSENGNYDYLMYADYDYDHPDVVNEMKKWGVWYANEVGLDGYRLDAVKHIKFQFLKDWVDNARAATGKEMFTVGEYWQNDLGALNNYLAKVNYNQSLFDAPLHYNFYAASTGGGYYDMRNILNNTLVASNPTKAVTLVENHDTQPGQSLESTVQPWFKPLAYAFILTRSGGYPSVFYGDMYGTKGTTTREIPALKSKIEPLLKARKDYAYGTQRDYIDNPDVIGWTREGDSTKAKSGLATVITDGPGGSKRMYVGTSNAGEIWYDLTGNRTDKITIGSDGYATFPVNYGSVSVWVQQ

SEQ ID NO: 36810 - protein, 480 aa, Cytophaga sp.
NGTMMQYFEWYVPNDGQQWNRLRTDAPYLSSVGITAVWTPPAYKGTSQADVGYGPYDLYDLGEFNQKGTVRTKYGTKGELKSAVNTLHSNGIQVYGDVVMNHKAGADYTENVTAVEVNPSNRYQETSGEYNIQAWTGFNFPGRGRTYSNWKWQWFHFDGTDWDQSRSLSRIFKFDGKAWDWEVSSENGNYDYLMYADYDYDHPDVVNEMKKWGVWYANEVGLDGYRLDAVKHIKFQFLKDWVDNARAATGKEMFTVGEYWQNDLGALNNYLAKVNYNQSLFDAPLHYNFYAASTGGGYYDMRNILNNTLVASNPTKAVTLVENHDTQPGQSLESTVQPWFKPLAYAFILTRSGGYPSVFYGDMYGTKGTTTREIPALKSKIEPLLKARKDYAYGTQRDYIDNPDVIGWTREGDSTKAKSGLATVITDGPGGSKRMYVGTSNAGEIWYDLTGNRTDKITIGSDGYATFPVNGGSVSVWVQQ

SEQ ID NO: 36811 - protein, 480 aa, Cytophaga sp.
NGTMMQYFEWYVPNDGQQWNRLRTDAPYLSSVGITAVWTPPAYKGTSQADVGYGPYDLYDLGEFNQKGTVRTKYGTKGELKSAVNTLHSNGIQVYGDVVMNHKAGADYTENVTAVEVNPSNRYQETSGEYNIQAWTGFNFPGRGTTYSNWKWQWFHFDGTDWDQSRSLSRIFKFDGKAWDWEVSSENGNYDYLMYADYDYDHPDVVNEMKKWGVWYANEVGLDGYRLDAVKHIKFQFLKDWVDNARAATGKEMFTVGEYWQNDLGALNNYLAKVNYNQSLFDAPLHYNFYAASTGGGYYDMRNILNNTLVASNPTKAVTLVENHDTQPGQSLESTVQPWFKPLAYAFILTRSGGYPSVFYGDMYGTKGTTTREIPALKSKIEPLLKARKDYAYGTQRDYIDNPDVIGWTREGDSAKAKSGLATVITDGPGGSKRMYVGTSNAGEIWYDLTGNRTDKITIGSDGYATFPVNGGSVSVWVQQ

SEQ ID NO: 36812 - protein, 480 aa, Cytophaga sp.
NGTMMQYFEWYVPNDGQQWNRLRTDAPYLSSVGITAVWTPPAYKGTSQADVGYGPYDLYDLGEFNQKGTVRTKYGTKGELKSAVNTLHSNGIQVYGDVVMNHKAGADYTENVTAVEVNPSNRYQETSGEYNIQAWTGFLFPGRGTTYSNWKWQWFHFDGTDWDQSRSLSRIFKFDGKAWDWEVSSENGNYDYLMYADYDYDHPDVVNEMKKWGVWYANEVGLDGYRLDAVKHIKFQFLKDWVDNARAATGKEMFTVGEYWQNDLGALNNYLAKVNYNQSLFDAPLHYNFYAASTGGGYYDMRNILNNTLVASNPTKAVTLVENHDTQPGQSLESTVQPWFKPLAYAFILTRSGGYPSVFYGDMYGTKGTTTREIPALKSKIEPLLKARKDYAYGTQRDYIDNPDVIGWTREGDSTKAKSGLATVITDGPGGSKRMYVGTSNAGEIWYDLTGNRTDKITIGSDGYATFPVNGGSVSVWVQQ

SEQ ID NO: 36813 - protein, 480 aa, Cytophaga sp.
NGTMMQYFEWYVPNDGQQWNRLRTDAPYLSSVGITAVWTPPAYKGTSQADVGYGPYDLYDLGEFNQKGTVRTKYGTKGELKSAVNTLHSNGIQVYGDVVMNHKAGADYTENVTAVEVNPSNRYQETSGEYNIQAWTGFNFPGRGTTYSNWKWQWFHFDGTDWDQSRSLSRIFKFDGKAWDWEVSSENGNYDYLMYADYDYDHPDVVNEMKKWGVWYANEVGLDGYRLDAVKHIKFQFLKDWVDNARAATGKEMFTVGEYWQNDLGALNNYLAKVNYNQSLFDAPLHYNFYAASTGGGYYDMRNILNNTLVASNPTKAVTLVENHDTQPGQSLESTVQPWFKPLAYAFILTRSGGYPSVFYGDMYGTKGTTTREIPALKSKIEPLLKARKDYAYGYQRDYIDNPDVIGWTREGDSTKAKSGLATVITDGPGGSKRMYVGTSNAGEIWYDLTGNRTDKITIGSDGYATFPVNGGSVSVWVQQ

SEQ ID NO: 36814 - protein, 480 aa, Cytophaga sp.
NGTMMQYFEWYVPNDGQQWNRLRTDAPYLSSVGITAVWTPPAYKGTSQADVGYGPYDLYDLGEFNQKGTVRTKYGTKGELKSAVNTLHSNGIQVYGDVVMNHKAGADYTENVTAVEVNPSNRYQETSGEYNIQAWTGFNFPGRGTTYSNWKWQWPHFDGTDWDQSRSLSRIFKFDGKAWDWEVSSENGNYDYLMYADYDYDHPDVVNEMKKWGVWYANEVGLDGYRLDAVKHIKFQFLKDWVDNARAATGKEMFTVGEYWQNDLGALNNYLAKVNYNQSLFDAPLHYNFYAASTGGGYYDMRNILNNTLVASNPTKAVTLVENHDTQPGQSLESTVQPWFKPLAYAFILTRSGGYPSVFYGDMYGTKGTTTREIPALKSKIEPLLKARKDYAYGTQRDYIDNPDVIGWTREGDSTKAKSGLATVITDGPGGSKRMYVGTSNAGEIWYDLTGNRTDKITIGSDGYATFPVNGGSVSVWVQQ

SEQ ID NO: 36815 - protein, 480 aa, Cytophaga sp.
NGTMMQYFEWYVPNDGQQWNRLRTDAPYLSSVGITAVWTPPAYKGTSQADVGYGPYDLYDLGEFNQKGTVRTKYGTKGELKSAVNTLHSNGIQVYGDVVMNHKAGADYTENVTAVEVNPSNRYQETSGEYNIQAWTGFNFPGRGTTYSNWKWQWFHFDGTDWDQSRSLSRIFKFDGKAWDWEVSSENGNYDYLMYADYDYDHPDVVNEMKKWGVWYANEVGLDGYRLDAVKHIKFQFLKDWVDNARAATGKEMFTVGEYWQNDLGALNNYLAKVNYNQSLFDAPLHYNFYAASTGGGYYDMRNILNNTLVASNPTKAVTLVENHDTQPGQSLESTVQPWFKPLAYAFILTRSGGYPSVFYGDMYGTKGTTTREIPALKSKIEPLLKARKDYAYGTQRDYIDNPDVIGWTREGDSTKAKSGLATVITDGPGGSKRMYVGTSNAGEIWYDLTGNRTDKITIGSDGTATFPVNGGSVSVWVQQ

SEQ ID NO: 36816 - protein, 480 aa, Cytophaga sp.
NGTMMQYFEWYVPNDGQQWNRLRTDAPYLSSVGITAVWTPPAYKGTSQADVGYGPYDLYDLGEFNQKGTVRTKYGTKGELKSAVNTLHSNGIQVYGDVVMNHKAGADYTENVTAVEVNPSNRYQETSGEYNIQAWTGFNFPGRGTTYSNWKWQWFHFDGTDWDQSRSLSRIFKFDGKAWDWEVSSENGNYDYLMYADYDYDHPDVVNEMKKWGVWYANEVGLDGYRLDAVKHIKFQFLKDWVDNARAATGKEMFTVGEYWQNDLGALNNYLAKVNYNQSLFDAPLHYNFYAASTGGGYYDMRNILNNTLVASNPTKAVTLVENHDTQPGQSLESTVQPWFKPLAYAFILTRSGGYPSVFYGDMYGTKGTTTREIPALKSDIEPLLKARKDYAYGTQRDYIDNPDVIGWTREGDSTKAKSGLATVITDGPGGSKRMYVGTSNAGEIWYDLTGNRTDKITIGSDGYATFPVNGGSVSVWVQQ

SEQ ID NO: 36817 - protein, 480 aa, Cytophaga sp.
NGTMMQYFEWYVPNDGQQWNRLRTDAPYLSSVGITAVWTPPAYKGTSQADVGYGPYDLYDLGEFNQKGTVRTKYGTKGELKSAVNTLHSNGIQVYGDVVMNHKAGADYTENVTAVEVNPSNRYQETSGEYNIQAWTGFNFPGRGTTYSNWKWQWFHFDGTDWDQSRSLSRIFKFDGKAWDWEVSSENGNYDYLMYADYDYDHPDVVNEMKKWGVWYANEVGLDGYRLDAVKHIKFQFLKDWVDNARHATGKEMFTVGEYWQNDLGALNNYLAKVNYNQSLFDAPLHYNFYAASTGGGYYDMRNILNNTLVASNPTKAVTLVENHDTQPGQSLESTVQPWFKPLAYAFILTRSGGYPSVFYGDMYGTKGTTTREIPALKSKIEPLLKARKDYAYGTQRDYIDNPDVIGWTREGDSTKAKSGLATVITDGPGGSKRMYVGTSNAGEIWYDLTGNRTDKITIGSDGYATFPVNGGSVSVWVQQ

SEQ ID NO: 36818 - protein, 480 aa, Cytophaga sp.
NGTMMQYFEWYVPNDGQQWNRLRTDAPYLSSVGITAVWTPPAYKGTSQADVGYGPYDLYDLGEFNQKGTVRTKYGTKGELKSAVNTLHSNGIQVYGDVVMNHKAGADYTENVTAVEVNPSNRYQETSGEYNIQAWTGFNFPGRGTTYSNWKWQWFHFDGTDWDQSRSLSRIFKFDGKAWDWEVSSENGNYDYLMYADYDYDHPDVVNEMKKWGVWYANEVGLDGYRLDAVKHIKFQFLKDWVVNARAATGKEMFTVGEYWQNDLGALNNYLAKVNYNQSLFDAPLHYNFYAASTGGGYYDMRNILNNTLVASNPTKAVTLVENHDTQPGQSLESTVQPWFKPLAYAFILTRSGGYPSVFYGDMYGTKGTTTREIPALKSKIEPLLKARKDYAYGTQRDYIDNPDVIGWTREGDSTKAKSGLATVITDGPGGSKRMYVGTSNAGEIWYDLTGNRTDKITIGSDGYATFPVNGGSVSVWVQQ

SEQ ID NO: 36819 - protein, 480 aa, Cytophaga sp.
NGTMMQYFEWYCPNDGQQWNRLRTDAPYLSSVGITAVWTPPAYKGTSQADVGYGPYDLYDLGEFNQKGTVRTKYGTKGELKSAVNTLHSNGIQVYGDVVMNHKAGADYTENVTAVEVNPSNRYQETSGEYNIQAWTGFNFPGRGTTYSNWKWQWFHFDGTDWDQSRSLSRIFKFDGKAWDWEVSSENGNYDYLMYADYDYDHPDVVNEMKKWGVWYANEVGLDGYRLDAVKHIKFQFLKDWVDNARAATGKEMFTVGEYWQNDLGALNNYLAKVNYNQSLFDAPLHYNFYAASTGGGYYDMRNILNNTLVASNPTKAVTLVENHDTQPGQSLESTVQPWFKPLAYAFILTRSGGYPSVFYGDMYGTKGTTTREIPALKSKIEPLLKARKDYAYGTQRDYIDNPDVIGWTREGDSTKAKSGLATVITDGPGGSKRMYVGTSNAGEIWYDLTGNRTDKITIGSDGYATFPVNGGSVSVWVQQ

SEQ ID NO: 36820 - protein, 480 aa, Cytophaga sp.
NGTMMQYFEWYVPNDGQQWNRLRTDAPYLSSVGITAVWTPPAYKGTSQADVGYGPYDLYDLGEFNQKGTVRTKYGTKGELKSAVNTLHSNGIQVYGDVVMNHKAGADYTENVTAVEVNPSNRYQETSGEYNIQAWTGFNFPGRGTTYSNWKWQWFHFDGTDWDQSRSLSRIFKFDGKAWDWEVSSENGNYDYLMYADYDYDHPDVVNEMKKWGVWYANEVGLDGYRLDAVKHIKFQFLKDWVDNARAATGKEMFTVGEYWQNDLGALNNYLAKVNYNQSLFDAPLHYNFYAASTGGGYYDMRNILNNTLVASNPTKAVTLVENHDTQPGQSLESTVQPWFKPLAYAFILTRSGGYPSVFYGDMYGTKGTTTREIPALKSKIEPLLKARKDYAYGTQRDYIDNPDVIGWTREGDSTKAKSGLATVITDGPGGSKRMYVGTSNAGEIWYDLTGNRTDKITIGSDGYAIFPVNGGSVSVWVQQ

SEQ ID NO: 36821 - protein, 480 aa, Cytophaga sp.
NGTMMQYFEWYVPNDGQQWNRLRTDAPYLSSVGITAVWTPPAYKGTSQADVGYGPYDLYDLGEFNQKGTVRTKYGTKGELKSAVNTLHSNGIQVYGDVVMNHKAGADYTENVTAVEVNPSNRYQETSGEYNIQAWTGFNFPGRGTTYSNWKWQWFHFDGTDWDQSRSLSRIFKFDGKAWDWEVSSENGNYDYLMYADYDYDHPDVVNEMKKWGVWYANEVGLDGYRLDAVKHIKFQFLKDWVDNARAATGKEMFTVGEYWQNDLGALNNYLAKVNYNQSLFDAPLHYNFYAASTGGGYYDMRNILNNTLVASNPTKAVTLVENHDTQPGQSLESTVQPWFKPLAYAFILTRSGGYPSVFYGDMYGTKGTTTREIPALKSKIEPLLKARKDYAYGTQRDYIDNPDVIGWTREGDSPKAKSGLATVITDGPGGSKRMYVGTSNAGEIWYDLTGNRTDKITIGSDGYATFPVNGGSVSVWVQQ

SEQ ID NO: 36822 - protein, 480 aa, Cytophaga sp.
NGTMMQYFEWYVPNDGQQWNRLRTDAPYLSSVGITAVWTPPAYKGTSQADVGYGPYDLYDLGEFNQKGTVRTKYGTKGELKSAVNTLHSNGIQVYGDVVMNHKAGADYTENVTAVEVNPSNRYQETSGEYNIQAWTGFYFPGRGTTYSNWKWQWFHFDGTDWDQSRSLSRIFKFDGKAWDWEVSSENGNYDYLMYADYDYDHPDVVNEMKKWGVWYANEVGLDGYRLDAVKHIKFQFLKDWVDNARAATGKEMFTVGEYWQNDLGALNNYLAKVNYNQSLFDAPLHYNFYAASTGGGYYDMRNILNNTLVASNPTKAVTLVENHDTQPGQSLESTVQPWFKPLAYAFILTRSGGYPSVFYGDMYGTKGTTTREIPALKSKIEPLLKARKDYAYGTQRDYIDNPDVIGWTREGDSTKAKSGLATVITDGPGGSKRMYVGTSNAGEIWYDLTGNRTDKITIGSDGYATFPVNGGSVSVWVQQ

SEQ ID NO: 36823 - protein, 480 aa, Cytophaga sp.
NGTMMQYFEWYVPNDGQQWNRLRTDAPYLSSVGITAVWTPPAYKGTSQADVGYGPYDLYDLGEFNQKGTVRTKYGTKGELKSAVNTLHSNGIQVYGDVVMNHKAGADYTENVTAVEVNPSNRYQETSGEYNIQAWTGFNFPGRGTTYSNWKWQWFHFDGTDWDQSRSLSRIFKFDGKAWDWEVSSENGNYDYLMYADYDYDHPDVVNEMKKWGVWYANEVGLDGYRLDAVKHIKFQFLKDWVDNARAATGKEMFTVGEYWQNDLGALNNYLAKVNYNQSLFDAPLHYNFYAASTGGGYYDMRNILNNTLVASNPTKAVTLVENHDTQPGQSLESTVQPWFKPLAYAFILTRSGGYPSVFYGDMYGTKGTTTREIPALKSKIEPLLKARKDYAYGTQRDYIDNPDVIGWTREGDSTKAKSGLATVITDGPGGSKRMYVGTSNAGEIWYDLTGNRTDYITIGSDGYATFPVNGGSVSVWVQQ

SEQ ID NO: 36824 - protein, 480 aa, Cytophaga sp.
NGTMMQYFEWYVPNDGQQWNRLRTDAPYLSSVGITAVWTPPAYKGTSQADVGYGPYDLYDLGEFNQKGTVRTKYGTKGELKSAVNTLHSNGIQVYGDVVMNHKAGADYTENVTAVEVNPSNRYQETSGEYNIQAWTGFNFPGRGTTYSNWKWQWFHFDGTDWDQSRSLSRIFKFDGKAWDWEVSSENGNYDYLMYADLDYDHPDVVNEMKKWGVWYANEVGLDGYRLDAVKHIKFQFLKDWVDNARAATGKEMFTVGEYWQNDLGALNNYLAKVNYNQSLFDAPLHYNFYAASTGGGYYDMRNILNNTLVASNPTKAVTLVENHDTQPGQSLESTVQPWFKPLAYAFILTRSGGYPSVFYGDMYGTKGTTTREIPALKSKIEPLLKARKDYAYGTQRDYIDNPDVIGWTREGDSTKAKSGLATVITDGPGGSKRMYVGTSNAGEIWYDLTGNRTDKITIGSDGYATFPVNGGSVSVWVQQ

SEQ ID NO: 36825 - protein, 480 aa, Cytophaga sp.
NGTMMQYFEWYVPNDGQQWNRLRTDAPYLSSVGITAVWTPPAYKGTSQADVGYGPYDLYDLGEFNQKGTVRTKYGTKGELKSAVNTLHSNGIQVYGDVVMNHKAGADYTENVTAVEVNPSNRYQETSGEYNIQAWTGFNFPGRGTTYSNWKWQWFHFDGTDWDQSRSLSRIFKFDGKAWDWEVSSENGNYDYLMYADYDYDHPDVVNEMKKWGVWYANEVGLDGYRLDAVKHIKFQFLKDWVDNARAATGKEMFTVGEYWQNDLGALNNYLAKVNYNQSLFDAPLHYNFYAASTGGGYYDMRNILNNTLVASNPTKAVTLVENHDTQPGQSLESTVQPWFKPLAYAFILTRSGGYPSVFYGDMYGTKGTTTREIPALKLKIEPLLKARKDYAYGTQRDYIDNPDVIGWTREGDSTKAKSGLATVITDGPGGSKRMYVGTSNAGEIWYDLTGNRTDKITIGSDGYATFPVNGGSVSVWVQQ

SEQ ID NO: 36826 - protein, 480 aa, Cytophaga sp.
NGTMMQYFEWYVPNDGQQWNRLRTDAPYLSSVGITAVWTPPAYKGTSQADVGYGPYDLYDLGEFNQKGTVRTKYGTKGELKSAVNTLHSNGIQVYGDVVMNHKAGADYTENVTAVEVNPSNRYQETSGEYNIQAWTGFNFPGRGTTYSNWKWQWFHFDGTDWDQSRSLSRIFKFDGKAWDWEVSSENGNYDYLMYADYDYDHPDVVNEMKKWGVWYANEVGLDGYRLDAVKHIKFQFLKDWVDNARAATGKEMFTVGEYWQNDLGALNNYLAKVNYNQSLFDAPLHYNFYAASTGGGYYDMRNILNNTLVASNPTKAVTLVENHDTQPGQSLESTVQPWFKPLAYAFILTRSGGYPSVFYGDMYGTKGTTTREIPALKSKIEPLLKARKDYAYGTQRDYIDNPDVIGWTREGDSTKAKSGLATVITDGPGGSKRMYVGTSNAGEIWYDLTGNRTDKITIGSDGYANFPVNGGSVSVWVQQ

SEQ ID NO: 36827 - protein, 480 aa, Cytophaga sp.
NGTMMQYFEWYVPNDGQQWNRLRTDAPYLSSVGITAVWTPPAYKGTSQADVGYGPYDLYDLGEFNQKGTVRTKYGTKGELKSAVNTLHSNGIQVYGDVVMNHKAGADYTENVTAVEVNPSNRYQETSGEYNIQAWTGFPFPGRGTTYSNWKWQWFHFDGTDWDQSRSLSRIFKFDGKAWDWEVSSENGNYDYLMYADYDYDHPDVVNEMKKWGVWYANEVGLDGYRLDAVKHIKFQFLKDWVDNARAATGKEMFTVGEYWQNDLGALNNYLAKVNYNQSLFDAPLHYNFYAASTGGGYYDMRNILNNTLVASNPTKAVTLVENHDTQPGQSLESTVQPWFKPLAYAFILTRSGGYPSVFYGDMYGTKGTTTREIPALKSKIEPLLKARKDYAYGTQRDYIDNPDVIGWTREGDSTKAKSGLATVITDGPGGSKRMYVGTSNAGEIWYDLTGNRTDKITIGSDGYATFPVNGGSVSVWVQQ

SEQ ID NO: 36828 - protein, 480 aa, Cytophaga sp.
NGTMMQYFEWYVPNDGQQWNRLRTDAPYLSSVGITAVWTPPAYKGTSQADVGYGPYDLYDLGEFNQKGTVRTKYGTKGELKSAVNTLHSNGIQVYGDVVMNHKAGADYTENVTAVEVNPSNRYQETSGEYNIQAWTGFNFPGRGTTYSNWKWQWFHFDGTDWDQSRSLSRIFKFDGKAWDWEVSSENGNYDYLMYADYDYDHPDVVNEMKKWGVWYANEVGLDGYRLDAVKHIKFQFLKDWVDNARAATGKEMFTVGEYWQNDIGALNNYLAKVNYNQSLFDAPLHYNFYAASTGGGYYDMRNILNNTLVASNPTKAVTLVENHDTQPGQSLESTVQPWFKPLAYAFILTRSGGYPSVFYGDMYGTKGTTTREIPALKSKIEPLLKARKDYAYGTQRDYIDNPDVIGWTREGDSTKAKSGLATVITDGPGGSKRMYVGTSNAGEIWYDLTGNRTDKITIGSDGYATFPVNGGSVSVWVQQ

SEQ ID NO: 36829 - protein, 480 aa, Cytophaga sp.
NGTMMQYFEWYVPNDGQQWNRLRTDAPYLSSVGITAVWTPPAYKGTSQADVGYGPYDLYDLGEFNQKGTVRTKYGTKGELKSAVNTLHSNGIQVYGDVVMNHKAGADYTENVTAVEVNPSNRYQETSGEYNIQAWTGFNFPGRGTTYSNWKWQWFHFDGTDWDQSRSLSRIFKFDGKAWDWEVSSENGNYDYLMYADYDYDHPDVVNEMKKWGVWYANEVGLDGYRLDAVKHIKFQFLKDWVDNARAATGKEMFTVGEYWQNDLGALNNYLAKVNYNQSLFDAPLHYNFYAASTGGGYYDMRNILNNTLVASNPTKAVTLVENHDTQPGQSLESTVQPWFKPLAYAFILTRSGGYPSVFYGDMYGTKGTTTREIPALKSVIEPLLKARKDYAYGTQRDYIDNPDVIGWTREGDSTKAKSGLATVITDGPGGSKRMYVGTSNAGEIWYDLTGNRTDKITIGSDGYATFPVNGGSVSVWVQQ

SEQ ID NO: 36830 - protein, 480 aa, Cytophaga sp.
NGTMMQYFEWYVPNDGQQWNRLRTDAPYLSSVGITAVWTPPAYKGTSQADVGYGPYDLYDLGEFNQKGTVRTKYGTKGELKSAVNTLHSNGIQVYGDVVMNHKAGADYTENVTAVEVNPSNRYQETSGEYHIQAWTGFNFPGRGTTYSNWKWQWFHFDGTDWDQSRSLSRIFKFDGKAWDWEVSSENGNYDYLMYADYDYDHPDVVNEMKKWGVWYANEVGLDGYRLDAVKHIKFQFLKDWVDNARAATGKEMFTVGEYWQNDLGALNNYLAKVNYNQSLFDAPLHYNFYAASTGGGYYDMRNILNNTLVASNPTKAVTLVENHDTQPGQSLESTVQPWFKPLAYAFILTRSGGYPSVFYGDMYGTKGTTTREIPALKSKIEPLLKARKDYAYGTQRDYIDNPDVIGWTREGDSTKAKSGLATVITDGPGGSKRMYVGTSNAGEIWYDLTGNRTDKITIGSDGYATFPVNGGSVSVWVQQ

SEQ ID NO: 36831 - protein, 480 aa, Cytophaga sp.
NGTMMQYFEWYVPNDGQQWNRLRTDAPYLSSVGITAVWTPPAYKGTSQADVGYGPYDLYDLGEFNQKGTVRTKYGTKGELKSAVNTLHSNGIQVYGDVVMNHKAGADYTENVTAVEVNPSNRYQETSGEYNIQAWTGFNFPGRGTTYSNWKWQWFHFDGTDWDQSRSLSRIFKFDGKAWDWEVSSENGNYDYLMYADYDYDHPDVVNEMKKWGVWYANEVGLDGYRLDAVKHIKFQFLKDWVDNARAATGKEMFTVGEYWQNDLGALNNYLAKVNYNQSLFDAPLHYNFYAASTGGGYYDMRNILNNTLVASNPTKAVTLVENHDTQPGQSLESTVQPWFKPLAYAFILTRSGGYPSVFYGDMYGTKGTTTREIPALKSKIEPLLKARKDYAYGTQSDYIDNPDVIGWTREGDSTKAKSGLATVITDGPGGSKRMYVGTSNAGEIWYDLTGNRTDKITIGSDGYATFPVNGGSVSVWVQQ

SEQ ID NO: 36832 - protein, 480 aa, Cytophaga sp.
NGTMMQYFEWYVPNDGQQWNRLRTDAPYLSSVGITAVWTPPAYKGTSQADVGYGPYDLYDLGEFNQKGTVRTKYGTKGELKSAVNTLHSNGIQVYGDVVMNHKAGADYTENVTAVEVNPSNRYQETSGEYNIQAWTGFNFPGRGTTYSNWKWQWFHFDGTDWDQSRSLSRIFKFDGKAWDWEVSSENGNYDYLMYADYDYDHPDVVNEMKKWGVWYANEVGLDGYRLDAVKHIKFQFLKDWVDNARAATGKEMFTVGEYWQNDLGALNNYLAKVNYNQSLFDAPLHYNFYAASTGGGYYDMRNILNNTLVAGNPTKAVTLVENHDTQPGQSLESTVQPWFKPLAYAFILTRSGGYPSVFYGDMYGTKGTTTREIPALKSKIEPLLKARKDYAYGTQRDYIDNPDVIGWTREGDSTKAKSGLATVITDGPGGSKRMYVGTSNAGEIWYDLTGNRTDKITIGSDGYATFPVNGGSVSVWVQQ

SEQ ID NO: 36833 - protein, 480 aa, Cytophaga sp.
NGTMMQYFEWYVPNDGQQWNRLRTDAPYLSSVGITAVWTPPAYKGTSQADVGYGPYDLYDLGEFNQKGTVRTKYGTKGELKSAVNTLHSNGIQVYGDVVMNHKAGADYTENVTAVEVNPSNRYQETSGEYNIQAWTGFNFPGRGTTYSNWKWQWFHFDGTDWDQSRSLSRIFKFDGKAWDWEVSSENGNYDYLMYADYDYDHPDVVNEMKKWGVWYANEVGLDGYRLDAVKHIKFQFLKDWVDNARAATGKEMFTVGEYWQNDLGALNNYLAKVNYNQSLFDAPLHYNFYAASTGGGYYDMRNILNNTLVQSNPTKAVTLVENHDTQPGQSLESTVQPWFKPLAYAFILTRSGGYPSVFYGDMYGTKGTTTREIPALKSKIEPLLKARKDYAYGTQRDYIDNPDVIGWTREGDSTKAKSGLATVITDGPGGSKRMYVGTSNAGEIWYDLTGNRTDKITIGSDGYATFPVNGGSVSVWVQQ

SEQ ID NO: 36834 - protein, 480 aa, Cytophaga sp.
NGTMMQYFEWYVPNDGQQWNRLRTDAPYLSSVGITAVWTPPAYKGTSQADVGYGPYDLYDLGEFNQKGTVRTKYGTKGELKSAVNTLHSNGIQVYGDVVMNHKAGADDTENVTAVEVNPSNRYQETSGEYNIQAWTGFNFPGRGTTYSNWKWQWFHFDGTDWDQSRSLSRIFKFDGKAWDWEVSSENGNYDYLMYADYDYDHPDVVNEMKKWGVWYANEVGLDGYRLDAVKHIKFQFLKDWVDNARAATGKEMFTVGEYWQNDLGALNNYLAKVNYNQSLFDAPLHYNFYAASTGGGYYDMRNILNNTLVASNPTKAVTLVENHDTQPGQSLESTVQPWFKPLAYAFILTRSGGYPSVFYGDMYGTKGTTTREIPALKSKIEPLLKARKDYAYGTQRDYIDNPDVIGWTREGDSTKAKSGLATVITDGPGGSKRMYVGTSNAGEIWYDLTGNRTDKITIGSDGYATFPVNGGSVSVWVQQ

SEQ ID NO: 36835 - protein, 480 aa, Cytophaga sp.
NGTMMQYFEWYVPNDGQQWNRLRTDAPYLSSVGITAVWTPPAYKGTSQADVGYGPYDLYDLGEFNQKGTVRTKYGTKGELKSAVNTLHSNGIQVYGDVVMNHKAGADYTENVTAVEVNPSNRYQETSGEYNIQAWTGFNFPGRGTTYSNWKWQWFHFDGTDWDQSRSLSRIFKFDGKAWDWEVSSENGNYDYLMYADYDYDHPDVVNEMKKWGVWYANEVGLDGYRLDAVKHIKFYFLKDWVDNARAATGKEMFTVGEYWQNDLGALNNYLAKVNYNQSLFDAPLHYNFYAASTGGGYYDMRNILNNTLVASNPTKAVTLVENHDTQPGQSLESTVQPWFKPLAYAFILTRSGGYPSVFYGDMYGTKGTTTREIPALKSKIEPLLKARKDYAYGTQRDYIDNPDVIGWTREGDSTKAKSGLATVITDGPGGSKRMYVGTSNAGEIWYDLTGNRTDKITIGSDGYATFPVNGGSVSVWVQQ

SEQ ID NO: 36836 - protein, 480 aa, Cytophaga sp.
NGTMMQYFEWYVPNDGQQWNRLRTDAPYLSSVGITAVWTPPAYKGTSQADVGYGPYDLYDLGEFNQKGTVRTKYGTKGELKSAVNTLHSNGIQVYGDVVMNHKAGADYTENVTAVEVNPSNRYQETSGEYNIQAWTGFNFPGRGTTYSNWKWQWFHFDGTDWDQSRSCSRIFKFDGKAWDWEVSSENGNYDYLMYADYDYDHPDVVNEMKKWGVWYANEVGLDGYRLDAVKHIKFQFLKDWVDNARAATGKEMFTVGEYWQNDLGALNNYLAKVNYNQSLFDAPLHYNFYAASTGGGYYDMRNILNNTLVASNPTKAVTLVENHDTQPGQSLESTVQPWFKPLAYAFILTRSGGYPSVFYGDMYGTKGTTTREIPALKSKIEPLLKARKDYAYGTQRDYIDNPDVIGWTREGDSTKAKSGLATVITDGPGGSKRMYVGTSNAGEIWYDLTGNRTDKITIGSDGYATFPVNGGSVSVWVQQ

SEQ ID NO: 36837 - protein, 480 aa, Cytophaga sp.
NGTMMQYFEWYVPNDGQQWNRLRTDAPYLSSVGITAVWTPPAYKGTSQADVGYGPYDLYDLGEFNQKGTVRTKYGTKGELKSAVNTLHSNGIQVYGDVVMNHKAGADYTENVTAVEVNPSNRYQETSGEYNIQAWTGFNFPGRGTTYSNWKWQWFHFDGTDWDQSRSLSRIFKFDGKAWDWEVSSENGNYDYLMYADYDYDHPDVVNEMKKWGVWYANEVGLDGYRLDAVKHIKFAFLKDWVDNARAATGKEMFTVGEYWQNDLGALNNYLAKVNYNQSLFDAPLHYNFYAASTGGGYYDMRNILNNTLVASNPTKAVTLVENHDTQPGQSLESTVQPWFKPLAYAFILTRSGGYPSVFYGDMYGTKGTTTREIPALKSKIEPLLKARKDYAYGTQRDYIDNPDVIGWTREGDSTKAKSGLATVITDGPGGSKRMYVGTSNAGEIWYDLTGNRTDKITIGSDGYATFPVNGGSVSVWVQQ

SEQ ID NO: 36838 - protein, 480 aa, Cytophaga sp.
NGTMMQYFEWYVPNDGQQWNRLRTDAPYLSSVGITAVWTPPAYKGTSQADVGYGPYDLYDLGEFNQKGTVRTKYGTKGELKSAVNTLHSNGIQVYGDVVMNHKAGADYTENVTAVEVNPSNRYQETSGEYNIQAWTGFNFPGRGTTYSNWKWQWFHFDGTDWDQSRSLSRIFKFDGKAWDWEVSSENGNYDYLMYADYDYDHPDVVNEMKKWGVWYANEVGLDGYRLDAVKHIKFQFLKDWVDNARAATGKEMFTVGEYWQNDLGALNNYLAKVNYNQSLFDAPLHYNFYAASTGGGYYDMRNILNNTLVASNPTKAVTLVENHDTQPGQSLESTVQPWFKPLAYAFILTRSGGYPSVFYGDMYGTKGTTTREIPALKSKIEPLLKARKDYAYGTQRDYIDNPDVIGWTREGDSTKAKSGLATVITDGPGGSKRMYVGTSNAGEIWYDLTGNRTDQITIGSDGYATFPVNGGSVSVWVQQ

SEQ ID NO: 36839 - protein, 480 aa, Cytophaga sp.
NGTMMQYFEWYVPNDGQQWNRLRTDAPYLSSVGITAVWTPPAYKGTSQADVGYGPYDLYDLGEFNQKGTVRTKYGTKGELKSAVNTLHSNGIQVYGDVVMNHKAGADYTENVTAVEVNPSNRYQETSGEYNIQAWTGFNFPGRGTTYSNWKWQWFHFDGTDWDQSRSLSRIFKFDGKAWDWEVSSENGNYDYLMYADYDYDHPDVVNEMKKWGVWYANEVGLDGYRLDAVKHIKFQFLKDWVDNARAATGKEMFTVGEYWQNDLGALNNYLAKVNYNQSLFDAPLHYNFYAASTGGGYYDMRNILNNTLVASNPTKAVTLVENHDTQPGQSLESTVQPWFKPLAYAFILTRVGGYPSVFYGDMYGTKGTTTREIPALKSKIEPLLKARKDYAYGTQRDYIDNPDVIGWTREGDSTKAKSGLATVITDGPGGSKRMYVGTSNAGEIWYDLTGNRTDKITIGSDGYATFPVNGGSVSVWVQQ

SEQ ID NO: 36840 - protein, 480 aa, Cytophaga sp.
NGTMMQYFEWYVPNDGQQWNRLRTDAPYLSSVGITAVWTPPAYKGTSQADVGYGPYDLYDLGEFNQKGTVRTKYGTKGELKSAVNTLHSNGIQVYGDVVMNHKAGADYTENVTAVEVNPSNRYQETSGEYNIQAWTGFNFPGRGTTYSNWKWQWFHFDGTDWDQSRQLSRIFKFDGKAWDWEVSSENGNYDYLMYADYDYDHPDVVNEMKKWGVWYANEVGLDGYRLDAVKHIKFQFLKDWVDNARAATGKEMFTVGEYWQNDLGALNNYLAKVNYNQSLFDAPLHYNFYAASTGGGYYDMRNILNNTLVASNPTKAVTLVENHDTQPGQSLESTVQPWFKPLAYAFILTRSGGYPSVFYGDMYGTKGTTTREIPALKSKIEPLLKARKDYAYGTQRDYIDNPDVIGWTREGDSTKAKSGLATVITDGPGGSKRMYVGTSNAGEIWYDLTGNRTDKITIGSDGYATFPVNGGSVSVWVQQ

SEQ ID NO: 36841 - protein, 480 aa, Cytophaga sp.
NGTMMQYFEWYVPNDGQQWNRLRTDAPYLSSVGITAVWTPPAYKGTSQADVGYGPYDLYDLGEFNQKGTVRTKYGTKGELKSAVNTLHSNGIQVYGDVVMNHKAGADYTENVTAVEVNPSNRYQETSGEYNIQAWTGFNFPGRGTTYSNHKWQWFHFDGTDWDQSRSLSRIFKFDGKAWDWEVSSENGNYDYLMYADYDYDHPDVVNEMKKWGVWYANEVGLDGYRLDAVKHIKFQFLKDWVDNARAATGKEMFTVGEYWQNDLGALNNYLAKVNYNQSLFDAPLHYNFYAASTGGGYYDMRNILNNTLVASNPTKAVTLVENHDTQPGQSLESTVQPWFKPLAYAFILTRSGGYPSVFYGDMYGTKGTTTREIPALKSKIEPLLKARKDYAYGTQRDYIDNPDVIGWTREGDSTKAKSGLATVITDGPGGSKRMYVGTSNAGEIWYDLTGNRTDKITIGSDGYATFPVNGGSVSVWVQQ

SEQ ID NO: 36842 - protein, 480 aa, Cytophaga sp.
NGTMMQYFEWYVPNDGQQWNRLRTDAPYLSSVGITAVWTPPAYKGTSQRDVGYGPYDLYDLGEFNQKGTVRTKYGTKGELKSAVNTLHSNGIQVYGDVVMNHKAGADYTENVTAVEVNPSNRYQETSGEYNIQAWTGFNFPGRGTTYSNWKWQWFHFDGTDWDQSRSLSRIFKFDGKAWDWEVSSENGNYDYLMYADYDYDHPDVVNEMKKWGVWYANEVGLDGYRLDAVKHIKFQFLKDWVDNARAATGKEMFTVGEYWQNDLGALNNYLAKVNYNQSLFDAPLHYNFYAASTGGGYYDMRNILNNTLVASNPTKAVTLVENHDTQPGQSLESTVQPWFKPLAYAFILTRSGGYPSVFYGDMYGTKGTTTREIPALKSKIEPLLKARKDYAYGTQRDYIDNPDVIGWTREGDSTKAKSGLATVITDGPGGSKRMYVGTSNAGEIWYDLTGNRTDKITIGSDGYATFPVNGGSVSVWVQQ

SEQ ID NO: 36843 - protein, 480 aa, Cytophaga sp.
NGTMMQYFEWYVPNDGQQWNRLRTDAPYLSSVGITAVWTPPAYKGTSQADVGYGPYDLYDLGEFNQKGTVRTKYGTKGELKSAVNTLHSNGIQVYGDVVMNHKAGADYTENVTAVEVNPSNRYQETSGEYNIQAWTGFNFPGRGTTYSNWKWQWFHFDGTDWDQSRSLSRIFKFDGKAWDWEVSSENGNYDYLMYADYDYDHPDVVNEMKKWGVWYANEVGLDGYRLDAVKHIKFQFLKDWVDNARAATGKEMFTVGEYWQNDLGALNNYLAKVNYNQSLFDAPLHYNFYAASTGGGYYDMRNILNNTLVASNPTKAVTLVENHDTQPGQSLESTVQPWFKPLAYAFILTRSGGYPSVFYGDMYGTKGTTTREIPALKSMIEPLLKARKDYAYGTQRDYIDNPDVIGWTREGDSTKAKSGLATVITDGPGGSKRMYVGTSNAGEIWYDLTGNRTDKITIGSDGYATFPVNGGSVSVWVQQ

SEQ ID NO: 36844 - protein, 480 aa, Cytophaga sp.
NGTMMQYFEWYVPNDGQQWNRLRTDAPYLSSVGITAVWTPPAYKGTSQADVGYGPYDLYDLGEFNQKGTVRTKYGTKGELKSAVNTLHSNGIQVYGDVVMNHKAGADYTENVTAVEVNPSNRYQETSGEYNIQAWTGFNFPGRGTTYSNWKWQWFHFDGTDWDQSRSLSRIFKFDGKAWDWEVSSENGNYDYLMYADYDYDHPDVVNEMKKWGVWYANEVGLDGYRLDAVKHIKFQFLKDWVDNARAATGKEMFTVGEYWQNDLGALNNYLAKVNYNQSLFDAPLHYNFYAASTGGGYYDMRNILNNTLVASNPTKAVTLVENHDTQPGQSLESTVQPWFKPLAYAFILTRSGGYPSVFYGDMYGTKGTTTREIPALKSKIEPLLKARKDYAYGTQRDYIDCPDVIGWTREGDSTKAKSGLATVITDGPGGSKRMYVGTSNAGEIWYDLTGNRTDKITIGSDGYATFPVNGGSVSVWVQQ

SEQ ID NO: 36845 - protein, 480 aa, Cytophaga sp.
NGTMMQYFEWYVPNDGQQWNRLRTDAPYLSSVGITAVWTPPAYKGTSQADVGYGPYDLYDLGEFNQKGTVRTKYGTKGELKSAVNTLHSNGIQVYGDVVMNHKAGADYTENVTAVEVNPSNRYQETSGEYNIQAWTGFNFPGRGTTYSNWKWQWFHFDGTDWDQSRSLSRIFKFNGKAWDWEVSSENGNYDYLMYADYDYDHPDVVNEMKKWGVWYANEVGLDGYRLDAVKHIKFQFLKDWVDNARAATGKEMFTVGEYWQNDLGALNNYLAKVNYNQSLFDAPLHYNFYAASTGGGYYDMRNILNNTLVASNPTKAVTLVENHDTQPGQSLESTVQPWFKPLAYAFILTRSGGYPSVFYGDMYGTKGTTTREIPALKSKIEPLLKARKDYAYGTQRDYIDNPDVIGWTREGDSTKAKSGLATVITDGPGGSKRMYVGTSNAGEIWYDLTGNRTDKITIGSDGYATFPVNGGSVSVWVQQ

SEQ ID NO: 36846 - protein, 480 aa, Cytophaga sp.
NGTMMQYFEWYVPNDGQQWNRLRTDAPYLSSVGITAVWTPPAYKGTSQADVGYGPYDLYDLGEFNQKGTVRTKYGTKGELKSAVNTLHSNGIQVYGDVVMNHKAGADYTENVTAVEVNPSNRYQETSGEYNIQAWTGFNFPGRGTTYSNWKWQWFHFDGTDWDQSRSLSRIFKFDGKAWDWEVSSENGNYDYLMYADYDYDHPDVVNEMKKWGVWYANEVGLDGYRLDAVKHIKFQFLKDWVDNARAATGKEMFTVGEYWQNDLGALNNYLAKVNYNQSLFDAPLHYNFYAASTGGGYYDMRLILNNTLVASNPTKAVTLVENHDTQPGQSLESTVQPWFKPLAYAFILTRSGGYPSVFYGDMYGTKGTTTREIPALKSKIEPLLKARKDYAYGTQRDYIDNPDVIGWTREGDSTKAKSGLATVITDGPGGSKRMYVGTSNAGEIWYDLTGNRTDKITIGSDGYATFPVNGGSVSVWVQQ

SEQ ID NO: 36847 - protein, 480 aa, Cytophaga sp.
NGTMMQYFEWYVPNDGQQWNRLRTDAPYLSSVGITAVWTPPAYKGTSQADVGYGPYDLYDLGEFNQKGTVRTKYGTKGELKSAVNTLHSYGIQVYGDVVMNHKAGADYTENVTAVEVNPSNRYQETSGEYNIQAWTGFNFPGRGTTYSNWKWQWFHFDGTDWDQSRSLSRIFKFDGKAWDWEVSSENGNYDYLMYADYDYDHPDVVNEMKKWGVWYANEVGLDGYRLDAVKHIKFQFLKDWVDNARAATGKEMFTVGEYWQNDLGALNNYLAKVNYNQSLFDAPLHYNFYAASTGGGYYDMRNILNNTLVASNPTKAVTLVENHDTQPGQSLESTVQPWFKPLAYAFILTRSGGYPSVFYGDMYGTKGTTTREIPALKSKIEPLLKARKDYAYGTQRDYIDNPDVIGWTREGDSTKAKSGLATVITDGPGGSKRMYVGTSNAGEIWYDLTGNRTDKITIGSDGYATFPVNGGSVSVWVQQ

SEQ ID NO: 36848 - protein, 480 aa, Cytophaga sp.
NGTMMQYFEWYVPNDGQQWNRLRTDAPYLSSVGITAVWTPPAYKGTSQADVGYGPYDLYDLGEFNQKGTVRTKYGTKGELKSAVNHLHSNGIQVYGDVVMNHKAGADYTENVTAVEVNPSNRYQETSGEYNIQAWTGFNFPGRGTTYSNWKWQWFHFDGTDWDQSRSLSRIFKFDGKAWDWEVSSENGNYDYLMYADYDYDHPDVVNEMKKWGVWYANEVGLDGYRLDAVKHIKFQFLKDWVDNARAATGKEMFTVGEYWQNDLGALNNYLAKVNYNQSLFDAPLHYNFYAASTGGGYYDMRNILNNTLVASNPTKAVTLVENHDTQPGQSLESTVQPWFKPLAYAFILTRSGGYPSVFYGDMYGTKGTTTREIPALKSKIEPLLKARKDYAYGTQRDYIDNPDVIGWTREGDSTKAKSGLATVITDGPGGSKRMYVGTSNAGEIWYDLTGNRTDKITIGSDGYATFPVNGGSVSVWVQQ

SEQ ID NO: 36849 - protein, 480 aa, Cytophaga sp.
NGTMMQYFEWYVPNDGQQWNRLRTDAPYLSSVGITAVWTPPAYKGTSQADVGYGPYDLYDLGEFNQKGTVRTKYGTKGELKLAVNTLHSNGIQVYGDVVMNHKAGADYTENVTAVEVNPSNRYQETSGEYNIQAWTGFNFPGRGTTYSNWKWQWFHFDGTDWDQSRSLSRIFKFDGKAWDWEVSSENGNYDYLMYADYDYDHPDVVNEMKKWGVWYANEVGLDGYRLDAVKHIKFQFLKDWVDNARAATGKEMFTVGEYWQNDLGALNNYLAKVNYNQSLFDAPLHYNFYAASTGGGYYDMRNILNNTLVASNPTKAVTLVENHDTQPGQSLESTVQPWFKPLAYAFILTRSGGYPSVFYGDMYGTKGTTTREIPALKSKIEPLLKARKDYAYGTQRDYIDNPDVIGWTREGDSTKAKSGLATVITDGPGGSKRMYVGTSNAGEIWYDLTGNRTDKITIGSDGYATFPVNGGSVSVWVQQ

SEQ ID NO: 36850 - protein, 480 aa, Cytophaga sp.
NGTMMQYFEWYVPNDGQQWNRLRTDAPYLSSVGITAVWTPPAYKGTSQADVGYGPYDLYDLGEFNQKGTVRTKYGTKGELKSAVNTLHSNGIQVYGDVVMNHKAGADYTENVTAVEVNPSNRYQETSGEYNIQAWTGFNFPGRGTTYSNWKWQWFHFDGTDWDQSRSLSRIFKFDGKAWDWEVSSENGNYDYLMYADYDYDHPDVVNEMKKWGVWYANEVGLDGYRLDAVKHIKFQFLKDWVDNARAATGKEMFTVGEYWQNDLGALNNYLAKVNYNQSLFDAPLHYNFYAASTGGGYYDMRNILNNTLVASNPTKAVTLVENHDTQPGQSLESTVQPWFKPLAYAFILTRSGGYPSVFYGDMYGTKGTTTREIPALKSKIEPLLKARKDYAYGTQRDYIDNPDVIGWTREGDSTKAKSGLATVITDGPGGSKRMYVGTSNAGEIWYDLTGNRTDKIRIGSDGYATFPVNGGSVSVWVQQ

SEQ ID NO: 36851 - protein, 480 aa, Cytophaga sp.
NGTMMQYFEWYVPNDGQQWNRLRTDAPYLSSVGITAVWTPPAYKGTSQADVGYGPYDLYDLGEFNQKGTVRTKYGTKGELKSAVNTLHSNGIQVYGDVVMNHKAGADYTENVTAVEVNPSNRYQETSGEYNIQAWTGFNFPGRGTTYSNWKWQWFHFDGTDWDQSRSLSRIFKFDGKAWDWEVSSENGNYDYLMYADYDYDHPDVVNEMKKWGVWYANEVGLDGYRLDAVKHIKFQFLKDWVDNARAATGKEMFTVGEYWQNDLGALNNYLAKVNYNQSLFDAPLHYNFYAASTGGGYYDMRNILNNTLVATNPTKAVTLVENHDTQPGQSLESTVQPWFKPLAYAFILTRSGGYPSVFYGDMYGTKGTTTREIPALKSKIEPLLKARKDYAYGTQRDYIDNPDVIGWTREGDSTKAKSGLATVITDGPGGSKRMYVGTSNAGEIWYDLTGNRTDKITIGSDGYATFPVNGGSVSVWVQQ

SEQ ID NO: 36852 - protein, 480 aa, Cytophaga sp.
NGTMMQYFEWYVPNDGQQWNRLRTDAPYLSSVGITAVWTPPAYKGTSQADVGYGPYDLYDLGEFNQKGTVRTKYGTKGELKSAVNTLHSNGIQVYGDVVMNHKAGADYTENVTAVEVNPSNRYQETSGEYNIQAWTGFNFPGRGTTYSNWKWQWFHFDGTDWDQSRSLSRIFKFDGKAWDWEVSSENGNYDYLMYADYDYDHPDVVNEMKKWGVWYANEVGLDGYRLDAVKHIKFQFLKDWVDNARAATGKEMFTVGEYWQNDKGALNNYLAKVNYNQSLFDAPLHYNFYAASTGGGYYDMRNILNNTLVASNPTKAVTLVENHDTQPGQSLESTVQPWFKPLAYAFILTRSGGYPSVFYGDMYGTKGTTTREIPALKSKIEPLLKARKDYAYGTQRDYIDNPDVIGWTREGDSTKAKSGLATVITDGPGGSKRMYVGTSNAGEIWYDLTGNRTDKITIGSDGYATFPVNGGSVSVWVQQ

SEQ ID NO: 36853 - protein, 480 aa, Cytophaga sp.
NGTMMQYFEWYVPNDGQQWNRLRTDAPYLSSVGITAVWTPPAYKGTSQADVGYGPYDLYDLGEFNQKGTVRTKYGTKGELKSAVNTLHSNGIQVYGDVVMNHKAGADYTENVTAVEVNPSNRYQETSGEYNIQAWTGFNFPGRGTTYSNWKWQWFHFDGTDWDQSRSLSRIFKFVGKAWDWEVSSENGNYDYLMYADYDYDHPDVVNEMKKWGVWYANEVGLDGYRLDAVKHIKFQFLKDWVDNARAATGKEMFTVGEYWQNDLGALNNYLAKVNYNQSLFDAPLHYNFYAASTGGGYYDMRNILNNTLVASNPTKAVTLVENHDTQPGQSLESTVQPWFKPLAYAFILTRSGGYPSVFYGDMYGTKGTTTREIPALKSKIEPLLKARKDYAYGTQRDYIDNPDVIGWTREGDSTKAKSGLATVITDGPGGSKRMYVGTSNAGEIWYDLTGNRTDKITIGSDGYATFPVNGGSVSVWVQQ

SEQ ID NO: 36854 - protein, 480 aa, Cytophaga sp.
NGTMMQYFEWYVPNDGQQWNRLRTDAPYLSSVGITAVWTPPAYKGTSQADVGYGPYDLYDLGEFNQKGTVRTKYGTKGELKSAVNTLHSNGIQVYGDVVMNHKAGADYTENVTAVEVNPSNRYQETSGEYNIQAWTGFNFPGRGTTYSNWKWQWFHFDGTDWDQSRSLSRIFKFDGKAWDWEVSSENGNYDYLMYADYDYDHPDVVNEMKKWGVWYANEVGLDGYRLDAVKHIKFQFLKDWVDNARAATGKEMFTVGEYWQNDLGALNNYLAKVNYNQSLFDAPLHYNFYAASTGGGYYDMRNILNNTLVASNPTKAVTLVENHDTQPGQSLESTVQPWFKPLAYAFILTRSGGYPSVFYGDMYGTKGTTTREIPALKSKIEPLLKARKDYAYGTQRDYIDNPDVIGWTREGDSTKAKSGLATVITDGPGGSKRMYVGTMNAGEIWYDLTGNRTDKITIGSDGYATFPVNGGSVSVWVQQ

SEQ ID NO: 36855 - protein, 480 aa, Cytophaga sp.
NGTMMQYFEWYVPNDGQQWNRLRTDAPYLSSVGITAVWTPPAYKGTSQADVGYGPYDLYDLGEFNQKGTVRTKYGTKGELKSAVNTLHSNGIQVYGDVVMNHKAGADYTENVTAVEVNPSNRYQETSGEYNIQAWTGFNFPGRGTTYSNWKWQWFHFDGTDWDQSRSLSRIFKFDGKAWDWEVSSENGNYDYLMYADYDYDHPDVVNEMKKWGVWYANEVGLDGYRLDAVKHIKFQFLKDWVDNARAATGKEMFTVGEYWQNDLGALNNYLAKVNYNQSLFDAPLHYNFYAASTGGGYYDMRNILNNTLVASNPTKAVTLVENHDTQPGQSLESTVQPWFKPLAYAFILTRSGGYPSVFYGDMYGTKGTTTREIPALKSKIEPLLKARKDYAYGTQRDYIDNPDVIGWTREGDSTKAKSGLATVITDGPGGSKRMYVGTSNAGEYWYDLTGNRTDKITIGSDGYATFPVNGGSVSVWVQQ

SEQ ID NO: 36856 - protein, 480 aa, Cytophaga sp.
NGTMMQYFEWYVPNDGQQWNRLRTDAPYLSSVGITAVWTPPAYKGTSQADVGYGPYDLYDLGEFNQKGTVRTKYGTKGELKSAVNTLHSNGIQVYGDVVMNHKAGADYTENVTAVEVNPSNRYQETSGEYNIQAWTGFNFPGRGTTYSNWKWQWFHFDGTDWDQSRSLSRIFKFDGKAWDWEVSSENGNYDYLMYADYDYDHPDVVNEMKKWGVWYANEVGLDGYRLDAVKHIKFQFLKDWVDNARAATGKEMFTVGEYWQNDLGALNNYLAKVNYNQSLFDAPLHYNFYAASTGGGYYDMRNILNNTLVASNPTKAVTLVENHDTQPGQSLESTVQPWFKPLAYAFILTRSGGYPSVFYGDMYGTKGTTTREIPALKCKIEPLLKARKDYAYGTQRDYIDNPDVIGWTREGDSTKAKSGLATVITDGPGGSKRMYVGTSNAGEIWYDLTGNRTDKITIGSDGYATFPVNGGSVSVWVQQ

SEQ ID NO: 36857 - protein, 480 aa, Cytophaga sp.
NGTMMQYFEWYVPNDGQQWNRLRTDAPYLSSVGITAVWTPPAYKGTSQADVGYGPYDLYDLGEFNQKGTVRTKYGTKGELKSAVNTLHSNGIQVYGDVVMNHKAGADYTENVTAVEVNPSNRYQETSGEYNIQAWTGFNFPGRGTTYSNWKWQWFHFDGTDWDASRSLSRIFKFDGKAWDWEVSSENGNYDYLMYADYDYDHPDVVNEMKKWGVWYANEVGLDGYRLDAVKHIKFQFLKDWVDNARAATGKEMFTVGEYWQNDLGALNNYLAKVNYNQSLFDAPLHYNFYAASTGGGYYDMRNILNNTLVASNPTKAVTLVENHDTQPGQSLESTVQPWFKPLAYAFILTRSGGYPSVFYGDMYGTKGTTTREIPALKSKIEPLLKARKDYAYGTQRDYIDNPDVIGWTREGDSTKAKSGLATVITDGPGGSKRMYVGTSNAGEIWYDLTGNRTDKITIGSDGYATFPVNGGSVSVWVQQ

SEQ ID NO: 36858 - protein, 480 aa, Cytophaga sp.
NGTMMQYFEWYVPNDGQQWNRLRTDAPYLSSVGITAVWTPPAYKGTSQADVGYGPYDLYDLGEFNQKGTVRTKYGTKGELKSAVNTLHSNGIQVYGDVVMNHKAGADYTENVTAVEVNPSNRYQETSGEYNIQAWTGFNFPGRGTTYSNWKWQWFHFDGTDWDQSRSLSRIFKFDGKAWDWEVSSENGNYDYLMYADYDYDHPDVVNEMKKWGVWYANEVGLDGYRLDAVKHIKFQFLKDWVDNARAATGKEMFTVGEYWQNDLGALNNYLAKVNYNQSLFDAPLHYNFYAASTGGGYYDMRNILNNTLVASNPTKAVTLVENHDTQPGQSLESTVQPWFKPLAYAFILTRSGGYPCVFYGDMYGTKGTTTREIPALKSKIEPLLKARKDYAYGTQRDYIDNPDVIGWTREGDSTKAKSGLATVITDGPGGSKRMYVGTSNAGEIWYDLTGNRTDKITIGSDGYATFPVNGGSVSVWVQQ

SEQ ID NO: 36859 - protein, 480 aa, Cytophaga sp.
NGTMMQYFEWYVPNDGQQWNRLRTDAPYLSSVGITAVWTPPAYKGTSQADVGYGPYDLYDLGEFNQKGTVRTKYGTKGELKSAVNTLHSNGIQVYGDVVMNHKAGADYTENVTAVEVNPSNRGQETSGEYNIQAWTGFNFPGRGTTYSNWKWQWFHFDGTDWDQSRSLSRIFKFDGKAWDWEVSSENGNYDYLMYADYDYDHPDVVNEMKKWGVWYANEVGLDGYRLDAVKHIKFQFLKDWVDNARAATGKEMFTVGEYWQNDLGALNNYLAKVNYNQSLFDAPLHYNFYAASTGGGYYDMRNILNNTLVASNPTKAVTLVENHDTQPGQSLESTVQPWFKPLAYAFILTRSGGYPSVFYGDMYGTKGTTTREIPALKSKIEPLLKARKDYAYGTQRDYIDNPDVIGWTREGDSTKAKSGLATVITDGPGGSKRMYVGTSNAGEIWYDLTGNRTDKITIGSDGYATFPVNGGSVSVWVQQ

SEQ ID NO: 36860 - protein, 480 aa, Cytophaga sp.
NGTMMQYFEWYVPNDGQQWNRLRTDAPYLSSVGITAVWTPPAYKGTSQADVGYGPYDLYDLGEFNQKGTVRTKYGTKGELKSAVNTLHSNGIQVYGDVVMNHKAGADYTENVTAVEVNPSNRYQETSGEYNIQAWTGFNFPGRGTTYSNWKWQWFHFDGTDWDQSRSLSRIFKFDGKAWDWEVSSENGNYDYLMYADYDYDHPDVVNEMKKWGVWYANEVGLDGYRLDAVKHIKFQFLKDWVDNARAATGKEMFTVGEYWQNDLGALNNYLAKVNYNQSLFDAPLHYNFYAASTGGGYYDMRNILRNTLVASNPTKAVTLVENHDTQPGQSLESTVQPWFKPLAYAFILTRSGGYPSVFYGDMYGTKGTTTREIPALKSKIEPLLKARKDYAYGTQRDYIDNPDVIGWTREGDSTKAKSGLATVITDGPGGSKRMYVGTSNAGEIWYDLTGNRTDKITIGSDGYATFPVNGGSVSVWVQQ

SEQ ID NO: 36861 - protein, 480 aa, Cytophaga sp.
NGTMMQYFEWYVPNDGQQWNRLRTDAPYLSSVGITAVWTPPAYKGTSQADVGYGPYDLYDLGEFNQKGTVRTKYGTKGELKSAVNTLHSNGIQVYGDVVMNHKAGADYTENVTAVEVNPSNRYQETSWEYNIQAWTGFNFPGRGTTYSNWKWQWFHFDGTDWDQSRSLSRIFKFDGKAWDWEVSSENGNYDYLMYADYDYDHPDVVNEMKKWGVWYANEVGLDGYRLDAVKHIKFQFLKDWVDNARAATGKEMFTVGEYWQNDLGALNNYLAKVNYNQSLFDAPLHYNFYAASTGGGYYDMRNILNNTLVASNPTKAVTLVENHDTQPGQSLESTVQPWFKPLAYAFILTRSGGYPSVFYGDMYGTKGTTTREIPALKSKIEPLLKARKDYAYGTQRDYIDNPDVIGWTREGDSTKAKSGLATVITDGPGGSKRMYVGTSNAGEIWYDLTGNRTDKITIGSDGYATFPVNGGSVSVWVQQ

SEQ ID NO: 36862 - protein, 480 aa, Cytophaga sp.
NGTMMQYFEWYVPNDGQQWNRLRTDAPYLSSVGITAVWTPPAYKGTSQDDVGYGPYDLYDLGEFNQKGTVRTKYGTKGELKSAVNTLHSNGIQVYGDVVMNHKAGADYTENVTAVEVNPSNRYQETSGEYNIQAWTGFNFPGRGTTYSNWKWQWFHFDGTDWDQSRSLSRIFKFDGKAWDWEVSSENGNYDYLMYADYDYDHPDVVNEMKKWGVWYANEVGLDGYRLDAVKHIKFQFLKDWVDNARAATGKEMFTVGEYWQNDLGALNNYLAKVNYNQSLFDAPLHYNFYAASTGGGYYDMRNILNNTLVASNPTKAVTLVENHDTQPGQSLESTVQPWFKPLAYAFILTRSGGYPSVFYGDMYGTKGTTTREIPALKSKIEPLLKARKDYAYGTQRDYIDNPDVIGWTREGDSTKAKSGLATVITDGPGGSKRMYVGTSNAGEIWYDLTGNRTDKITIGSDGYATFPVNGGSVSVWVQQ

SEQ ID NO: 36863 - protein, 480 aa, Cytophaga sp.
NGTMMQYFEWYVPNDGQQWNRLRTDAPYLSSVGITAVWTPPAYKGTSQADVGYGPYDLYDLGEFNQKGTVRTKYGTKGELKSAVNTLHSNGIQVYGDVVMNHKAGADYTENVTAVEVNPSNRYQETSGEYNIQAWTGFNFPGRGTTYSNWKWQWFHFDGTDWDQSRSLSRIFKFDGKAWDWEVSSENGNYDYLMYADYDYDHPDVVNEMKKWGVWYANEVGLDGYRLDAVKHIKFQFLKDWVDNARAATGKEMFTVGEYWQNDLGALNNYLAKVNYNQSLFDAPLHYNFYAASTGGGYYDMRNILNNTLVASNPTKAVTLVENHDTQPGQSLESTVQPWFKPLAYAFILTRSGGYPAVFYGDMYGTKGTTTYEIPALKSKIEPLLKARKDYAYGTQRDYIDNPDVIGWTREGDSTKAKSGLATVITDGPGGSKRMYVGTSNAGEIWYDLTGNRTDKITIGSDGYATFPVNGGSVSVWVQQ

SEQ ID NO: 36864 - protein, 480 aa, Cytophaga sp.
NGTMMQYFEWYVPNDGQQWNRLRTDAPYLSSVGITAVWTPPAYKGTSQADVGYGPYDLYDLGEFNQKGTVRTKYGTKGELKSAVNTLHSNGIQVYGDVVMNHKAGADYTENVTAVEVNPSNRYQETSGEYNIQAWTGFNFPGRGTTYSNWKWQWFHFDGTDWDQSRSLSRIFKFDGKAWDWEVSSENGNYDYLMYADYDYDHPDVVNEMKKWGVWYANEVGLDGYRLDAVKHIKFQFLKDWVDNARAATGKEMFTVGEYWQNDLGALNNYLAKVNYNQSLFDAPLHYNFYAASTGGGRYDMRNILNNTLVASNPTKAVTLVENHDTQPGQSLESTVQPWFKPLAYAFILTRSGGYPSVFYGDMYGTKGTTTREIPALKSKIEPLLKARKDYAYGTQRDYIDNPDVIGWTREGDSTKAKSGLATVITDGPGGSKRMYVGTSNAGEIWYDLTGNRTDKITIGSDGYATFPVNGGSVSVWVQQ

SEQ ID NO: 36865 - protein, 480 aa, Cytophaga sp.
NGTMMQYFEWYVPNDGQQWNRLRTDAPYLSSVGITAVWTPPAYKGTSQADVGYGPYDLYDLGEFNQKGTVRTKYGTKGELKSAVNTLHSNGIQVYGDVVMNHKAGADYTENVTAVEVNPSNRYQETSGEYNIQAWTGFNFPGRGTTYSNWKWQWFHFDGTDWDQSRSLSRIFKFDGKAWDWEVSSENGNYDYLMYADYDYDHPDVVNEMKKWGVWYANEVGLDGYRLDAVKHIKFQFLKDWVDNARAATGKEMFTVGEYWQNDLGSLNNYLAKVNYNQSLFDAPLHYNFYAASTGGGYYDMRNILNNTLVASNPTKAVTLVENHDTQPGQSLESTVQPWFKPLAYAFILTRSGGYPSVFYGDMYGTKGTTTREIPALKSKIEPLLKARKDYAYGTQRDYIDNPDVIGWTREGDSTKAKSGLATVITDGPGGSKRMYVGTSNAGEIWYDLTGNRTDKITIGSDGYATFPVNGGSVSVWVQQ

SEQ ID NO: 36866 - protein, 480 aa, Cytophaga sp.
NGTMMQYFEWYVPNDGQQWNRLRTDAPYLSSVGITAVWTPPAYKGTSQADVGYGPYDLYDLGEFNQKGTVRTKYGTKGELKSAVNTLHSNGIQVYGDVVMNHKAGADYTENVTAVEVNPSNRYQETSGEYNIQAWTGFNFPGRGTTYSNWKWQWFHFDGTDWDQSRSLSRIFKFDGKAWDWEVSSENGNYDYLMYADYDYDHPDVVNEMKKWGVWYANEVGLDGYRLDAVKHIKFQFLKDWVDNARAATGKEMFTVGEYWQNDLGALNNYLAKVNYNQSLFDAPLHYNFYAASTGGGYYDMRNILNNTLVASNPTKAVTLVENHDTQPGQSLESTVQPWFKPLAYAFILTRAGGYPSVFYGDMYGTKGTTTREIPALKSKIEPLLKARKDYAYGTQRDYIDNPDVIGWTREGDSTKAKSGLATVITDGPGGSKRMYVGTSNAGEIWYDLTGNRTDKITIGSDGYATFPVNGGSVSVWVQQ

SEQ ID NO: 36867 - protein, 480 aa, Cytophaga sp.
NGTMMQYFEWYVPNDGQQWNRLRTDAPYLSSVGITAVWTPPAYKGTSQADVGYGPYDLYDLGEFNQKGTVRTKYGTKGELKSAVNTLHSNGIQVYGDVVMNHKAGADYTENVTAVEVNPSNRYQETSGEYNIQAWTGFNFPGRGTTYSNWKWQWFHFDGTDWDQSRSLSRIFKFDGKAWDWEVSSENGNYDYLMYADYDYDHPDVVNEMKKWGVWYANEVGLDGYRLDAVKHIKFQFLKDWVDNARAATGKEMFTVGEYWQNDLGALNNYLAKVNYNQSLFDAPLHYNFYAASTGGGYYDMRNILNNTLVASNPTKAVTLVENHDTQPGQSLESTVQPWFKPLAYAFILTRSGGYPSVFYGDMYGTKGTTTREIPALKSKIEPLLKARKDYAYGTQRDYIDNPDVIGWTREGDSTKAKSGLAVVITDGPGGSKRMYVGTSNAGEIWYDLTGNRTDKITIGSDGYATFPVNGGSVSVWVQQ

SEQ ID NO: 36868 - protein, 480 aa, Cytophaga sp.
NGTMMQYFEWYVPNDGQQWNRLRTDAPYLSSVGITAVWTPPAYKGTSQADVGYGPYDLYDLGEFNQKGTVRTKYGTKGELKSAVNTLHSNGIQVYGDVVMNHKAGADYTENVTAVEVNPSNRYQETSGEYNIQAWTGFNFPGRGTTYSNWKWQWFHFDGTDWDQSRDLSRIFKFDGKAWDWEVSSENGNYDYLMYADYDYDHPDVVNEMKKWGVWYANEVGLDGYRLDAVKHIKFQFLKDWVDNARAATGKEMFTVGEYWQNDLGALNNYLAKVNYNQSLFDAPLHYNFYAASTGGGYYDMRNILNNTLVASNPTKAVTLVENHDTQPGQSLESTVQPWFKPLAYAFILTRSGGYPSVFYGDMYGTKGTTTREIPALKSKIEPLLKARKDYAYGTQRDYIDNPDVIGWTREGDSTKAKSGLATVITDGPGGSKRMYVGTSNAGEIWYDLTGNRTDKITIGSDGYATFPVNGGSVSVWVQQ

SEQ ID NO: 36869 - protein, 480 aa, Cytophaga sp.
NGTMMQYFEWYVPNDGQFWNRLRTDAPYLSSVGITAVWTPPAYKGTSQADVGYGPYDLYDLGEFNQKGTVRTKYGTKGELKSAVNTLHSNGIQVYGDVVMNHKAGADYTENVTAVEVNPSNRYQETSGEYNIQAWTGFNFPGRGTTYSNWKWQWFHFDGTDWDQSRSLSRIFKFDGKAWDWEVSSENGNYDYLMYADYDYDHPDVVNEMKKWGVWYANEVGLDGYRLDAVKHIKFQFLKDWVDNARAATGKEMFTVGEYWQNDLGALNNYLAKVNYNQSLFDAPLHYNFYAASTGGGYYDMRNILNNTLVASNPTKAVTLVENHDTQPGQSLESTVQPWFKPLAYAFILTRSGGYPSVFYGDMYGTKGTTTREIPALKSKIEPLLKARKDYAYGTQRDYIDNPDVIGWTREGDSTKAKSGLATVITDGPGGSKRMYVGTSNAGEIWYDLTGNRTDKITIGSDGYATFPVNGGSVSVWVQQ

SEQ ID NO: 36870 - protein, 480 aa, Cytophaga sp.
NGTMMQYFEWYVPNDGQQWNRLRTDAPYLSSVGITAVWTPPAYKGTSQADVGYGPYDLYDLGEFNQKGTVRTKYGTKGELKSAVNTLHSNGIQVYGDVVMNHKAGADYTEGVTAVEVNPSNRYQETSGEYNIQAWTGFNFPGRGTTYSNWKWQWFHFDGTDWDQSRSLSRIFKFDGKAWDWEVSSENGNYDYLMYADYDYDHPDVVNEMKKWGVWYANEVGLDGYRLDAVKHIKFQFLKDWVDNARAATGKEMFTVGEYWQNDLGALNNYLAKVNYNQSLFDAPLHYNFYAASTGGGYYDMRNILNNTLVASNPTKAVTLVENHDTQPGQSLESTVQPWFKPLAYAFILTRSGGYPSVFYGDMYGTKGTTTREIPALKSKIEPLLKARKDYAYGTQRDYIDNPDVIGWTREGDSTKAKSGLATVITDGPGGSKRMYVGTSNAGEIWYDLTGNRTDKITIGSDGYATFPVNGGSVSVWVQQ

SEQ ID NO: 36871 - protein, 480 aa, Cytophaga sp.
NGTMMQYFEWYVPNDGQQWNRLRTDAPYLSSVGITAVWTPPAYKGTSQADVGYGPYDLYDLGEFNQKGTVRTKYGTKGELKSAVNTLHSNGIQVYGDVVMNHKAGADYTENVTAVEVNPSNRYQETSGEYNIQAWTGFNFPGRGTTYSNWKWQWFHFDGTDWDQSRSLSRIFKFDGKAWDWEVSSENGNYDYLMYADYDYDHPDVVNEMKKWGVWYANEVGLDGYRLDAVKHIKFQFLKDWVDNARAATGKEMFTVGEYWQNDLGALNNYLAKVNYNQSLFDAPLHYNFYAASTGGGYYDMRNILNNTLVASNPTKAVTLVENHDTQPGQSLESTVQPWFKPLAYAFILTRSGGYPSVFYGDMYGTKGTTTREIPALKSKIEPLLKARKDYAYGCQRDYIDNPDVIGWTREGDSTKAKSGLATVITDGPGGSKRMYVGTSNAGEIWYDLTGNRTDKITIGSDGYATFPVNGGSVSVWVQQ

SEQ ID NO: 36872 - protein, 480 aa, Cytophaga sp.
NGTMMQYFEWYVPNDGQQWNRLRTDAPYLSSVGITAVWTPPAYKGTSQADVGYGPYDLYDLGEFNQKGTVRTKYGTKGELKSAVNTLHSNGIQVYGDVVMNHKAGADYTENVTAVEVNPSNRYQETSGEYNIQAWTGFNFPGRGTTYSNWKWQWFHFDGTDWDQSRSLSRIFKFDGKAWDWEVSSENGNYDYLMYADYDYDHPDVVNEMKKWGVWYANEVGLDGYRLDAVKHIKFQFLKDWVDNARAATGKEMFTVGEYWQNDLGALNNYLAKVNYNQSLFDAPLHYNFYAASTGGGYYDMRNILNKTLVASNPTKAVTLVENHDTQPGQSLESTVQPWFKPLAYAFILTRSGGYPSVFYGDMYGTKGTTTREIPALKSKIEPLLKARKDYAYGTQRDYIDNPDVIGWTREGDSTKAKSGLATVITDGPGGSKRMYVGTSNAGEIWYDLTGNRTDKITIGSDGYATFPVNGGSVSVWVQQ

SEQ ID NO: 36873 - protein, 480 aa, Cytophaga sp.
NGTMMQYFEWYVPNDGQQWNRLRTDAPYLSSVGITAVWTPPAYKGTSQADVGYGPYDLYDLGEFVQKGTVRTKYGTKGELKSAVNTLHSNGIQVYGDVVMNHKAGADYTENVTAVEVNPSNRYQETSGEYNIQAWTGFNFPGRGTTYSNWKWQWFHFDGTDWDQSRSLSRIFKFDGKAWDWEVSSENGNYDYLMYADYDYDHPDVVNEMKKWGVWYANEVGLDGYRLDAVKHIKFQFLKDWVDNARAATGKEMFTVGEYWQNDLGALNNYLAKVNYNQSLFDAPLHYNFYAASTGGGYYDMRNILNNTLVASNPTKAVTLVENHDTQPGQSLESTVQPWFKPLAYAFILTRSGGYPSVFYGDMYGTKGTTTREIPALKSKIEPLLKARKDYAYGTQRDYIDNPDVIGWTREGDSTKAKSGLATVITDGPGGSKRMYVGTSNAGEIWYDLTGNRTDKITIGSDGYATFPVNGGSVSVWVQQ

SEQ ID NO: 36874 - protein, 480 aa, Cytophaga sp.
NGTMMQYFEWYVPNDGQQWNRLRTDAPYLSSVGITAVWTPPAYKGTSQADVGYGPYDLYDLGEFNQKGTVRTKYGTKGELKSAVNTLHSNAIQVYGDVVMNHKAGADYTENVTAVEVNPSNRYQETSGEYNIQAWTGFNFPGRGTTYSNWKWQWFHFDGTDWDQSRSLSRIFKFDGKAWDWEVSSENGNYDYLMYADYDYDHPDVVNEMKKWGVWYANEVGLDGYRLDAVKHIKFQFLKDWVDNARAATGKEMFTVGEYWQNDLGALNNYLAKVNYNQSLFDAPLHYNFYAASTGGGYYDMRNILNNTLVASNPTKAVTLVENHDTQPGQSLESTVQPWFKPLAYAFILTRSGGYPSVFYGDMYGTKGTTTREIPALKSKIEPLLKARKDYAYGTQRDYIDNPDVIGWTREGDSTKAKSGLATVITDGPGGSKRMYVGTSNAGEIWYDLTGNRTDKITIGSDGYATFPVNGGSVSVWVQQ

SEQ ID NO: 36875 - protein, 480 aa, Cytophaga sp.
NGTMMQYFEWYVPNDGQQWNRLRTDAPYLSSVGITAVWTPPAYKGTSQADVGYGPYDLYDLGEFNQKGTVRTKYGTKGELKSAVNTLHSNGIQVYGDVVMNHKAGADYTENVTAVEVNPSNRYQETSGEYNIQAWTGFNFPGRGTTYSNWKWQWFHFDGTDWDQSRSLSRIFKFDGKAWDWEVSSENGNYDYLMYADYDYDHPDVVNEMKKWGVWYANEVGLDGYRLDAVKHIKFQFLKDWVDNARAATGKEMFTVGEYWQNDLGALNNYLAKVNYNQSLFDAPLHYNFYAASTGGGYYDMRNILNNTLVASNPTKAVTLVENHDTQPGQSLESTVQPWFKPLAYAFILTRSGGYPSVFYGDMYGTKGTTTREIPALKSKIEPLLKARKDYAYGTQRDYIDNPDVIGWTREGDSTKAKSGLATVITDGPGGSKRMYVGTSNAGEIWYDLTGNRTDKITIGSDGYATFPVNAGSVSVWVQQ

SEQ ID NO: 36876 - protein, 480 aa, Cytophaga sp.
NGTMMQYFEWYVPNDGQQWNRLRTDAPYLSSVGITAVWTPPAYKGTSQADVGYGPYDLYDLGEFNQKGTVRTKYGTKGELKSAVNTLHSNGIQVYGDVVMNHKAGADYTENVTAVEVNPSNRYQETSGEYNIQAWTGFNFPGRGTTYSNWKWQWFHFDGTDWDQSRSLSRIFKFDGKAWDWEVSSENGNYDYLMYADYDYDHPDVVNEMKKWGVWYANEVGLDGYRLDAVKHIKFQFLKDWVDNARAATGKEMFTVGEYWQNDLGALNNYLAKVNYNQSLFDAPLHYNFYAASTGGGYYDMRNILNNTLVASNPTKAVTLVENHDTQPGQSLESTVQPWFKPLAYAFILTRSGGYPSVFYGDMYGTKGTTTREIPALKHKIEPLLKARKDYAYGTQRDYIDNPDVIGWTREGDSTKAKSGLATVITDGPGGSKRMYVGTSNAGEIWYDLTGNRTDKITIGSDGYATFPVNGGSVSVWVQQ

SEQ ID NO: 36877 - protein, 480 aa, Cytophaga sp.
NGTMMQYFEWYVPNDGQQWNRLRTDAPYLSSVGITAVWTPPAYKGTSQADVGYGPYDLYDLGEFNQKGTVRTKYGTKGELKSAVNTLHSNGIQVYGDVVMNHKAGADYTENVTAVEVNPSNRYQETSGEYNIQAWTGFNFPGRGTTYSNWKWQWFHFDGTDWDQSRSLSRIFKFHGKAWDWPVSSENGNYDYLMYADYDYDHPDVVNEMKKWGVWYANEVGLDGYRLDAVKHIKFSFLKDWVDNARAATGKEMFTVGEYWQNDLGALNNYLAKVNYNQSLFDAPLHYNFYAASTGGGYYDMRNILNNTLVASNPTKAVTLVENHDTQPGQSLESTVQPWFKPLAYAFILTRSGGYPSVFYGDMYGTKGTTTREIPALKSKIEPLLKARKDYAYGTQRDYIDNPDVIGWTREGDSTKAKSGLATVITDGPGGSKRMYVGTSNAGEIWYDLTGNRTDKITIGSDGYATFPVNGGSVSVWVQQ

SEQ ID NO: 36878 - protein, 480 aa, Cytophaga sp.
NGTMMQYFEWYVPNDGQQWNRLRTDAPYLSSVGITAVWTPPAYKGTSQADVGYGPYDLYDLGEFNQKGTVRTKYGTKGELKSAVNTLHSNGIQVYGDVVMNHKAGADYTENVTAVEVNPSNRYQETSGEYNIQAWTGFNFPGRGTTYSNWKWYWFHFDGTDWDQSRSLSRIFKFDGKAWDWEVSSENGNYDYLMYADYDYDHPDVVNEMKKWGVWYANEVGLDGYRLDAVKHIKFQFLKDWVDNARAATGKEMFTVGEYWQNDLGALNNYLAKVNYNQSLFDAPLHYNFYAASTGGGYYDMRNILNNTLVASNPTKAVTLVENHDTQPGQSLESTVQPWFKPLAYAFILTRSGGYPSVFYGDMYGTKGTTTREIPALKSKIEPLLKARKDYAYGTQRDYIDNPDVIGWTREGDSTKAKSGLATVITDGPGGSKRMYVGTSNAGEIWYDLTGNRTDKITIGSDGYATFPVNGGSVSVWVQQ

SEQ ID NO: 36879 - protein, 480 aa, Cytophaga sp.
NGTMMQYFEWYVPNDGQQWNRLRTDAPYLSSVGITAVWTPPAYKGTSQADVGYGPYDLYDLGEFNQKGTVRTKYGTKGELKSAVNTLHSNGIQVYGDVVMNHKAGADYTENVTAVEVNPSNRYQETSGEYNIQAWTGFNFPGRGTTYSNWKWEWFHFDGTDWDQSRSLSRIFKFDGKAWDWEVSSENGNYDYLMYADYDYDHPDVVNEMKKWGVWYANEVGLDGYRLDAVKHIKFQFLKDWVDNARAATGKEMFTVGEYWQNDLGALNNYLAKVNYNQSLFDAPLHYNFYAASTGGGYYDMRNILNNTLVASNPTKAVTLVENHDTQPGQSLESTVQPWFKPLAYAFILTRSGGYPSVFYGDMYGTKGTTTREIPALKSKIEPLLKARKDYAYGTQRDYIDNPDVIGWTREGDSTKAKSGLATVITDGPGGSKRMYVGTSNAGEIWYDLTGNRTDKITIGSDGYATFPVNGGSVSVWVQQ

SEQ ID NO: 36880 - protein, 480 aa, Cytophaga sp.
NGTMMQYFEWYVPNDGQQWNRLRTDAPYLSSVGITAVWTPPAYKGTSQADVGYGPYDLYDLGEFNQKGTVRTKYGTKGELKSAVNTLHSNGIQVYGDVVMNHKAGADYTENVTAVEVNPSNRYQETSGEYNIQAWTGFNFPGRGTTYSNWKWQWFHFDGTDWDQSRSLSRIFKFDGKAWDWEVSSENGNYDYLMYADYDYDHPDVVEEMKKWGVWYANEVGLDGYRLDAVKHIKFQFLKDWVDNARAATGKEMFTVGEYWQNDLGALNNYLAKVNYNQSLFDAPLHYNFYAASTGGGYYDMRNILNNTLVASNPTKAVTLVENHDTQPGQSLESTVQPWFKPLAYAFILTRSGGYPSVFYGDMYGTKGTTTREIPALKSKIEPLLKARKDYAYGTQRDYIDNPDVIGWTREGDSTKAKSGLATVITDGPGGSKRMYVGTSNAGEIWYDLTGNRTDKITIGSDGYATFPVNGGSVSVWVQQ

SEQ ID NO: 36881 - protein, 480 aa, Cytophaga sp.
NGTMMQYFEWYVPNDGQQWNRLRTDAPYLSSVGITAVWTPPAYKGTSQADVGYGPYDLYDLGEFNQKGTVRTKYGTKGELKSAVNTLHSNGIQVYGDVVMNHKAGADYTENVTAVEVNPSNRYQETSGEYKIQAWTGFNFPGRGTTYSNWKWQWFHFDGTDWDQSRSLSRIFKFDGKAWDWEVSSENGNYDYLMYADYDYDHPDVVNEMKKWGVWYANEVGLDGYRLDAVKHIKFQFLKDWVDNARAATGKEMFTVGEYWQNDLGALNNYLAKVNYNQSLFDAPLHYNFYAASTGGGYYDMRNILNNTLVASNPTKAVTLVENHDTQPGQSLESTVQPWFKPLAYAFILTRSGGYPSVFYGDMYGTKGTTTREIPALKSKIEPLLKARKDYAYGTQRDYIDNPDVIGWTREGDSTKAKSGLATVITDGPGGSKRMYVGTSNAGEIWYDLTGNRTDKITIGSDGYATFPVNGGSVSVWVQQ

SEQ ID NO: 36882 - protein, 480 aa, Cytophaga sp.
NGTMMQYFEWYVPNDGQQWNRLRTDAPYLSSVGITAVWTPPAYKGTSQADVGYGPYDLYDLGEFNQKGTVRTKYGTKGELKSAVNTLHSNGIQVYGDVVMNHKAGADYTENVTAVEVNPSNRYQETSGEYNIQAWTGFNFPGRGTTYSNWKWQWFHFDGTDWDDSRSLSRIFKFDGKAWDWEVSSENGNYDYLMYADYDYDHPDVVNEMKKWGVWYANEVGLDGYRLDAVKHIKFQFLKDWVDNARAATGKEMFTVGEYWQNDLGALNNYLAKVNYNQSLFDAPLHYNFYAASTGGGYYDMRNILNNTLVASNPTKAVTLVENHDTQPGQSLESTVQPWFKPLAYAFILTRSGGYPSVFYGDMYGTKGTTTREIPALKSKIEPLLKARKDYAYGTQRDYIDNPDVIGWTREGDSTKAKSGLATVITDGPGGSKRMYVGTSNAGEIWYDLTGNRTDKITIGSDGYATFPVNGGSVSVWVQQ

SEQ ID NO: 36883 - protein, 480 aa, Cytophaga sp.
NGTMMQYFEWYVPNDGQQWNRLRTDAPYLSSVGITAVWTPPAYKGTSQADVGYGPYDLYDLGEFNQKGTVRTKYGTKGELISAVNTLHSNGIQVYGDVVMNHKAGADYTENVTAVEVNPSNRYQETSGEYNIQAWTGFNFPGRGTTYSNWKWQWFHFDGTDWDQSRSLSRIFKFDGKAWDWEVSSENGNYDYLMYADYDYDHPDVVNEMKKWGVWYANEVGLDGYRLDAVKHIKFQFLKDWVDNARAATGKEMFTVGEYWQNDLGALNNYLAKVNYNQSLFDAPLHYNFYAASTGGGYYDMRNILNNTLVASNPTKAVTLVENHDTQPGQSLESTVQPWFKPLAYAFILTRSGGYPSVFYGDMYGTKGTTTREIPALKSKIEPLLKARKDYAYGTQRDYIDNPDVIGWTREGDSTKAKSGLATVITDGPGGSKRMYVGTSNAGEIWYDLTGNRTDKITIGSDGYATFPVNGGSVSVWVQQ

SEQ ID NO: 36884 - protein, 480 aa, Cytophaga sp.
NGTMMQYFEWYVPNDGQQWNRLGTDAPYLSSVGITAVWTPPAYKGTSQADVGYGPYDLYDLGEFNQKGTVRTKYGTKGELKSAVNTLHSNGIQVYGDVVMNHKAGADYTENVTAVEVNPSNRYQETSGEYNIQAWTGFNFPGRGTTYSNWKWQWFHFDGTDWDQSRSLSRIFKFDGKAWDWEVSSENGNYDYLMYADYDYDHPDVVNEMKKWGVWYANEVGLDGYRLDAVKHIKFQFLKDWVDNARAATGKEMFTVGEYWQNDLGALNNYLAKVNYNQSLFDAPLHYNFYAASTGGGYYDMRNILNNTLVASNPTKAVTLVENHDTQPGQSLESTVQPWFKPLAYAFILTRSGGYPSVFYGDMYGTKGTTTREIPALKSKIEPLLKARKDYAYGTQRDYIDNPDVIGWTREGDSTKAKSGLATVITDGPGGSKRMYVGTSNAGEIWYDLTGNRTDKITIGSDGYATFPVNGGSVSVWVQQ

SEQ ID NO: 36885 - protein, 480 aa, Cytophaga sp.
NGTMMQYFEWYVPNDGQQWNRLRLDAPYLSSVGITAVWTPPAYKGTSQADVGYGPYDLYDLGEFNQKGTVRTKYGTKGELKSAVNTLHSNGIQVYGDVVMNHKAGADYTENVTAVEVNPSNRYQETSGEYNIQAWTGFNFPGRGTTYSNWKWQWFHFDGTDWDQSRSLSRIFKFDGKAWDWEVSSENGNYDYLMYADYDYDHPDVVNEMKKWGVWYANEVGLDGYRLDAVKHIKFQFLKDWVDNARAATGKEMFTVGEYWQNDLGALNNYLAKVNYNQSLFDAPLHYNFYAASTGGGYYDMRNILNNTLVASNPTKAVTLVENHDTQPGQSLESTVQPWFKPLAYAFILTRSGGYPSVFYGDMYGTKGTTTREIPALKSKIEPLLKARKDYAYGTQRDYIDNPDVIGWTREGDSTKAKSGLATVITDGPGGSKRMYVGTSNAGEIWYDLTGNRTDKITIGSDGYATFPVNGGSVSVWVQQ

SEQ ID NO: 36886 - protein, 480 aa, Cytophaga sp.
NGTMMQYFEWYVPNDGQQWNRLRTDAPYLSSVGITAVWTPPAYKGTSQADVGYGPYDLYDLGEFNQKGTVRTKYGTKGELKSAVNTLHSNGIQVYGDVVMNHKAGADYTENVTAVEVNPSNRYQETSGEYNIQAWTGFNFPGRGTTYSNWKWQWFHFDGTDWDQSRSLSRIFKFDGKAWDWEVSSENGNYDYLMYADYDYDHPDVVNEMKKWGVWYANEVGLDGYRLDAVKHIKFQFLKDWVDNARAATGKEMFTVGEYWQNDLGALNNYLAKVNYNQSLFDAPLHYNFYAASTGGGYYDMRNILNNTLVASNPTKAVTLVENHDTQPGQSLESTVQPWFKPLAYAFILTRSGGYPSVFYGDMYGTKGTTTREIPALKSKIEPLLKARKDYAYGTQRDYIDNPDVIGWTREGDSTKAKSGLATVITDGPGGSKRMYVGTSNAGEIWYDLTGNRTDKIVIGSDGYATFPVNGGSVSVWVQQ

SEQ ID NO: 36887 - protein, 480 aa, Cytophaga sp.
NGTMMQYFEWYVPNDGQQWNRLRTDAPYLSSVGITAVWTPPAYKGTSQADVGYGPYDLYDLGEFNQKGTVRTKYGTKPELKSAVNTLHSNGIQVYGDVVMNHKAGADYTENVTAVEVNPSNRYQETSGEYNIQAWTGFNFPGRGTTYSNWKWQWFHFDGTDWDQSRSLSRIFKFDGKAWDWEVSSENGNYDYLMYADYDYDHPDVVNEMKKWGVWYANEVGLDGYRLDAVKHIKFQFLKDWVDNARAATGKEMFTVGEYWQNDLGALNNYLAKVNYNQSLFDAPLHYNFYAASTGGGYYDMRNILNNTLVASNPTKAVTLVENHDTQPGQSLESTVQPWFKPLAYAFILTRSGGYPSVFYGDMYGTKGTTTREIPALKSKIEPLLKARKDYAYGTQRDYIDNPDVIGWTREGDSTKAKSGLATVITDGPGGSKRMYVGTSNAGEIWYDLTGNRTDKITIGSDGYATFPVNGGSVSVWVQQ

SEQ ID NO: 36888 - protein, 480 aa, Cytophaga sp.
NGTMMQYFEWYVPNDGQQWNRLRTDAPYLSSVGITAVWTPPAYKGTSQADVGYGPYDLYDLGEFNQKGTVRTKYGTKGELKSAVNTLHSKGIQVYGDVVMNHKAGADYTENVTAVEVNPSNRYQETSGEYNIQAWTGFNFPGRGTTYSNWKWQWFHFDGTDWDQSRSLSRIFKFDGKAWDWEVSSENGNYDYLMYADYDYDHPDVVNEMKKWGVWYANEVGLDGYRLDAVKHIKFQFLKDWVDNARAATGKEMFTVGEYWQNDLGALNNYLAKVNYNQSLFDAPLHYNFYAASTGGGYYDMRNILNNTLVASNPTKAVTLVENHDTQPGQSLESTVQPWFKPLAYAFILTRSGGYPSVFYGDMYGTKGTTTREIPALKSKIEPLLKARKDYAYGTQRDYIDNPDVIGWTREGDSTKAKSGLATVITDGPGGSKRMYVGTSNAGEIWYDLTGNRTDKITIGSDGYATFPVNGGSVSVWVQQ

SEQ ID NO: 36889 - protein, 480 aa, Cytophaga sp.
NGTMMQYFEWYVPNDGQQWNRLRTDAPYLSSVGITAVWTPPAYKGTSQADVGYGPYDLYDLGEFNQKGTVRTKYGTKGELKSAVNTLHSNGIQVYGDVVMNHKAGADYTENVTAVEVNPSNRYQETSGEYNIQAWTGFNFPGRGTTYSNWKWQWFHFDGTDWDQSRSLSRIFKFDGKAWDWEVSSENGNYDYLMYADYDYDHPDVVNEMKKWGVWYANEVGLDGYRLDAVKHIKFQFLKDWVDNARAATGKEMFTVGEYWQNDLGALNNYLAKVNYNQSLFDAPLHYNFYAASTGGGYYDMRNILNNTLVASNPWKAVTLVENHDTQPGQSLESTVQPWFKPLAYAFILTRSGGYPSVFYGDMYGTKGTTTREIPALKSKIEPLLKARKDYAYGTQRDYIDNPDVIGWTREGDSTKAKSGLATVITDGPGGSKRMYVGTSNAGEIWYDLTGNRTDKITIGSDGYATFPVNGGSVSVWVQQ

SEQ ID NO: 36890 - protein, 480 aa, Cytophaga sp.
NGTMMQYFEWYVPNDGQQWNRLRTDAPYLSSVGITAVWTPPAYKGTSQADVGYGPYDLYDLGEFWQKGTVRTKYGTKGELKSAVNTLHSNGIQVYGDVVMNHKAGADYTENVTAVEVNPSNRYQETSGEYNIQAWTGFNFPGRGTTYSNWKWQWFHFDGTDWDQSRSLSRIFKFDGKAWDWEVSSENGNYDYLMYADYDYDHPDVVNEMKKWGVWYANEVGLDGYRLDAVKHIKFQFLKDWVDNARAATGKEMFTVGEYWQNDLGALNNYLAKVNYNQSLFDAPLHYNFYAASTGGGYYDMRNILNNTLVASNPTKAVTLVENHDTQPGQSLESTVQPWFKPLAYAFILTRSGGYPSVFYGDMYGTKGTTTREIPALKSKIEPLLKARKDYAYGTQRDYIDNPDVIGWTREGDSTKAKSGLATVITDGPGGSKRMYVGTSNAGEIWYDLTGNRTDKITIGSDGYATFPVNGGSVSVWVQQ

SEQ ID NO: 36891 - protein, 480 aa, Cytophaga sp.
NGTMMQYFEWYVPNDGQQWERLRTDAPYLSSVGITAVWTPPAYKGTSQADVGYGPYDLYDLGEFNQKGTVRTKYGTKGELKSAVNTLHSNGIQVYGDVVMNHKAGADYTENVTAVEVNPSNRYQETSGEYNIQAWTGFNFPGRGTTYSNWKWQWFHFDGTDWDQSRSLSRIFKFDGKAWDWEVSSENGNYDYLMYADYDYDHPDVVNEMKKWGVWYANEVGLDGYRLDAVKHIKFQFLKDWVDNARAATGKEMFTVGEYWQNDLGALNNYLAKVNYNQSLFDAPLHYNFYAASTGGGYYDMRNILNNTLVASNPTKAVTLVENHDTQPGQSLESTVQPWFKPLAYAFILTRSGGYPSVFYGDMYGTKGTTTREIPALKSKIEPLLKARKDYAYGTQRDYIDNPDVIGWTREGDSTKAKSGLATVITDGPGGSKRMYVGTSNAGEIWYDLTGNRTDKITIGSDGYATFPVNGGSVSVWVQQ

SEQ ID NO: 36892 - protein, 480 aa, Cytophaga sp.
NGTMMQYFEWYVPNDGQQWNRLRTDAPYLSSVGITAVWTPPAYKGTSQADVGYGPYDLYDLGEFNQKGTVRTKYGTKGELKSAVNTLHSNGIQVYGDVVMNHKAGADYTENVTAVEVNPSNRYQETSGEYNIRAWTGFNFPGRGTTYSNWKWQWFHFDGTDWDQSRSLSRIFKFDGKAWDWEVSSENGNYDYLMYADYDYDHPDVVNEMKKWGVWYANEVGLDGYRLDAVKHIKFQFLKDWVDNARAATGKEMFTVGEYWQNDLGALNNYLAKVNYNQSLFDAPLHYNFYAASTGGGYYDMRNILNNTLVASNPTKAVTLVENHDTQPGQSLESTVQPWFKPLAYAFILTRSGGYPSVFYGDMYGTKGTTTREIPALKSKIEPLLKARKDYAYGTQRDYIDNPDVIGWTREGDSTKAKSGLATVITDGPGGSKRMYVGTSNAGEIWYDLTGNRTDKITIGSDGYATFPVNGGSVSVWVQQ

SEQ ID NO: 36893 - protein, 480 aa, Cytophaga sp.
NGTMMQYFEWYVPNDGQQWNRLRTDAPYLSSVGITAVWTPPAYKGTSQADVGYGPYDLYDLGEFNQKGTVRTKYGTKGELKSAVNTLHSNGIQVYGDVVMNHKAGADYTENVTAVEVNPSNRYQETSGEYNIQAWTGFNFPGRGTTYSNWKWQWFHFDGTDWDQSRSLSRIFKFDGKAWDWEVSSENGNYDYLMYADYDYDHPDVVNEMKKWGVWYANEVGLDGYRLDAVKHIKFQFLKDWVDNARAATGKEMFTVGEYWQNDLGALNNYLAKVNYNQSLFDAPLHYNFYAASTGGGYYDMRNILNNTLVASNPTKAVTLVENHDTQPGQSLESTVQPWFKPLAYAFILTRSGGYPSVFYGDMYGTKGTTTREIPALKSKIEPLLKARKDYAYGTQRDYIDNPDVIGWTREGDSTQAKSGLATVITDGPGGSKRMYVGTSNAGEIWYDLTGNRTDKITIGSDGYATFPVNGGSVSVWVQQ

SEQ ID NO: 36894 - protein, 480 aa, Cytophaga sp.
NGTMMQYFEWYVPNDGQQWNRLRTDAPYLSSVGITAVWTPPAYKGTSQADVGYGPYDLYDLGEFNQKGTVRTKYGTKGELKSAVNTLHSNGIQVYGDVVMNHKAGADYTENVTAVEVNPSNRYQETSGEYNIQAWTGFNFPGRGTTYSNWKWQWFHFDGTDWDQSRSLSRIFKFDGKAWDWEVSSENGNYDYLMYADYDYDHPDVVNEMKKWGVWYANEVGLDGYRLDAVKHIKFQFLKDWVDNARAATGKEMFTVGEYWQNDLGALNNYLAKVNYNQSLFDAPLHYNFYAASTGGGYYDMRNILNNTLVASNPTKAVTLVENHDTQPGQSLESTVQPWFKPLAYAFILTRSGGYPSVFYGDMYGTKGTTTREIPALKSKIEPLLKARKDYAYGTQRDYIDNPDVIGWTREGDSTKAKSGLATVITDGPGGSKRMYVGTSNAGEIWYDLTGNRTDMITIGSDGYATFPVNGGSVSVWVQQ

SEQ ID NO: 36895 - protein, 480 aa, Cytophaga sp.
NGTMMQYFEWYVPNDGQQWNRLRTDAPYLSSVGITAVWTPPAYKGTSQADVGYGPYDLYDLGEFNQKGTVRTKYGTKGELKSAVNTLHSNGIQVYGDVVMNHKAGADYTENVTAVEVNPSNRYQETSGEYNIQAWTGFNFPGRGTTYSNWKWQWMHFDGTDWDQSRSLSRIFKFDGKAWDWEVSSENGNYDYLMYADYDYDHPDVVNEMKKWGVWYANEVGLDGYRLDAVKHIKFQFLKDWVDNARAATGKEMFTVGEYWQNDLGALNNYLAKVNYNQSLFDAPLHYNFYAASTGGGYYDMRNILNNTLVASNPTKAVTLVENHDTQPGQSLESTVQPWFKPLAYAFILTRSGGYPSVFYGDMYGTKGTTTREIPALKSKIEPLLKARKDYAYGTQRDYIDNPDVIGWTREGDSTKAKSGLATVITDGPGGSKRMYVGTSNAGEIWYDLTGNRTDKITIGSDGYATFPVNGGSVSVWVQQ

SEQ ID NO: 36896 - protein, 480 aa, Cytophaga sp.
NGTMMQYFEWYVPNDGQQWNRLRTDAPYLSSVGITAVWTPPAYKGTSQADVGYGPYDLYDLGEFNQKGTVRTKYGTKGELKSAVNTLHSNGIQVYGDVVMNHKAGADYTENVTAVEVNPSNRYQETSGEYNIQAWTGFNFPGRGTTYSNWKWQWFHFDGTDWDQSRSLSRIFKFDGKAWDWEVSSENGNYDYLMYADYDYDHPDVVNEMKKWGVWYANEVGLDGYRLDAVKHIKFQFLKDWVDNARAATGKEMFTVGEYWQNDLGALNNYLAKVNYNQSLFDAPLHYNFYAASTGGGYYDMRNILNNTLVASNPTKAVTLVENHDTQPGQSLESTVQPWFKPLAYAFILTRSGGYPSVFYGDMYGTKGTTTNEIPALKSKIEPLLKARKDYAYGTQRDYIDNPDVIGWTREGDSTKAKSGLATVITDGPGGSKRMYVGTSNAGEIWYDLTGNRTDKITIGSDGYATFPVNGGSVSVWVQQ

SEQ ID NO: 36897 - protein, 480 aa, Cytophaga sp.
NGTMMQYFEWYVPNDGQQWNRLRTDAPYLSSVGITAVWTPPAYKGTSQADVGYGPYDLYDLGEFNQKGTVRTKYGTKGELKSAVNRLHSNGIQVYGDVVMNHKAGADYTENVTAVEVNPSNRYQETSGEYNIQAWTGFNFPGRGTTYSNWKWQWFHFDGTDWDQSRSLSRIFKFDGKAWDWEVSSENGNYDYLMYADYDYDHPDVVNEMKKWGVWYANEVGLDGYRLDAVKHIKFQFLKDWVDNARAATGKEMFTVGEYWQNDLGALNNYLAKVNYNQSLFDAPLHYNFYAASTGGGYYDMRNILNNTLVASNPTKAVTLVENHDTQPGQSLESTVQPWFKPLAYAFILTRSGGYPSVFYGDMYGTKGTTTREIPALKSKIEPLLKARKDYAYGTQRDYIDNPDVIGWTREGDSTKAKSGLATVITDGPGGSKRMYVGTSNAGEIWYDLTGNRTDKITIGSDGYATFPVNGGSVSVWVQQ

SEQ ID NO: 36898 - protein, 480 aa, Cytophaga sp.
NGTMMQYFEWYVPNDGQQWNRLRTDAPYLSSVGITAVWTPPAYKGTSQADVGYGPYDLYDLGEFNQKGTVRTKYGTKGELKSAVNTLHSNGIQVYGDVVMNHKAGADYTENVTAVEVNPSNRYQETSGEYNIQAWTGFNFPGRGATYSNWKWQWFHFDGTDWDQSRSLSRIFKFDGKAWDWEVSSENGNYDYLMYADYDYDHPDVVNEMKKWGVWYANEVGLDGYRLDAVKHIKFQFLKDWVDNARAATGKEMFTVGEYWQNDLGALNNYLAKVNYNQSLFDAPLHYNFYAASTGGGYYDMRNILNNTLVASNPTKAVTLVENHDTQPGQSLESTVQPWFKPLAYAFILTRSGGYPSVFYGDMYGTKGTTTREIPALKSKIEPLLKARKDYAYGTQRDYIDNPDVIGWTREGDSTKAKSGLATVITDGPGGSKRMYVGTSNAGEIWYDLTGNRTDKITIGSDGYATFPVNGGSVSVWVQQ

SEQ ID NO: 36899 - protein, 480 aa, Cytophaga sp.
NGTMMQYFEWYVPNDGQQWNRLRRDAPYLSSVGITAVWTPPAYKGTSQADVGYGPYDLYDLGEFNQKGTVRTKYGTKGELKSAVNTLHSNGIQVYGDVVMNHKAGADYTENVTAVEVNPSNRYQETSGEYNIQAWTGFNFPGRGTTYSNWKWQWFHFDGTDWDQSRSLSRIFKFDGKAWDWEVSSENGNYDYLMYADYDYDHPDVVNEMKKWGVWYANEVGLDGYRLDAVKHIKFQFLKDWVDNARAATGKEMFTVGEYWQNDLGALNNYLAKVNYNQSLFDAPLHYNFYAASTGGGYYDMRNILNNTLVASNPTKAVTLVENHDTQPGQSLESTVQPWFKPLAYAFILTRSGGYPSVFYGDMYGTKGTTTREIPALKSKIEPLLKARKDYAYGTQRDYIDNPDVIGWTREGDSTKAKSGLATVITDGPGGSKRMYVGTSNAGEIWYDLTGNRTDKITIGSDGYATFPVNGGSVSVWVQQ

SEQ ID NO: 36900 - protein, 480 aa, Cytophaga sp.
NGTMMQYFEWYVPNDGQQWNRLRTDAPYLSSVGITAVWTPPAYKGTSQADVGYGPYDLYDLGEFNQKGTVRTKYGTKGELKSAVNTLHSNGIQVYGDVVMNHKAGADYTENVTAVEVNPSNRYQETSGEYNIQAWTGFNFPGRGTTYSNWKWQWFHFDGTDWDQSRSLSRIFKFDGKAWDWEVSSENGNYDYLMYADYDYDHPDVVNEMKKWGVWYANEVGLDGYRLDAVKHIKFQFLKDWVDYARAATGKEMFTVGEYWQNDLGALNNYLAKVNYNQSLFDAPLHYNFYAASTGGGYYDMRNILNNTLVASNPTKAVTLVENHDTQPGQSLESTVQPWFKPLAYAFILTRSGGYPSVFYGDMYGTKGTTTREIPALKSKIEPLLKARKDYAYGTQRDYIDNPDVIGWTREGDSTKAKSGLATVITDGPGGSKRMYVGTSNAGEIWYDLTGNRTDKITIGSDGYATFPVNGGSVSVWVQQ

SEQ ID NO: 36901 - protein, 480 aa, Cytophaga sp.
NGTMMQYFEWYVPNDGQQWNRLRTDAPYLSSVGITAVWTPPAYKGTSQADVGYGPYDLYDLGEFNQKGTVRTKYGTKGELKSAVNTLHSNGIQVYGDVVMNHKAGADYTENVTAVEVNPCNRYQETSGEYNIQAWTGFNFPGRGTTYSNWKWQWFHFDGTDWDQSRSLSRIFKFDGKAWDWEVSSENGNYDYLMYADYDYDHPDVVNEMKKWGVWYANEVGLDGYRLDAVKHIKFQFLKDWVDNARAATGKEMFTVGEYWQNDLGALNNYLAKVNYNQSLFDAPLHYNFYAASTGGGYYDMRNILNNTLVASNPTKAVTLVENHDTQPGQSLESTVQPWFKPLAYAFILTRSGGYPSVFYGDMYGTKGTTTREIPALKSKIEPLLKARKDYAYGTQRDYIDNPDVIGWTREGDSTKAKSGLATVITDGPGGSKRMYVGTSNAGEIWYDLTGNRTDKITIGSDGYATFPVNGGSVSVWVQQ

SEQ ID NO: 36902 - protein, 480 aa, Cytophaga sp.
NGTMMQYFEWYVPNDGQQWNRLRTDAPYLSSVGITAVWTPPAYKGTSQADVGYGPYDLYDLGEFNQKGTVRTKYGTKGELKSAVNTLHSNGIQVYGDVVMNHKAGADYTENVTAVEVNPSNRYQETSGEYNIQAWTGFNFPGRGTTYSNWKWQWFHFDGTDWDQSRSLSRIFKFDGKAWDWEVSSENGNYDYLMYADYDYDHPDVVNEMKKWGVWYANEVGLDGYRLDAVKHIKFQFLKDWVDNARAATGKEMFTVGEYWQNDLGALNNYLAKVNYNQSLFDAPLHYNFYAASTGGGYYDMRNILNNTLVASNPTKAVTLVENHDTQPGQSLESTVQPWFKPLAYAFILTRSGGYPSVFYGDMYGTKGTTTREIPALKSKIEPLLKARKDYAYGTQRDYIDNPDVIGWTREGDSTKAKSGLATVITDGPGGSKRMYVGTSNAGEIWYDLTGNRTDKITIGSDGYACFPVNGGSVSVWVQQ

SEQ ID NO: 36903 - protein, 480 aa, Cytophaga sp.
NGTMMQYFEWYVPNDGQQWNRLRADAPYLSSVGITAVWTPPAYKGTSQADVGYGPYDLYDLGEFNQKGTVRTKYGTKGELKSAVNTLHSNGIQVYGDVVMNHKAGADYTENVTAVEVNPSNRYQETSGEYNIQAWTGFNFPGRGTTYSNWKWQWFHFDGTDWDQSRSLSRIFKFDGKAWDWEVSSENGNYDYLMYADYDYDHPDVVNEMKKWGVWYANEVGLDGYRLDAVKHIKFQFLKDWVDNARAATGKEMFTVGEYWQNDLGALNNYLAKVNYNQSLFDAPLHYNFYAASTGGGYYDMRNILNNTLVASNPTKAVTLVENHDTQPGQSLESTVQPWFKPLAYAFILTRSGGYPSVFYGDMYGTKGTTTREIPALKSKIEPLLKARKDYAYGTQRDYIDNPDVIGWTREGDSTKAKSGLATVITDGPGGSKRMYVGTSNAGEIWYDLTGNRTDKITIGSDGYATFPVNGGSVSVWVQQ

SEQ ID NO: 36904 - protein, 480 aa, Cytophaga sp.
NGTMMQYFEWYVPNDGQQWNRLRTDAPYLSSVGITAVWTPPAYKGTSQADVGYGPYDLYDLGEFNQKGTVRTKYGTKGELKSAVNTLHSNGIQVYGDVVMNHKAGADNTENVTAVEVNPSNRYQETSGEYNIQAWTGFNFPGRGTTYSNWKWQWFHFDGTDWDQSRSLSRIFKFDGKAWDWEVSSENGNYDYLMYADYDYDHPDVVNEMKKWGVWYANEVGLDGYRLDAVKHIKFQFLKDWVDNARAATGKEMFTVGEYWQNDLGALNNYLAKVNYNQSLFDAPLHYNFYAASTGGGYYDMRNILNNTLVASNPTKAVTLVENHDTQPGQSLESTVQPWFKPLAYAFILTRSGGYPSVFYGDMYGTKGTTTREIPALKSKIEPLLKARKDYAYGTQRDYIDNPDVIGWTREGDSTKAKSGLATVITDGPGGSKRMYVGTSNAGEIWYDLTGNRTDKITIGSDGYATFPVNGGSVSVWVQQ

SEQ ID NO: 36905 - protein, 480 aa, Cytophaga sp.
NGTMMQYFEWYVPNDGQQWNRLRTDAPYLSSVGITAVWCPPAYKGTSQADVGYGPYDLYDLGEFNQKGTVRTKYGTKGELKSAVNTLHSNGIQVYGDVVMNHKAGADYTENVTAVEVNPSNRYQETSGEYNIQAWTGFNFPGRGTTYSNWKWQWFHFDGTDWDQSRSLSRIFKFDGKAWDWEVSSENGNYDYLMYADYDYDHPDVVNEMKKWGVWYANEVGLDGYRLDAVKHIKFQFLKDWVDNARAATGKEMFTVGEYWQNDLGALNNYLAKVNYNQSLFDAPLHYNFYAASTGGGYYDMRNILNNTLVASNPTKAVTLVENHDTQPGQSLESTVQPWFKPLAYAFILTRSGGYPSVFYGDMYGTKGTTTREIPALKSKIEPLLKARKDYAYGTQRDYIDNPDVIGWTREGDSTKAKSGLATVITDGPGGSKRMYVGTSNAGEIWYDLTGNRTDKITIGSDGYATFPVNGGSVSVWVQQ

SEQ ID NO: 36906 - protein, 480 aa, Cytophaga sp.
NGTMMQYFEWYVPNDGQQWNRLRTDAPYLSSVGITAVWTPPAYKGTSQADVGYGPYDLYDLGEFNQKGTVRTKYGTKGELKSAVNTLHSNCIQVYGDVVMNHKAGADYTENVTAVEVNPSNRYQETSGEYNIQAWTGFNFPGRGTTYSNWKWQWFHFDGTDWDQSRSLSRIFKFDGKAWDWEVSSENGNYDYLMYADYDYDHPDVVNEMKKWGVWYANEVGLDGYRLDAVKHIKFQFLKDWVDNARAATGKEMFTVGEYWQNDLGALNNYLAKVNYNQSLFDAPLHYNFYAASTGGGYYDMRNILNNTLVASNPTKAVTLVENHDTQPGQSLESTVQPWFKPLAYAFILTRSGGYPSVFYGDMYGTKGTTTREIPALKSKIEPLLKARKDYAYGTQRDYIDNPDVIGWTREGDSTKAKSGLATVITDGPGGSKRMYVGTSNAGEIWYDLTGNRTDKITIGSDGYATFPVNGGSVSVWVQQ

SEQ ID NO: 36907 - protein, 480 aa, Cytophaga sp.
NGTMMQYFEWYVPNDGQQWNRLRTDAPYLSSVGITAVWTPPAYKGTSQADVGYGPYDLYDLGEFNQKGTVRTKYGTKGELKSAVNTLHSNGIQVYGDVVMNHKAGADYTENVTAVEVNPSNRYQETSGEYNIQAWTGFNFPGRGTTYSNWKWQWFHFDGTDWDQSRSLSRIFKFDGKAWDWEVSSENGNYDYLMYADYDYDHPDVVNEMKKWGVWYANEVGLDGYRLDAVKHIKFQFLKDWVDNARAATGKEMFTVGEYWQNDLGALNNYLYKVNYNQSLFDAPLHYNFYAASTGGGYYDMRNILNNTLVASNPTKAVTLVENHDTQPGQSLESTVQPWFKPLAYAFILTRSGGYPSVFYGDMYGTKGTTTREIPALKSKIEPLLKARKDYAYGTQRDYIDNPDVIGWTREGDSTKAKSGLATVITDGPGGSKRMYVGTSNAGEIWYDLTGNRTDKITIGSDGYATFPVNGGSVSVWVQQ

SEQ ID NO: 36908 - protein, 480 aa, Cytophaga sp.
NGTMMQYFEWYVPNDGQQWNRLRTDAPYLSSVGITAVWTPPAYKGTSQADVGYGPYDLYDLGEFNQKGTVRTKYGTKGELKSAVNTLHSNGIQVYGDVVMNHKAGADYTENVTAVEVNPSNRYQETSGEYNIQAWTGFNFPGRGTTYSNWKWQWFHFDGTDWDQSRSLSRIFKFDGKAWDWEVSSENGNYDYLMYADYDYDHPDVVNEMKKWGVWYANEVGLDGYRLDAVKHIKFQFLKDWVDNARAATGKEMFTVGEYWQNDLGALNNYLAKVNYNQSLFDAPLHYNFYAASTWGGYYDMRNILNNTLVASNPTKAVTLVENHDTQPGQSLESTVQPWFKPLAYAFILTRSGGYPSVFYGDMYGTKGTTTREIPALKSKIEPLLKARKDYAYGTQRDYIDNPDVIGWTREGDSTKAKSGLATVITDGPGGSKRMYVGTSNAGEIWYDLTGNRTDKITIGSDGYATFPVNGGSVSVWVQQ

SEQ ID NO: 36909 - protein, 480 aa, Cytophaga sp.
NGTMMQYFEWYVPNDGQQWNRLRYDAPYLSSVGITAVWTPPAYKGTSQADVGYGPYDLYDLGEFNQKGTVRTKYGTKGELKSAVNTLHSNGIQVYGDVVMNHKAGADYTENVTAVEVNPSNRYQETSGEYNIQAWTGFNFPGRGTTYSNWKWQWFHFDGTDWDQSRSLSRIFKFDGKAWDWEVSSENGNYDYLMYADYDYDHPDVVNEMKKWGVWYANEVGLDGYRLDAVKHIKFQFLKDWVDNARAATGKEMFTVGEYWQNDLGALNNYLAKVNYNQSLFDAPLHYNFYAASTGGGYYDMRNILNNTLVASNPTKAVTLVENHDTQPGQSLESTVQPWFKPLAYAFILTRSGGYPSVFYGDMYGTKGTTTREIPALKSKIEPLLKARKDYAYGTQRDYIDNPDVIGWTREGDSTKAKSGLATVITDGPGGSKRMYVGTSNAGEIWYDLTGNRTDKITIGSDGYATFPVNGGSVSVWVQQ

SEQ ID NO: 36910 - protein, 480 aa, Cytophaga sp.
NGTMMQYFEWYVPNDGQQWNRLRTDAPYLSSVGITAVWTPPAYKGTSQADVGYGPYDLYDLGEFNQKGTVRTKYGTKGELKSAVNTLHSNGIQVYGDVVMNHKAGADYTEPVTAVEVNPSNRYQETSGEYNIQAWTGFNFPGRGTTYSNWKWQWFHFDGTDWDQSRSLSRIFKFDGKAWDWEVSSENGNYDYLMYADYDYDHPDVVNEMKKWGVWYANEVGLDGYRLDAVKHIKFQFLKDWVDNARAATGKEMFTVGEYWQNDLGALNNYLAKVNYNQSLFDAPLHYNFYAASTGGGYYDMRNILNNTLVASNPTKAVTLVENHDTQPGQSLESTVQPWFKPLAYAFILTRSGGYPSVFYGDMYGTKGTTTREIPALKSKIEPLLKARKDYAYGTQRDYIDNPDVIGWTREGDSTKAKSGLATVITDGPGGSKRMYVGTSNAGEIWYDLTGNRTDKITIGSDGYATFPVNGGSVSVWVQQ

SEQ ID NO: 36911 - protein, 480 aa, Cytophaga sp.
NGTMMQYFEWYVPNDGQQWNRLRTDAPYLSSVGITAVWTPPAYKGTSQADVGYGPYDLYDLGEFNQKGTVRTKYGTKGELKSAVNTLHSNGIQVYGDVVMNHKAGADYTENVTAVEVNPSNRYQETSGEYNIQAWTGFNFPGRGTTYSNWKWQWFHFDGTDWDQSRSLSRIFKFDGKAWDWEVSSENGNYDYLMYADYDYDHPDVVNEMKKWGVWYANEVGLDGYRLDAVKHIKFQFLKDWVDNARAATGKEMFTVGEYWQNDLGALNNYLVKVNYNQSLFDAPLHYNFYAASTGGGYYDMRNILNNTLVASNPTKAVTLVENHDTQPGQSLESTVQPWFKPLAYAFILTRSGGYPSVFYGDMYGTKGTTTREIPALKSKIEPLLKARKDYAYGTQRDYIDNPDVIGWTREGDSTKAKSGLATVITDGPGGSKRMYVGTSNAGEIWYDLTGNRTDKITIGSDGYATFPVNGGSVSVWVQQ

SEQ ID NO: 36912 - protein, 480 aa, Cytophaga sp.
NGTMMQYFEWYVPNDGQQWNRLRTDAPYLSSVGITAVWTPPAYKGTSQADVGYGPYDLYDLGEFNQKGTVRTKYGTKGELKSAVNTLHSNGIQVYGDVVMNHKAGADYTENVTAVEVNPSNRYQETSGEYNIQAWTGFNFPGRGTTYSNWKWQWFHFDGTDWDQSRSLSRIFKFDGKAWDWEVSSENGNYDYLMYADYDYDHPDVVNEMKKWGVWYANEVGLDGYRLDAVKHIKFQFLKDWVDNARVATGKEMFTVGEYWQNDLGALNNYLAKVNYNQSLFDAPLHYNFYAASTGGGYYDMRNILNNTLVASNPTKAVTLVENHDTQPGQSLESTVQPWFKPLAYAFILTRSGGYPSVFYGDMYGTKGTTTREIPALKSKIEPLLKARKDYAYGTQRDYIDNPDVIGWTREGDSTKAKSGLATVITDGPGGSKRMYVGTSNAGEIWYDLTGNRTDKITIGSDGYATFPVNGGSVSVWVQQ

SEQ ID NO: 36913 - protein, 480 aa, Cytophaga sp.
NGTMMQYFEWYVPNDGQQWNRLRTDAPYLSSVGITAVWTPPAYKGTSQADVGYGPYDLYDLGEFNQKGTVRTKYGTKGELKSAVNTLHSNGIQVYGDVVMNHKAGADYTENVTAVEVNPSNRYQETSGEYNINAWTGFNFPGRGTTYSNWKWQWFHFDGTDWDQSRSLSRIFKFDGKAWDWEVSSENGNYDYLMYADYDYDHPDVVNEMKKWGVWYANEVGLDGYRLDAVKHIKFQFLKDWVDNARAATGKEMFTVGEYWQNDLGALNNYLAKVNYNQSLFDAPLHYNFYAASTGGGYYDMRNILNNTLVASNPTKAVTLVENHDTQPGQSLESTVQPWFKPLAYAFILTRSGGYPSVFYGDMYGTKGTTTREIPALKSKIEPLLKARKDYAYGTQRDYIDNPDVIGWTREGDSTKAKSGLATVITDGPGGSKRMYVGTSNAGEIWYDLTGNRTDKITIGSDGYATFPVNGGSVSVWVQQ

SEQ ID NO: 36914 - protein, 480 aa, Cytophaga sp.
NGTMMQYFEWYVPNDGQQWNRLRTDAPYLSSVGITAVWTPPAYKGTSQADVGYGPYDLYDLGEFNQKGTVRTKYGTKGELKSAVNTLHSNGIQVYGDVVMNHKAGADYTENVTAVEVNPSNRYQETSGEYMIQAWTGFNFPGRGTTYSNWKWQWFHFDGTDWDQSRSLSRIFKFDGKAWDWEVSSENGNYDYLMYADYDYDHPDVVNEMKKWGVWYANEVGLDGYRLDAVKHIKFQFLKDWVDNARAATGKEMFTVGEYWQNDLGALNNYLAKVNYNQSLFDAPLHYNFYAASTGGGYYDMRNILNNTLVASNPTKAVTLVENHDTQPGQSLESTVQPWFKPLAYAFILTRSGGYPSVFYGDMYGTKGTTTREIPALKSKIEPLLKARKDYAYGTQRDYIDNPDVIGWTREGDSTKAKSGLATVITDGPGGSKRMYVGTSNAGEIWYDLTGNRTDKITIGSDGYATFPVNGGSVSVWVQQ

SEQ ID NO: 36915 - protein, 480 aa, Cytophaga sp.
NGTMMQYFEWYVPNDGQQWNRLRTDAPYLSSVGITAVWTPPAYKGTSQADVGYGPYDLYDLGEFNQKGTVRTKYGTKGELKSAVNTLHSNGIQVYGDVVMNHKAGADYTENVTAVEVNPSNRYQETSGEYNIQAWTGFNFPGRGTTYSNWKWQWFHFDGTDWDQSRSLSRIFKFDGKAWDWEVSSENGNYDYLMYADYDYDHPDVVNEMKKWGVWYANEVGLDGYRLDAVKHIKFQFLKDWVDNARAATGKEMFTVGEYWQNDLGALNNYLAKVNYNQSLFDAPLHYNFYAASTGGGYYDMRNILNNTLVASNPTKAVTLVENHDTQPGQSLESTVQPWFKPLAYAFILTRSGGYPIVFYGDMYGTKGTTTREIPALKSKIEPLLKARKDYAYGTQRDYIDNPDVIGWTREGDSTKAKSGLATVITDGPGGSKRMYVGTSNAGEIWYDLTGNRTDKITIGSDGYATFPVNGGSVSVWVQQ

SEQ ID NO: 36916 - protein, 480 aa, Cytophaga sp.
NGTMMQYFEWYVPNDGQQWNRLRTDAPYLSSVGITAVWTPPAYKGTSQADVGYGPYDLYDLGEFNQKGTVRTKYGTKGELKSAVNTLHSNGIQVYGDVVMNHKAGADYTENVTAVEVNPLNRYQETSGEYNIQAWTGFNFPGRGTTYSNWKWQWFHFDGTDWDQSRSLSRIFKFDGKAWDWEVSSENGNYDYLMYADYDYDHPDVVNEMKKWGVWYANEVGLDGYRLDAVKHIKFQFLKDWVDNARAATGKEMFTVGEYWQNDLGALNNYLAKVNYNQSLFDAPLHYNFYAASTGGGYYDMRNILNNTLVASNPTKAVTLVENHDTQPGQSLESTVQPWFKPLAYAFILTRSGGYPSVFYGDMYGTKGTTTREIPALKSKIEPLLKARKDYAYGTQRDYIDNPDVIGWTREGDSTKAKSGLATVITDGPGGSKRMYVGTSNAGEIWYDLTGNRTDKITIGSDGYATFPVNGGSVSVWVQQ

SEQ ID NO: 36917 - protein, 480 aa, Cytophaga sp.
NGTMMQYFEWYVPNDGQQWNRLRTDAPYLSSVGITAVWTPPAYKGTSQADVGYGPYDLYDLGEFNQKGTVRTKYGTKGELKSAVNTLHSNGIQVYGDVVMNHKAGADYTENVTAVEVNPSNRYQETSGEYNIQAWTGFNFPGRGTTYSNWKWQWFHFDGTDWDQSRSLSRIFKFDGKAWDWEVSSENGNYDYLMYADYDYDHPDVVNEMKKWGVWYANEVGLDGYRLDAVKHIKFQFLKDWVDNARAATGKEMFTVGEYWQNDLGALNNYLAKVNYNQSLFDAPLHYNFYAASTGGGYYDMRNILNNTLVASNPTKAVTLVENHDTQPGQSLESTVQPWFKPLAYAFILTRSGGYPSVFYGDMYGTKGTTTREIPALKSKIEPLLKARKDYAYGTQRDYIDNPDVIGWTREGDSTKAKSGLATVITDGPGGSKRMYVGTSNAGEIWYDLTGNRTDKITIGSDGYAMFPVNGGSVSVWVQQ

SEQ ID NO: 36918 - protein, 480 aa, Cytophaga sp.
NGTMMQYFEWYVPNDGQQWNRLRTDAPYLSSVGITAVWTPPAYKGTSQADVGYGPYDLYDLGEFNQKGTVRTKYGTKGELKSAVNTLHSNGIQVYGDVVMNHKAGADYTENVTAVEVNPSNRYQETSGEYNIVAWTGFNFPGRGTTYSNWKWQWFHFDGTDWDQSRSLSRIFKFDGKAWDWEVSSENGNYDYLMYADYDYDHPDVVNEMKKWGVWYANEVGLDGYRLDAVKHIKFQFLKDWVDNARAATGKEMFTVGEYWQNDLGALNNYLAKVNYNQSLFDAPLHYNFYAASTGGGYYDMRNILNNTLVASNPTKAVTLVENHDTQPGQSLESTVQPWFKPLAYAFILTRSGGYPSVFYGDMYGTKGTTTREIPALKSKIEPLLKARKDYAYGTQRDYIDNPDVIGWTREGDSTKAKSGLATVITDGPGGSKRMYVGTSNAGEIWYDLTGNRTDKITIGSDGYATFPVNGGSVSVWVQQ

SEQ ID NO: 36919 - protein, 480 aa, Cytophaga sp.
NGTMMQYFEWYVPNDGQQWNRLKTDAPYLSSVGITAVWTPPAYKGTSQADVGYGPYDLYDLGEFNQKGTVRTKYGTKGELKSAVNTLHSNGIQVYGDVVMNHKAGADYTENVTAVEVNPSNRYQETSGEYNIQAWTGFNFPGRGTTYSNWKWQWFHFDGTDWDQSRSLSRIFKFDGKAWDWEVSSENGNYDYLMYADYDYDHPDVVNEMKKWGVWYANEVGLDGYRLDAVKHIKFQFLKDWVDNARAATGKEMFTVGEYWQNDLGALNNYLAKVNYNQSLFDAPLHYNFYAASTGGGYYDMRNILNNTLVASNPTKAVTLVENHDTQPGQSLESTVQPWFKPLAYAFILTRSGGYPSVFYGDMYGTKGTTTREIPALKSKIEPLLKARKDYAYGTQRDYIDNPDVIGWTREGDSTKAKSGLATVITDGPGGSKRMYVGTSNAGEIWYDLTGNRTDKITIGSDGYATFPVNGGSVSVWVQQ

SEQ ID NO: 36920 - protein, 480 aa, Cytophaga sp.
NGTMMQYFEWYVPNDGQQWNRLRTDAPYLSSVGITAVWTPPAYKGTSQADVGYGPYDLYDLGEFNQKGTVRTKYGTKGELKSAVNTLHSNGIQVYGDVVMNHKAGADYTENVTAVEVNPSNRYQETSGEYNIQAWTGFNFPGRGTTYSNWKWQWFHFDGTDWDQSRSLSRIFKFDGKAWDWEVSSENGNYDYLMYADYDYDHPDVVNEMKKWGVWYANEVGLDGYRLDAVKHIKFQFLKDWVDNARAATGKEMFTVGEYWQNDLGALNNYLAKVNYNQSLFDAPLHYNFYAASTGGGYYDMRNILNNTLVASNPTKAVTLVENHDTQPGQSLESTVQPWFKPLAYAFILTRSGGYPSVFYGDMYGTKGTTTREIPALKSKIEPLLKARKDYAYGTQRDYIDNPDVIGWTREGDSGKAKSGLATVITDGPGGSKRMYVGTSNAGEIWYDLTGNRTDKITIGSDGYATFPVNGGSVSVWVQQ

SEQ ID NO: 36921 - protein, 480 aa, Cytophaga sp.
NGTMMQYFEWYVPNDGQQWNRLRTDAPYLSSVGITAVWTPPAYKGTSQADVGYGPYDLYDLGEFNQKGTVRTKYGTKGELKSAVNTLHSNGIQVYGDVVMNHKAGADYTENVTAVEVNPSNRYQETSGEYNIQAWTGFNFPGRGTTYSNWKWQWFHFDGTDWDQSRSLSRIFKFDGKAWDWEVSSENGNYDYLMYADYDYDHPDVVNEMKKWGVWYANEVGLDGYRLDAVKHIKFQFLKDWVDNARAATGKEMFTVGEYWQNDLGALNNYLAKVNYNQSLFDAPLHYNFYAASTGGGYYDMRNILNNTLVASNPTKAVTLVENHDTQPGQSLESTVQPWFKPLAYAFILTRSGGYPTVFYGDMYGTKGTTTREIPALKSKIEPLLKARKDYAYGTQRDYIDNPDVIGWTREGDSTKAKSGLATVITDGPGGSKRMYVGTSNAGEIWYDLTGNRTDKITIGSDGYATFPVNGGSVSVWVQQ

SEQ ID NO: 36922 - protein, 480 aa, Cytophaga sp.
NGTMMQYFEWYVPNDGQQWNRLRTDAPYLSSVGITAVWTPPAYKGTSQADVGYGPYDLYDLGEFNQKGTVRTKYGTKGELKSAVNTLHSNGIQVYGDVVMNHKAGADYTENVTAVEVNPSNRYQETSGEYNIQAWTGFNFPGRGTTYSNWKWQWFHFDGTDWDQSRSTSRIFKFDGKAWDWEVSSENGNYDYLMYADYDYDHPDVVNEMKKWGVWYANEVGLDGYRLDAVKHIKFQFLKDWVDNARAATGKEMFTVGEYWQNDLGALNNYLAKVNYNQSLFDAPLHYNFYAASTGGGYYDMRNILNNTLVASNPTKAVTLVENHDTQPGQSLESTVQPWFKPLAYAFILTRSGGYPSVFYGDMYGTKGTTTREIPALKSKIEPLLKARKDYAYGTQRDYIDNPDVIGWTREGDSTKAKSGLATVITDGPGGSKRMYVGTSNAGEIWYDLTGNRTDKITIGSDGYATFPVNGGSVSVWVQQ

SEQ ID NO: 36923 - protein, 480 aa, Cytophaga sp.
NGTMMQYFEWYVPNDGQQWNRLRTDAPYLSSVGITAVWTPPAYKGTSQADVGYGPYDLYDLGEFNQKGTVRTKYGTKGELKSAVNTLHSNGIQVYGDVVMNHKAGADYTENVTAVEVNPSNRYQETSGEYNIQAWTGFNFPGRGTTYSNWKWQWFHFDGTDWDQSRSYSRIFKFDGKAWDWEVSSENGNYDYLMYADYDYDHPDVVNEMKKWGVWYANEVGLDGYRLDAVKHIKFQFLKDWVDNARAATGKEMFTVGEYWQNDLGALNNYLAKVNYNQSLFDAPLHYNFYAASTGGGYYDMRNILNNTLVASNPTKAVTLVENHDTQPGQSLESTVQPWFKPLAYAFILTRSGGYPSVFYGDMYGTKGTTTREIPALKSKIEPLLKARKDYAYGTQRDYIDNPDVIGWTREGDSTKAKSGLATVITDGPGGSKRMYVGTSNAGEIWYDLTGNRTDKITIGSDGYATFPVNGGSVSVWVQQ

SEQ ID NO: 36924 - protein, 480 aa, Cytophaga sp.
NGTMMQYFEWYVPNDGQQWNRLRTDAPYLSSVGITAVWTPPAYKGTSQADVGYGPYDLYDLGEFNQKGTVRTKYGTKGELKSAVQTLHSNGIQVYGDVVMNHKAGADYTENVTAVEVNPSNRYQETSGEYNIQAWTGFNFPGRGTTYSNWKWQWFHFDGTDWDQSRSLSRIFKFDGKAWDWEVSSENGNYDYLMYADYDYDHPDVVNEMKKWGVWYANEVGLDGYRLDAVKHIKFQFLKDWVDNARAATGKEMFTVGEYWQNDLGALNNYLAKVNYNQSLFDAPLHYNFYAASTGGGYYDMRNILNNTLVASNPTKAVTLVENHDTQPGQSLESTVQPWFKPLAYAFILTRSGGYPSVFYGDMYGTKGTTTREIPALKSKIEPLLKARKDYAYGTQRDYIDNPDVIGWTREGDSTKAKSGLATVITDGPGGSKRMYVGTSNAGEIWYDLTGNRTDKITIGSDGYATFPVNGGSVSVWVQQ

SEQ ID NO: 36925 - protein, 480 aa, Cytophaga sp.
NGTMMQYFEWYVPNDGQQWNRLRTDAPYLSSVGITAVWTPPAYKGTSQADVGYGPYDLYDLGEFNQKGTVRTKYGTKGELKSAVNTLHSNGIQVYGDVVMNHKAGADYTENVTAVEVNPSNRYQETSGEYNIQAWTGFNFPGRGTTYSNWKWQWFHFDGTDWDQSRSLSRIFKFDGKAWDWEVSSENGNYDYLMYADYDYDHPDVVNEMKKWGVWYANEVGLDGYRLDAVKHIKFQFLKDWVDNARAATGKEMFTVGEYWQNDLGALNNYLAKVNYNQSLFDAPLHYNFYAASFGGGYYDMRNILNNTLVASNPTKAVTLVENHDTQPGQSLESTVQPWFKPLAYAFILTRSGGYPSVFYGDMYGTKGTTTREIPALKSKIEPLLKARKDYAYGTQRDYIDNPDVIGWTREGDSTKAKSGLATVITDGPGGSKRMYVGTSNAGEIWYDLTGNRTDKITIGSDGYATFPVNGGSVSVWVQQ

SEQ ID NO: 36926 - protein, 480 aa, Cytophaga sp.
NGTMMQYFEWYVPNDGQQWNRLRTDAPYLSSVGITAVWTPPAYKGTSQADVGYGPYDLYDLGEFNQKGTVRTKYGTKGELKSAVKTLHSNGIQVYGDVVMNHKAGADYTENVTAVEVNPSNRYQETSGEYNIQAWTGFNFPGRGTTYSNWKWQWFHFDGTDWDQSRSLSRIFKFDGKAWDWEVSSENGNYDYLMYADYDYDHPDVVNEMKKWGVWYANEVGLDGYRLDAVKHIKFQFLKDWVDNARAATGKEMFTVGEYWQNDLGALNNYLAKVNYNQSLFDAPLHYNFYAASTGGGYYDMRNILNNTLVASNPTKAVTLVENHDTQPGQSLESTVQPWFKPLAYAFILTRSGGYPSVFYGDMYGTKGTTTREIPALKSKIEPLLKARKDYAYGTQRDYIDNPDVIGWTREGDSTKAKSGLATVITDGPGGSKRMYVGTSNAGEIWYDLTGNRTDKITIGSDGYATFPVNGGSVSVWVQQ

SEQ ID NO: 36927 - protein, 480 aa, Cytophaga sp.
NGTMMQYFEWYVPNDGQQWNRLRTDAPYLSSVGITAVWTPPAYKGTSQADVGYGPYDLYDLGEFNQKGTVRTKYGTKGELKSAVNTLHSNGIQVYGDVVMNHKAGADYTENVTAVEVNPSNRYQETSGEYNIQAWTGFNFPGRGTTYSNWKWQWFHFDGTDWDQSRSLSRIFKFDGKAWDWEVSSENGNYDYLMYADYDYDHPDVVNEMKKWGVWYANEVGLDGYRLDAVKHIKFQFLKDWVDNARAATGKEMFTVGEYWQNDLGALNNYLAKVNYNQSLFDAPLHYNFYAASTGGGYYDMRNILNNTLVASRPTKAVTLVENHDTQPGQSLESTVQPWFKPLAYAFILTRSGGYPSVFYGDMYGTKGTTTREIPALKSKIEPLLKARKDYAYGTQRDYIDNPDVIGWTREGDSTKAKSGLATVITDGPGGSKRMYVGTSNAGEIWYDLTGNRTDKITIGSDGYATFPVNGGSVSVWVQQ

SEQ ID NO: 36928 - protein, 480 aa, Cytophaga sp.
NGTMMQYFEWYVPNDGQQWTRLRTDAPYLSSVGITAVWTPPAYKGTSQADVGYGPYDLYDLGEFNQKGTVRTKYGTKGELKSAVNTLHSNGIQVYGDVVMNHKAGADYTENVTAVEVNPSNRYQETSGEYNIQAWTGFNFPGRGTTYSNWKWQWFHFDGTDWDQSRSLSRIFKFDGKAWDWEVSSENGNYDYLMYADYDYDHPDVVNEMKKWGVWYANEVGLDGYRLDAVKHIKFQFLKDWVDNARAATGKEMFTVGEYWQNDLGALNNYLAKVNYNQSLFDAPLHYNFYAASTGGGYYDMRNILNNTLVASNPTKAVTLVENHDTQPGQSLESTVQPWFKPLAYAFILTRSGGYPSVFYGDMYGTKGTTTREIPALKSKIEPLLKARKDYAYGTQRDYIDNPDVIGWTREGDSTKAKSGLATVITDGPGGSKRMYVGTSNAGEIWYDLTGNRTDKITIGSDGYATFPVNGGSVSVWVQQ

SEQ ID NO: 36929 - protein, 480 aa, Cytophaga sp.
NGTMMQYFEWYVPNDGQQWNRLRTDAPYLSSVGITAVWTPPAYKGTSQADVGYGPYDLYDLGEFNQKGTVRTKYGTKNELKSAVNTLHSNGIQVYGDVVMNHKAGADYTENVTAVEVNPSNRYQETSGEYNIQAWTGFNFPGRGTTYSNWKWQWFHFDGTDWDQSRSLSRIFKFDGKAWDWEVSSENGNYDYLMYADYDYDHPDVVNEMKKWGVWYANEVGLDGYRLDAVKHIKFQFLKDWVDNARAATGKEMFTVGEYWQNDLGALNNYLAKVNYNQSLFDAPLHYNFYAASTGGGYYDMRNILNNTLVASNPTKAVTLVENHDTQPGQSLESTVQPWFKPLAYAFILTRSGGYPSVFYGDMYGTKGTTTREIPALKSKIEPLLKARKDYAYGTQRDYIDNPDVIGWTREGDSTKAKSGLATVITDGPGGSKRMYVGTSNAGEIWYDLTGNRTDKITIGSDGYATFPVNGGSVSVWVQQ

SEQ ID NO: 36930 - protein, 480 aa, Cytophaga sp.
NGTMMQYFEWYVPNDGQQWNRLRTDAPYLSSVGITAVWTPPAYKGTSQADVGYGPYDLYDLGEFNQKGTVRTKYGTKGELKSAVNTLHSNGIQVYGDVVMNHKAGADYTENVTAVEVNPSNRYQETSGEYNIQAWTGFNFPGRGTTYSNWKWQWFHFDGTDWDQSRSLSRIFKFDGKAWDWEVSSENGNYDYLMYADYDYDHPDVVNEMKKWGVWYANEVGLDGYRLDAVKHIKFQFLKDWVDNARAATGKEMFTVGEYWQNDLGALNNYLAKVNYNQSLFDAPLHYNFYAASTGGGYYDMRNILNNTLVACNPTKAVTLVENHDTQPGQSLESTVQPWFKPLAYAFILTRSGGYPSVFYGDMYGTKGTTTREIPALKSKIEPLLKARKDYAYGTQRDYIDNPDVIGWTREGDSTKAKSGLATVITDGPGGSKRMYVGTSNAGEIWYDLTGNRTDKITIGSDGYATFPVNGGSVSVWVQQ

SEQ ID NO: 36931 - protein, 480 aa, Cytophaga sp.
NGTMMQYFEWYVPNDGQQWNRLRTDAPYLSSVGITAVWTPPAYKGTSQADVGYGPYDLYDLGEFNQKGTVRTKYGTKGELKSAVNTLHSNGIQVYGDVVMNHKAGADYTENVTAVEVNPSNRYQETSGEYNIQAWTGFNFPGRGTTYSNWKWQWFHFDGTDWDQSRSLSRIFKFDGKAWDWEVSSENGNYDYLMYADYDYDHPDVVNEMKKWGVWYANEVGLDGYRLDAVKHIKFQFLKDWVDNARAATGKEMFTVGEYWQNDLGALNNYLAKVNYNQSLFDAPLHYNFYAASTGGGYYDMRNILNNTLVASNPTKAVTLVENHDTQPGQSLESTVQPWFKPLAYAFILTRSGGYPSVFYGDMYGTKGTTTREIPALKSKIEPLLKARKDYAYGTQRDYIDNPDVIGWTREGDSMKAKSGLATVITDGPGGSKRMYVGTSNAGEIWYDLTGNRTDKITIGSDGYATFPVNGGSVSVWVQQ

SEQ ID NO: 36932 - protein, 480 aa, Cytophaga sp.
NGTMMQYFEWYVPNDGQQWNRLRTDAPYLSSVGITAVWTPPAYKGTSQADVGYGPYDLYDLGEFNQKGTVRTKYGTKGELKSAVNTLHSNGIQVYGDVVMNHKAGADYTENVTAVEVNPSNRYQETSGEYNIQAWTGFNFPGRGTTYSNWKWQWFHFDGTDWDQSRSLSRIFKFDGKAWDWEVSSENGNYDYLMYADYDYDHPDVVNEMKKWGVWYANEVGLDGYRLDAVKHIKFQFLKDWVDNARAATGKEMFTVGEYWQNDLGALNNYLAKVNYNQSLFDAPLHYNFYAASTGGGYYDMRNILNNTLVASNPTKAVTLVENHDTQPGQSLESTVQPWFKPLAYAFILTRSGGYPSVFYGDMYGTKGTTTREIPALKSKIEPLLKARKDYAYGTQRDYIDNPDVIGWTREGDSTKAKSGLATVITDGPGGSKRMYVGTANAGEIWYDLTGNRTDKITIGSDGYATFPVNGGSVSVWVQQ

SEQ ID NO: 36933 - protein, 480 aa, Cytophaga sp.
NGTMMQYFEWYVPNDGQQWNRLRTDAPYLSSVGITAVWTPPAYKGTSQADVGYGPYDLYDLGEFNQKGTVRTKYGTKGELKGAVNTLHSNGIQVYGDVVMNHKAGADYTENVTAVEVNPSNRYQETSGEYNIQAWTGFNFPGRGTTYSNWKWQWFHFDGTDWDQSRSLSRIFKFDGKAWDWEVSSENGNYDYLMYADYDYDHPDVVNEMKKWGVWYANEVGLDGYRLDAVKHIKFQFLKDWVDNARAATGKEMFTVGEYWQNDLGALNNYLAKVNYNQSLFDAPLHYNFYAASTGGGYYDMRNILNNTLVASNPTKAVTLVENHDTQPGQSLESTVQPWFKPLAYAFILTRSGGYPSVFYGDMYGTKGTTTREIPALKSKIEPLLKARKDYAYGTQRDYIDNPDVIGWTREGDSTKAKSGLATVITDGPGGSKRMYVGTSNAGEIWYDLTGNRTDKITIGSDGYATFPVNGGSVSVWVQQ

SEQ ID NO: 36934 - protein, 480 aa, Cytophaga sp.
NGTMMQYFEWYVPNDGQQWNRLRTDAPYLSSVGITAVWTPPAYKGTSQADVGYGPYDLYDLGEFNQKGTVRTKYGTKGELKSAVNTLHSNGIQVYGDVVMNHKAGADYTENVTAVEVNPSNRYQETSGEYNIQAWTGFNFPGRGTTYSNWKWQWFHFDGTDWDQSRALSRIFKFDGKAWDWEVSSENGNYDYLMYADYDYDHPDVVNEMKKWGVWYANEVGLDGYRLDAVKHIKFQFLKDWVDNARAATGKEMFTVGEYWQNDLGALNNYLAKVNYNQSLFDAPLHYNFYAASTGGGYYDMRNILNNTLVASNPTKAVTLVENHDTQPGQSLESTVQPWFKPLAYAFILTRSGGYPSVFYGDMYGTKGTTTREIPALKSKIEPLLKARKDYAYGTQRDYIDNPDVIGWTREGDSTKAKSGLATVITDGPGGSKRMYVGTSNAGEIWYDLTGNRTDKITIGSDGYATFPVNGGSVSVWVQQ

SEQ ID NO: 36935 - protein, 480 aa, Cytophaga sp.
NGTMMQYFEWYVPNDGQQWNRLRTDAPYLSSVGITAVWTPPAYKGTSQADVGYGPYDLYDLGEFNQKGTVRTKYGTKGELKSAVNTLHSNGIQVYGDVVMNHKAGADYTENVTAVEVNPSNRYQETSGEYNIQAWTGFNFPGRGTTYSNWKWQWFHFDGTDWDQSRSLSRIFKFDGKAWDWEVSSENGNYDYLMYADYDYDHPDVVNEMKKWGVWYANEVGLDGYRLDAVKHIKFQFLKDWVDNARAATGKEMFTVGEYWQNDLGALNNYLAKVNYNQSIFDAPLHYNFYAASTGGGYYDMRNILNNTLVASNPTKAVTLVENHDTQPGQSLESTVQPWFKPLAYAFILTRSGGYPSVFYGDMYGTKGTTTREIPALKSKIEPLLKARKDYAYGTQRDYIDNPDVIGWTREGDSTKAKSGLATVITDGPGGSKRMYVGTSNAGEIWYDLTGNRTDKITIGSDGYATFPVNGGSVSVWVQQ

SEQ ID NO: 36936 - protein, 480 aa, Cytophaga sp.
NGTMMQYFEWYVPNDGQQWNRLRTDAPYLSSVGITAVWTPPAYKGTSQADVGYGPYDLYDLGEFNQKGTVRTKYGTKGELKSAVNTLHSNGIQVYGDVVMNHKAGADYTENVTAVEVNPSNRYQETSGEYNIQAWTGFNFPGRGTTYSNWKWQWFHFDGTDWDQSRSLSRIFKFHGKAWDWPVSSENGNYDYLMYADYDYDHPDVVNEMKKWGVWYANEVGLDGYRLDAVKHIKFSFLKDWVDNARAATGKEMFTVGEYWQNDLGALNNYLDKVNYNQSLFDAPLHYNFYAASTGGGYYDMRNILNNTLVASNPTKAVTLVENHDTQPGQSLESTVQPWFKPLAYAFILTRSGGYPAVFYGDMYGTKGTTTYEIPALKSKIEPLLKARKDYAYGTQRDYIDNPDVIGWTREGDSTKAKSGLATVITDGPGGSKRMYVGTSNAGEIWYDLTGNRTDKITIGSDGYATFPVNGGSVSVWVQQ

SEQ ID NO: 36937 - protein, 480 aa, Cytophaga sp.
NGTMMQYFEWYVPNDGQQWNRLRTDAPYLSSVGITAVWTPPAYKGTSQADVGYGPYDLYDLGEFNQKGTVRTKYGTKGELKSAVNTLHSNGIQVYGDVVMNHKAGADYTENVTAVEVNPSNRYQETSGEYNIQAWTGFNFPGRGTTYSNWKWQWFHFDGTDWDQSRSLSRIFKFDGKAWDWEVSSENGNYDYLMYADYDYDHPDVVNEMKKWGVWYANEVGLDGYRLDAVKHIKFQFLKDWVDNARAATGKEMFTVGEYWQNDLGALNNYLAKVNYNQSLFDAPLHYNFYAASTGGGYYDMRNILNNTLVASNPTKAVTLVENHDTQPGQSLESTVQPWFKPLAYAFILTRSGGYPSVFYGDMYGTKGTTTREIPALKSKIEPLLKARKDYAYGTQKDYIDNPDVIGWTREGDSTKAKSGLATVITDGPGGSKRMYVGTSNAGEIWYDLTGNRTDKITIGSDGYATFPVNGGSVSVWVQQ

SEQ ID NO: 36938 - protein, 480 aa, Cytophaga sp.
NGTMMQYFEWYVPNDGQQWNRLRTDAPYLSSVGITAVWTPPAYKGTSQADVGYGPYDLYDLGEFNQKGTVRTKYGTKGELKSAVNTLHSNGIQVYGDVVMNHKAGADYTENVTAVEVNPSNRYQETSGEYNIQAWTGFNFPGRGTTYSNWKWQWFHFDGTDWDQSRSLSRIFKFDGKAWDWEVSSENGNYDYLMYADYDYDHPDVVNEMKKWGVWYANEVGLDGYRLDAVKHIKFQFLKDWVDNARAATGKEMFTVGEYWQNDLGALNNYLAKVNYNQSLFDAPLHYNFYAASTGGGYYDMRNILNNTLVASNPTKAVTLVENHDTQPGQSLESTVQPWFKPLAYAFILTRSGGYPSVFYGDMYGTKGTTTHEIPALKSKIEPLLKARKDYAYGTQRDYIDNPDVIGWTREGDSTKAKSGLATVITDGPGGSKRMYVGTSNAGEIWYDLTGNRTDKITIGSDGYATFPVNGGSVSVWVQQ

SEQ ID NO: 36939 - protein, 480 aa, Cytophaga sp.
NGTMMQYFEWYVPNDGQQWNRLRTDAPYLSSVGITAVWTPPAYKGTSQADVGYGPYDLYDLGEFNQKGTVRTKYGTKGELKSAVNTLHSNGIQVYGDVVMNHKAGADYTENVTAVEVNPSNRYQETSGEYNIQAWTGFNFPGRGTTYSNWKWQWFHFDGTDWDQSRSLSRIFKFDGKAWDWEVSSENGNYDYLMYADYDYDHPDVVNEMKKWGVWYANEVGLDGYRLDAVKHIKFQFLKDWVDNARAATGKEMFTVGEYWQNDLGALNNYLAKVNYNQSLFDAPLHYNFYAASTGGGYYDMRNILNNTLVASNPTKAVTLVENHDTQPGQSLESTVQPWFKPLAYAFILTRSGGYPSVFYGDMYGTKGTTTREIPLLKSKIEPLLKARKDYAYGTQRDYIDNPDVIGWTREGDSTKAKSGLATVITDGPGGSKRMYVGTSNAGEIWYDLTGNRTDKITIGSDGYATFPVNGGSVSVWVQQ

SEQ ID NO: 36940 - protein, 480 aa, Cytophaga sp.
NGTMMQYFEWYVPNDGQQWNRLRTDAPYLSSVGITAVWTPPAYKGTSQADVGYGPYDLYDLGEFNQKGTVRTKYGTKGELKSAVNTLHSNGIQVYGDVVMNHKAGADYTENVTAVEVNPSNRYQETSGEYNIQAWTGFNFPGRGTTYSNWKWQWFHFDGTDWDQSRSLSRIFKFDGKAWDWEVSSENGNYDYLMYADYDYDHPDVVNEMKKWGVWYANEVGLDGYRLDAVKHIKFQFLKDWVDNARAATGKEMFTVGEYWQNDLGALNNYLAKVNYNQSLFDAPLHYNFYAASTGGGYYDMRNILNNTLVASNPTKAVTLVENHDTQPGQSLESTVQPWFKPLAYAFILTRSGGYPSVFYGDMYGTKGTTTVEIPALKSKIEPLLKARKDYAYGTQRDYIDNPDVIGWTREGDSTKAKSGLATVITDGPGGSKRMYVGTSNAGEIWYDLTGNRTDKITIGSDGYATFPVNGGSVSVWVQQ

SEQ ID NO: 36941 - protein, 480 aa, Cytophaga sp.
NGTMMQYFEWYVPNDGQQWNRLRTDAPYLSSVGITAVWTPPAYKGTSQADVGYGPYDLYDLGEFNQKGTVRTKYGTKGELKSAVNTLHSNGIQVYGDVVMNHKAGADSTENVTAVEVNPSNRYQETSGEYNIQAWTGFNFPGRGTTYSNWKWQWFHFDGTDWDQSRSLSRIFKFDGKAWDWEVSSENGNYDYLMYADYDYDHPDVVNEMKKWGVWYANEVGLDGYRLDAVKHIKFQFLKDWVDNARAATGKEMFTVGEYWQNDLGALNNYLAKVNYNQSLFDAPLHYNFYAASTGGGYYDMRNILNNTLVASNPTKAVTLVENHDTQPGQSLESTVQPWFKPLAYAFILTRSGGYPSVFYGDMYGTKGTTTREIPALKSKIEPLLKARKDYAYGTQRDYIDNPDVIGWTREGDSTKAKSGLATVITDGPGGSKRMYVGTSNAGEIWYDLTGNRTDKITIGSDGYATFPVNGGSVSVWVQQ

SEQ ID NO: 36942 - protein, 480 aa, Cytophaga sp.
NGTMMQYFEWYVPNDGQQWNRLRTDAPYLSSVGITAVWTPPAYKGTSQADVGYGPYDLYDLGEFNQKGTVRTKYGTKGELKSAVNTLHSNGIQVYGDVVMNHKAGADYTENVTAVEVNPSNRYQETSGEYNIQAWTGFNFPGRGTTYSNWKWQWFHFDGTDWDQSRSLSRIFKFDGKAWDWEVSSENGNYDYLMYADYDYDHPDVVNEMKKWGVWYANEVGLDGYRLDAVKHIKFQFLKDWVDNARAATGKEMFTVGEYWQNDLGALNNYLAKVNYNQSLFDAPLHYNFYAASTGGGYYDMRNILNNTLVASNPTKAVTLVENHDTQPGQSLESTVQPWFKPLAYAFILTRSGGYPSVFYGDMYGTKGTTTREIPALKSKIEPLLKARKDYAYGTQRDYIDNPDVIGWTREGDSTKAKSGLATVITDGPGGSKRMYVGTSNAGEIWYDLTGNRTDKITIGSDGIATFPVNGGSVSVWVQQ

SEQ ID NO: 36943 - protein, 480 aa, Cytophaga sp.
NGTMMQYFEWYVPNDGQQWNRLRTDAPYLSSVGITAVWTPPAYKGTSQADVGYGPYDLYDLGEFNQKGTVRTKYGTKGELKSAVNTLHSNGIQVYGDVVMNHKAGADYTENVTAVEVNPSNRYQETSGEYNIQAWTGFNFPGRGTTYSNWKWQWFHFDGTDWDQSRSLSRIFKFDGKAWDWEVSSENGNYDYLMYADYDYDHPDVVNEMKKWGVWYANEVGLDGYRLDAVKHIKFQFLKDWVDNARAATGKEMFTVGEYWQNDLGALNNYLAKVNYNQSLFDAPLHYNFYAASTGGGYYDMRNILNNTLVASNPTKAVTLVENHDTQPGQSLESTVQPWFKPLAYAFILTRSGGYPSVFYGDMYGTKGTTTREIPALKSKIEPLLKARKDYAYGTQRDYIDNPDVIGWTREGDSTKAKSGLATVITDGPGGSKRMYIGTSNAGEIWYDLTGNRTDKITIGSDGYATFPVNGGSVSVWVQQ

SEQ ID NO: 36944 - protein, 480 aa, Cytophaga sp.
NGTMMQYFEWYVPNDGQQWNRLRTDAPYLSSVGITAVWTPPAYKGTSQADVGYGPYDLYDLGEFNQKGTVRTKYGTKDELKSAVNTLHSNGIQVYGDVVMNHKAGADYTENVTAVEVNPSNRYQETSGEYNIQAWTGFNFPGRGTTYSNWKWQWFHFDGTDWDQSRSLSRIFKFDGKAWDWEVSSENGNYDYLMYADYDYDHPDVVNEMKKWGVWYANEVGLDGYRLDAVKHIKFQFLKDWVDNARAATGKEMFTVGEYWQNDLGALNNYLAKVNYNQSLFDAPLHYNFYAASTGGGYYDMRNILNNTLVASNPTKAVTLVENHDTQPGQSLESTVQPWFKPLAYAFILTRSGGYPSVFYGDMYGTKGTTTREIPALKSKIEPLLKARKDYAYGTQRDYIDNPDVIGWTREGDSTKAKSGLATVITDGPGGSKRMYVGTSNAGEIWYDLTGNRTDKITIGSDGYATFPVNGGSVSVWVQQ

SEQ ID NO: 36945 - protein, 480 aa, Cytophaga sp.
NGTMMQYFEWYVPNDGQQWNRLRTDAPYLSSVGITAVWTPPAYKGTSQADVGYGPYDLYDLGEFNQKGTVRTKYGTKGELKSAVNTLHSNGIQVYGDVVMNHKAGADYTENVTAVEVNPSNRYQETSGEYNIQAWTGFNFPGRGTTYSNWKWQWFHFDGTDWDQSRSLSRIFKFDGKAWDWEVSSENGNYDYLMYADYDYDHPDVVNEMKKWGVWYANEVGLDGYRLDAVKHIKFQFLKDWVDNARAATGKEMFTVGEYWQNDLGALNNYLAKVNYNQSLFDAPLHYNFYAASTGGGYYDMRNILNNTLVASNPTKAVTLVENHDTQPGQSLESTVQPWFKPLAYAFILTRSGGYPSVFYGDMYGTKGTTTREIPALKSKIEPLLKARKDYAYGTQRDYIDNPDVIGWTREGDSTEAKSGLATVITDGPGGSKRMYVGTSNAGEIWYDLTGNRTDKITIGSDGYATFPVNGGSVSVWVQQ

SEQ ID NO: 36946 - protein, 480 aa, Cytophaga sp.
NGTMMQYFEWYVPNDGQQWNRLRTDAPYLSSVGITAVWTPPAYKGTSQADVGYGPYDLYDLGEFNQKGTVRTKYGTKGELKSAVNTLHSNGIQVYGDVVMNHKAGADYTENVTAVEVNPSNRYQETSGEYNIQAWTGFNFPGRGTTYSNWKWQWFHFDGTDWDQSRSLSRIFKFDGKAWDWEVSSENGNYDYLMYADYDYDHPDVVNEMKKWGVWYANEVGLDGYRLDAVKHIKFQFLKDWVDNARAATGKEMFTVGEYWQNDLGALNNYLAKVNYNQSLFDAPLHYNFYAASTGGGYYDMRNILNNTLVASNPKKAVTLVENHDTQPGQSLESTVQPWFKPLAYAFILTRSGGYPSVFYGDMYGTKGTTTREIPALKSKIEPLLKARKDYAYGTQRDYIDNPDVIGWTREGDSTKAKSGLATVITDGPGGSKRMYVGTSNAGEIWYDLTGNRTDKITIGSDGYATFPVNGGSVSVWVQQ

SEQ ID NO: 36947 - protein, 480 aa, Cytophaga sp.
NGTMMQYFEWYVPNDGQQWNRLRTDAPYLSSVGITAVWTPPAYKGTSQADVGYGPYDLYDLGEFNQKGTVRTKYGTKGELKSAVNTLHSNGIQVYGDVVMNHKAGADYTENVTAVEVNPSNRYQETSGEYNIQAWTGFNFPGRGTTYSNWKWQWFHFDGTDWDQSRSLSRIFKFDGKAWDWEVSSENGNYDYLMYADYDYDHPDVVNEMKKWGVWYANEVGLDGYRLDAVKHIKFQFLKDWVDNARAATGKEMFTVGEYWQNDLGALNNYLAKVNYNQSLFDAPLHYNFYAASTGGGYYDMRNILNNTLVASNPTKAVTLVENHDTQPGQSLESTVQPWFKPLAYAFILTRSGGYPSVFYGDMYGTKGTTTREIPALKSKIEPLLKARKDYAYGTQRDYIDNPDVIGWTREGDSTKAKSGLATVITDGPGGSKRMYVGTSNAGEIWYDLTGNRTDKITIGSDGYAVFPVNGGSVSVWVQQ

SEQ ID NO: 36948 - protein, 480 aa, Cytophaga sp.
NGTMMQYFEWYVPNDGQQWNRLRTDAPYLSSVGITAVWTPPAYKGTSQADVGYGPYDLYDLGEFNQKGTVRTKYGTKGELKSAVNTLHSNGIQVYGDVVMNHKAGADYTENVTAVEVNPSNRAQETSGEYNIQAWTGFNFPGRGTTYSNWKWQWFHFDGTDWDQSRSLSRIFKFDGKAWDWEVSSENGNYDYLMYADYDYDHPDVVNEMKKWGVWYANEVGLDGYRLDAVKHIKFQFLKDWVDNARAATGKEMFTVGEYWQNDLGALNNYLAKVNYNQSLFDAPLHYNFYAASTGGGYYDMRNILNNTLVASNPTKAVTLVENHDTQPGQSLESTVQPWFKPLAYAFILTRSGGYPSVFYGDMYGTKGTTTREIPALKSKIEPLLKARKDYAYGTQRDYIDNPDVIGWTREGDSTKAKSGLATVITDGPGGSKRMYVGTSNAGEIWYDLTGNRTDKITIGSDGYATFPVNGGSVSVWVQQ

SEQ ID NO: 36949 - protein, 480 aa, Cytophaga sp.
NGTMMQYFEWYVPNDGQQWNRLRTDAPYLSSVGITAVWTPPAYKGTSQADVGYGPYDLYDLGEFNQKGTVRTKYGTKGELKSAVNTLHSNGIQVYGDVVMNHKAGADYTENVTAVEVNPSNRYQETSGEYNIQAWTGFNFPGRGKTYSNWKWQWFHFDGTDWDQSRSLSRIFKFDGKAWDWEVSSENGNYDYLMYADYDYDHPDVVNEMKKWGVWYANEVGLDGYRLDAVKHIKFQFLKDWVDNARAATGKEMFTVGEYWQNDLGALNNYLAKVNYNQSLFDAPLHYNFYAASTGGGYYDMRNILNNTLVASNPTKAVTLVENHDTQPGQSLESTVQPWFKPLAYAFILTRSGGYPSVFYGDMYGTKGTTTREIPALKSKIEPLLKARKDYAYGTQRDYIDNPDVIGWTREGDSTKAKSGLATVITDGPGGSKRMYVGTSNAGEIWYDLTGNRTDKITIGSDGYATFPVNGGSVSVWVQQ

SEQ ID NO: 36950 - protein, 480 aa, Cytophaga sp.
NGTMMQYFEWYVPNDGQQWNRLRTDAPYLSSVGITAVWTPPAYKGTSQADVGYGPYDLYDLGEFNQKGTVRTKYGTKGELKSAVNTLHSNGIQVYGDVVMNHKAGADYTENVTAVEVNPSNRYQETSGEYNIQAWTGFNFPGRGTTYSNWKWQWFHFDGTDWDQSRSQSRIFKFDGKAWDWEVSSENGNYDYLMYADYDYDHPDVVNEMKKWGVWYANEVGLDGYRLDAVKHIKFQFLKDWVDNARAATGKEMFTVGEYWQNDLGALNNYLAKVNYNQSLFDAPLHYNFYAASTGGGYYDMRNILNNTLVASNPTKAVTLVENHDTQPGQSLESTVQPWFKPLAYAFILTRSGGYPSVFYGDMYGTKGTTTREIPALKSKIEPLLKARKDYAYGTQRDYIDNPDVIGWTREGDSTKAKSGLATVITDGPGGSKRMYVGTSNAGEIWYDLTGNRTDKITIGSDGYATFPVNGGSVSVWVQQ

SEQ ID NO: 36951 - protein, 480 aa, Cytophaga sp.
NGTMMQYFEWYVPNDGQQWNRLRTDAPYLSSVGITAVWTPPAYKGTSQADVGYGPYDLYDLGEFNQKGTVRTKYGTKGELKSAVNTLHSNGIQVYGDVVMNHKAGADYTENVTAVEVNPSNRYQETSGEYNIQAWTGFNFPGRGTTYSNWKWQWFHFDGTDWDQSRTLSRIFKFDGKAWDWEVSSENGNYDYLMYADYDYDHPDVVNEMKKWGVWYANEVGLDGYRLDAVKHIKFQFLKDWVDNARAATGKEMFTVGEYWQNDLGALNNYLAKVNYNQSLFDAPLHYNFYAASTGGGYYDMRNILNNTLVASNPTKAVTLVENHDTQPGQSLESTVQPWFKPLAYAFILTRSGGYPSVFYGDMYGTKGTTTREIPALKSKIEPLLKARKDYAYGTQRDYIDNPDVIGWTREGDSTKAKSGLATVITDGPGGSKRMYVGTSNAGEIWYDLTGNRTDKITIGSDGYATFPVNGGSVSVWVQQ

SEQ ID NO: 36952 - protein, 480 aa, Cytophaga sp.
NGTMMQYFEWYVPNDGQQWNRLRTDAPYLSSVGITAVWTPPAYKGTSQADVGYGPYDLYDLGEFNQKGTVRTKYGTKGELKVAVNTLHSNGIQVYGDVVMNHKAGADYTENVTAVEVNPSNRYQETSGEYNIQAWTGFNFPGRGTTYSNWKWQWFHFDGTDWDQSRSLSRIFKFDGKAWDWEVSSENGNYDYLMYADYDYDHPDVVNEMKKWGVWYANEVGLDGYRLDAVKHIKFQFLKDWVDNARAATGKEMFTVGEYWQNDLGALNNYLAKVNYNQSLFDAPLHYNFYAASTGGGYYDMRNILNNTLVASNPTKAVTLVENHDTQPGQSLESTVQPWFKPLAYAFILTRSGGYPSVFYGDMYGTKGTTTREIPALKSKIEPLLKARKDYAYGTQRDYIDNPDVIGWTREGDSTKAKSGLATVITDGPGGSKRMYVGTSNAGEIWYDLTGNRTDKITIGSDGYATFPVNGGSVSVWVQQ

SEQ ID NO: 36953 - protein, 480 aa, Cytophaga sp.
NGTMMQYFEWYVPNDGQQWNRLRTDAPYLSSVGITAVWTPPAYKGTSQADVGYGPYDLYDLGEFNQKGTVRTKYGTKGELKSAVNTLHSNGIQVYGDVVMNHKAGADYTENVTAVEVNPSNRYQETSGEYNIQAWTGFNFPGRGTTYSNWKWQWFHFDGTDWDQSRSLSRIFKFDGKAWDWEVSSENGNYDYLMYADYDYDHPDVVNEMKKWGVWYANEVGLDGYRLDAVKHIKFQFLKDWVDNARAATGKEMFTVGEYWQNDLGALNNYLAKVNYNQSLFDAPLHYNFYAASTGGGYYDMRNILNNTLVASNPTKAVTAVENHDTQPGQSLESTVQPWFKPLAYAFILTRSGGYPSVFYGDMYGTKGTTTREIPALKSKIEPLLKARKDYAYGTQRDYIDNPDVIGWTREGDSTKAKSGLATVITDGPGGSKRMYVGTSNAGEIWYDLTGNRTDKITIGSDGYATFPVNGGSVSVWVQQ

SEQ ID NO: 36954 - protein, 480 aa, Cytophaga sp.
NGTMMQYFEWYVPNDGQQWNRLRTDAPYLSSVGITAVWTPPAYKGTSQADVGYGPYDLYDLGEFNQKGTVRTKYGTKGELKSAVNTLHSNGIQVYGDVVMNHKAGADYTENVTAVEVNPSNRYQETSGEYNIQAWTGFNFPGRGTTYSNWKWQWFHFDGTDWDQSRSLSRIFKFDGKAWDWEVSSENGNYDYLMYADYDYDHPDVVNEMKKWGVWYANEVGLDGYRLDAVKHIKFQFLKDWVDNARAATGKEMFTVGEYWQNDLGALNNYLAKVNYNQSLFDAPLHYNFYAASTGGGYYDMRNILNNTLVASNPTKAVTLVENHDTQPGQSLESTVQPWFKPLAYAFILTRSGGYPSVFYGDMYGTKGTTTTEIPALKSKIEPLLKARKDYAYGTQRDYIDNPDVIGWTREGDSTKAKSGLATVITDGPGGSKRMYVGTSNAGEIWYDLTGNRTDKITIGSDGYATFPVNGGSVSVWVQQ

SEQ ID NO: 36955 - protein, 480 aa, Cytophaga sp.
NGTMMQYFEWYVPNDGQQWNRLRTDAPYLSSVGITAVWTPPAYKGTSQADVGYGPYDLYDLGEFNQKGTVRTKYGTKGELKSAVNTLHSNGIQVYGDVVMNHKAGADYTENVTAVEVNPSNRYQETSGEYNIQAWTGFNFPGRGTTYSNWKWQWFHFDGTDWDQSRSLSRIFKFDGKAWDWEVSSENGNYDYLMYADYDYDHPDVVNEMKKWGVWYANEVGLDGYRLDAVKHIKFQFLKDWVDNARAATGKEMFTVGEYWQNDLGALNNYLAKVNYNQSLFDAPLHYNFYAASTGGGYYDMRNILNNTLVASNPTKAVTLVENHDTQPGQSLESTVQPWFKPLAYAFILTRSGGYPSVFYGDMYGTKGTTTSEIPALKSKIEPLLKARKDYAYGTQRDYIDNPDVIGWTREGDSTKAKSGLATVITDGPGGSKRMYVGTSNAGEIWYDLTGNRTDKITIGSDGYATFPVNGGSVSVWVQQ

SEQ ID NO: 36956 - protein, 480 aa, Cytophaga sp.
NGTMMQYFEWYVPNDGQQWNRLRTDAPYLSSVGITAVWTPPAYKGTSQADVGYGPYDLYDLGEFNQKGTVRTKYGTKGELKSAVNTLHSNGIQVYGDVVMNHKAGADYTENVTAVEVNPSNRYQETSGEYNIQAWTGFNFPGRGTTYSNWKWQWFHFDGTDWDQSRSLSRIFKFDGKAWDWEVSSENGNYDYLMYADYDYDHPDVVNEMKKWGVWYANEVGLDGYRLDAVKHIKFQFLKDWVDNARAATGKEMFTVGEYWQNDLGALNNYLAKVNYNQSLFDAPLHYNFYAASTGGGYYDMRNILNNTLVASNPTKAVTLVENHDTQPGQSLESTVQPWFKPLAYAFILTRSGGYPSVFYGDMYGTKGTTTREIPALKSKIEPLLKARKDYAYGTQRDYIDNPDVIGWTREGDSTKAKSGLATVITDGPGGSKRMYVGTSNAGEIWYDLTGNRTDKTTIGSDGYATFPVNGGSVSVWVQQ

SEQ ID NO: 36957 - protein, 480 aa, Cytophaga sp.
NGTMMQYFEWYVPNDGQQWNRLRTDAPYLSSVGITAVWTPPAYKGTSQADVGYGPYDLYDLGEFNQKGTVRTKYGTKGELKSAVNTLHSNGIQVYGDVVMNHKAGADYTENVTAVEVNPSNRYQETSGEYNIQAWTGFNFPGRGTTYSNWKWQWFHFDGTDWDQSRSLSRIFKFDGKAWDWEVSSENGNYDYLMYADYDYDHPDVVNEMKKWGVWYANEVGLDGYRLDAVKHIKFQFLKDWVDNARAATGKEMFTVGEYWQNDLGALNNYLAKVNYNQSLFDAPLHYNFYAASTGGGYYDMRNILNNTLVASNPTKAVTLVENHDTQPGQSLESTVQPWFKPLAYAFILTRSGGYPSVFYGDMYGTKGTTTREIPALKSKIEPLLKARKNYAYGTQRDYIDNPDVIGWTREGDSTKAKSGLATVITDGPGGSKRMYVGTSNAGEIWYDLTGNRTDKITIGSDGYATFPVNGGSVSVWVQQ

SEQ ID NO: 36958 - protein, 480 aa, Cytophaga sp.
NGTMMQYFEWYVPNDGQQWNRLRTDAPYLSSVGITAVWTPPAYKGTSQADVGYGPYDLYDLGEFNQKGTVRTKYGTKGELKSAVNTLHSNGIQVYGDVVMNHKAGADYTENVTAVEVNPSNRYQETSGEYNIQAWTGFNFPGRGTTYSNWKWQWFHFDGTDWDQSRSLSRIFKFDGKAWDWEVSSENGNYDYLMYADYDYDHPDVVNEMKKWGVWYANEVGLDGYRLDAVKHIKFQFLKDWVDNARAATGKEMFTVGEYWQNDLGALNNYLAKVNYNQSLFDAPLHYNFYAASTGGGYYDMRNILNNTLVASNPTKAVTLVENHDTQPGQSLESTVQPWFKPLAYAFILTRSGGYPSVFYGDMYGTKGTTTREIPALKSKIEPLLKARKDYAYGTQRDYIDNPDVIGWTREGDSTNAKSGLATVITDGPGGSKRMYVGTSNAGEIWYDLTGNRTDKITIGSDGYATFPVNGGSVSVWVQQ

SEQ ID NO: 36959 - protein, 480 aa, Cytophaga sp.
NGTMMQYFEWYVPNDGQQWNRLRTDAPYLSSVGITAVWTPPAYKGTSQADVGYGPYDLYDLGEFNQKGTVRTKYGTKGELKSAVNTLHSNGIQVYGDVVMNHKAGADYTENVTAVEVNPSNRYQETSGEYNIQAWTGFNFPGRGTTYSNWKWQWFHFDGTDWDQSRSGSRIFKFDGKAWDWEVSSENGNYDYLMYADYDYDHPDVVNEMKKWGVWYANEVGLDGYRLDAVKHIKFQFLKDWVDNARAATGKEMFTVGEYWQNDLGALNNYLAKVNYNQSLFDAPLHYNFYAASTGGGYYDMRNILNNTLVASNPTKAVTLVENHDTQPGQSLESTVQPWFKPLAYAFILTRSGGYPSVFYGDMYGTKGTTTREIPALKSKIEPLLKARKDYAYGTQRDYIDNPDVIGWTREGDSTKAKSGLATVITDGPGGSKRMYVGTSNAGEIWYDLTGNRTDKITIGSDGYATFPVNGGSVSVWVQQ

SEQ ID NO: 36960 - protein, 480 aa, Cytophaga sp.
NGTMMQYFEWYVPNDGQQWNRLRTDAPYLSSVGITAVWTPPAYKGTSQADVGYGPYDLYDLGEFNQKGTVRTKYGTKGELKSAVNTLHSNGIQVYGDVVMNHKAGADYTENVTAVEVNPSNRYQETSGEYNIQAWTGFNFPGRGTTYSNYKWQWFHFDGTDWDQSRSLSRIFKFDGKAWDWEVSSENGNYDYLMYADYDYDHPDVVNEMKKWGVWYANEVGLDGYRLDAVKHIKFQFLKDWVDNARAATGKEMFTVGEYWQNDLGALNNYLAKVNYNQSLFDAPLHYNFYAASTGGGYYDMRNILNNTLVASNPTKAVTLVENHDTQPGQSLESTVQPWFKPLAYAFILTRSGGYPSVFYGDMYGTKGTTTREIPALKSKIEPLLKARKDYAYGTQRDYIDNPDVIGWTREGDSTKAKSGLATVITDGPGGSKRMYVGTSNAGEIWYDLTGNRTDKITIGSDGYATFPVNGGSVSVWVQQ

SEQ ID NO: 36961 - protein, 480 aa, Cytophaga sp.
NGTMMQYFEWYVPNDGQQWNRLRTDAPYLSSVGITAVWTPPAYKGTSQADVGYGPYDLYDLGEFRQKGTVRTKYGTKGELKSAVNTLHSNGIQVYGDVVMNHKAGADYTENVTAVEVNPSNRYQETSGEYNIQAWTGFNFPGRGTTYSNWKWQWFHFDGTDWDQSRSLSRIFKFDGKAWDWEVSSENGNYDYLMYADYDYDHPDVVNEMKKWGVWYANEVGLDGYRLDAVKHIKFQFLKDWVDNARAATGKEMFTVGEYWQNDLGALNNYLAKVNYNQSLFDAPLHYNFYAASTGGGYYDMRNILNNTLVASNPTKAVTLVENHDTQPGQSLESTVQPWFKPLAYAFILTRSGGYPSVFYGDMYGTKGTTTREIPALKSKIEPLLKARKDYAYGTQRDYIDNPDVIGWTREGDSTKAKSGLATVITDGPGGSKRMYVGTSNAGEIWYDLTGNRTDKITIGSDGYATFPVNGGSVSVWVQQ

SEQ ID NO: 36962 - protein, 480 aa, Cytophaga sp.
NGTMMQYFEWYVPNDGQQWNRLRTDAPYLSSVGITAVWTPPAYKGTSQADVGYGPYDLYDLGEFNQKGTVRTKYGTKGELKSAVNTLHSNGIQVYGDVVMNHKAGADYTENVTAVEVNPSNRYQETSGEYNIQAWTGFNFPGRGTTYSNWKWQWFHFDGTDWDQSRSLSRIFKFDGKAWDWEVSSENGNYDYLMYADYDYDHPDVVNEMKKWGVWYANEVGLDGYRLDAVKHIKFQFLKDWVDNARAATGKEMFTVGEYWQNDLGALNNYLAKVNYNQSLFDAPLHYNFYAASTGGGYYDMRNILNNTLVASNPTKAVTLVENHDTQPGQSLESTVQPWFKPLAYAFILTRSGGYPSVFYGDMYGTKGTTTREIPALKSKIEPLLKARKDYAYGTQRDYIDNPDVIGWTREGDSTYAKSGLATVITDGPGGSKRMYVGTSNAGEIWYDLTGNRTDKITIGSDGYATFPVNGGSVSVWVQQ

SEQ ID NO: 36963 - protein, 480 aa, Cytophaga sp.
NGTMMQYFEWYVPNDGQQWNRLRTDAPYLSSVGITAVWTPPAYKGTSQADVGYGPYDLYDLGEFNQKGTVRTKYGTKGELKSAVNTLHSNGIQVYGDVVMNHKAGADYTENVTAVEVNPSNRYQETSGEYNIQAWTGFNFPGRGTTYSNWKWQWFHFDGTDWDQSRSLSRIFKFDGKAWDWEVSSENGNYDYLMYADYDYDHPDVVNEMKKWGVWYANEVGLDGYRLDAVKHIKFQFLKDWVDNARAATGKEMFTVGEYWQNDLGALNNYLAKVNYNQSLFDAPLHYNFYAASTGGGYYDMRNILNNTLVADNPTKAVTLVENHDTQPGQSLESTVQPWFKPLAYAFILTRSGGYPSVFYGDMYGTKGTTTREIPALKSKIEPLLKARKDYAYGTQRDYIDNPDVIGWTREGDSTKAKSGLATVITDGPGGSKRMYVGTSNAGEIWYDLTGNRTDKITIGSDGYATFPVNGGSVSVWVQQ

SEQ ID NO: 36964 - protein, 480 aa, Cytophaga sp.
NGTMMQYFEWYVPNDGQQWNRLRTDAPYLSSVGITAVWTPPAYKGTSQADVGYGPYDLYDLGEFNQKGTVRTKYGTKGELKSAVNTLHSNGIQVYGDVVMNHKAGADYTENVTAVEVNPSNRYQETSGEYNIQAWTGFNFPGRGTTYSNWKWQWFHFDGTDWDQSRSLSRIFKFDGKAWDWEVSSENGNYDYLMYADYDYDHPDVVNEMKKWGVWYANEVGLDGYRLDAVKHIKFQFLKDWVDNARAATGKEMFTVGEYWQNDLGALNNYLAKVNYNQSLFDAPLHYNFYAASTGGGYYDMRNILNNTLVGSNPTKAVTLVENHDTQPGQSLESTVQPWFKPLAYAFILTRSGGYPSVFYGDMYGTKGTTTREIPALKSKIEPLLKARKDYAYGTQRDYIDNPDVIGWTREGDSTKAKSGLATVITDGPGGSKRMYVGTSNAGEIWYDLTGNRTDKITIGSDGYATFPVNGGSVSVWVQQ

SEQ ID NO: 36965 - protein, 480 aa, Cytophaga sp.
NGTMMQYFEWYVPNDGQQWNRLRTDAPYLSSVGITAVWTPPAYKGTSQADVGYGPYDLYDLGEFNQKGTVRTKYGTKGELKSAVNTLHSNGIQVYGDVVMNHKAGADYTENVTAVEVNPSNRYQETSGEYNIQAWTGFNFPGRGTTYSNWKWQWFHFDGTDWDQSRSLSRIFKFDGKAWDWEVSSENGNYDYLMYADYDYDHPDVVNEMKKWGVWYANEVGLDGYRLDAVKHIKFQFLKDWVDNARAATGKEMFTVGEYWQNDTGALNNYLAKVNYNQSLFDAPLHYNFYAASTGGGYYDMRNILNNTLVASNPTKAVTLVENHDTQPGQSLESTVQPWFKPLAYAFILTRSGGYPSVFYGDMYGTKGTTTREIPALKSKIEPLLKARKDYAYGTQRDYIDNPDVIGWTREGDSTKAKSGLATVITDGPGGSKRMYVGTSNAGEIWYDLTGNRTDKITIGSDGYATFPVNGGSVSVWVQQ

SEQ ID NO: 36966 - protein, 480 aa, Cytophaga sp.
NGTMMQYFEWYVPNDGQQWNRLRTDAPYLSSVGITAVWTPPAYKGTSQADVGYGPYDLYDLGEFNQKGTVRTKYGTKGELKSAVNTLHSNGIQVYGDVVMNHKAGADYTENVTAVEVNPSNRYQETSGEYNIQAWTGFNFPGRGTTYSNWKWQWFHFDGTDWDQSRSLSRIFKFDGKAWDWEVSSENGNYDYLMYADYDYDHPDVVNEMKKWGVWYANEVGLDGYRLDAVKHIKFQFLKDWVDNARAATGKEMFTVGEYWQNDLGALNNYLAKVNYNQSLFDAPLHYNFYAASTGGGYYDMRNILNNTLVASAPTKAVTLVENHDTQPGQSLESTVQPWFKPLAYAFILTRSGGYPSVFYGDMYGTKGTTTREIPALKSKIEPLLKARKDYAYGTQRDYIDNPDVIGWTREGDSTKAKSGLATVITDGPGGSKRMYVGTSNAGEIWYDLTGNRTDKITIGSDGYATFPVNGGSVSVWVQQ

SEQ ID NO: 36967 - protein, 480 aa, Cytophaga sp.
NGTMMQYFEWYVPNDGQQWNRLRTDAPYLSSVGITAVWTPPAYKGTSQADVGYGPYDLYDLGEFNQKGTVRTKYGTKGELKSAVNYLHSNGIQVYGDVVMNHKAGADYTENVTAVEVNPSNRYQETSGEYNIQAWTGFNFPGRGTTYSNWKWQWFHFDGTDWDQSRSLSRIFKFDGKAWDWEVSSENGNYDYLMYADYDYDHPDVVNEMKKWGVWYANEVGLDGYRLDAVKHIKFQFLKDWVDNARAATGKEMFTVGEYWQNDLGALNNYLAKVNYNQSLFDAPLHYNFYAASTGGGYYDMRNILNNTLVASNPTKAVTLVENHDTQPGQSLESTVQPWFKPLAYAFILTRSGGYPSVFYGDMYGTKGTTTREIPALKSKIEPLLKARKDYAYGTQRDYIDNPDVIGWTREGDSTKAKSGLATVITDGPGGSKRMYVGTSNAGEIWYDLTGNRTDKITIGSDGYATFPVNGGSVSVWVQQ

SEQ ID NO: 36968 - protein, 480 aa, Cytophaga sp.
NGTMMQYFEWYVPNDGQQWNRLRTDAPYLSSVGITAVWTPPAYKGTSQADVGYGPYDLYDLGEFNQKGTVRTKYGTKGELKSAVNTLHSNGIQVYGDVVMNHKAGADYTENVTAVEVNPSNRYQETSGEYNIQAWTGFNFPGRGTTYSNWKWQWFHFDGTDWDQSRSLSRIFKFDGKAWDWEVSSENGNYDYLMYADYDYDHPDVVNEMKKWGVWYANEVGLDGYRLDAVKHIKFQFLKDWVDNARAATGKEMFTVGEYWQNDLGALNNYLAKVNYNQSLFDAPLHYNFYAASTGGGYYDMRMILNNTLVASNPTKAVTLVENHDTQPGQSLESTVQPWFKPLAYAFILTRSGGYPSVFYGDMYGTKGTTTREIPALKSKIEPLLKARKDYAYGTQRDYIDNPDVIGWTREGDSTKAKSGLATVITDGPGGSKRMYVGTSNAGEIWYDLTGNRTDKITIGSDGYATFPVNGGSVSVWVQQ

SEQ ID NO: 36969 - protein, 480 aa, Cytophaga sp.
NGTMMQYFEWYVPNDGQQWNRLRTDAPYLSSVGITAVWTPPAYKGTSQADVGYGPYDLYDLGEFNQKGTVRTKYGTKGELKSAVNTLHSNGIQVYGDVVMNHKAGADYTENVTAVEVNPSNRYQETSGEYNIQAWTGFNFPGRGTTYSNWKWQWFHFDGTDWDQSRSLSRIFKFDGKAWDWEVSSENGNYDYLMYADYDYDHPDVVNEMKKWGVWYANEVGLDGYRLDAVKHIKFPFLKDWVDNARAATGKEMFTVGEYWQNDLGALNNYLAKVNYNQSLFDAPLHYNFYAASTGGGYYDMRNILNNTLVASNPTKAVTLVENHDTQPGQSLESTVQPWFKPLAYAFILTRSGGYPSVFYGDMYGTKGTTTREIPALKSKIEPLLKARKDYAYGTQRDYIDNPDVIGWTREGDSTKAKSGLATVITDGPGGSKRMYVGTSNAGEIWYDLTGNRTDKITIGSDGYATFPVNGGSVSVWVQQ

SEQ ID NO: 36970 - protein, 480 aa, Cytophaga sp.
NGTMMQYFEWYVPNDGQQWNRLRTDAPYLSSVGITAVWTPPAYKGTSQADVGYGPYDLYDLGEFNQKGTVRTKYGTKGELKSAVNTLHSNGIQVYGDVVMNHKAGADYTENVTAVEVNPSNRYQETSGEYNIQAWTGFNFPGRGTTYSNWKWQWFHFDGTDWDQSRSLSRIFKFDGKAWDWEVSSENGNYDYLMYADYDYDHPDVVNEMKKWGVWYANEVGLDGYRLDAVKHIKFQFLKDWVDNARAATGKEMFTVGEYWQNDLGALNNYLAKVNYNQSLFDAPLHYNFYAASTGGGYYDMRNILNNTLVASNPTKAVTLVENHDTQPGQSLESTVQPWFKPLAYAFILTRSGGYPSVFYGDMYGTKGTTTREIPALKSKIEPLLKARKDYAYGLQRDYIDNPDVIGWTREGDSTKAKSGLATVITDGPGGSKRMYVGTSNAGEIWYDLTGNRTDKITIGSDGYATFPVNGGSVSVWVQQ

SEQ ID NO: 36971 - protein, 480 aa, Cytophaga sp.
NGTMMQYFEWYVPNDGQQWNRLRTDAPYLSSVGITAVWTPPAYKGTSQADVGYGPYDLYDLGEFNQKGTVRTKYGTKGELKSAVNTLHSNGIQVYGDVVMNHKAGADYTENVTAVEVNPSNRYQETSGEYNIQAWTGFNFPGRGTTYSNWKWQWFHFDGTDWDQSRSLSRIFKFDGKAWDWEVSSENGNYDYLMYADYDYDHPDVVNEMKKWGVWYANEVGLDGYRLDAVKHIKFQFLKDWVDNARAATGKEMFTVGEYWQNDLGALNNYLAKVNYNQSLFDAPLHYNFYAASTGGGYYDMRNILNNTLVASNPTKAVTLVENHDTQPGQSLESTVQPWFKPLAYAFILTRSGGYPSVFYGDMYGTKGTTTREIPALKSKIEPLLKARKDYAYGNQRDYIDNPDVIGWTREGDSTKAKSGLATVITDGPGGSKRMYVGTSNAGEIWYDLTGNRTDKITIGSDGYATFPVNGGSVSVWVQQ

SEQ ID NO: 36972 - protein, 480 aa, Cytophaga sp.
NGTMMQYFEWYVPNDGQQWNRLRTDAPYLSSVGITAVWTPPAYKGTSQADVGYGPYDLYDLGEFNQKGTVRTKYGTKGELKSAVNTLHSNGIQVYGDVVMNHKAGADYTENVTAVEVNPSNRYQETSGEYNIQAWTGFNFPGRGTTYSNWKWQWFHFDGTDWDQSRSLSRIFKFDGKAWDWEVSSENGNYDYLMYADYDYDHPDVVNEMKKWGVWYANEVGLDGYRLDAVKHIKFQFLKDWVDNARAATGKEMFTVGEYWQNDLGALNNYLAKVNYNQSLFDAPLHYNFYAASTGGGYYDMRNILNNTLVASNPTKAVTLVENHDTQPGQSLESTVQPWFKPLAYAFILTRSGGYPSVFYGDMYGTKGTTTREIPALKSKIEPLLKARKDYAYGTQRDYIDNPDVIGWTREGDSTKAKSGLATVITDGPGGSKRMYVGTSNAGEEWYDLTGNRTDKITIGSDGYATFPVNGGSVSVWVQQ

SEQ ID NO: 36973 - protein, 480 aa, Cytophaga sp.
NGTMMQYFEWYVPNDGQQWNRLRTDAPYLSSVGITAVWTPPAYKGTSQADVGYGPYDLYDLGEFNQKGTVRTKYGTKGELKSAVNTLHSNGIQVYGDVVMNHKAGADYTENVTAVEVNPSNRYQETSGEYNIQAWTGFNFPGRGTTYSNWKWQWFHFDGTDWDQSRSLSRIFKFDGKAWDWEVSSENGNYDYLMYADYDYDHPDVVNEMKKWGVWYANEVGLDGYRLDAVKHIKFQFLKDWVDNARAATGKEMFTVGEYWQNDDGALNNYLAKVNYNQSLFDAPLHYNFYAASTGGGYYDMRNILNNTLVASNPTKAVTLVENHDTQPGQSLESTVQPWFKPLAYAFILTRSGGYPSVFYGDMYGTKGTTTREIPALKSKIEPLLKARKDYAYGTQRDYIDNPDVIGWTREGDSTKAKSGLATVITDGPGGSKRMYVGTSNAGEIWYDLTGNRTDKITIGSDGYATFPVNGGSVSVWVQQ

SEQ ID NO: 36974 - protein, 480 aa, Cytophaga sp.
NGTMMQYFEWYVPNDGQQWNRLRTDAPYLSSVGITAVWTPPAYKGTSQADVGYGPYDLYDLGEFNQKGTVRTKYGTKGELKSAVNTLHSNGIQVYGDVVMNHKAGADYTENVTAVEVNPSNRYQETSGEYNIQAWTGFNFPGRGTTYSNWKWQWFHFDGTDWDMSRSLSRIFKFDGKAWDWEVSSENGNYDYLMYADYDYDHPDVVNEMKKWGVWYANEVGLDGYRLDAVKHIKFQFLKDWVDNARAATGKEMFTVGEYWQNDLGALNNYLAKVNYNQSLFDAPLHYNFYAASTGGGYYDMRNILNNTLVASNPTKAVTLVENHDTQPGQSLESTVQPWFKPLAYAFILTRSGGYPSVFYGDMYGTKGTTTREIPALKSKIEPLLKARKDYAYGTQRDYIDNPDVIGWTREGDSTKAKSGLATVITDGPGGSKRMYVGTSNAGEIWYDLTGNRTDKITIGSDGYATFPVNGGSVSVWVQQ

SEQ ID NO: 36975 - protein, 480 aa, Cytophaga sp.
NGTMMQYFEWYVPNDGQQWNRLRTDAPYLSSVGITAVWTPPAYKGTSQADVGYGPYDLYDLGEFNQKGTVRTKYGTKGELKSAVNTLHSNGIQVYGDVVMNHKAGADYTENVTAVEVNPSNRYQETSGEYNIQAWTGFNFPGRGTTYSNWKWQWFHFDGTDWDQSRSLSRIFKFDGKAWDWEVSSENGNYDYLMYADYDYDHPDVVNEMKKWGVWYANEVGLDGYRLDAVKHIKFQFLKDWVDNARAATGKEMFTVGEYWQNDLGALNNYLAKVNYNQSLFDAPLHYNFYAASTGGGYYDMRNILNNTLVASNPTKAVTLVENHDTQPGQSLESTVQPWFKPLAYAFILTRSGGYPSVFYGDMYGTKGTTTREIPALKYKIEPLLKARKDYAYGTQRDYIDNPDVIGWTREGDSTKAKSGLATVITDGPGGSKRMYVGTSNAGEIWYDLTGNRTDKITIGSDGYATFPVNGGSVSVWVQQ

SEQ ID NO: 36976 - protein, 480 aa, Cytophaga sp.
NGTMMQYFEWYVPNDGQQWNRLRTDAPYLSSVGITAVWTPPAYKGTSQADVGYGPYDLYDLGEFNQKGTVRTKYGTKGELKSAVNTLHSNGIQVYGDVVMNHKAGADYTENVTAVEVNPSNRYQETSGEYNIQAWTGFNFPGRGTTYSNWKWQWFHFDGTDWDQSRSLSRIFKFDGKAWDWEVSSENGNYDYLMYADYDYDHPDVVNEMKKWGVWYANEVGLDGYRLDAVKHIKFQFLKDWVDNARAATGKEMFTVGEYWQNDLGALNNYLAKVNYNQSLFDAPLHYNFYAASTGGGYYDMRNILNNTLVDSNPTKAVTLVENHDTQPGQSLESTVQPWFKPLAYAFILTRSGGYPSVFYGDMYGTKGTTTREIPALKSKIEPLLKARKDYAYGTQRDYIDNPDVIGWTREGDSTKAKSGLATVITDGPGGSKRMYVGTSNAGEIWYDLTGNRTDKITIGSDGYATFPVNGGSVSVWVQQ

SEQ ID NO: 36977 - protein, 480 aa, Cytophaga sp.
NGTMMQYFEWYVPNDGQQWNRLRTDAPYLSSVGITAVWTPPAYKGTSQADVGYGPYDLYDLGEFNQKGTVRTKYGTKGELKSAVNTLHSNGIQVYGDVVMNHKAGADYTENVTAVEVNPSNRYQETSGEYNIQAWTGFNFPGRGTTYSNWKWQWFHFDGTDWDQSRSLSRIFKFDGKAWDWEVSSENGNYDYLMYADYDYDHPDVVNEMKKWGVWYANEVGLDGYRLDAVKHIKFQFLKDWVDNARAATGKEMFTVGEYWQNDLGALNNYLAKVNYNQSLFDAPLHYNFYAASTGGGYYDMRNILNQTLVASNPTKAVTLVENHDTQPGQSLESTVQPWFKPLAYAFILTRSGGYPSVFYGDMYGTKGTTTREIPALKSKIEPLLKARKDYAYGTQRDYIDNPDVIGWTREGDSTKAKSGLATVITDGPGGSKRMYVGTSNAGEIWYDLTGNRTDKITIGSDGYATFPVNGGSVSVWVQQ

SEQ ID NO: 36978 - protein, 480 aa, Cytophaga sp.
NGTMMQYFEWYVPNDGQQWNRLRTDAPYLSSVGITAVWTPPAYKGTSQADVGYGPYDLYDLGEFNQKGTVRTKYGTKGELKSAVNTLHSNGIQVYGDVVMNHKAGADYTENVTAVEVNPSNRYQETSGEYNIQAWTGFNFPGRGTTYSNWKWQWFHFDGTDWDQSRSLSRIFKFDGKAWDWEVSSENGNYDYLMYADYDYDHPDVVNEMKKWGVWYANEVGLDGYRLDAVKHIKFQFLKDWVDNARAATGKEMFTVGEYWQNDLGALNNYLAKVNYNQSLFDAPLHYNFYAASTGGGYYDMRNILNNTLVASNPTKAVTLVENHDTQPGQSLESTVQPWFKPLAYAFILTRSGGYPSVFYGDMYGTKGTTTREIPALKSKIEPLLKARKDYAYGTQRDYIDNPDVIGWTREGDSTKAKSGLATVITDGPGGSKRMYVGTSNAGEIWYDLTGNRTDKITIGSDGYATFPVNWGSVSVWVQQ

SEQ ID NO: 36979 - protein, 480 aa, Cytophaga sp.
NGTMMQYFEWYVPNDGQQWNRLRTDAPYLSSVGITAVWTPPAYKGTSQADVGYGPYDLYDLGEFNQKGTVRTKYGTKGELKSAVNTLHSNGIQVYGDVVMNHKAGADYTENVTAVEVNPSNRYQETSGEYNIFAWTGFNFPGRGTTYSNWKWQWFHFDGTDWDQSRSLSRIFKFDGKAWDWEVSSENGNYDYLMYADYDYDHPDVVNEMKKWGVWYANEVGLDGYRLDAVKHIKFQFLKDWVDNARAATGKEMFTVGEYWQNDLGALNNYLAKVNYNQSLFDAPLHYNFYAASTGGGYYDMRNILNNTLVASNPTKAVTLVENHDTQPGQSLESTVQPWFKPLAYAFILTRSGGYPSVFYGDMYGTKGTTTREIPALKSKIEPLLKARKDYAYGTQRDYIDNPDVIGWTREGDSTKAKSGLATVITDGPGGSKRMYVGTSNAGEIWYDLTGNRTDKITIGSDGYATFPVNGGSVSVWVQQ

SEQ ID NO: 36980 - protein, 480 aa, Cytophaga sp.
NGTMMQYFEWYVPNDGQQWNRLRTDAPYLSSVGITAVWTPPAYKGTSQADVGYGPYDLYDLGEFNQKGTVRTKYGTKGELKSAVNTLHSNGIQVYGDVVMNHKAGADYTENVTAVEVNPSNRYQETSGEYNIQAWTGFNFPGRGVTYSNWKWQWFHFDGTDWDQSRSLSRIFKFDGKAWDWEVSSENGNYDYLMYADYDYDHPDVVNEMKKWGVWYANEVGLDGYRLDAVKHIKFQFLKDWVDNARAATGKEMFTVGEYWQNDLGALNNYLAKVNYNQSLFDAPLHYNFYAASTGGGYYDMRNILNNTLVASNPTKAVTLVENHDTQPGQSLESTVQPWFKPLAYAFILTRSGGYPSVFYGDMYGTKGTTTREIPALKSKIEPLLKARKDYAYGTQRDYIDNPDVIGWTREGDSTKAKSGLATVITDGPGGSKRMYVGTSNAGEIWYDLTGNRTDKITIGSDGYATFPVNGGSVSVWVQQ

SEQ ID NO: 36981 - protein, 480 aa, Cytophaga sp.
NGTMMQYFEWYVPNDGQQWNRLRTDAPYLSSVGITAVWTPPAYKGTSQADVGYGPYDLYDLGEFNQKGTVRTKYGTKGELKSAVNTLHSNGIQVYGDVVMNHKAGADYTENVTAVEVNPSNRYQETSGEYNIAAWTGFNFPGRGTTYSNWKWQWFHFDGTDWDQSRSLSRIFKFDGKAWDWEVSSENGNYDYLMYADYDYDHPDVVNEMKKWGVWYANEVGLDGYRLDAVKHIKFQFLKDWVDNARAATGKEMFTVGEYWQNDLGALNNYLAKVNYNQSLFDAPLHYNFYAASTGGGYYDMRNILNNTLVASNPTKAVTLVENHDTQPGQSLESTVQPWFKPLAYAFILTRSGGYPSVFYGDMYGTKGTTTREIPALKSKIEPLLKARKDYAYGTQRDYIDNPDVIGWTREGDSTKAKSGLATVITDGPGGSKRMYVGTSNAGEIWYDLTGNRTDKITIGSDGYATFPVNGGSVSVWVQQ

SEQ ID NO: 36982 - protein, 480 aa, Cytophaga sp.
NGTMMQYFEWYVPNDGQQWNRLRTDAPYLSSVGITAVWTPPAYKGTSQADVGYGPYDLYDLGEFNQKGTVRTKYGTKGELYSAVNTLHSNGIQVYGDVVMNHKAGADYTENVTAVEVNPSNRYQETSGEYNIQAWTGFNFPGRGTTYSNWKWQWFHFDGTDWDQSRSLSRIFKFDGKAWDWEVSSENGNYDYLMYADYDYDHPDVVNEMKKWGVWYANEVGLDGYRLDAVKHIKFQFLKDWVDNARAATGKEMFTVGEYWQNDLGALNNYLAKVNYNQSLFDAPLHYNFYAASTGGGYYDMRNILNNTLVASNPTKAVTLVENHDTQPGQSLESTVQPWFKPLAYAFILTRSGGYPSVFYGDMYGTKGTTTREIPALKSKIEPLLKARKDYAYGTQRDYIDNPDVIGWTREGDSTKAKSGLATVITDGPGGSKRMYVGTSNAGEIWYDLTGNRTDKITIGSDGYATFPVNGGSVSVWVQQ

SEQ ID NO: 36983 - protein, 480 aa, Cytophaga sp.
NGTMMQYFEWYVPNDGQQWNRLRTDAPYLSSVGITAVWTPPAYKGTSQADVGYGPYDLYDLGEFNQKGTVRTKYGTKGELKSAVNTLHSNGIQVYGDVVMNHKAGADYTENVTAVEVNPSNRYQETSGEYNIQAWTGFNFPGRGTTYSNWKWQWFHFDGTDWDQSRSLSRIFKFDGKAWDWEVSSENGNYDYLMYADYDYDHPDVVNEMKKWGVWYANEVGLDGYRLDAVKHIKFQFLKDWVDNARAATGKEMFTVGEYWQNDLGHLNNYLAKVNYNQSLFDAPLHYNFYAASTGGGYYDMRNILNNTLVASNPTKAVTLVENHDTQPGQSLESTVQPWFKPLAYAFILTRSGGYPSVFYGDMYGTKGTTTREIPALKSKIEPLLKARKDYAYGTQRDYIDNPDVIGWTREGDSTKAKSGLATVITDGPGGSKRMYVGTSNAGEIWYDLTGNRTDKITIGSDGYATFPVNGGSVSVWVQQ

SEQ ID NO: 36984 - protein, 480 aa, Cytophaga sp.
NGTMMQYFEWYVPNDGQQWNRLRTDAPYLSSVGITAVWTPPAYKGTSQADVGYGPYDLYDLGEFNQKGTVRTKYGTKGELKSAVNTLHSNGIQVYGDVVMNHKAGADYTENVTAVEVNPSNRYQETSGEYNIQAWTGFNFPGRGTTYSNWKWQWFHFDGTDWDQSRSLSRIFKFDGKAWDWEVSSENGNYDYLMYADYDYDHPDVVNEMKKWGVWYANEVGLDGYRLDAVKHIKFQFLKDWVDNARAATGKEMFTVGEYWQNDLGALNNYLAKVNYNQSLFDAPLHYNFYAASTGGGYYDMRNILNNTLVASNPTKAVTLVENHDTQPGQSLESTVQPWFKPLAYAFILTRSGGYPSVFYGDMYGTKGTTTREIPALKSKIEPLLKARKDYAYGTQRDYIDNPDVIGWTREGDSTKAKSGLATVITDGPGGSKRMYVGTSNAGEIWYDLTGNRTDKITIGSDGYATFPVNIGSVSVWVQQ

SEQ ID NO: 36985 - protein, 480 aa, Cytophaga sp.
NGTMMQYFEWYVPNDGQQWNRLRTDAPYLSSVGITAVWTPPAYKGTSQADVGYGPYDLYDLGEFNQKGTVRTKYGTKGELKSAVNTLHSNGIQVYGDVVMNHKAGADYTENVTAVEVNPSNRYQETSGEYNIQAWTGFNFPGRGTTYSNWKWQWFHFDGTDWDQSRSLSRIFKFDGKAWDWEVSSENGNYDYLMYADYDYDHPDVVNEMKKWGVWYANEVGLDGYRLDAVKHIKFQFLKDWVDNARAATGKEMFTVGEYWQNDLGALNNYLAKVNYNQSLFDAPLHYNFYAASTGGGYYDMRNILNNTLVASNPTKAVTLVENHDTQPGQSLESTVQPWFKPLAYAFILTRSGGYPSVFYGDMYGTKGTTTREIPALKSKIEPLLKARKDYAYGTQRDYIDNPDVIGWTREGDSTKAKSGLATVITDGPGGSKRMYVGTSNAGEIWYDLTGNRTDKITIGSDGYATFGVNGGSVSVWVQQ

SEQ ID NO: 36986 - protein, 480 aa, Cytophaga sp.
NGTMMQYFEWYVPNDGQQWNRLRTDAPYLSSVGITAVWTPPAYKGTSQADVGYGPYDLYDLGEFNQKGTVRTKYGTKGELKSAVNTLHSNGIQVYGDVVMNHKAGADYTENVTAVEVNPSNRYQETSGEYNIQAWTGFNFPGRGTTYSNWKWQWFHFDGTDWDQSRSLSRIFKFDGKAWDWEVSSENGNYDYLMYADYDYDHPDVVNEMKKWGVWYANEVGLDGYRLDAVKHIKFQFLKDWVDNARAATGKEMFTVGEYWQNDLGALNNYLAKVNYNQSLFDAPLHYNFYAASTGGGYYDMRNILNNTLVASNPTKAVTLVENHDTQPGQSLESTVQPWFKPLAYAFILTRSGGYPSVFYGDMYGTKGTTTREIPALKSKIEPLLKARKDYAYGTQRDYIDNPDVIGWTREGDSTKAKSGLATVITDGPGGSKRMYVGTSNAGELWYDLTGNRTDKITIGSDGYATFPVNGGSVSVWVQQ

SEQ ID NO: 36987 - protein, 480 aa, Cytophaga sp.
NGTMMQYFEWYVPNDGQQWNRLRTDAPYLSSVGITAVWTPPAYKGTSQADVGYGPYDLYDLGEFNQKGTVRTKYGTKGELKSAVNTLHSNGIQVYGDVVMNHKAGADYTENVTAVEVNPSNRYQETSGEYNIQAWTGFNFPGRGTTYSNWKWQWFHFDGTDWDQSRSLSRIFKFDGKAWDWEVSSENGNYDYLMYADYDYDHPDVVNEMKKWGVWYANEVGLDGYRLDAVKHIKFQFLKDWVDNARAATGKEMFTVGEYWQNDLGALNNYLAKVNYNQSLFDAPLHYNFYAASTGGGAYDMRNILNNTLVASNPTKAVTLVENHDTQPGQSLESTVQPWFKPLAYAFILTRSGGYPSVFYGDMYGTKGTTTREIPALKSKIEPLLKARKDYAYGTQRDYIDNPDVIGWTREGDSTKAKSGLATVITDGPGGSKRMYVGTSNAGEIWYDLTGNRTDKITIGSDGYATFPVNGGSVSVWVQQ

SEQ ID NO: 36988 - protein, 480 aa, Cytophaga sp.
NGTMMQYFEWYVPNDGQQWNRLRTDAPYLSSVGITAVWVPPAYKGTSQADVGYGPYDLYDLGEFNQKGTVRTKYGTKGELKSAVNTLHSNGIQVYGDVVMNHKAGADYTENVTAVEVNPSNRYQETSGEYNIQAWTGFNFPGRGTTYSNWKWQWFHFDGTDWDQSRSLSRIFKFDGKAWDWEVSSENGNYDYLMYADYDYDHPDVVNEMKKWGVWYANEVGLDGYRLDAVKHIKFQFLKDWVDNARAATGKEMFTVGEYWQNDLGALNNYLAKVNYNQSLFDAPLHYNFYAASTGGGYYDMRNILNNTLVASNPTKAVTLVENHDTQPGQSLESTVQPWFKPLAYAFILTRSGGYPSVFYGDMYGTKGTTTREIPALKSKIEPLLKARKDYAYGTQRDYIDNPDVIGWTREGDSTKAKSGLATVITDGPGGSKRMYVGTSNAGEIWYDLTGNRTDKITIGSDGYATFPVNGGSVSVWVQQ

SEQ ID NO: 36989 - protein, 480 aa, Cytophaga sp.
NGTMMQYFEWYVPNDGQQWNRLRTDAPYLSSVGITAVWTPPAYKGTSQADVGYGPYDLYDLGEFNQKGTVRTKYGTKGELKSAVNTLHSNGIQVYGDVVMNHKAGADYTENVTAVEVNPSNRYQETSGEYNIQAWTGFNFPGRGTTYSNWKWQWFHFDGTDWDQSRSLSRIFKFDGKAWDWEVSSENGNYDYLMYADYDYDHPDVVMEMKKWGVWYANEVGLDGYRLDAVKHIKFQFLKDWVDNARAATGKEMFTVGEYWQNDLGALNNYLAKVNYNQSLFDAPLHYNFYAASTGGGYYDMRNILNNTLVASNPTKAVTLVENHDTQPGQSLESTVQPWFKPLAYAFILTRSGGYPSVFYGDMYGTKGTTTREIPALKSKIEPLLKARKDYAYGTQRDYIDNPDVIGWTREGDSTKAKSGLATVITDGPGGSKRMYVGTSNAGEIWYDLTGNRTDKITIGSDGYATFPVNGGSVSVWVQQ

SEQ ID NO: 36990 - protein, 480 aa, Cytophaga sp.
NGTMMQYFEWYVPNDGQQWNRLRTDAPYLSSVGITAVWTPPAYKGTSQADVGYGPYDLYDLGEFLQKGTVRTKYGTKGELKSAVNTLHSNGIQVYGDVVMNHKAGADYTENVTAVEVNPSNRYQETSGEYNIQAWTGFNFPGRGTTYSNWKWQWFHFDGTDWDQSRSLSRIFKFDGKAWDWEVSSENGNYDYLMYADYDYDHPDVVNEMKKWGVWYANEVGLDGYRLDAVKHIKFQFLKDWVDNARAATGKEMFTVGEYWQNDLGALNNYLAKVNYNQSLFDAPLHYNFYAASTGGGYYDMRNILNNTLVASNPTKAVTLVENHDTQPGQSLESTVQPWFKPLAYAFILTRSGGYPSVFYGDMYGTKGTTTREIPALKSKIEPLLKARKDYAYGTQRDYIDNPDVIGWTREGDSTKAKSGLATVITDGPGGSKRMYVGTSNAGEIWYDLTGNRTDKITIGSDGYATFPVNGGSVSVWVQQ

SEQ ID NO: 36991 - protein, 480 aa, Cytophaga sp.
NGTMMQYFEWYVPNDGQQWNRLRTDAPYLSSVGITAVWTPPAYKGTSQADVGYGPYDLYDLGEFNQKGTVRTKYGTKGELKSAVNTLHSNGIQVYGDVVMNHKAGADYTENVTAVEVNPSNRYQETSGEYNIQAWTGFNFPGRGTTYSNWKWQWFHFDGTDWDQSRSLSRIFKFDGKAWDWEVSSENGNYDYLMYADYDYDHPDVVNEMKKWGVWYANEVGLDGYRLDAVKHIKFQFLKDWVDNARAATGKEMFTVGEYWQNDLGALNNYLAKVNYNQSLFDAPLHYNFYAASTGGGYYDMRNILNNTLVASNPTKAVTLVENHDTQPGQSLESTVQPWFKPLAYAFILTRSGGYPSVFYGDMYGTKGTTTREIPALKAKIEPLLKARKDYAYGTQRDYIDNPDVIGWTREGDSTKAKSGLATVITDGPGGSKRMYVGTSNAGEIWYDLTGNRTDKITIGSDGYATFPVNGGSVSVWVQQ

SEQ ID NO: 36992 - protein, 480 aa, Cytophaga sp.
NGTMMQYFEWYVPNDGQQWNRLRTDAPYLSSVGITAVWTPPAYKGTSQADVGYGPYDLYDLGEFNQKGTVRTKYGTKGELKSAVNTLHSNGIQVYGDVVMNHKAGADYTENVTAVEVNPSNRYQETSGEYNIQAWTGFNFPGRGTTYSNWKWQWFHFDGTDWDQSRSLSRIFKFDGKAWDWEVSSENGNYDYLMYADYDYDHPDVVNEMKKWGVWYANEVGLDGYRLDAVKHIKFQFLKDWVDNARAATGKEMFTVGEYWQNDLGALNNYLAKVNYNQSLFDAPLHYNFYAASTGGGQYDMRNILNNTLVASNPTKAVTLVENHDTQPGQSLESTVQPWFKPLAYAFILTRSGGYPSVFYGDMYGTKGTTTREIPALKSKIEPLLKARKDYAYGTQRDYIDNPDVIGWTREGDSTKAKSGLATVITDGPGGSKRMYVGTSNAGEIWYDLTGNRTDKITIGSDGYATFPVNGGSVSVWVQQ

SEQ ID NO: 36993 - protein, 480 aa, Cytophaga sp.
NGTMMQYFEWYVPNDGQQWNRLRTDAPYLSSVGITAVWTPPAYKGTSQADVGYGPYDLYDLGEFNQKGTVRTKYGTKGELKSAVNTLHSNGIQVYGDVVMNHKAGADYTENVTAVEVNPSNRYQETSGEYNIQAWTGFNFPGRGTTYSNWKWQWFHFDGTDWDQSRSLSRIFKFDGKAWDWEVSSENGNYDYLMYADYDYDHPDVVNEMKKWGVWYANEVGLDGYRLDAVKHIKFQFLKDWVDNARAATGKEMFTVGEYWQNDLGALNNYLAKVNYNQSLFDAPLHYNFYAASVGGGYYDMRNILNNTLVASNPTKAVTLVENHDTQPGQSLESTVQPWFKPLAYAFILTRSGGYPSVFYGDMYGTKGTTTREIPALKSKIEPLLKARKDYAYGTQRDYIDNPDVIGWTREGDSTKAKSGLATVITDGPGGSKRMYVGTSNAGEIWYDLTGNRTDKITIGSDGYATFPVNGGSVSVWVQQ

SEQ ID NO: 36994 - protein, 480 aa, Cytophaga sp.
NGTMMQYFEWYVPNDGQQWNRLRTDAPYLSSVGITAVWTPPAYKGTSQADVGYGPYDLYDLGEFNQKGTVRTKYGTKGELKSAVNTLHSNGIQVYGDVVMNHKAGADYTENVTAVEVNPSNRYQETSGEYNIQAWTGFNFPGRGTTYSNWKWQWFHFDGTDWDQSRSLSRIFKFDGKAWDWEVSSENGNYDYLMYADYDYDHPDVVNEMKKWGVWYANEVGLDGYRLDAVKHIKFQFLKDWVDNARAATGKEMFTVGEYWQNDLGALNNYLAKVNYNQSLFDAPLHYNFYAASTGGGYYDMRNILNNTLVASNPTKAVTLVENHDTQPGQSLESTVQPWFKPLAYAFILTRSGGYPSVFYGDMYGTKGTTTREIPALKSKIEPLLKARKDYAYGTQRDYIDNPDVIGWTREGDSTKAKSGLATVITDGPGGSKRMYVGTSNAGEIWYDATGNRTDKITIGSDGYATFPVNGGSVSVWVQQ

SEQ ID NO: 36995 - protein, 480 aa, Cytophaga sp.
NGTMMQYFEWYVPNDGQQWNRLRTDAPYLSSVGITAVWTPPAYKGTSQADVGYGPYDLYDLGEFNQKGTVRTKYGTKGELKSAVNTLHSNGIQVYGDVVMNHKAGADYTENVTAVEVNPSNRYQETSGHYNIQAWTGFNFPGRGTTYSNWKWQWFHFDGTDWDESRSLSRIFKFDGKAWDWEVSSENGNYDYLMYADYDYDHPDVVNEMKKWGVWYANEVGLDGYRLDAVKHIKFQFLKDWVDNARAATGKEMFTVGEYWQNDLGALNNYLFKVNYNQSLFDAPLHYNFYAASTGGGYYDMRNILNNTLVASNPTKAVTLVENHDTQPGQSLESTVQPWFKPLAYAFILTRSGGYPSVFYGDMYGTKGTTTREIPALKSKIEPLLKARKDYAYGKQRDYIDNPDVIGWTREGDSTKAKSGLATVITDGPGGSKRMYVGTSNAGEIWYDLTGNRTDKITIGSDGYATFPVNGGSVSVWVQQ

SEQ ID NO: 36996 - protein, 480 aa, Cytophaga sp.
NGTMMQYFEWYVPNDGQQWNRLRTDAPYLSSVGITAVWTPPAYKGTSQADVGYGPYDLYDLGEFNQKGTVRTKYGTKGELKSAVNTLHSNGIQVYGDVVMNHKAGADYTENVTAVEVNPSNRYQETSGEYNIQAWTGFNFPGRGTTYSNWKWQWFHFDGTDWDQSRSLSRIFKFDGKAWDWEVSSENGNYDYLMYADYDYDHPDVVNEMKKWGVWYANEVGLDGYRLDAVKHIKFQFLKDWVDNARAATGKEMFTVGEYWQNDLGALNNYLAKVNYNQSLFDAPLHYNFYAASTGGGYYDMRNILNNTLVASNPTKAVTLVENHDTQPGQSLESTVQPWFKPLAYAFILTRSGGYPSVFYGDMYGTKGTTTREIPALKSKIEPLLKARKDYAYGRQRDYIDNPDVIGWTREGDSTKAKSGLATVITDGPGGSKRMYVGTSNAGEIWYDLTGNRTDKITIGSDGYATFPVNGGSVSVWVQQ

SEQ ID NO: 36997 - protein, 480 aa, Cytophaga sp.
NGTMMQYFEWYVPNDGQQWNRLRTDAPYLSSVGITAVWTPPAYKGTSQADVGYGPYDLYDLGEFNQKGTVRTKYGTKGELKSAVNTLHSNGIQVYGDVVMNHKAGADYTENVTAVEVNPSNRVQETSGEYNIQAWTGFNFPGRGTTYSNWKWQWFHFDGTDWDQSRSLSRIFKFDGKAWDWEVSSENGNYDYLMYADYDYDHPDVVNEMKKWGVWYANEVGLDGYRLDAVKHIKFQFLKDWVDNARAATGKEMFTVGEYWQNDLGALNNYLAKVNYNQSLFDAPLHYNFYAASTGGGYYDMRNILNNTLVASNPTKAVTLVENHDTQPGQSLESTVQPWFKPLAYAFILTRSGGYPSVFYGDMYGTKGTTTREIPALKSKIEPLLKARKDYAYGTQRDYIDNPDVIGWTREGDSTKAKSGLATVITDGPGGSKRMYVGTSNAGEIWYDLTGNRTDKITIGSDGYATFPVNGGSVSVWVQQ

SEQ ID NO: 36998 - protein, 480 aa, Cytophaga sp.
NGTMMQYFEWYVPNDGQQWNRLRTDAPYLSSVGITAVWTPPAYKGTSQADVGYGPYDLYDLGEFNQKGTVRTKYGTKGELKSAVNTLHSNGIQVYGDVVMNHKAGADYTENVTAVEVNPSNRYQETSGEYNIQAWTGFNFPGRGTTYSNWKWQWFHFDGTDWDQSRSLSRIFKFDGKAWDWEVSSENGNYDYLMYADYDYDHPDVVNEMKKWGVWYANEVGLDGYRLDAVKHIKFQFLKDWVDNARAATGKEMFTVGEYWQNDLGMLNNYLAKVNYNQSLFDAPLHYNFYAASTGGGYYDMRNILNNTLVASNPTKAVTLVENHDTQPGQSLESTVQPWFKPLAYAFILTRSGGYPSVFYGDMYGTKGTTTREIPALKSKIEPLLKARKDYAYGTQRDYIDNPDVIGWTREGDSTKAKSGLATVITDGPGGSKRMYVGTSNAGEIWYDLTGNRTDKITIGSDGYATFPVNGGSVSVWVQQ

SEQ ID NO: 36999 - protein, 480 aa, Cytophaga sp.
NGTMMQYFEWYVPNDGQQWNRLRTDAPYLSSVGITAVWTPPAYKGTSQADVGYGPYDLYDLGEFNQKGTVRTKYGTKGELKSAVNTLHSNGIQVYGDVVMNHKAGADYTENVTAVEVNPSNRYQETSGEYNIQAWTGFNFPGRGTTYSNWKWQWLHFDGTDWDQSRSLSRIFKFDGKAWDWEVSSENGNYDYLMYADYDYDHPDVVNEMKKWGVWYANEVGLDGYRLDAVKHIKFQFLKDWVDNARAATGKEMFTVGEYWQNDLGALNNYLAKVNYNQSLFDAPLHYNFYAASTGGGYYDMRNILNNTLVASNPTKAVTLVENHDTQPGQSLESTVQPWFKPLAYAFILTRSGGYPSVFYGDMYGTKGTTTREIPALKSKIEPLLKARKDYAYGTQRDYIDNPDVIGWTREGDSTKAKSGLATVITDGPGGSKRMYVGTSNAGEIWYDLTGNRTDKITIGSDGYATFPVNGGSVSVWVQQ

SEQ ID NO: 37000 - protein, 480 aa, Cytophaga sp.
NGTMMQYFEWYVPNDGQQWNRLRTDAPYLSSVGITAVWTPPAYKGTSQADVGYGPYDLYDLGEFNQKGTVRTKYGTKGELKSAVNTLHSNGIQVYGDVVMNHKAGADYTENVTAVEVNPSNRYQETSGEYNIQAWTGFNFPGRGTTYSNWKWQWFHFDGTDWDQSRSLSRIFKFDGKAWDWEVSSENGNYDYLMYADYDYDHPDVVNEMKKWGVWYANEVGLDGYRLDAVKHIKFQFLKDWVDNARAATGKEMFTVGEYWQNDLGALNNYLAKVNYNQSLFDAPLHYNFYAASTGGGYYDMRNILNNTLVASNPTKAVTLVENHDTQPGQSLESTVQPWFKPLAYAFILTRSGGYPEVFYGDMYGTKGTTTREIPALKSKIEPLLKARKDYAYGTQRDYIDNPDVIGWTREGDSTKAKSGLATVITDGPGGSKRMYVGTSNAGEIWYDLTGNRTDKITIGSDGYATFPVNGGSVSVWVQQ

SEQ ID NO: 37001 - protein, 480 aa, Cytophaga sp.
NGTMMQYFEWYVPNDGQQWNRLRTDAPYLSSVGITAVWTPPAYKGTSQADVGYGPYDLYDLGEFNQKGTVRTKYGTKGELKSAVNTLHSNGIQVYGDVVMNHKAGADYTENVTAVEVNPSNRYQETSGEYNIQAWTGFNFPGRGTTYSNWKWQWFHFDGTDWDQSRSLSRIFKFDGKAWDWEVSSENGNYDYLMYADYDYDHPDVVNEMKKWGVWYANEVGLDGYRLDAVKHIKFQFLKDWVDNARAATGKEMFTVGEYWQNDLGALNNYLAKVNYNQSLFDAPLHYNFYAASTGGGYYDMRNILNNTLVASNPTKAVTLVENHDTQPGQSLESTVQPWFKPLAYAFILTRSGGYPSVFYGDMYGTKGTTTREIPALKSKIEPLLKARKDYAYGTQRDYIDNPDVIGWTREGDSTKAKSGLATVITDGPGGSKRMYVGTSNAGEIWYDLTGNRTDKITIGSDGNATFPVNGGSVSVWVQQ

SEQ ID NO: 37002 - protein, 480 aa, Cytophaga sp.
NGTMMQYFEWYVPNDGQQWNRLRTDAPYLSSVGITAVWTPPAYKGTSQADVGYGPYDLYDLGEFNQKGTVRTKYGTKGELKSAVNTLHSNGIQVYGDVVMNHKAGADYTENVTAVEVNPSNRYQETSGEYNIQAWTGFNFPGRGTTYSNWKWQWFHFDGTDWDQSRSLSRIFKFDGKAWDWEVSSENGNYDYLMYADYDYDHPDVVNEMKKWGVWYANEVGLDGYRLDAVKHIKFQFLKDWVDNARAATGKEMFTVGEYWQNDLGALNNYLAKVNYNQSLFDAPLHYNFYAASTGGGYYDMRNILNNTLVASNPTKAVTLVENHDTQPGQSLESTVQPWFKPLAYAFILTRSGGYPSVFYGDMYGTKGTTTREIPALKSKIEPLLKARKDYAYGTQRDYIDNPDVIGWTREGDSDKAKSGLATVITDGPGGSKRMYVGTSNAGEIWYDLTGNRTDKITIGSDGYATFPVNGGSVSVWVQQ

SEQ ID NO: 37003 - protein, 480 aa, Cytophaga sp.
NGTMMQYFEWYVPNDGQQWNRLRTDAPYLSSVGITAVWTPPAYKGTSQADVGYGPYDLYDLGEFNQKGTVRTKYGTKGELKRAVNTLHSNGIQVYGDVVMNHKAGADYTENVTAVEVNPSNRYQETSGEYNIQAWTGFNFPGRGTTYSNWKWQWFHFDGTDWDQSRSLSRIFKFDGKAWDWEVSSENGNYDYLMYADYDYDHPDVVNEMKKWGVWYANEVGLDGYRLDAVKHIKFQFLKDWVDNARAATGKEMFTVGEYWQNDLGALNNYLAKVNYNQSLFDAPLHYNFYAASTGGGYYDMRNILNNTLVASNPTKAVTLVENHDTQPGQSLESTVQPWFKPLAYAFILTRSGGYPSVFYGDMYGTKGTTTREIPALKSKIEPLLKARKDYAYGTQRDYIDNPDVIGWTREGDSTKAKSGLATVITDGPGGSKRMYVGTSNAGEIWYDLTGNRTDKITIGSDGYATFPVNGGSVSVWVQQ

SEQ ID NO: 37004 - protein, 480 aa, Cytophaga sp.
NGTMMQYFEWYVPNDGQQWNRLRTDAPYLSSVGITAVWTPPAYKGTSQADVGYGPYDLYDLGEFNQKGTVRTKYGTKGELKSAVNTLHSNGIQVYGDVVMNHKAGADYTENVTAVEVNPSNRYQETSGEYNIQAWTGFNFPGRGTTYSNWKWQWFHFDGTDWDQSRSLSRIFKFDGKAWDWEVSSENGNYDYLMYADYDYDHPDVVNEMKKWGVWYANEVGLDGYRLDAVKHIKFQFLKDWVDNARAATGKEMFTVGEYWQNDLGALNNYLAKVNYNQSLFDAPLHYNFYAASTGGGYYDMRNILNNTLVASNPTKAVTLVENHDTQPGQSLESTVQPWFKPLAYAFILTRSGGYPSVFYGDMYGTKGTTTREIPALKSAIEPLLKARKDYAYGTQRDYIDNPDVIGWTREGDSTKAKSGLATVITDGPGGSKRMYVGTSNAGEIWYDLTGNRTDKITIGSDGYATFPVNGGSVSVWVQQ

SEQ ID NO: 37005 - protein, 480 aa, Cytophaga sp.
NGTMMQYFEWYVPNDGQQWNRLRTDAPYLSSVGITAVWTPPAYKGTSQADVGYGPYDLYDLGEFNQKGTVRTKYGTKGELKSAVNTLHSNGIQVYGDVVMNHKAGADYTENVTAVEVNPSNRYQETSGEYNIQAWTGFNFPGRGTTYSNWKWQWFHFDGTDWDVSRSLSRIFKFDGKAWDWEVSSENGNYDYLMYADYDYDHPDVVNEMKKWGVWYANEVGLDGYRLDAVKHIKFQFLKDWVDNARAATGKEMFTVGEYWQNDLGALNNYLAKVNYNQSLFDAPLHYNFYAASTGGGYYDMRNILNNTLVASNPTKAVTLVENHDTQPGQSLESTVQPWFKPLAYAFILTRSGGYPSVFYGDMYGTKGTTTREIPALKSKIEPLLKARKDYAYGTQRDYIDNPDVIGWTREGDSTKAKSGLATVITDGPGGSKRMYVGTSNAGEIWYDLTGNRTDKITIGSDGYATFPVNGGSVSVWVQQ

SEQ ID NO: 37006 - protein, 480 aa, Cytophaga sp.
NGTMMQYFEWYVPNDGQQWNRLRTDAPYLSSVGITAVWTPPAYKGTSQADVGYGPYDLYDLGEFNQKGTVRTKYGTKGELKSAVNTLHSNGIQVYGDVVMNHKAGADYTENVTAVEVNPSNRYQETSGEYDIQAWTGFNFPGRGTTYSNWKWQWFHFDGTDWDQSRSLSRIFKFDGKAWDWEVSSENGNYDYLMYADYDYDHPDVVNEMKKWGVWYANEVGLDGYRLDAVKHIKFQFLKDWVDNARAATGKEMFTVGEYWQNDLGALNNYLAKVNYNQSLFDAPLHYNFYAASTGGGYYDMRNILNNTLVASNPTKAVTLVENHDTQPGQSLESTVQPWFKPLAYAFILTRSGGYPSVFYGDMYGTKGTTTREIPALKSKIEPLLKARKDYAYGTQRDYIDNPDVIGWTREGDSTKAKSGLATVITDGPGGSKRMYVGTSNAGEIWYDLTGNRTDKITIGSDGYATFPVNGGSVSVWVQQ

SEQ ID NO: 37007 - protein, 480 aa, Cytophaga sp.
NGTMMQYFEWYVPNDGQQWNRLRTDAPYLSSVGITAVWTPPAYKGTSQADVGYGPYDLYDLGEFNQKGTVRTKYGTKGELKSAVNTLHSNGIQVYGDVVMNHKAGADYTENVTAVEVNPSNRYQETSGEYNIQAWTGFNFPGRGTTYSNWKWQWFHFDGTDWDQSRSLSRIFKFDGKAWDWEVSSENGNYDYLMYADYDYDHPDVVNEMKKWGVWYANEVGLDGYRLDAVKHIKFQFLKDWVDNARAATGKEMFTVGEYWQNDLGALNNYLAKVNYNQSLFDAPLHYNFYAASTGGGYYDMRNILNNTLVASFPTKAVTLVENHDTQPGQSLESTVQPWFKPLAYAFILTRSGGYPSVFYGDMYGTKGTTTREIPALKSKIEPLLKARKDYAYGTQRDYIDNPDVIGWTREGDSTKAKSGLATVITDGPGGSKRMYVGTSNAGEIWYDLTGNRTDKITIGSDGYATFPVNGGSVSVWVQQ

SEQ ID NO: 37008 - protein, 480 aa, Cytophaga sp.
NGTMMQYFEWYVPNDGQQWNRLRKDAPYLSSVGITAVWTPPAYKGTSQADVGYGPYDLYDLGEFNQKGTVRTKYGTKGELKSAVNTLHSNGIQVYGDVVMNHKAGADYTENVTAVEVNPSNRYQETSGEYNIQAWTGFNFPGRGTTYSNWKWQWFHFDGTDWDQSRSLSRIFKFDGKAWDWEVSSENGNYDYLMYADYDYDHPDVVNEMKKWGVWYANEVGLDGYRLDAVKHIKFQFLKDWVDNARAATGKEMFTVGEYWQNDLGALNNYLAKVNYNQSLFDAPLHYNFYAASTGGGYYDMRNILNNTLVASNPTKAVTLVENHDTQPGQSLESTVQPWFKPLAYAFILTRSGGYPSVFYGDMYGTKGTTTREIPALKSKIEPLLKARKDYAYGTQRDYIDNPDVIGWTREGDSTKAKSGLATVITDGPGGSKRMYVGTSNAGEIWYDLTGNRTDKITIGSDGYATFPVNGGSVSVWVQQ

SEQ ID NO: 37009 - protein, 480 aa, Cytophaga sp.
NGTMMQYFEWYVPNDGQQWNRLRTDAPYLSSVGITAVWTPPAYKGTSQADVGYGPYDLYDLGEFNQKGTVRTKYGTKGELKSAVNTLHSNGIQVYGDVVMNHKAGADYTENVTAVEVNPSNRYQETSGEYNIQAWTGFNFPGRGTTYSNWKWQWFHFDGTDWDQSRSLSRIFKFDGKAWDWEVSSENGNYDYLMYADYDYDHPDVVNEMKKWGVWYANEVGLDGYRLDAVKHIKFQFLKDWVDNARAATGKEMFTVGEYWQNDLGALNNYLAKVNYNQSLFDAPLHYNFYAASTGGGYYDMRNILNNTLVASNPTKAVTLVENHDTQPGQSLESTVQPWFKPLAYAFILTRSGGYPSVFYGDMYGTKGTTTREIPALKSKIEPLLKARKDYAYGTQRDYIDNPDVIGWTREGDSTLAKSGLATVITDGPGGSKRMYVGTSNAGEIWYDLTGNRTDKITIGSDGYATFPVNGGSVSVWVQQ

SEQ ID NO: 37010 - protein, 480 aa, Cytophaga sp.
NGTMMQYFEWYVPNDGQQWNRLRTDAPYLSSVGITAVWTPPAYKGTSQADVGYGPYDLYDLGEFNQKGTVRTKYGTKGELKSAVNTLHSNGIQVYGDVVMNHKAGADYTENVTAVEVNPSNRYQETSGEYNIQAWTGFNFPGRGTTYSNWKWQWFHFDGTDWDQSRSLSRIFKFDGKAWDWEVSSENGNYDYLMYADYDYDHPDVVNEMKKWGVWYANEVGLDGYRLDAVKHIKFQFLKDWVDNARAATGKEMFTVGEYWQNDLGALNNYLAKVNYNQSLFDAPLHYNFYAASTGGGYYDMRNILNNTLVASNPTKAVTLVENHDTQPGQSLESTVQPWFKPLAYAFILTRSGGYPSVFYGDMYGTKGTTTREIPALKSKIEPLLKARKDYAYGTQRDYIDNPDVIGWTREGDSTKAKSGLATVITDGPGGSKRMYVGTSNAGEIWYDLTGNRTDHITIGSDGYATFPVNGGSVSVWVQQ

SEQ ID NO: 37011 - protein, 480 aa, Cytophaga sp.
NGTMMQYFEWYVPNDGQQWNRLRTDAPYLSSVGITAVWTPPAYKGTSQADVGYGPYDLYDLGEFNQKGTVRTKYGTKGELKSAVNTLHSNGIQVYGDVVMNHKAGADYTENVTAVEVNPSNRYQETSGEYRIQAWTGFNFPGRGTTYSNWKWQWFHFDGTDWDQSRSLSRIFKFDGKAWDWEVSSENGNYDYLMYADYDYDHPDVVNEMKKWGVWYANEVGLDGYRLDAVKHIKFQFLKDWVDNARAATGKEMFTVGEYWQNDLGALNNYLAKVNYNQSLFDAPLHYNFYAASTGGGYYDMRNILNNTLVASNPTKAVTLVENHDTQPGQSLESTVQPWFKPLAYAFILTRSGGYPSVFYGDMYGTKGTTTREIPALKSKIEPLLKARKDYAYGTQRDYIDNPDVIGWTREGDSTKAKSGLATVITDGPGGSKRMYVGTSNAGEIWYDLTGNRTDKITIGSDGYATFPVNGGSVSVWVQQ

SEQ ID NO: 37012 - protein, 480 aa, Cytophaga sp.
NGTMMQYFEWYVPNDGQQWNRLRTDAPYLSSVGITAVWTPPAYKGTSQADVGYGPYDLYDLGEFNQKGTVRTKYGTKGELKSAVNTLHSNGIQVYGDVVMNHKAGADYTENVTAVEVNPSNRYQETSGEYVIQAWTGFNFPGRGTTYSNWKWQWFHFDGTDWDQSRSLSRIFKFDGKAWDWEVSSENGNYDYLMYADYDYDHPDVVNEMKKWGVWYANEVGLDGYRLDAVKHIKFQFLKDWVDNARAATGKEMFTVGEYWQNDLGALNNYLAKVNYNQSLFDAPLHYNFYAASTGGGYYDMRNILNNTLVASNPTKAVTLVENHDTQPGQSLESTVQPWFKPLAYAFILTRSGGYPSVFYGDMYGTKGTTTREIPALKSKIEPLLKARKDYAYGTQRDYIDNPDVIGWTREGDSTKAKSGLATVITDGPGGSKRMYVGTSNAGEIWYDLTGNRTDKITIGSDGYATFPVNGGSVSVWVQQ

SEQ ID NO: 37013 - protein, 480 aa, Cytophaga sp.
NGTMMQYFEWYVPNDGQQWNRLRTDAPYLSSVGITAVWTPPAYKGTSQADVGYGPYDLYDLGEFNQKGTVRTKYGTKGELKSAVNTLHSNGIQVYGDVVMNHKAGADYTENVTAVEVNPSNRYQETSGEYNIQAWTGFNFPGRGTTYSNWKWQWFHFDGTDWDQSRSLSRIFKFDGKAWDWEVSSENGNYDYLMYADYDYDHPDVVNEMKKWGVWYANEVGLDGYRLDAVKHIKFQFLKDWVDNARAATGKEMFTVGEYWQNDLGALNNYLAKVNYNQSLFDAPLHYNFYAASTGGGYYDMRNILNNTLVASNPTKAVTLVENHDTQPGQSLESTVQPWFKPLAYAFILTRSGGYPSVFYGDMYGTKGTTTREIPALKSKIEPLLKARKDYAYGTQRDYIDNPDVIGWTREGDSTKAKSGLATVITDGPGGSKRMYVGTSNAGEIWYDLTGNRTDKITIGSDGYATFPVNFGSVSVWVQQ

SEQ ID NO: 37014 - protein, 480 aa, Cytophaga sp.
NGTMMQYFEWYVPNDGQQWNRLRTDAPYLSSVGITAVWTPPAYKGTSQADVGYGPYDLYDLGEFNQKGTVRTKYGTKGELKSAVNTLHSNGIQVYGDVVMNHKAGADYTENVTAVEVNPSNRYQETSGEYNIQAWTGFNFPGRGTTYSNWKWQWFHFDGTDWDQSRSLSRIFKFDGKAWDWEVSSENGNYDYLMYADYDYDHPDVVNEMKKWGVWYANEVGLDGYRLDAVKHIKFQFLKDWVDNARAATGKEMFTVGEYWQNDLGALNNYLAKVNYNQSLFDAPLHYNFYAASTGGGYYDMRNILNNTLVASNPTKAVTLVENHDTQPGQSLESTVQPWFKPLAYAFILTRSGGYPSVFYGDMYGTKGTTTREIPALKSKIEPLLKARKDYAYGTQRDYIDNPDVIGWTREGDSTKAKSGLATVITDGPGGSKRMYVGTSNAGEIWYDLTGNRTDKLTIGSDGYATFPVNGGSVSVWVQQ

SEQ ID NO: 37015 - protein, 480 aa, Cytophaga sp.
NGTMMQYFEWYVPNDGQQWRRLRTDAPYLSSVGITAVWTPPAYKGTSQADVGYGPYDLYDLGEFNQKGTVRTKYGTKGELKSAVNTLHSNGIQVYGDVVMNHKAGADYTENVTAVEVNPSNRYQETSGEYNIQAWTGFNFPGRGTTYSNWKWQWFHFDGTDWDQSRSLSRIFKFDGKAWDWEVSSENGNYDYLMYADYDYDHPDVVNEMKKWGVWYANEVGLDGYRLDAVKHIKFQFLKDWVDNARAATGKEMFTVGEYWQNDLGALNNYLAKVNYNQSLFDAPLHYNFYAASTGGGYYDMRNILNNTLVASNPTKAVTLVENHDTQPGQSLESTVQPWFKPLAYAFILTRSGGYPSVFYGDMYGTKGTTTREIPALKSKIEPLLKARKDYAYGTQRDYIDNPDVIGWTREGDSTKAKSGLATVITDGPGGSKRMYVGTSNAGEIWYDLTGNRTDKITIGSDGYATFPVNGGSVSVWVQQ

SEQ ID NO: 37016 - protein, 480 aa, Cytophaga sp.
NGTMMQYFEWYVPNDGQQWNRLRTDAPYLSSVGITAVWTPPAYKGTSQADVGYGPYDLYDLGEFNQKGTVRTKYGTKGELKSAVNTLHSNGIQVYGDVVMNHKAGADYTENVTAVEVNPSNREQETSGEYNIQAWTGFNFPGRGTTYSNWKWQWFHFDGTDWDQSRSLSRIFKFDGKAWDWEVSSENGNYDYLMYADYDYDHPDVVNEMKKWGVWYANEVGLDGYRLDAVKHIKFQFLKDWVDNARAATGKEMFTVGEYWQNDLGALNNYLAKVNYNQSLFDAPLHYNFYAASTGGGYYDMRNILNNTLVASNPTKAVTLVENHDTQPGQSLESTVQPWFKPLAYAFILTRSGGYPSVFYGDMYGTKGTTTREIPALKSKIEPLLKARKDYAYGTQRDYIDNPDVIGWTREGDSTKAKSGLATVITDGPGGSKRMYVGTSNAGEIWYDLTGNRTDKITIGSDGYATFPVNGGSVSVWVQQ

SEQ ID NO: 37017 - protein, 480 aa, Cytophaga sp.
NGTMMQYFEWYVPNDGQQWNRLRTDAPYLSSVGITAVWTPPAYKGTSQADVGYGPYDLYDLGEFNQKGTVRTKYGTKGELKSAVNTLHSNGIQVYGDVVMNHKAGADYTENVTAVEVNPSNRYQETSGEYNIQAWTGFNFPGRGTTYSNWKWQWFHFDGTDWDQSRSLSRIFKFDGKAWDWEVSSENGNYDYLMYADYDYDHPDVVNEMKKWGVWYANEVGLDGYRLDAVKHIKFQFLKDWVDNARAATGKEMFTVGEYWQNDLGALNNYLAKVNYNQSLFDAPLHYNFYAASTGGGYYDMRNILNNTLVASNPTKAVTLVENHDTQPGQSLESTVQPWFKPLAYAFILTRSGGYPSVFYGDMYGTKGTTTREIPALKSKIEPLLKARKDYAYGTQRDYIDNPDVIGWTREGDSTKAKSGLATVITDGPGGSKRMYVGTSNAGEIWYDLTGNRTDKITIGSDGSATFPVNGGSVSVWVQQ

SEQ ID NO: 37018 - protein, 480 aa, Cytophaga sp.
NGTMMQYFEWYVPNDGQQWNRLRTDAPYLSSVGITAVWTPPAYKGTSQADVGYGPYDLYDLGEFNQKGTVRTKYGTKGELKSAVNTLHSNGIQVYGDVVMNHKAGADYTENVTAVEVNPSNRYQETSGEYNIQAWTGFNFPGRGTTYSNWKWQWFHFDGTDWDQSRSLSRIFKFDGKAWDWEVSSENGNYDYLMYADYDYDHPDVVNEMKKWGVWYANEVGLDGYRLDAVKHIKFQFLKDWVDNARAATGKEMFTVGEYWQNDLGALNNYLAKVNYNQSLFDAPLHYNFYAASTGGGYYDMRNILNNTLVASNPTKAVTLVENHDTQPGQSLESTVQPWFKPLAYAFILTRSGGYPSVFYGDMYGTKGTTTREIPALKSKIEPLLKARKDYAYGTQRDYIDNPDVIGWTREGDSTKAKSGLATVITDGPGGSKRMYVGTSNAGEIWYDKTGNRTDKITIGSDGYATFPVNGGSVSVWVQQ

SEQ ID NO: 37019 - protein, 480 aa, Cytophaga sp.
NGTMMQYFEWYVPNDGQQWNRLRTDAPYLSSVGITAVWTPPAYKGTSQADVGYGPYDLYDLGEFNQKGTVRTKYGTKAELKSAVNTLHSNGIQVYGDVVMNHKAGADYTENVTAVEVNPSNRYQETSGEYNIQAWTGFNFPGRGTTYSNWKWQWFHFDGTDWDQSRSLSRIFKFDGKAWDWEVSSENGNYDYLMYADYDYDHPDVVNEMKKWGVWYANEVGLDGYRLDAVKHIKFQFLKDWVDNARAATGKEMFTVGEYWQNDLGALNNYLAKVNYNQSLFDAPLHYNFYAASTGGGYYDMRNILNNTLVASNPTKAVTLVENHDTQPGQSLESTVQPWFKPLAYAFILTRSGGYPSVFYGDMYGTKGTTTREIPALKSKIEPLLKARKDYAYGTQRDYIDNPDVIGWTREGDSTKAKSGLATVITDGPGGSKRMYVGTSNAGEIWYDLTGNRTDKITIGSDGYATFPVNGGSVSVWVQQ

SEQ ID NO: 37020 - protein, 480 aa, Cytophaga sp.
NGTMMQYFEWYVPNDGQQWNRLRTDAPYLSSVGITAVWTPPAYKGTSQADTGYGPYDLYDLGEFNQKGTVRTKYGTKGELKSAVNTLHSNGIQVYGDVVMNHKAGADYTENVTAVEVNPSNRYQETSGEYNIQAWTGFNFPGRGTTYSNWKWQWFHFDGTDWDQSRSLSRIFKFDGKAWDWEVSSENGNYDYLMYADYDYDHPDVVNEMKKWGVWYANEVGLDGYRLDAVKHIKFQFLKDWVDNARAATGKEMFTVGEYWQNDLGALNNYLAKVNYNQSLFDAPLHYNFYAASTGGGYYDMRNILNNTLVASNPTKAVTLVENHDTQPGQSLESTVQPWFKPLAYAFILTRSGGYPSVFYGDMYGTKGTTTREIPALKSKIEPLLKARKDYAYGTQRDYIDNPDVIGWTREGDSTKAKSGLATVITDGPGGSKRMYVGTSNAGEIWYDLTGNRTDKITIGSDGYATFPVNGGSVSVWVQQ

SEQ ID NO: 37021 - protein, 480 aa, Cytophaga sp.
NGTMMQYFEWYVPNDGQQWNRLRTDAPYLSSVGITAVWTPPAYKGTSQADVGYGPYDLYDLGEFNQKGTVRTKYGTKGELKSAVNTLHSNGIQVYGDVVMNHKAGADYTENVTAVEVNPSNRYQETSGEYNIQAWTGFNFPGRGTTYSNWKWQWFHFDGTDWDQSRSLSRIFKFDGKAWDWEVSSENGNYDYLMYADYDYDHPDVVNEMKKWGVWYANEVGLDGYRLDAVKHIKFQFLKDWVDNARAATGKEMFTVGEYWQNDLGALNNYLAKVNYNQSLFDAPLHYNFYAASTGGGYYDMRNILNNTLVASNPAKAVTLVENHDTQPGQSLESTVQPWFKPLAYAFILTRSGGYPSVFYGDMYGTKGTTTREIPALKSKIEPLLKARKDYAYGTQRDYIDNPDVIGWTREGDSTKAKSGLATVITDGPGGSKRMYVGTSNAGEIWYDLTGNRTDKITIGSDGYATFPVNGGSVSVWVQQ

SEQ ID NO: 37022 - protein, 480 aa, Cytophaga sp.
NGTAMQYFEWYVPNDGQQWNRLRTDAPYLSSVGITAVWTPPAYKGTSQADVGYGPYDLYDLGEFNQKGTVRTKYGTKGELKSAVNTLHSNGIQVYGDVVMNHKAGADYTENVTAVEVNPSNRYQETSGEYNIQAWTGFNFPGRGTTYSNWKWQWFHFDGTDWDQSRSLSRIFKFDGKAWDWEVSSENGNYDYLMYADYDYDHPDVVNEMKKWGVWYANEVGLDGYRLDAVKHIKFQFLKDWVDNARAATGKEMFTVGEYWQNDLGALNNYLAKVNYNQSLFDAPLHYNFYAASTGGGYYDMRNILNNTLVASNPTKAVTLVENHDTQPGQSLESTVQPWFKPLAYAFILTRSGGYPSVFYGDMYGTKGTTTREIPALKSKIEPLLKARKDYAYGTQRDYIDNPDVIGWTREGDSTKAKSGLATVITDGPGGSKRMYVGTSNAGEIWYDLTGNRTDKITIGSDGYATFPVNGGSVSVWVQQ

SEQ ID NO: 37023 - protein, 480 aa, Cytophaga sp.
NGTMMQYFEWYVPNDGQQWNRLRTDAPYLSSVGITAVWTPPAYKGTSQADVGYGPYDLYDLGEFNQKGTVRTKYGTKGELKSAVNTLHSNGIQVYGDVVMNHKAGADYTENVTAVEVNPSNRYQETSGEYNIQAWTGFNFPGRGTTYSNWKWQWFHFDGTDWDQSRSWSRIFKFDGKAWDWEVSSENGNYDYLMYADYDYDHPDVVNEMKKWGVWYANEVGLDGYRLDAVKHIKFQFLKDWVDNARAATGKEMFTVGEYWQNDLGALNNYLAKVNYNQSLFDAPLHYNFYAASTGGGYYDMRNILNNTLVASNPTKAVTLVENHDTQPGQSLESTVQPWFKPLAYAFILTRSGGYPSVFYGDMYGTKGTTTREIPALKSKIEPLLKARKDYAYGTQRDYIDNPDVIGWTREGDSTKAKSGLATVITDGPGGSKRMYVGTSNAGEIWYDLTGNRTDKITIGSDGYATFPVNGGSVSVWVQQ

SEQ ID NO: 37024 - protein, 480 aa, Cytophaga sp.
NGTMMQYFEWYVPNDGQQWNRLRTDAPYLSSVGITAVWTPPAYKGTSQADVGYGPYDLYDLGEFNQKGTVRTKYGTKGELKSAVNTLHSNGIQVYGDVVMNHKAGADYTEAVTAVEVNPSNRYQETSGEYNIQAWTGFNFPGRGTTYSNWKWQWFHFDGTDWDQSRSLSRIFKFDGKAWDWEVSSENGNYDYLMYADYDYDHPDVVNEMKKWGVWYANEVGLDGYRLDAVKHIKFQFLKDWVDNARAATGKEMFTVGEYWQNDLGALNNYLAKVNYNQSLFDAPLHYNFYAASTGGGYYDMRNILNNTLVASNPTKAVTLVENHDTQPGQSLESTVQPWFKPLAYAFILTRSGGYPSVFYGDMYGTKGTTTREIPALKSKIEPLLKARKDYAYGTQRDYIDNPDVIGWTREGDSTKAKSGLATVITDGPGGSKRMYVGTSNAGEIWYDLTGNRTDKITIGSDGYATFPVNGGSVSVWVQQ

SEQ ID NO: 37025 - protein, 480 aa, Cytophaga sp.
NGTMMQYFEWYVPNDGQQWNRLRTDAPYLSSVGITAVWTPPAYKGTSQADVGYGPYDLYDLGEFNQKGTVRTKYGTKGELKSAVNTLHSNGIQVYGDVVMNHKAGADYTENVTAVEVNPSNRYQETSGEYNIQAWTGFNFPGRGTTYSNWKWQWNHFDGTDWDQSRSLSRIFKFDGKAWDWEVSSENGNYDYLMYADYDYDHPDVVNEMKKWGVWYANEVGLDGYRLDAVKHIKFQFLKDWVDNARAATGKEMFTVGEYWQNDLGALNNYLAKVNYNQSLFDAPLHYNFYAASTGGGYYDMRNILNNTLVASNPTKAVTLVENHDTQPGQSLESTVQPWFKPLAYAFILTRSGGYPSVFYGDMYGTKGTTTREIPALKSKIEPLLKARKDYAYGTQRDYIDNPDVIGWTREGDSTKAKSGLATVITDGPGGSKRMYVGTSNAGEIWYDLTGNRTDKITIGSDGYATFPVNGGSVSVWVQQ

SEQ ID NO: 37026 - protein, 480 aa, Cytophaga sp.
NGTMMQYFEWYVPNDGQQWNRLRTDAPYLSSVGITAVWTPPAYKGTSQADVGYGPYDLYDLGEFNQKGTVRTKYGTKGELKSAVNTLHSNGIQVYGDVVMNHKAGADYTENVTAVEVNPSNRYQETSGEYNIQAWTGFNFPGRGTTYSNWKWQWFHFDGTDWDQSRSLSRIFKFDGKAWDWEVSSENGNYDYLMYADYDYDHPDVVNEMKKWGVWYANEVGLDGYRLDAVKHIKFQFLKDWVDNARAATGKEMFTVGEYWQNDLGALNNYLAKVNYNQSLFDAPLHYNFYAASTGGGYYDMRNILNNTLVASNPTKAVTLVENHDTQPGQSLESTVQPWFKPLAYAFILTRSGGYPSVFYGDMYGTKGTTTREIPALKSLIEPLLKARKDYAYGTQRDYIDNPDVIGWTREGDSTKAKSGLATVITDGPGGSKRMYVGTSNAGEIWYDLTGNRTDKITIGSDGYATFPVNGGSVSVWVQQ

SEQ ID NO: 37027 - protein, 480 aa, Cytophaga sp.
NGTMMQYFEWYVPNDGQQWNRLRTDAPYLSSVGITAVWTPPAYKGTSQADVGYGPYDLYDLGEFNQKGTVRTKYGTKGELKSAVNTLHSNGIQVYGDVVMNHKAGADYTENVTAVEVNPSNRYQETSGEYNIQAWTGFNFPGRGTTYSNWKWQWFHFDGTDWDQSRSLSRIFKFDGKAWDWEVSSENGNYDYLMYADYDYDHPDVVNEMKKWGVWYANEVGLDGYRLDAVKHIKFQFLKDWVDNARAATGKEMFTVGEYWQNDLGALNNYLAKVNYNQSLFDAPLHYNFYAASTGGGYYDMRNILNNTLVASNPTKAVTLVENHDTQPGQSLESTVQPWFKPLAYAFILTRSGGYPSVFYGDMYGTKGTTTREIPALKSKIEPLLKARKDYAYGIQRDYIDNPDVIGWTREGDSTKAKSGLATVITDGPGGSKRMYVGTSNAGEIWYDLTGNRTDKITIGSDGYATFPVNGGSVSVWVQQ

SEQ ID NO: 37028 - protein, 480 aa, Cytophaga sp.
NGTMMQYFEWYVPNDGQQWNRLRTDAPYLSSVGITAVWTPPAYKGTSQADVGYGPYDLYDLGEFHQKGTVRTKYGTKGELKSAVNTLHSNGIQVYGDVVMNHKAGADYTENVTAVEVNPSNRYQETSGEYNIQAWTGFNFPGRGTTYSNWKWQWFHFDGTDWDQSRSLSRIFKFDGKAWDWEVSSENGNYDYLMYADYDYDHPDVVNEMKKWGVWYANEVGLDGYRLDAVKHIKFQFLKDWVDNARAATGKEMFTVGEYWQNDLGALNNYLAKVNYNQSLFDAPLHYNFYAASTGGGYYDMRNILNNTLVASNPTKAVTLVENHDTQPGQSLESTVQPWFKPLAYAFILTRSGGYPSVFYGDMYGTKGTTTREIPALKSKIEPLLKARKDYAYGTQRDYIDNPDVIGWTREGDSTKAKSGLATVITDGPGGSKRMYVGTSNAGEIWYDLTGNRTDKITIGSDGYATFPVNGGSVSVWVQQ

SEQ ID NO: 37029 - protein, 480 aa, Cytophaga sp.
NGTMMQYFEWYVPNDGQQWNRLRCDAPYLSSVGITAVWTPPAYKGTSQADVGYGPYDLYDLGEFNQKGTVRTKYGTKGELKSAVNTLHSNGIQVYGDVVMNHKAGADYTENVTAVEVNPSNRYQETSGEYNIQAWTGFNFPGRGTTYSNWKWQWFHFDGTDWDQSRSLSRIFKFDGKAWDWEVSSENGNYDYLMYADYDYDHPDVVNEMKKWGVWYANEVGLDGYRLDAVKHIKFQFLKDWVDNARAATGKEMFTVGEYWQNDLGALNNYLAKVNYNQSLFDAPLHYNFYAASTGGGYYDMRNILNNTLVASNPTKAVTLVENHDTQPGQSLESTVQPWFKPLAYAFILTRSGGYPSVFYGDMYGTKGTTTREIPALKSKIEPLLKARKDYAYGTQRDYIDNPDVIGWTREGDSTKAKSGLATVITDGPGGSKRMYVGTSNAGEIWYDLTGNRTDKITIGSDGYATFPVNGGSVSVWVQQ

SEQ ID NO: 37030 - protein, 480 aa, Cytophaga sp.
NGTMMQYFEWYVPNDGQQWNRLRTDAPYLSSVGITAVWTPPAYKGTSQADVGYGPYDLYDLGEFNQKGTVRTKYGTKGELKSAVNTLHSNGIQVYGDVVMNHKAGADYTENVTAVEVNPSNRYQETSGEYNIQAWTGFNFPGRGTTYSNWKWQWFHFDGTDWDQSRSLSRIFKFDGKAWDWEVSSENGNYDYLMYADYDYDHPDVVNEMKKWGVWYANEVGLDGYRLDAVKHIKFQFLKDWVDNARAATGKEMFTVGEYWQNDLGALNNYLAKVNYNQSLFDAPLHYNFYAASTGGGYYDMRNILNNTLVASNPTKAVTLVENHDTQPGQSLESTVQPWFKPLAYAFILTRWGGYPSVFYGDMYGTKGTTTREIPALKSKIEPLLKARKDYAYGTQRDYIDNPDVIGWTREGDSTKAKSGLATVITDGPGGSKRMYVGTSNAGEIWYDLTGNRTDKITIGSDGYATFPVNGGSVSVWVQQ

SEQ ID NO: 37031 - protein, 480 aa, Cytophaga sp.
NGTMMQYFEWYVPNDGQQWNRLRTDAPYLSSVGITAVWTPPAYKGTSQADVGYGPYDLYDLGEFNQKGTVRTKYGTKGELKSAVNTLHSNGIQVYGDVVMNHKAGADYTENVTAVEVNPSNRYQETSGEYFIQAWTGFNFPGRGTTYSNWKWQWFHFDGTDWDQSRSLSRIFKFDGKAWDWEVSSENGNYDYLMYADYDYDHPDVVNEMKKWGVWYANEVGLDGYRLDAVKHIKFQFLKDWVDNARAATGKEMFTVGEYWQNDLGALNNYLAKVNYNQSLFDAPLHYNFYAASTGGGYYDMRNILNNTLVASNPTKAVTLVENHDTQPGQSLESTVQPWFKPLAYAFILTRSGGYPSVFYGDMYGTKGTTTREIPALKSKIEPLLKARKDYAYGTQRDYIDNPDVIGWTREGDSTKAKSGLATVITDGPGGSKRMYVGTSNAGEIWYDLTGNRTDKITIGSDGYATFPVNGGSVSVWVQQ

SEQ ID NO: 37032 - protein, 480 aa, Cytophaga sp.
NGTMMQYFEWYVPNDGQQWNRLRTDAPYLSSVGITAVWTPPAYKGTSQADVGYGPYDLYDLGEFNQKGTVRTKYGTKGELKSAVNTLHSNGIQVYGDVVMNHKAGADYTELVTAVEVNPSNRYQETSGEYNIQAWTGFNFPGRGTTYSNWKWQWFHFDGTDWDQSRSLSRIFKFDGKAWDWEVSSENGNYDYLMYADYDYDHPDVVNEMKKWGVWYANEVGLDGYRLDAVKHIKFQFLKDWVDNARAATGKEMFTVGEYWQNDLGALNNYLAKVNYNQSLFDAPLHYNFYAASTGGGYYDMRNILNNTLVASNPTKAVTLVENHDTQPGQSLESTVQPWFKPLAYAFILTRSGGYPSVFYGDMYGTKGTTTREIPALKSKIEPLLKARKDYAYGTQRDYIDNPDVIGWTREGDSTKAKSGLATVITDGPGGSKRMYVGTSNAGEIWYDLTGNRTDKITIGSDGYATFPVNGGSVSVWVQQ

SEQ ID NO: 37033 - protein, 480 aa, Cytophaga sp.
NGTMMQYFEWYVPNDGQQWNRLRTDAPYLSSVGITAVWTPPAYKGTSQADVGYGPYDLYDLGEFNQKGTVRTKYGTKGELKSAVNTLHSNGIQVYGDVVMNHKAGADYTENVTAVEVNPSNRYQETSGEYNIQAWTGFNFPGRGTTYSNWKWQWFHFDGTDWDQSRSLSRIFKFDGKAWDWEVSSENGNYDYLMYADYDYDHPDVVNEMKKWGVWYANEVGLDGYRLDAVKHIKFQFLKDWVDNARAATGKEMFTVGEYWQNDLGALNNYLAKVNYNQSLFDAPLHYNFYAASTGGGLYDMRNILNNTLVASNPTKAVTLVENHDTQPGQSLESTVQPWFKPLAYAFILTRSGGYPSVFYGDMYGTKGTTTREIPALKSKIEPLLKARKDYAYGTQRDYIDNPDVIGWTREGDSTKAKSGLATVITDGPGGSKRMYVGTSNAGEIWYDLTGNRTDKITIGSDGYATFPVNGGSVSVWVQQ

SEQ ID NO: 37034 - protein, 480 aa, Cytophaga sp.
NGTMMQYFEWYVPNDGQQWNRLRTDAPYLSSVGITAVWTPPAYKGTSQADVGYGPYDLYDLGEFNQKGTVRTKYGTKGELKSAVNTLHSNGIQVYGDVVMNHKAGADYTENVTAVEVNPSNRYQETSGEYNIQAWTGFNFPGRGTTYSNWKWQWFHFDGTDWDQSRSLSRIFKFDGKAWDWEVSSENGNYDYLMYADYDYDHPDVVNEMKKWGVWYANEVGLDGYRLDAVKHIKFQFLKDWVDNARAATGKEMFTVGEYWQNDLGALNNYLAKVNYNQSLFDAPLHYNFYAASTGGGYYDMRNILNNTLVASNPTKAVTLVENHDTQPGQSLESTVQPWFKPLAYAFILTRSGGYPSVFYGDMYGTKGTTTREIPALKSKIEPLLKARKDYAYGTQRDYIDAPDVIGWTREGDSTKAKSGLATVITDGPGGSKRMYVGTSNAGEIWYDLTGNRTDKITIGSDGYATFPVNGGSVSVWVQQ

SEQ ID NO: 37035 - protein, 480 aa, Cytophaga sp.
NGTMMQYFEWYVPNDGQQWNRLRTDAPYLSSVGITAVWTPPAYKGTSQADVGYGPYDLYDLGEFNQKGTVRTKYGTKGELKSAVNTLHSNGIQVYGDVVMNHKAGADYTENVTAVEVNPSNRYQETSGEYNIQAWTGFNFPGRGTTYSNWKWQWFHFDGTDWDQSRSLSRIFKFDGKAWDWEVSSENGNYDYLMYADYDYDHPDVVNEMKKWGVWYANEVGLDGYRLDAVKHIKFQFLKDWVDNARAATGKEMFTVGEYWQNDLGALNNYLRKVNYNQSLFDAPLHYNFYAASTGGGYYDMRNILNNTLVASNPTKAVTLVENHDTQPGQSLESTVQPWFKPLAYAFILTRSGGYPSVFYGDMYGTKGTTTREIPALKSKIEPLLKARKDYAYGTQRDYIDNPDVIGWTREGDSTKAKSGLATVITDGPGGSKRMYVGTSNAGEIWYDLTGNRTDKITIGSDGYATFPVNGGSVSVWVQQ

SEQ ID NO: 37036 - protein, 480 aa, Cytophaga sp.
NGTMMQYFEWYVPNDGQQWNRLRTDAPYLSSVGITAVWTPPAYKGTSQADVGYGPYDLYDLGEFNQKGTVRTKYGTKGELKSAVNTLHSNGIQVYGDVVMNHKAGADYTENVTAVEVNPSNRYQETSGEYNIQAWTGFNFPGRGTTYSNWKWQWFHFDGTDWDQSRSLSRIFKFDGKAWDWEVSSENGNYDYLMYADYDYDHPDVVNEMKKWGVWYANEMGLDGYRLDAVKHIKFQFLKDWVDNARAATGKEMFTVGEYWQNDLGALNNYLAKVNYNQSLFDAPLHYNFYAASTGGGYYDMRNILNNTLVASNPTKAVTLVENHDTQPGQSLESTVQPWFKPLAYAFILTRSGGYPSVFYGDMYGTKGTTTREIPALKSKIEPLLKARKDYAYGTQRDYIDNPDVIGWTREGDSTKAKSGLATVITDGPGGSKRMYVGTSNAGEIWYDLTGNRTDKITIGSDGYATFPVNGGSVSVWVQQ

SEQ ID NO: 37037 - protein, 480 aa, Cytophaga sp.
NGTMMQYFEWYVPNDGQQWNRLRTDAPYLSSVGITAVWTPPAYKGTSQADVGYGPYDLYDLGEFNQKGTVRTKYGTKGELKEAVNTLHSNGIQVYGDVVMNHKAGADYTENVTAVEVNPSNRYQETSGEYNIQAWTGFNFPGRGTTYSNWKWQWFHFDGTDWDQSRSLSRIFKFDGKAWDWEVSSENGNYDYLMYADYDYDHPDVVNEMKKWGVWYANEVGLDGYRLDAVKHIKFQFLKDWVDNARAATGKEMFTVGEYWQNDLGALNNYLAKVNYNQSLFDAPLHYNFYAASTGGGYYDMRNILNNTLVASNPTKAVTLVENHDTQPGQSLESTVQPWFKPLAYAFILTRSGGYPSVFYGDMYGTKGTTTREIPALKSKIEPLLKARKDYAYGTQRDYIDNPDVIGWTREGDSTKAKSGLATVITDGPGGSKRMYVGTSNAGEIWYDLTGNRTDKITIGSDGYATFPVNGGSVSVWVQQ

SEQ ID NO: 37038 - protein, 480 aa, Cytophaga sp.
NGTMMQYFEWYVPNDGQQWNRLRTDAPYLSSVGITAVWTPPAYKGTSQADVGYGPYDLYDLGEFNQKGTVRTKYGTKGELKSAVNTLHSNGIQVYGDVVMNHKAGADYTENVTAVEVNPSNRIQETSGEYNIQAWTGFNFPGRGTTYSNWKWQWFHFDGTDWDQSRSLSRIFKFDGKAWDWEVSSENGNYDYLMYADYDYDHPDVVNEMKKWGVWYANEVGLDGYRLDAVKHIKFQFLKDWVDNARAATGKEMFTVGEYWQNDLGALNNYLAKVNYNQSLFDAPLHYNFYAASTGGGYYDMRNILNNTLVASNPTKAVTLVENHDTQPGQSLESTVQPWFKPLAYAFILTRSGGYPSVFYGDMYGTKGTTTREIPALKSKIEPLLKARKDYAYGTQRDYIDNPDVIGWTREGDSTKAKSGLATVITDGPGGSKRMYVGTSNAGEIWYDLTGNRTDKITIGSDGYATFPVNGGSVSVWVQQ

SEQ ID NO: 37039 - protein, 480 aa, Cytophaga sp.
NGTMMQYFEWYVPNDGQQWNRLRTDAPYLSSVGITAVWTPPAYKGTSQADVGYGPYDLYDLGEFNQKGTVRTKYGTKGELKSAVNTLHSNGIQVYGDVVMNHKAGADYTENVTAVEVNPSNRYQETSGEYNIQAWTGFNFPGRGTTYSNWKWQWFHFDGTDWDQSRSLSRIFKFDGKAWDWEVSSENGNYDYLMYADYDYDHPDVVNEMKKWGVWYANEVGLDGYRLDAVKHIKFQFLKDWVDNARAATGKEMFTVGEYWQNDLGALNNYLAKVNYNQSLFDAPLHYNFYAASTGGGYYDMRNILNNTLVASNPTKAVTLVENHDTQPGQSLESTVQPWFKPLAYAFILTRSGGYPSVFYGDMYGTKGTTTREIPALKSKIEPLLKARKDYAYGTQRDYIDNPDVIGWTREGDSTKAKSGLAGVITDGPGGSKRMYVGTSNAGEIWYDLTGNRTDKITIGSDGYATFPVNGGSVSVWVQQ

SEQ ID NO: 37040 - protein, 480 aa, Cytophaga sp.
NGTMMQYFEWYVPNDGQQWNRLRTDAPYLSSVGITAVWTPPAYKGTSQADVGYGPYDLYDLGEFNQKGTVRTKYGTKGELKSAVNTLHSNGIQVYGDVVMNHKAGADYTENVTAVEVNPSNRYQETSGEYWIQAWTGFNFPGRGTTYSNWKWQWFHFDGTDWDQSRSLSRIFKFDGKAWDWEVSSENGNYDYLMYADYDYDHPDVVNEMKKWGVWYANEVGLDGYRLDAVKHIKFQFLKDWVDNARAATGKEMFTVGEYWQNDLGALNNYLAKVNYNQSLFDAPLHYNFYAASTGGGYYDMRNILNNTLVASNPTKAVTLVENHDTQPGQSLESTVQPWFKPLAYAFILTRSGGYPSVFYGDMYGTKGTTTREIPALKSKIEPLLKARKDYAYGTQRDYIDNPDVIGWTREGDSTKAKSGLATVITDGPGGSKRMYVGTSNAGEIWYDLTGNRTDKITIGSDGYATFPVNGGSVSVWVQQ

SEQ ID NO: 37041 - protein, 480 aa, Cytophaga sp.
NGTMMQYFEWYVPNDGQQWNRLRTDAPYLSSVGITAVWTPPAYKGTSQADVGYGPYDLYDLGEFNQKGTVRTKYGTKGELKSAVNTLHSNGIQVYGDVVMNHKAGADYTENVTAVEVNPSNRYQETSGHYNIQAWTGFNFPGRGTTYSNFKWQWFHFDGTDWDQSRSLSRIFKFDGKAWDWPVSSENGNYDYLMYADYDYDHPDVVNEMKKWGVWYANEVGLDGYRLDAVKHIKFSFLKDWVDNARAATGKEMFTVGEYWQNDLGALNNYLAKVNYNQSLFDAPLHYNFYAASTGGGYYDMRNILNNTLVASNPTKAVTLVENHDTQPGQSLESTVQPWFKPLAYAFILTRSGGYPSVFYGDMYGTKGTTTREIPALKSKIEPLLKARKDYAYGTQRDYIDNPDVIGWTREGDSTKAKSGLATVITDGPGGSKRMYVGTSNAGEIWYDLTGNRTDKITIGSDGYATFPVNGGSVSVWVQQ

SEQ ID NO: 37042 - protein, 480 aa, Cytophaga sp.
NGTMMQYFEWYVPNDGQQWNRLRTDAPYLSSVGITAVWTPPAYKGTSQADVGYGPYDLYDLGEFNQKGTVRTKYGTKGELKSAVNTLHSNGIQVYGDVVMNHKAGADYTENVTAVEVNPSNRYQETSGEYNIQAWTGFNFPGRGTTYSNWKWQWFHFDGTDWDQSRSLSRIFKFDGKAWDWEVSSENGNYDYLMYADYDYDHPDVVNEMKKWGVWYANEVGLDGYRLDAVKHIKFQFLKDWVDNMRAATGKEMFTVGEYWQNDLGALNNYLAKVNYNQSLFDAPLHYNFYAASTGGGYYDMRNILNNTLVASNPTKAVTLVENHDTQPGQSLESTVQPWFKPLAYAFILTRSGGYPSVFYGDMYGTKGTTTREIPALKSKIEPLLKARKDYAYGTQRDYIDNPDVIGWTREGDSTKAKSGLATVITDGPGGSKRMYVGTSNAGEIWYDLTGNRTDKITIGSDGYATFPVNGGSVSVWVQQ

SEQ ID NO: 37043 - protein, 480 aa, Cytophaga sp.
NGTMMQYFEWYVPNDGQQWNRLRTDAPYLSSVGITAVWTPPAYKGTSQADVGYGPYDLYDLGEFNQKGTVRTKYGTKGELKSAVNTLHSNGIQVYGDVVMNHKAGADYTENVTAVEVNPSNRYQETSGEYNIQAWTGFNFPGRGTTYSNWKWQWFHFDGTDWDQSRSLSRIFKFDGKAWDWEVSSENGNYDYLMYADYDYDHPDVVNEMKKWGVWYANEVGLDGYRLDAVKHIKFQFLKDWVDNARGATGKEMFTVGEYWQNDLGALNNYLAKVNYNQSLFDAPLHYNFYAASTGGGYYDMRNILNNTLVASNPTKAVTLVENHDTQPGQSLESTVQPWFKPLAYAFILTRSGGYPSVFYGDMYGTKGTTTREIPALKSKIEPLLKARKDYAYGTQRDYIDNPDVIGWTREGDSTKAKSGLATVITDGPGGSKRMYVGTSNAGEIWYDLTGNRTDKITIGSDGYATFPVNGGSVSVWVQQ

SEQ ID NO: 37044 - protein, 480 aa, Cytophaga sp.
NGTMMQYFEWYVPNDGQQWNRLRTDAPYLSSVGITAVWTPPAYKGTSQADVGYGPYDLYDLGEFNQKGTVRTKYGTKGELKSAVNTLHSNGIQVYGDVVMNHKAGADYTENVTAVEVNPSNRYQETSGEYNIQAWTGFNFPGRGTTYSNWKWQWFHFDGTDWDQSRSLSRIFKFDGKAWDWEVSSENGNYDYLMYADYDYDHPDVVNEMKKWGVWYANEVGLDGYRLDAVKHIKFQFLKDWVDNARAATGKEMFTVGEYWQNDLGALNNYLAKVNYNQSLFDAPLHYNFYAASTHGGYYDMRNILNNTLVASNPTKAVTLVENHDTQPGQSLESTVQPWFKPLAYAFILTRSGGYPSVFYGDMYGTKGTTTREIPALKSKIEPLLKARKDYAYGTQRDYIDNPDVIGWTREGDSTKAKSGLATVITDGPGGSKRMYVGTSNAGEIWYDLTGNRTDKITIGSDGYATFPVNGGSVSVWVQQ

SEQ ID NO: 37045 - protein, 480 aa, Cytophaga sp.
NGTMMQYFEWYVPNDGQQWNRLRTDAPYLSSVGITAVWTPPAYKGTSQADVGYGPYDLYDLGEFNQKGTVRTKYGTKGELKSAVNTLHSIGIQVYGDVVMNHKAGADYTENVTAVEVNPSNRYQETSGEYNIQAWTGFNFPGRGTTYSNWKWQWFHFDGTDWDQSRSLSRIFKFDGKAWDWEVSSENGNYDYLMYADYDYDHPDVVNEMKKWGVWYANEVGLDGYRLDAVKHIKFQFLKDWVDNARAATGKEMFTVGEYWQNDLGALNNYLAKVNYNQSLFDAPLHYNFYAASTGGGYYDMRNILNNTLVASNPTKAVTLVENHDTQPGQSLESTVQPWFKPLAYAFILTRSGGYPSVFYGDMYGTKGTTTREIPALKSKIEPLLKARKDYAYGTQRDYIDNPDVIGWTREGDSTKAKSGLATVITDGPGGSKRMYVGTSNAGEIWYDLTGNRTDKITIGSDGYATFPVNGGSVSVWVQQ

SEQ ID NO: 37046 - protein, 480 aa, Cytophaga sp.
NGTMMQYFEWYVPNDGQQWNRLRTDAPYLSSVGITAVWTPPAYKGTSQADVGYGPYDLYDLGEFNQKGTVRTKYGTKGELKSAVNTLHSNGIQVYGDVVMNHKAGADYTENVTAVEVNPSNRYQETSGEYNIQAWTGFNFPGRGTTYSNWKWQWFHFDGTDWDQSRSLSRIFKFDGKAWDWEVSSENGNYDYLMYADYDYDHPDVVNEMKKWGVWYANEVGLDGYRLDAVKHIKFQFLKDWVDNARAATGKEMFTVGEYWQNDLGALNNYLAKVNYNQSLFDAPLHYNFYAASTGGGSYDMRNILNNTLVASNPTKAVTLVENHDTQPGQSLESTVQPWFKPLAYAFILTRSGGYPSVFYGDMYGTKGTTTREIPALKSKIEPLLKARKDYAYGTQRDYIDNPDVIGWTREGDSTKAKSGLATVITDGPGGSKRMYVGTSNAGEIWYDLTGNRTDKITIGSDGYATFPVNGGSVSVWVQQ

SEQ ID NO: 37047 - protein, 480 aa, Cytophaga sp.
NGTMMQYFEWYVPNDGQQWNRLRTDAPYLSSVGITAVWTPPAYKGTSQADVGYGPYDLYDLGEFNQKGTVRTKYGTKGELKSAVNTLHSNGIQVYGDVVMNHKAGADYTENVTAVEVNPSNRYQETSGEYNIQAWTGFNFPGRGTTYSNWKWQWFHFDGTDWDQSRSLSRIFKFDGKAWDWEVSSENGNYDYLMYADYDYDHPDVVNEMKKWGVWYANEVGLDGYRLDAVKHIKFQFLKDWVDNARAATGKEMFTVGEYWQNDLGALNNYLAKVNYNQSLFDAPLHYNFYAASTGGGYYDMRNILNNTLVASNPTKAVTLVENHDTQPGQSLESTVQPWFKPLAYAFILTRSGGYPSVFYGDMYGTKGTTTREIPALKSKIEPLLKARKDYAYGTQRDYIDNPDVIGWTREGDSTKAKSGLATVITDGPGGSKRMYVGTSNAGEIWYDLTGNRTDCITIGSDGYATFPVNGGSVSVWVQQ

SEQ ID NO: 37048 - protein, 480 aa, Cytophaga sp.
NGTMMQYFEWYVPNDGQQWNRLRTDAPYLSSVGITAVWTPPAYKGTSQADVGYGPYDLYDLGEFNQKGTVRTKYGTKGELKSAVNTLHSNGIQVYGDVVMNHKAGADYTENVTAVEVNPSNRYQETSGEYNIQAWTGFNFPGRGTTYSNWKWQWFHFDGTDWDQSRSLSRIFKFDGKAWDWEVSSENGNYDYLMYADYDYDHPDVVNEMKKWGVWYANEVGLDGYRLDAVKHIKFQFLKDWVDNARAATGKEMFTVGEYWQNDLGALNNYLAKVNYNQSLFDAPLHYNFYAASWGGGYYDMRNILNNTLVASNPTKAVTLVENHDTQPGQSLESTVQPWFKPLAYAFILTRSGGYPSVFYGDMYGTKGTTTREIPALKSKIEPLLKARKDYAYGTQRDYIDNPDVIGWTREGDSTKAKSGLATVITDGPGGSKRMYVGTSNAGEIWYDLTGNRTDKITIGSDGYATFPVNGGSVSVWVQQ

SEQ ID NO: 37049 - protein, 480 aa, Cytophaga sp.
NGTMMQYFEWYVPNDGQQWNRLRTDAPYLSSVGITAVWAPPAYKGTSQADVGYGPYDLYDLGEFNQKGTVRTKYGTKGELKSAVNTLHSNGIQVYGDVVMNHKAGADYTENVTAVEVNPSNRYQETSGEYNIQAWTGFNFPGRGTTYSNWKWQWFHFDGTDWDQSRSLSRIFKFDGKAWDWEVSSENGNYDYLMYADYDYDHPDVVNEMKKWGVWYANEVGLDGYRLDAVKHIKFQFLKDWVDNARAATGKEMFTVGEYWQNDLGALNNYLAKVNYNQSLFDAPLHYNFYAASTGGGYYDMRNILNNTLVASNPTKAVTLVENHDTQPGQSLESTVQPWFKPLAYAFILTRSGGYPSVFYGDMYGTKGTTTREIPALKSKIEPLLKARKDYAYGTQRDYIDNPDVIGWTREGDSTKAKSGLATVITDGPGGSKRMYVGTSNAGEIWYDLTGNRTDKITIGSDGYATFPVNGGSVSVWVQQ

SEQ ID NO: 37050 - protein, 480 aa, Cytophaga sp.
NGTMMQYFEWYVPNDGQQWNRLRTDAPYLSSVGITAVWTPPAYKGTSQADVGYGPYDLYDLGEFNQKGTVRTKYGTKGELKSAVNTLHSNGIQVYGDVVMNHKAGADYTENVTAVEVNPSNRYQETSGEYNIQAWTGFNFPGRGFTYSNWKWQWFHFDGTDWDQSRSLSRIFKFDGKAWDWEVSSENGNYDYLMYADYDYDHPDVVNEMKKWGVWYANEVGLDGYRLDAVKHIKFQFLKDWVDNARAATGKEMFTVGEYWQNDLGALNNYLAKVNYNQSLFDAPLHYNFYAASTGGGYYDMRNILNNTLVASNPTKAVTLVENHDTQPGQSLESTVQPWFKPLAYAFILTRSGGYPSVFYGDMYGTKGTTTREIPALKSKIEPLLKARKDYAYGTQRDYIDNPDVIGWTREGDSTKAKSGLATVITDGPGGSKRMYVGTSNAGEIWYDLTGNRTDKITIGSDGYATFPVNGGSVSVWVQQ

SEQ ID NO: 37051 - protein, 480 aa, Cytophaga sp.
NGTMMQYFEWYVPNDGQQWNRLRTDAPYLSSVGITAVWTPPAYKGTSQADVGYGPYDLYDLGEFNQKGTVRTKYGTKGELKSAVNTLHSNGIQVYGDVVMNHKAGADYTENVTAVEVNPSNRYQETSGEYNIQAWTGFNFPGRGTTYSNWKWQWFHFDGTDWDQSRSLSRIFKFDGKAWDWEVSSENGNYDYLMYADYDYDHPDVVNEMKKWGVWYANEVGLDGYRLDAVKHIKFQFLKDWVDNARAATGKEMFTVGEYWQNDLGALNNYLAKVNYNQSLFDAPLHYNFYAASTGGGYYDMRNILNNTLVASNPTKAVTMVENHDTQPGQSLESTVQPWFKPLAYAFILTRSGGYPSVFYGDMYGTKGTTTREIPALKSKIEPLLKARKDYAYGTQRDYIDNPDVIGWTREGDSTKAKSGLATVITDGPGGSKRMYVGTSNAGEIWYDLTGNRTDKITIGSDGYATFPVNGGSVSVWVQQ

SEQ ID NO: 37052 - protein, 480 aa, Cytophaga sp.
NGTMMQYFEWYVPNDGQQWNRLRTDAPYLSSVGITAVWTPPAYKGTSQADVGYGPYDLYDLGEFNQKGTVRTKYGTKGELKSAVNTLHSNGIQVYGDVVMNHKAGADYTENVTAVEVNPSNRYQETSGEYNIQAWTGFNFPGRGTTYSNWKWQWFHFDGTDWDQSRSLSRIFKFDGKAWDWEVSSENGNYDYLMYADYDYDHPDVVLEMKKWGVWYANEVGLDGYRLDAVKHIKFQFLKDWVDNARAATGKEMFTVGEYWQNDLGALNNYLAKVNYNQSLFDAPLHYNFYAASTGGGYYDMRNILNNTLVASNPTKAVTLVENHDTQPGQSLESTVQPWFKPLAYAFILTRSGGYPSVFYGDMYGTKGTTTREIPALKSKIEPLLKARKDYAYGTQRDYIDNPDVIGWTREGDSTKAKSGLATVITDGPGGSKRMYVGTSNAGEIWYDLTGNRTDKITIGSDGYATFPVNGGSVSVWVQQ

SEQ ID NO: 37053 - protein, 480 aa, Cytophaga sp.
NGTMMQYFEWYVPNDGQQWNRLRTDAPYLSSVGITAVWTPPAYKGTSQADVGYGPYDLYDLGEFNQKGTVRTKYGTKGELKSAVNTLHSNGIQVYGDVVMNHKAGADYTENVTAVEVNPSNRYQETSGEYNIQAWTGFNFPGRGTTYSNWKWQWFHFDGTDWDQSRSLSRIFKFDGKAWDWEVSSENGNYDYLMYADYDYDHPDVVNEMKKWGVWYANEVGLDGYRLDAVKHIKFQFLKDWVDNARAATGKEMFTVGEYWQNDLGALNNYLAKVNYNQSLFDAPLHYNFYAASTGGGYYDMRNILNNTLVASNPTKAVTLVENHDTQPGQSLESTVQPWFKPLAYAFILTRSGGYPSVFYGDMYGTKGTTTREIPALKSKIEPLLKARKDYAYGTQRDYIDNPDVIGWTREGDSTKAKSGLATVITDGPGGSKRMYVGWSNAGEIWYDLTGNRTDKITIGSDGYATFPVNGGSVSVWVQQ

SEQ ID NO: 37054 - protein, 480 aa, Cytophaga sp.
NGTMMQYFEWYVPNDGQQWNRLRTDAPYLSSVGITAVWTPPAYKGTSQADVGYGPYDLYDLGEFNQKGTVRTKYGTKGELKSAVNTLHSNGIQVYGDVVMNHKAGADYTENVTAVEVNPSNRYQETSGEYNIQAWTGFNFPGRGTTYSNWKWQWFHFDGTDWDQSRSASRIFKFDGKAWDWEVSSENGNYDYLMYADYDYDHPDVVNEMKKWGVWYANEVGLDGYRLDAVKHIKFQFLKDWVDNARAATGKEMFTVGEYWQNDLGALNNYLAKVNYNQSLFDAPLHYNFYAASTGGGYYDMRNILNNTLVASNPTKAVTLVENHDTQPGQSLESTVQPWFKPLAYAFILTRSGGYPSVFYGDMYGTKGTTTREIPALKSKIEPLLKARKDYAYGTQRDYIDNPDVIGWTREGDSTKAKSGLATVITDGPGGSKRMYVGTSNAGEIWYDLTGNRTDKITIGSDGYATFPVNGGSVSVWVQQ

SEQ ID NO: 37055 - protein, 480 aa, Cytophaga sp.
NGTMMQYFEWYVPNDGQQWNRLRTDAPYLSSVGITAVWTPPAYKGTSQADVGYGPYDLYDLGEFNQKGTVRTKYGTKGELKQAVNTLHSNGIQVYGDVVMNHKAGADYTENVTAVEVNPSNRYQETSGEYNIQAWTGFNFPGRGTTYSNWKWQWFHFDGTDWDQSRSLSRIFKFDGKAWDWEVSSENGNYDYLMYADYDYDHPDVVNEMKKWGVWYANEVGLDGYRLDAVKHIKFQFLKDWVDNARAATGKEMFTVGEYWQNDLGALNNYLAKVNYNQSLFDAPLHYNFYAASTGGGYYDMRNILNNTLVASNPTKAVTLVENHDTQPGQSLESTVQPWFKPLAYAFILTRSGGYPSVFYGDMYGTKGTTTREIPALKSKIEPLLKARKDYAYGTQRDYIDNPDVIGWTREGDSTKAKSGLATVITDGPGGSKRMYVGTSNAGEIWYDLTGNRTDKITIGSDGYATFPVNGGSVSVWVQQ

SEQ ID NO: 37056 - protein, 480 aa, Cytophaga sp.
NGTMMQYFEWYVPNDGQQWNRLRTDAPYLSSVGITAVWTPPAYKGTSQADVGYGPYDLYDLGEFNQKGTVRTKYGTKGELKSAVNTLHSNGIQVYGDVVMNHKAGADYTENVTAVEVNPSNRYQETSGEYNIQAWTGFNFPGRGTTYSNWKWQWFHFDGTDWDQSRFLSRIFKFDGKAWDWEVSSENGNYDYLMYADYDYDHPDVVNEMKKWGVWYANEVGLDGYRLDAVKHIKFQFLKDWVDNARAATGKEMFTVGEYWQNDLGALNNYLAKVNYNQSLFDAPLHYNFYAASTGGGYYDMRNILNNTLVASNPTKAVTLVENHDTQPGQSLESTVQPWFKPLAYAFILTRSGGYPSVFYGDMYGTKGTTTREIPALKSKIEPLLKARKDYAYGTQRDYIDNPDVIGWTREGDSTKAKSGLATVITDGPGGSKRMYVGTSNAGEIWYDLTGNRTDKITIGSDGYATFPVNGGSVSVWVQQ

SEQ ID NO: 37057 - protein, 480 aa, Cytophaga sp.
NGTMMQYFEWYVPNDGQQWNRLRTDAPYLSSVGITAVWTPPAYKGTSQADVGYGPYDLYDLGEFNQKGTVRTKYGTKGELKSAVNTLHSNGIQVYGDVVMNHKAGADYTENVTAVEVNPSNRYQETSGEYNIQAWTGFNFPGRGTTYSNWKWQWFHFDGTDWDQSRSLSRIFKFDGKAWDWEVSSENGNYDYLMYADYDYDHPDVVNEMKKWGVWYANEVGLDGYRLDAVKHIKFQFLKDWVDNARAATGKEMFTVGEYWQNDLGALNNYLAKVNYNQSLFDAPLHYNFYAASTGGGYYDMRNILNNTLVASNPTKAVTLVENHDTQPGQSLESTVQPWFKPLAYAFILTRSGGYPSVFYGDMYGTKGTTTREIPALKSKIEPLLKARKDYAYGTQRDYIDNPDVIGWTREGDSTKAKSGLATVITDGPGGSKRMYVGHSNAGEIWYDLTGNRTDKITIGSDGYATFPVNGGSVSVWVQQ

SEQ ID NO: 37058 - protein, 480 aa, Cytophaga sp.
NGTMMQYFEWYVPNDGQQWNRLRTDAPYLSSVGITAVWTPPAYKGTSQADVGYGPYDLYDLGEFNQKGTVRTKYGTKGELKSAVNTLHSNGIQVYGDVVMNHKAGADYTENVTAVEVNPSNRYQETSGEYNIQAWTGFNFPGRGTTYSNWKWQWFHFDGTDWDQSRSLSRIFKFDGKAWDWEVSSENGNYDYLMYADYDYDHPDVVNEMKKWGVWYANEVGLDGYRLDAVKHIKFQFLKDWVDNARAATGKEMFTVGEYWQNDLGALNNYLAKVNYNQSLFDAPLHYNFYAASTGGGYYDMRNILNNTLVASNPTKAVTLVENHDTQPGQSLESTVQPWFKPLAYAFILTRSGGYPSVFYGDMYGTKGTTTYEIPALKSKIEPLLKARKDYAYGTQRDYIDNPDVIGWTREGDSTKAKSGLATVITDGPGGSKRMYVGTSNAGEIWYDLTGNRTDKITIGSDGYATFPVNGGSVSVWVQQ

SEQ ID NO: 37059 - protein, 480 aa, Cytophaga sp.
NGTMMQYFEWYVPNDGQQWNRLRTDAPYLSSVGITAVWTPPAYKGTSQADVGYGPYDLYDLGEFNQKGTVRTKYGTKGELKSAVNTLHSNGIQVYGDVVMNHKAGADYTENVTAVEVNPSNRYQETSGEYNIQAWTGFNFPGRGTTYSNWKWQWFHFDGTDWDQSRSLSRIFKFDGKAWDWEVSSENGNYDYLMYADYDYDHPDVVNEMKKWGVWYANEVGLDGYRLDAVKHIKFQFLKDWVDNARAATGKEMFTVGEYWQNDLGALNNYLAKVNYNQSLFDAPLHYNFYAASTGGGYYDMRNILNNTLVASNPTKAVTLVENHDTQPGQSLESTVQPWFKPLAYAFILTRSGGYPSVFYGDMYGTKGTTTREIPALKSKIEPLLKARKDYAYGTQRDYIDNPDVIGWTREGDSTKAKSGLATVITDGPGGSKRMYVGTSNAGEIWYDLTGNRTDKITIGSDGYATFPVNEGSVSVWVQQ

SEQ ID NO: 37060 - protein, 480 aa, Cytophaga sp.
NGTMMQYFEWYVPNDGQQWNRLRTDAPYLSSVGITAVWTPPAYKGTSQADVGYGPYDLYDLGEFNQKGTVRTKYGTKGELKSAVNTLHSNGIQVYGDVVMNHKAGADYTENVTAVEVNPSNRQQETSGEYNIQAWTGFNFPGRGTTYSNWKWQWFHFDGTDWDQSRSLSRIFKFDGKAWDWEVSSENGNYDYLMYADYDYDHPDVVNEMKKWGVWYANEVGLDGYRLDAVKHIKFQFLKDWVDNARAATGKEMFTVGEYWQNDLGALNNYLAKVNYNQSLFDAPLHYNFYAASTGGGYYDMRNILNNTLVASNPTKAVTLVENHDTQPGQSLESTVQPWFKPLAYAFILTRSGGYPSVFYGDMYGTKGTTTREIPALKSKIEPLLKARKDYAYGTQRDYIDNPDVIGWTREGDSTKAKSGLATVITDGPGGSKRMYVGTSNAGEIWYDLTGNRTDKITIGSDGYATFPVNGGSVSVWVQQ

SEQ ID NO: 37061 - protein, 480 aa, Cytophaga sp.
NGTMMQYFEWYVPNDGQQWNRLRTDAPYLSSVGITAVWTPPAYKGTSQADVGYGPYDLYDLGEFNQKGTVRTKYGTKGELKSAVNTLHSNGIQVYGDVVMNHKAGADYTENVTAVEVNPSNRYQETSGEYNIQAWTGFNFPGRGTTYSNWKWQWFHFDGTDWDQSRSLSRIFKFDGKAWDWEVSSENGNYDYLMYADYDYDHPDVVNEMKKWGVWYANEVGLDGYRLDAVKHIKFQFLKDWVDNARAATGKEMFTVGEYWQNDLGALNNYLAKVNYNQSLFDAPLHYNFYAASTGGGYYDMRNILNNTLVASNPTKAVTLVENHDTQPGQSLESTVQPWFKPLAYAFILTRSGGYPSVFYGDMYGTKGTTTREIPALKNKIEPLLKARKDYAYGTQRDYIDNPDVIGWTREGDSTKAKSGLATVITDGPGGSKRMYVGTSNAGEIWYDLTGNRTDKITIGSDGYATFPVNGGSVSVWVQQ

SEQ ID NO: 37062 - protein, 480 aa, Cytophaga sp.
NGTMMQYFEWYVPNDGQQWNRLRTDAPYLSSVGITAVWTPPAYKGTSQADVGYGPYDLYDLGEFNQKGTVRTKYGTKGELKSAVNTLHSNGIQVYGDVVMNHKAGADLTENVTAVEVNPSNRYQETSGEYNIQAWTGFNFPGRGTTYSNWKWQWFHFDGTDWDQSRSLSRIFKFDGKAWDWEVSSENGNYDYLMYADYDYDHPDVVNEMKKWGVWYANEVGLDGYRLDAVKHIKFQFLKDWVDNARAATGKEMFTVGEYWQNDLGALNNYLAKVNYNQSLFDAPLHYNFYAASTGGGYYDMRNILNNTLVASNPTKAVTLVENHDTQPGQSLESTVQPWFKPLAYAFILTRSGGYPSVFYGDMYGTKGTTTREIPALKSKIEPLLKARKDYAYGTQRDYIDNPDVIGWTREGDSTKAKSGLATVITDGPGGSKRMYVGTSNAGEIWYDLTGNRTDKITIGSDGYATFPVNGGSVSVWVQQ

SEQ ID NO: 37063 - protein, 480 aa, Cytophaga sp.
NGTMMQYFEWYVPNDGQQWNRLRTDAPYLSSVGITAVWTPPAYKGTSQADVGYGPYDLYDLGEFNQKGTVRTKYGTKGELKSAVNTLHSNGIQVYGDVVMNHKAGADYTENVTAVEVNPSNRYQETSGEYNIQAWTGFNFPGRGTTYSNWKWQWFHFDGTDWDQSRSLSRIFKFHGKAWDWEVSSENGNYDYLMYADYDYDHPDVVNEMKKWGVWYANEVGLDGYRLDAVKHIKFQFLKDWVDNARAATGKEMFTVGEYWQNDLGALNNYLAKVNYNQSLFDAPLHYNFYAASTGGGYYDMRNILNNTLVASNPTKAVTLVENHDTQPGQSLESTVQPWFKPLAYAFILTRSGGYPAVFYGDMYGTKGTTTYEIPALKSKIEPLLKARKDYAYGTQRDYIDNPDVIGWTREGDSTKAKSGLATVITDGPGGSKRMYVGTSNAGEIWYDLTGNRTDKITIGSDGYATFPVNGGSVSVWVQQ

SEQ ID NO: 37064 - protein, 480 aa, Cytophaga sp.
NGTMMQYFEWYVPNDGQQWNRLRTDAPYLSSVGITAVWTPPAYKGTSQADVGYGPYDLYDLGEFNQKGTVRTKYGTKGELKSAVNTLHSNGIQVYGDVVMNHKAGADYTENVTAVEVNPSNRYQETSGEYNIQAWTGFNFPGRGTTYSQWKWQWFHFDGTDWDQSRSLSRIFKFDGKAWDWEVSSENGNYDYLMYADYDYDHPDVVNEMKKWGVWYANEVGLDGYRLDAVKHIKFQFLKDWVDNARAATGKEMFTVGEYWQNDLGALNNYLAKVNYNQSLFDAPLHYNFYAASTGGGYYDMRNILNNTLVASNPTKAVTLVENHDTQPGQSLESTVQPWFKPLAYAFILTRSGGYPSVFYGDMYGTKGTTTREIPALKSKIEPLLKARKDYAYGTQRDYIDNPDVIGWTREGDSTKAKSGLATVITDGPGGSKRMYVGTSNAGEIWYDLTGNRTDKITIGSDGYATFPVNGGSVSVWVQQ

SEQ ID NO: 37065 - protein, 480 aa, Cytophaga sp.
NGTMMQYFEWYVPNDGQQWNRLRTDAPYLSSVGITAVWTPPAYKGTSQADVGYGPYDLYDLGEFNQKGTVRTKYGTKGELKSAVNTLHSNGIQVYGDVVMNHKAGADYTENVTAVEVNPSNRYQETSGEYNIQAWTGFNFPGRGTTYSNWKWQWFHFDGTDWDQSRSLSRIFKFDGKAWDWEVSSENGNYDYLMYADYDYDHPDVVNEMKKWGVWYANEVGLDGYRLDAVKHIKFQFLKDWVDNARAATGKEMFTVGEYWQNDLGALNNYLAKVNYNQSLFDAPLHYNFYAASTGGGYYDMRNILNNTLVASNPTKAVTLVENHDTQPGQSLESTVQPWFKPLAYAFILTRSGGYPAVFYGDMYGTKGTTTREIPALKSKIEPLLKARKDYAYGTQRDYIDNPDVIGWTREGDSTKAKSGLATVITDGPGGSKRMYVGTSNAGEIWYDLTGNRTDKITIGSDGYATFPVNGGSVSVWVQQ

SEQ ID NO: 37066 - protein, 480 aa, Cytophaga sp.
NGTMMQYFEWYVPNDGQQWNRLRTDAPYLSSVGITAVWTPPAYKGTSQADVGYGPYDLYDLGEFNQKGTVRTKYGTKGELKSAVNTLHSNGIQVYGDVVMNHKAGADYTENVTAVEVNPSNRYQETSGEYNIQAWTGFNFPGRGTTYSNWKWQWFHFDGTDWDQSRSLSRIFKFDGKAWDWEVSSENGNYDYLMYADYDYDHPDVVNEMKKWGVWYANEVGLDGYRLDAVKHIKFQFLKDWVDNARAATGKEMFTVGEYWQNDLGALNNYLAKVNYNQSLFDAPLHYNFYAASTGGGYYDMRNILNNTLVASNPTKAVTLVENHDTQPGQSLESTVQPWFKPLAYAFILTRSGGYPSVFYGDMYGTKGTTTREIPALKSKIEPLLKARKDYAYGTQNDYIDNPDVIGWTREGDSTKAKSGLATVITDGPGGSKRMYVGTSNAGEIWYDLTGNRTDKITIGSDGYATFPVNGGSVSVWVQQ

SEQ ID NO: 37067 - protein, 480 aa, Cytophaga sp.
NGTMMQYFEWYVPNDGQQWNRLRTDAPYLSSVGITAVWTPPAYKGTSQADVGYGPYDLYDLGEFNQKGTVRTKYGTKGELKSAVNTLHSNGIQVYGDVVMNHKAGADYTENVTAVEVNPSNRYQETSGHYNIQAWTGFNFPGRGTTYSNWKWQWFHFDGTDWDESRSLSRIFKFDGKAWDWEVSSENGNYDYLMYADYDYDHPDVVNEMKKWGVWYANEVGLDGYRLDAVKHIKFQFLKDWVDNARAATGKEMFTVGEYWQNDLGALNNYLFKVNYNQSLFDAPLHYNFYAASTGGGYYDMRNILNNTLVASNPTKAVTLVENHDTQPGQSLESTVQPWFKPLAYAFILTRSGGYPSVFYGDMYGTKGTTTREIPALKSKIEPLLKARKDYAYGTQRDYIDNPDVIGWTREGDSTKAKSGLATVITDGPGGSKRMYVGTSNAGEIWYDLTGNRTDKITIGSDGYATFPVNGGSVSVWVQQ

SEQ ID NO: 37068 - protein, 480 aa, Cytophaga sp.
NGTMMQYFEWYVPNDGQQWNRLRTDAPYLSSVGITAVWTPPAYKGTSQADVGYGPYDLYDLGEFNQKGTVRTKYGTKGELKSAVNTLHSNGIQVYGDVVMNHKAGADYTENVTAVEVNPSNRYQETSGEYNIQAWTGFNFPGRGTTYSNWKWQWFHFDGTDWDQSRSLSRIFKFDGKAWDWEVSSENGNYDYLMYADYDYDHPDVVNEMKKWGVWYANEVGLDGYRLDAVKHIKFQFLKDWVDNARAATGKEMFTVGEYWQNDLGALNNYLAKVNYNQSLFDAPLHYNFYAASTGGGYYDMRNILNNTLVASNPTKAVTLVENHDTQPGQSLESTVQPWFKPLAYAFILTRSGGYPSVFYGDMYGTKGTTTREIPALKSKIEPLLKARKDYAYGTQRDYIDNPDVIGWTREGDSEKAKSGLATVITDGPGGSKRMYVGTSNAGEIWYDLTGNRTDKITIGSDGYATFPVNGGSVSVWVQQ

SEQ ID NO: 37069 - protein, 480 aa, Cytophaga sp.
NGTMMQYFEWYVPNDGQQWNRLRTDAPYLSSVGITAVWTPPAYKGTSQADVGYGPYDLYDLGEFNQKGTVRTKYGTKGELKSAVNTLHSNGIQVYGDVVMNHKAGADYTENVTAVEVNPSNRYQETSGEYNIQAWTGFNFPGRGTTYSNWKWQWFHFDGTDWDQSRSLSRIFKFDGKAWDWEVSSENGNYDYLMYADYDYDHPDVVNEMKKWGVWYANEVGLDGYRLDAVKHIKFQFLKDWVDNARAATGKEMFTVGEYWQNDLGALNNYLAKVNYNQSLFDAPLHYNFYAASTGGGYYDMRNILNRTLVASNPTKAVTLVENHDTQPGQSLESTVQPWFKPLAYAFILTRSGGYPSVFYGDMYGTKGTTTREIPALKSKIEPLLKARKDYAYGTQRDYIDNPDVIGWTREGDSTKAKSGLATVITDGPGGSKRMYVGTSNAGEIWYDLTGNRTDKITIGSDGYATFPVNGGSVSVWVQQ

SEQ ID NO: 37070 - protein, 480 aa, Cytophaga sp.
NGTMMQYFEWYVPNDGQQWNRLRTDAPYLSSVGITAVWTPPAYKGTSQADVGYGPYDLYDLGEFNQKGTVRTKYGTKGELKSAVNTLHSNGIQVYGDVVMNHKAGADYTENVTAVEVNPSNRYQETSGEYNIQAWTGFNFPGRGTTYSNWKWQWFHFDGTDWDQSRSRSRIFKFDGKAWDWEVSSENGNYDYLMYADYDYDHPDVVNEMKKWGVWYANEVGLDGYRLDAVKHIKFQFLKDWVDNARAATGKEMFTVGEYWQNDLGALNNYLAKVNYNQSLFDAPLHYNFYAASTGGGYYDMRNILNNTLVASNPTKAVTLVENHDTQPGQSLESTVQPWFKPLAYAFILTRSGGYPSVFYGDMYGTKGTTTREIPALKSKIEPLLKARKDYAYGTQRDYIDNPDVIGWTREGDSTKAKSGLATVITDGPGGSKRMYVGTSNAGEIWYDLTGNRTDKITIGSDGYATFPVNGGSVSVWVQQ

SEQ ID NO: 37071 - protein, 480 aa, Cytophaga sp.
NGTMMQYFEWYVPNDGQQWNRLRTDAPYLSSVGITAVWTPPAYKGTSQADVGYGPYDLYDLGEFNQKGTVRTKYGTKGELKSAVNTLHSNGIQVYGDVVMNHKAGADYTENVTAVEVNPSNRYQETSGEYNIQAWTGFNFPGRGTTYSNWKWQWFHFDGTDWDQSRSLSRIFKFFGKAWDWEVSSENGNYDYLMYADYDYDHPDVVNEMKKWGVWYANEVGLDGYRLDAVKHIKFQFLKDWVDNARAATGKEMFTVGEYWQNDLGALNNYLAKVNYNQSLFDAPLHYNFYAASTGGGYYDMRNILNNTLVASNPTKAVTLVENHDTQPGQSLESTVQPWFKPLAYAFILTRSGGYPSVFYGDMYGTKGTTTREIPALKSKIEPLLKARKDYAYGTQRDYIDNPDVIGWTREGDSTKAKSGLATVITDGPGGSKRMYVGTSNAGEIWYDLTGNRTDKITIGSDGYATFPVNGGSVSVWVQQ

SEQ ID NO: 37072 - protein, 480 aa, Cytophaga sp.
NGTMMQYFEWYVPNDGQQWNRLRTDAPYLSSVGITAVWTPPAYKGTSQADVGYGPYDLYDLGEFNQKGTVRTKYGTKGELKSAVNTLHSNGIQVYGDVVMNHKAGADYTENVTAVEVNPSNRYQETSGEYNIQAWTGFNFPGRGTTYSNWKWQWFHFDGTDWDQSRSLSRIFKFDGKAWDWEVSSENGNYDYLMYADYDYDHPDVVNEMKKWGVWYANEVGLDGYRLDAVKHIKFQFLKDWVDNARAATGKEMFTVGEYWQNDLGALNNYLAKVNYNQSLFDAPLHYNFYAASTGGGYYDMRNILNNTLVASNPTKAVTLVENHDTQPGQSLESTVQPWFKPLAYAFILTRSGGYPSVFYGDMYGTKGTTTCEIPALKSKIEPLLKARKDYAYGTQRDYIDNPDVIGWTREGDSTKAKSGLATVITDGPGGSKRMYVGTSNAGEIWYDLTGNRTDKITIGSDGYATFPVNGGSVSVWVQQ

SEQ ID NO: 37073 - protein, 480 aa, Cytophaga sp.
NGTMMQYFEWYVPNDGQQWNRLRTDAPYLSSVGITAVWTPPAYKGTSQADVGYGPYDLYDLGEFNQKGTVRTKYGTKGELKSAVNTLHSNGIQVYGDVVMNHKAGADYTENVTAVEVNPSNRYQETSGEYNIQAWTGFNFPGRGTTYSNWKWQWFHFDGTDWDQSRSLSRIFKFDGKAWDWEVSSENGNYDYLMYADYDYDHPDVVNEMKKWGVWYANEVGLDGYRLDAVKHIKFQFLKDWVDNARAATGKEMFTVGEYWQNDLGALNNYLAKVNYNQSLFDAPLHYNFYAASTGGGYYDMRNILNNTLVASNPTKAVTLVENHDTQPGQSLESTVQPWFKPLAYAFILTRSGGYPSVFYGDMYGTKGTTTREIPALKSKIEPLLKARKDYAYGTQRDYIDNPDVIGWTREGDSTKAKSGLATVITDGPGGSKRMYVGTSNAGESWYDLTGNRTDKITIGSDGYATFPVNGGSVSVWVQQ

SEQ ID NO: 37074 - protein, 480 aa, Cytophaga sp.
NGTMMQYFEWYVPNDGQQWNRLRTDAPYLSSVGITAVWTPPAYKGTSQADVGYGPYDLYDLGEFNQKGTVRTKYGTKGELKSAVNTLHSNGIQVYGDVVMNHKAGADYTEYVTAVEVNPSNRYQETSGEYNIQAWTGFNFPGRGTTYSNWKWQWFHFDGTDWDQSRSLSRIFKFDGKAWDWEVSSENGNYDYLMYADYDYDHPDVVNEMKKWGVWYANEVGLDGYRLDAVKHIKFQFLKDWVDNARAATGKEMFTVGEYWQNDLGALNNYLAKVNYNQSLFDAPLHYNFYAASTGGGYYDMRNILNNTLVASNPTKAVTLVENHDTQPGQSLESTVQPWFKPLAYAFILTRSGGYPSVFYGDMYGTKGTTTREIPALKSKIEPLLKARKDYAYGTQRDYIDNPDVIGWTREGDSTKAKSGLATVITDGPGGSKRMYVGTSNAGEIWYDLTGNRTDKITIGSDGYATFPVNGGSVSVWVQQ

SEQ ID NO: 37075 - protein, 480 aa, Cytophaga sp.
NGTMMQYFEWYVPNDGQQWNRLRTDAPYLSSVGITAVWTPPAYKGTSQADVGYGPYDLYDLGEFNQKGTVRTKYGTKGELKSAVNTLHSNGIQVYGDVVMNHKAGADYTENVTAVEVNPSNRYQETSGEYNIQAWTGFNFPGRGTTYSNWKWQWFHFDGTDWDQSRSLSRIFKFDGKAWDWEVSSENGNYDYLMYADYDYDHPDVVNEMKKWGVWYANEVGLDGYRLDAVKHIKFQFLKDWVDNARAATGKEMFTVGEYWQNDLGALNNYLAKVNYNQSLFDAPLHYNFYAASTGGGYYDMRNILNNTLVASNPTKAVTLVENHDTQPGQSLESTVQPWFKPLAYAFILTRSGGYPSVFYGDMYGTKGTTTREIPALKSKIEPLLKARKDYAYGTQRDYIDNPDVIGWTREGDSTKAKSGLATVITDGPGGSKRMYVGTSNAGEIWYDLTGNRTDKITIGSDGYATFKVNGGSVSVWVQQ

SEQ ID NO: 37076 - protein, 480 aa, Cytophaga sp.
NGTMMQYFEWYVPNDGQQWNRLRTDAPYLSSVGITAVWTPPAYKGTSQADVGYGPYDLYDLGEFNQKGTVRTKYGTKGELKSAVNTLHSNGIQVYGDVVMNHKAGADYTENVTAVEVNPSNRYQETSGEYNIQAWTGFNFPGRGTTYSNWKWQWFHFDGTDWDQSRSLSRIFKFDGKAWDWEVSSENGNYDYLMYADYDYDHPDVVNEMKKWGVWYANEVGLDGYRLDAVKHIKFQFLKDWVDNARAATGKEMFTVGEYWQNDLGALNNYLAKVNYNQSLFDAPLHYNFYAASTGGGYYDMRNILNNTLVASNPTKAVTLVENHDTQPGQSLESTVQPWFKPLAYAFILTRSGGYPSVFYGDMYGTKGTTTREIPALKSKIEPLLKARKDYAYGTQRDYIDNPDVIGWTREGDSTKAKSGLATVITDGPGGSKRMYVGTSNAGEIWYDLTGNRTDKITIGSDGYATFTVNGGSVSVWVQQ

SEQ ID NO: 37077 - protein, 480 aa, Cytophaga sp.
NGTMMQYFEWYVPNDGQQWNRLRTDAPYLSSVGITAVWTPPAYKGTSQADVGYGPYDLYDLGEFNQKGTVRTKYGTKGELKSAVNTLHSNGIQVYGDVVMNHKAGADYTENVTAVEVNPSNRYQETSGEYNIQAWTGFNFPGRGTTYSTWKWQWFHFDGTDWDQSRSLSRIFKFDGKAWDWEVSSENGNYDYLMYADYDYDHPDVVNEMKKWGVWYANEVGLDGYRLDAVKHIKFQFLKDWVDNARAATGKEMFTVGEYWQNDLGALNNYLAKVNYNQSLFDAPLHYNFYAASTGGGYYDMRNILNNTLVASNPTKAVTLVENHDTQPGQSLESTVQPWFKPLAYAFILTRSGGYPSVFYGDMYGTKGTTTREIPALKSKIEPLLKARKDYAYGTQRDYIDNPDVIGWTREGDSTKAKSGLATVITDGPGGSKRMYVGTSNAGEIWYDLTGNRTDKITIGSDGYATFPVNGGSVSVWVQQ

SEQ ID NO: 37078 - protein, 480 aa, Cytophaga sp.
NGTMMQYFEWYVPNDGQQWNRLRTDAPYLSSVGITAVWTPPAYKGTSQADVGYGPYDLYDLGEFNQKGTVRTKYGTKGELKSAVNTLHSNGIQVYGDVVMNHKAGADYTENVTAVEVNPSNRYQETSGEYNIQAWTGFNFPGRGTTYSNWKWQWFHFDGTDWDQSRELSRIFKFDGKAWDWEVSSENGNYDYLMYADYDYDHPDVVNEMKKWGVWYANEVGLDGYRLDAVKHIKFQFLKDWVDNARAATGKEMFTVGEYWQNDLGALNNYLAKVNYNQSLFDAPLHYNFYAASTGGGYYDMRNILNNTLVASNPTKAVTLVENHDTQPGQSLESTVQPWFKPLAYAFILTRSGGYPSVFYGDMYGTKGTTTREIPALKSKIEPLLKARKDYAYGTQRDYIDNPDVIGWTREGDSTKAKSGLATVITDGPGGSKRMYVGTSNAGEIWYDLTGNRTDKITIGSDGYATFPVNGGSVSVWVQQ

SEQ ID NO: 37079 - protein, 480 aa, Cytophaga sp.
NGTMMQYFEWYVPNDGQQWNRLRTDAPYLSSVGITAVWTPPAYKGTSQADVGYGPYDLYDLGEFNQKGTVRTKYGTKGELKSAVNTLHSNGIQVYGDVVMNHKAGADYTENVTAVEVNPSNRYQETSGEYNIQAWTGFNFPGRGTTYSNWKWQWFHFDGTDWDQSRSLSRIFKFDGKAWDWEVSSENGNYDYLMYADYDYDHPDVVNEMKKWGVWYANEVGLDGYRLDAVKHIKFQFLKDWVDNARAATGKEMFTVGEYWQNDLGALNNYLAKVNYNQSLFDAPLHYNFYAASTGGGYYDMRNILNNTLVASNPTKAVTLVENHDTQPGQSLESTVQPWFKPLAYAFILTRSGGYPSVFYGDMYGTKGTTTREIPALKSKIEPLLKARKDYAYGTQRDYIDNPDVIGWTREGDSTKAKSGLATVITDGPGGSKRMYVGTSNAGEIWYDLTGNRTDKITIGSDGYATFPVNQGSVSVWVQQ

SEQ ID NO: 37080 - protein, 480 aa, Cytophaga sp.
NGTMMQYFEWYVPNDGQQWNRLRTDAPYLSSVGITAVWTPPAYKGTSQADVGYGPYDLYDLGEFNQKGTVRTKYGTKGELKSAVNTLHSNGIQVYGDVVMNHKAGADYTENVTAVEVNPSNRYQETSGEYNIQAWTGFNFPGRGTTYSNWKWQWFHFDGTDWDQSRSLSRIFKFDGKAWDWEVSSENGNYDYLMYADYDYDHPDVVNEMKKWGVWYANEVGLDGYRLDAVKHIKFQFLKDWVDNARAATGKEMFTVGEYWQNDLGALNNYLAKVNYNQSLFDAPLHYNFYAASTGGGYYDMRNILNNTLVASNPTKAVTLVENHDTQPGQSLESTVQPWFKPLAYAFILTRSGGYPSVFYGDMYGTKGTTTREIPALKSKIEPLLKARKDYAYGTQRDYIDQPDVIGWTREGDSTKAKSGLATVITDGPGGSKRMYVGTSNAGEIWYDLTGNRTDKITIGSDGYATFPVNGGSVSVWVQQ

SEQ ID NO: 37081 - protein, 480 aa, Cytophaga sp.
NGTMMQYFEWYVPNDGQQWNRLRTDAPYLSSVGITAVWTPPAYKGTSQADVGYGPYDLYDLGEFNQKGTVRTKYGTKGELKSAVNTLHSNGIQVYGDVVMNHKAGADYTENVTAVEVNPSNRYQETSGEYNIQAWTGFNFPGRGWTYSNWKWQWFHFDGTDWDQSRSLSRIFKFDGKAWDWEVSSENGNYDYLMYADYDYDHPDVVNEMKKWGVWYANEVGLDGYRLDAVKHIKFQFLKDWVDNARAATGKEMFTVGEYWQNDLGALNNYLAKVNYNQSLFDAPLHYNFYAASTGGGYYDMRNILNNTLVASNPTKAVTLVENHDTQPGQSLESTVQPWFKPLAYAFILTRSGGYPSVFYGDMYGTKGTTTREIPALKSKIEPLLKARKDYAYGTQRDYIDNPDVIGWTREGDSTKAKSGLATVITDGPGGSKRMYVGTSNAGEIWYDLTGNRTDKITIGSDGYATFPVNGGSVSVWVQQ

SEQ ID NO: 37082 - protein, 480 aa, Cytophaga sp.
NGTMMQYFEWYVPNDGQQWNRLRTDAPYLSSVGITAVWTPPAYKGTSQADVGYGPYDLYDLGEFNQKGTVRTKYGTKGELKSAVNTLHSNGIQVYGDVVMNHKAGADYTENVTAVEVNPSNRYQETSGEYNIQAWTGFNFPGRGTTYSNWKWQWFHFDGTDWDQSRSLSRIFKFDGKAWDWEVSSENGNYDYLMYADYDYDHPDVVNEMKKWGVWYANEVGLDGYRLDAVKHIKFQFLKDWVDNARAATGKEMFTVGEYWQNDLGALNNYLAKVNYNQSLFDAPLHYNFYAASTGGGYYDMRNILNNTLVASNPTKAVTLVENHDTQPGQSLESTVQPWFKPLAYAFILTRSGGYPSVFYGDMYGTKGTTTREIPALKSKIEPLLKARKDYAYGTQRDYIDNPDVIGWTREGDSTKAKSGLATVITDGPGGSKRMYVGTSNAGENWYDLTGNRTDKITIGSDGYATFPVNGGSVSVWVQQ

SEQ ID NO: 37083 - protein, 480 aa, Cytophaga sp.
NGTMMQYFEWYVPNDGQQWNRLRTDAPYLSSVGITAVWTPPAYKGTSQADVGYGPYDLYDLGEFNQKGTVRTKYGTKGELKSAVNTLHSNGIQVYGDVVMNHKAGADYTENVTAVEVNPSNRYQETSGEYNIQAWTGFNFPGRGTTYSNWKWQWFHFDGTDWDTSRSLSRIFKFDGKAWDWEVSSENGNYDYLMYADYDYDHPDVVNEMKKWGVWYANEVGLDGYRLDAVKHIKFQFLKDWVDNARAATGKEMFTVGEYWQNDLGALNNYLAKVNYNQSLFDAPLHYNFYAASTGGGYYDMRNILNNTLVASNPTKAVTLVENHDTQPGQSLESTVQPWFKPLAYAFILTRSGGYPSVFYGDMYGTKGTTTREIPALKSKIEPLLKARKDYAYGTQRDYIDNPDVIGWTREGDSTKAKSGLATVITDGPGGSKRMYVGTSNAGEIWYDLTGNRTDKITIGSDGYATFPVNGGSVSVWVQQ

SEQ ID NO: 37084 - protein, 480 aa, Cytophaga sp.
NGTMMQYFEWYVPNDGQQWNRLRTDAPYLSSVGITAVWTPPAYKGTSQADVGYGPYDLYDLGEFNQKGTVRTKYGTKGELKSAVNTLHSNGIQVYGDVVMNHKAGADYTENVTAVEVNPSNRYQETSGEYNIQAWTGFNFPGRGTTYSNWKWQWFHFDGTDWDQSRSLSRIFKFDGKAWDWEVSSENGNYDYLMYADYDYDHPDVVNEMKKWGVWYANEVGLDGYRLDAVKHIKFQFLKDWVDNARAATGKEMFTVGEYWQNDLGALNNYLAKVNYNQSLFDAPLHYNFYAASTFGGYYDMRNILNNTLVASNPTKAVTLVENHDTQPGQSLESTVQPWFKPLAYAFILTRSGGYPSVFYGDMYGTKGTTTREIPALKSKIEPLLKARKDYAYGTQRDYIDNPDVIGWTREGDSTKAKSGLATVITDGPGGSKRMYVGTSNAGEIWYDLTGNRTDKITIGSDGYATFPVNGGSVSVWVQQ

SEQ ID NO: 37085 - protein, 480 aa, Cytophaga sp.
NGTMMQYFEWYVPNDGQQWNRLRTDAPYLSSVGITAVWTPPAYKGTSQADVGYGPYDLYDLGEFNQKGTVRTKYGTKGELKSAVNTLHSNGIQVYGDVVMNHKAGADYTENVTAVEVNPSNRYQETSGEYNIQAWTGFNFPGRGTTYSNWKWQWFHFDGTDWDQSRSLSRIFKFDGKAWDWEVSSENGNYDYLMYADYDYDHPDVVNEMKKWGVWYANEVGLDGYRLDAVKHIKFQFLKDWVDNARAATGKEMFTVGEYWQNDLGALNNYLAKVNYNQSLFDAPLHYNFYAASTGGGYYDMRNILNNTLVASNPTKAVTLVENHDTQPGQSLESTVQPWFKPLAYAFILTRSGGYPSVFYGDMYGTKGTTTREIPALKSKIEPLLKARKDYAYGTQRDYIDNPDVIGWTREGDSTIAKSGLATVITDGPGGSKRMYVGTSNAGEIWYDLTGNRTDKITIGSDGYATFPVNGGSVSVWVQQ

SEQ ID NO: 37086 - protein, 480 aa, Cytophaga sp.
NGTMMQYFEWYVPNDGQQWNRLRTDAPYLSSVGITAVWTPPAYKGTSQADVGYGPYDLYDLGEFNQKGTVRTKYGTKGELKSAVNTLHSNGIQVYGDVVMNHKAGADYTENVTAVEVNPSNRYQETSGEYNIQAWTGFNFPGRGTTYSNWKWQWFHFDGTDWDQSRSLSRIFKFDGKAWDWEVSSENGNYDYLMYADYDYDHPDVVNEMKKWGVWYANEVGLDGYRLDAVKHIKFQFLKDWVDNARAATGKEMFTVGEYWQNDLGALNNYLAKVNYNQSLFDAPLHYNFYAASTGGGYYDMRNILNNTLVASQPTKAVTLVENHDTQPGQSLESTVQPWFKPLAYAFILTRSGGYPSVFYGDMYGTKGTTTREIPALKSKIEPLLKARKDYAYGTQRDYIDNPDVIGWTREGDSTKAKSGLATVITDGPGGSKRMYVGTSNAGEIWYDLTGNRTDKITIGSDGYATFPVNGGSVSVWVQQ

SEQ ID NO: 37087 - protein, 480 aa, Cytophaga sp.
NGTMMQYFEWYVPNDGQQWNRLRTDAPYLSSVGITAVWTPPAYKGTSQADVGYGPYDLYDLGEFNQKGTVRTKYGTKGELKSAVNTLHSNGIQVYGDVVMNHKAGADYTENVTAVEVNPSNRYQETSGEYNIQAWTGFNFPGRGTTYSNWKWQWFHFDGTDWDQSRSLSRIFKFDGKAWDWEVSSENGNYDYLMYADYDYDHPDVVNEMKKWGVWYANEVGLDGYRLDAVKHIKFQFLKDWVDNARAATGKEMFTVGEYWQNDLGALNNYLAKVNYNQSLFDAPLHYNFYAASTGGGYYDMRNILNNTLVASNPTKAVTLVENHDTQPGQSLESTVQPWFKPLAYAFILTRSGGYPSVFYGDMYGTKGTTTREIPALKSQIEPLLKARKDYAYGTQRDYIDNPDVIGWTREGDSTKAKSGLATVITDGPGGSKRMYVGTSNAGEIWYDLTGNRTDKITIGSDGYATFPVNGGSVSVWVQQ

SEQ ID NO: 37088 - protein, 480 aa, Cytophaga sp.
NGTMMQYFEWYVPNDGQQWNRLRTDAPYLSSVGITAVWTPPAYKGTSQADVGYGPYDLYDLGEFNQKGTVRTKYGTKGELKSAVNTLHSLGIQVYGDVVMNHKAGADYTENVTAVEVNPSNRYQETSGEYNIQAWTGFNFPGRGTTYSNWKWQWFHFDGTDWDQSRSLSRIFKFDGKAWDWEVSSENGNYDYLMYADYDYDHPDVVNEMKKWGVWYANEVGLDGYRLDAVKHIKFQFLKDWVDNARAATGKEMFTVGEYWQNDLGALNNYLAKVNYNQSLFDAPLHYNFYAASTGGGYYDMRNILNNTLVASNPTKAVTLVENHDTQPGQSLESTVQPWFKPLAYAFILTRSGGYPSVFYGDMYGTKGTTTREIPALKSKIEPLLKARKDYAYGTQRDYIDNPDVIGWTREGDSTKAKSGLATVITDGPGGSKRMYVGTSNAGEIWYDLTGNRTDKITIGSDGYATFPVNGGSVSVWVQQ

SEQ ID NO: 37089 - protein, 480 aa, Cytophaga sp.
NGTMMQYFEWYVPNDGQQWNRLRTDAPYLSSVGITAVWTPPAYKGTSQADVGYGPYDLYDLGEFNQKGTVRTKYGTKGELKSAVNTLHSNGIQVYGDVVMNHKAGADYTENVTAVEVNPSNRYQETSGEYNIQAWTGFNFPGRGTTYSNWKWQWFHFDGTDWDQSRSLSRIFKFDGKAWDWEVSSENGNYDYLMYADYDYDHPDVVNEMKKWGVWYANEVGLDGYRLDAVKHIKFQFLKDWVDNARAATGKEMFTVGEYWQNDLGALNNYLAKVNYNQSLFDAPLHYNFYAASTGGGYYDMRNILNNTLVASNPTKAVTLVENHDTQPGQSLESTVQPWFKPLAYAFILTRSGGYPSVFYGDMYGTKGTTTREIPALKSKIEPLLKARKDYAYGTQRDYIDNPDVIGWTREGDSTKAKSGLATVITDGPGGSKRMYVGESNAGEIWYDLTGNRTDKITIGSDGYATFPVNGGSVSVWVQQ

SEQ ID NO: 37090 - protein, 480 aa, Cytophaga sp.
NGTMMQYFEWYVPNDGQQWNRLRTDAPYLSSVGITAVWTPPAYKGTSQADVGYGPYDLYDLGEFNQKGTVRTKYGTKGELKSAVNTLHSNGIQVYGDVVMNHKAGADYTENVTAVEVNPSNRYQETSGEYNIQAWTGFNFPGRGTTYSNWKWQWFHFDGTDWDQSRSLSRIFKFDGKAWDWEVSSENGNYDYLMYADYDYDHPDVVNEMKKWGVWYANEVGLDGYRLDAVKHIKFQFLKDWVDNARYATGKEMFTVGEYWQNDLGALNNYLAKVNYNQSLFDAPLHYNFYAASTGGGYYDMRNILNNTLVASNPTKAVTLVENHDTQPGQSLESTVQPWFKPLAYAFILTRSGGYPSVFYGDMYGTKGTTTREIPALKSKIEPLLKARKDYAYGTQRDYIDNPDVIGWTREGDSTKAKSGLATVITDGPGGSKRMYVGTSNAGEIWYDLTGNRTDKITIGSDGYATFPVNGGSVSVWVQQ

SEQ ID NO: 37091 - protein, 480 aa, Cytophaga sp.
NGTMMQYFEWYVPNDGQQWNRLRTDAPYLSSVGITAVWTPPAYKGTSQADVGYGPYDLYDLGEFNQKGTVRTKYGTKGELKSAVNTLHSNGIQVYGDVVMNHKAGADYTENVTAVEVNPSNRYQETSGEYNIQAWTMFNFPGRGTTYSNWKWQWFHFDGTDWDQSRSLSRIFKFDGKAWDWEVSSENGNYDYLMYADYDYDHPDVVNEMKKWGVWYANEVGLDGYRLDAVKHIKFQFLKDWVDNARAATGKEMFTVGEYWQNDLGALNNYLAKVNYNQSLFDAPLHYNFYAASTGGGYYDMRNILNNTLVASNPTKAVTLVENHDTQPGQSLESTVQPWFKPLAYAFILTRSGGYPSVFYGDMYGTKGTTTREIPALKSKIEPLLKARKDYAYGTQRDYIDNPDVIGWTREGDSTKAKSGLATVITDGPGGSKRMYVGTSNAGEIWYDLTGNRTDKITIGSDGYATFPVNGGSVSVWVQQ

SEQ ID NO: 37092 - protein, 480 aa, Cytophaga sp.
NGTMMQYFEWYVPNDGQQWNRLRTDAPYLSSVGITAVWTPPAYKGTSQADVGYGPYDLYDLGEFNQKGTVRTKYGTKGELKSAVNTLHSNGIQVYGDVVMNHKAGADYTENVTAVEVNPKNRYQETSGEYNIQAWTGFNFPGRGTTYSNWKWQWFHFDGTDWDQSRSLSRIFKFDGKAWDWEVSSENGNYDYLMYADYDYDHPDVVNEMKKWGVWYANEVGLDGYRLDAVKHIKFQFLKDWVDNARAATGKEMFTVGEYWQNDLGALNNYLAKVNYNQSLFDAPLHYNFYAASTGGGYYDMRNILNNTLVASNPTKAVTLVENHDTQPGQSLESTVQPWFKPLAYAFILTRSGGYPSVFYGDMYGTKGTTTREIPALKSKIEPLLKARKDYAYGTQRDYIDNPDVIGWTREGDSTKAKSGLATVITDGPGGSKRMYVGTSNAGEIWYDLTGNRTDKITIGSDGYATFPVNGGSVSVWVQQ

SEQ ID NO: 37093 - protein, 480 aa, Cytophaga sp.
NGTMMQYFEWYVPNDGQQWNRLRTDAPYLSSVGITAVWTPPAYKGTSQADVGYGPYDLYDLGEFNQKGTVRTKYGTKGELKSAVNTLHSNGIQVYGDVVMNHKAGADYTENVTAVEVNPSNRYQETSGEYNIQAWTGFNFPGRGTTYSNWKWQWFHFDGTDWDQSRSLSRIFKFDGKAWDWEVSSENGNYDYLMYADYDYDHPDVVNEMKKWGVWYANEVGLDGYRLDAVKHIKFQFLKDWVDNARAATGKEMFTVGEYWQNDLGALNNYLAKVNYNQSLFDAPLHYNFYAASTGGGYYDMRNILNNTLVASNPTKAVTLVENHDTQPGQSLESTVQPWFKPLAYAFILTRSGGYPSVFYGDMYGTKGTTTREIPALKSKIEPLLKARKDYAYGTQRDYIDNPDVIGWTREGDSTPAKSGLATVITDGPGGSKRMYVGTSNAGEIWYDLTGNRTDKITIGSDGYATFPVNGGSVSVWVQQ

SEQ ID NO: 37094 - protein, 480 aa, Cytophaga sp.
NGTMMQYFEWYVPNDGQQWNRLRTDAPYLSSVGITAVWTPPAYKGTSQADVGYGPYDLYDLGEFNQKGTVRTKYGTKGELKSAVNTLHSNGIQVYGDVVMNHKAGADYTENVTAVEVNPSNRYQETSGEYNIQAWTGFNFPGRGTTYSNWKWQWFHFDGTDWDQSRSLSRIFKFDGKAWDWEVSSENGNYDYLMYADYDYDHPDVVNEMKKWGVWYANEVGLDGYRLDAVKHIKFQFLKDWVDNARAATGKEMFTVGEYWQNDLGALNNYLAKVNYNQSLFDAPLHYNFYAASTGGGKYDMRNILNNTLVASNPTKAVTLVENHDTQPGQSLESTVQPWFKPLAYAFILTRSGGYPSVFYGDMYGTKGTTTREIPALKSKIEPLLKARKDYAYGTQRDYIDNPDVIGWTREGDSTKAKSGLATVITDGPGGSKRMYVGTSNAGEIWYDLTGNRTDKITIGSDGYATFPVNGGSVSVWVQQ

SEQ ID NO: 37095 - protein, 480 aa, Cytophaga sp.
NGTMMQYFEWYVPNDGQQWNRLRTDAPYLSSVGITAVWTPPAYKGTSQADVGYGPYDLYDLGEFNQKGTVRTKYGTKGELKSAVNTLHSNGIQVYGDVVMNHKAGADYTENVTAVEVNPSNRYQETSGEYNIQAWTGFNFPGRGTTYSNWKWQWFHFDGTDWDQSRSLSRIFKFDGKAWDWEVSSENGNYDYLMYADYDYDHPDVVNEMKKWGVWYANEVGLDGYRLDAVKHIKFQFLKDWVDNARAATGKEMFTVGEYWQNDLGALNNYLAKVNYNQSLFDAPLHYNFYAASTGGGYYDMRNILNNTLVASNPTKAVTLVENHDTQPGQSLESTVQPWFKPLAYAFILTRSGGYPSVFYGDMYGTKGTTTREIPALKSKIEPLLKARKDYAYGTQRDYIDNPDVIGWTREGDSTKAKSGLATVITDGPGGSKRMYVGTSNAGEIWYDLTGNRTDKITIGSDGYATFPVNTGSVSVWVQQ

SEQ ID NO: 37096 - protein, 480 aa, Cytophaga sp.
NGTMMQYFEWYVPNDGQQWNRLRTDAPYLSSVGITAVWTPPAYKGTSQADVGYGPYDLYDLGEFNQKGTVRTKYGTKGELKSAVNTLHSNGIQVYGDVVMNHKAGADYTENVTAVEVNPSNRYQETSGEYNIQAWTGFNFPGRGTTYSNWKWQWFHFDGTDWDQSRSLSRIFKFDGKAWDWEVSSENGNYDYLMYADYDYDHPDVVNEMKKWGVWYANEVGLDGYRLDAVKHIKFQFLKDWVDNARAATGKEMFTVGEYWQNDLGALNNYLAKVNYNQSLFDAPLHYNFYAASTGGGYYDMRNILNNTLVASNPTKAVTLVENHDTQPGQSLESTVQPWFKPLAYAFILTRSGGYPSVFYGDMYGTKGTTTREIPALKSKIEPLLKARKDYAYGTQRDYIDNPDVIGWTREGDSTKAKSGLATVITDGPGGSKRMYVGTSNAGEDWYDLTGNRTDKITIGSDGYATFPVNGGSVSVWVQQ

SEQ ID NO: 37097 - protein, 480 aa, Cytophaga sp.
NGTMMQYFEWYVPNDGQQWNRLRTDAPYLSSVGITAVWTPPAYKGTSQADVGYGPYDLYDLGEFNQKGTVRTKYGTKGELKSAVNTLHSNGIQVYGDVVMNHKAGADYTENVTAVEVNPSNRYQETSGEYNIQAWTGFNFPGRGTTYSNWKWQWFHFDGTDWDQSRSLSRIFKFDGKAWDWEVSSENGNYDYLMYADYDYDHPDVVNEMKKWGVWYANEVGLDGYRLDAVKHIKFQFLKDWVDNARAATGKEMFTVGEYWQNDLGALNNYLAKVNYNQSLFDAPLHYNFYAASTGGGYYDMRNILNNTLVASNPRKAVTLVENHDTQPGQSLESTVQPWFKPLAYAFILTRSGGYPSVFYGDMYGTKGTTTREIPALKSKIEPLLKARKDYAYGTQRDYIDNPDVIGWTREGDSTKAKSGLATVITDGPGGSKRMYVGTSNAGEIWYDLTGNRTDKITIGSDGYATFPVNGGSVSVWVQQ

SEQ ID NO: 37098 - protein, 480 aa, Cytophaga sp.
NGTMMQYFEWYVPNDGQQWNRLRTDAPYLSSVGITAVWTPPAYKGTSQADVGYGPYDLYDLGEFNQKGTVRTKYGTKGELKSAVNTLHSNGIQVYGDVVMNHKAGADYTENVTAVEVNPSNRYQETSGEYNIQAWTGFNFPGRGTTYSNWKWQWFHFDGTDWDQSRSLSRIFKFDGKAWDWEVSSENGNYDYLMYADYDYDHPDVVNEMKKWGVWYANEVGLDGYRLDAVKHIKFQFLKDWVDNARAATGKEMFTVGEYWQNDLGALNNYLAKVNYNQSLFDAPLHYNFYAASTGGGYYDMRNILNNTLVASNPTKAVTLVENHDTQPGQSLESTVQPWFKPLAYAFILTRSGGYPSVFYGDMYGTKGTTTREIPALKSKIEPLLKARKDYAYGTQRDYIDNPDVIGWTREGDSTKAKSGLATVITDGPGGSKRMYVGTSNAGEIWYDLTGNRTDKITIGSDGMATFPVNGGSVSVWVQQ

SEQ ID NO: 37099 - protein, 480 aa, Cytophaga sp.
NGTMMQYFEWYVPNDGQQWNRLRTDAPYLSSVGITAVWTPPAYKGTSQADVGYGPYDLYDLGEFNQKGTVRTKYGTKGELKSAVNTLHSNGIQVYGDVVMNHKAGADYTENVTAVEVNPSNRYQETSGEYNIQAWTGFNFPGRGTTYSNWKWQWFHFDGTDWDQSRSLSRIFKFDGKAWDWEVSSENGNYDYLMYADYDYDHPDVVNEMKKWGVWYANEVGLDGYRLDAVKHIKFQFLKDWVDNARAATGKEMFTVGEYWQNDCGALNNYLAKVNYNQSLFDAPLHYNFYAASTGGGYYDMRNILNNTLVASNPTKAVTLVENHDTQPGQSLESTVQPWFKPLAYAFILTRSGGYPSVFYGDMYGTKGTTTREIPALKSKIEPLLKARKDYAYGTQRDYIDNPDVIGWTREGDSTKAKSGLATVITDGPGGSKRMYVGTSNAGEIWYDLTGNRTDKITIGSDGYATFPVNGGSVSVWVQQ

SEQ ID NO: 37100 - protein, 480 aa, Cytophaga sp.
NGTMMQYFEWYVPNDGQQWNRLRTDAPYLSSVGITAVWTPPAYKGTSQADVGYGPYDLYDLGEFNQKGTVRTKYGTKGELKSAVNTLHSNGIQVYGDVVMNHKAGADYTENVTAVEVNPSNRYQETSGEYNIQAWTGFNFPGRGTTYSNWKWQWFHFDGTDWDQSRSLSRIFKFDGKAWDWEVSSENGNYDYLMYADYDYDHPDVVNEMKKWGVWYANEVGLDGYRLDAVKHIKFQFLKDWVDNARAATGKEMFTVGEYWQNDLGCLNNYLAKVNYNQSLFDAPLHYNFYAASTGGGYYDMRNILNNTLVASNPTKAVTLVENHDTQPGQSLESTVQPWFKPLAYAFILTRSGGYPSVFYGDMYGTKGTTTREIPALKSKIEPLLKARKDYAYGTQRDYIDNPDVIGWTREGDSTKAKSGLATVITDGPGGSKRMYVGTSNAGEIWYDLTGNRTDKITIGSDGYATFPVNGGSVSVWVQQ

SEQ ID NO: 37101 - protein, 480 aa, Cytophaga sp.
NGTMMQYFEWYVPNDGQQWNRLRTDAPYLSSVGITAVWTPPAYKGTSQADVGYGPYDLYDLGEFNQKGTVRTKYGTKKELKSAVNTLHSNGIQVYGDVVMNHKAGADYTENVTAVEVNPSNRYQETSGEYNIQAWTGFNFPGRGTTYSNWKWQWFHFDGTDWDQSRSLSRIFKFDGKAWDWEVSSENGNYDYLMYADYDYDHPDVVNEMKKWGVWYANEVGLDGYRLDAVKHIKFQFLKDWVDNARAATGKEMFTVGEYWQNDLGALNNYLAKVNYNQSLFDAPLHYNFYAASTGGGYYDMRNILNNTLVASNPTKAVTLVENHDTQPGQSLESTVQPWFKPLAYAFILTRSGGYPSVFYGDMYGTKGTTTREIPALKSKIEPLLKARKDYAYGTQRDYIDNPDVIGWTREGDSTKAKSGLATVITDGPGGSKRMYVGTSNAGEIWYDLTGNRTDKITIGSDGYATFPVNGGSVSVWVQQ

SEQ ID NO: 37102 - protein, 480 aa, Cytophaga sp.
NGTMMQYFEWYVPNDGQQWNRLRTDAPYLSSVGITAVWTPPAYKGTSQADVGYGPYDLYDLGEFNQKGTVRTKYGTKGELKSAVNTLHSNGIQVYGDVVMNHKAGADYTENVTAVEVNPSNRYQETSGEYNIQAWTGFNFPGRGTTYSNWKWDWFHFDGTDWDQSRSLSRIFKFDGKAWDWEVSSENGNYDYLMYADYDYDHPDVVNEMKKWGVWYANEVGLDGYRLDAVKHIKFQFLKDWVDNARAATGKEMFTVGEYWQNDLGALNNYLAKVNYNQSLFDAPLHYNFYAASTGGGYYDMRNILNNTLVASNPTKAVTLVENHDTQPGQSLESTVQPWFKPLAYAFILTRSGGYPSVFYGDMYGTKGTTTREIPALKSKIEPLLKARKDYAYGTQRDYIDNPDVIGWTREGDSTKAKSGLATVITDGPGGSKRMYVGTSNAGEIWYDLTGNRTDKITIGSDGYATFPVNGGSVSVWVQQ

SEQ ID NO: 37103 - protein, 480 aa, Cytophaga sp.
NGTMMQYFEWYVPNDGQQWNRLRTDAPYLSSVGITAVWTPPAYKGTSQADVGYGPYDLYDLGEFNQKGTVRTKYGTKGELKSAVNTLHSNGIQVYGDVVMNHKAGADYTENVTAVEVNPSNRYQETSGEYNIQAWTGFNFPGRGTTYSNWKWQWFHFDGTDWDQSRSLSRIFKFDGKAWDWEVSSENGNYDYLMYADYDYDHPDVVVEMKKWGVWYANEVGLDGYRLDAVKHIKFQFLKDWVDNARAATGKEMFTVGEYWQNDLGALNNYLAKVNYNQSLFDAPLHYNFYAASTGGGYYDMRNILNNTLVASNPTKAVTLVENHDTQPGQSLESTVQPWFKPLAYAFILTRSGGYPSVFYGDMYGTKGTTTREIPALKSKIEPLLKARKDYAYGTQRDYIDNPDVIGWTREGDSTKAKSGLATVITDGPGGSKRMYVGTSNAGEIWYDLTGNRTDKITIGSDGYATFPVNGGSVSVWVQQ

SEQ ID NO: 37104 - protein, 480 aa, Cytophaga sp.
NGTMMQYFEWYVPNDGQQWNRLRTDAPYLSSVGITAVWTPPAYKGTSQADVGYGPYDLYDLGEFNQKGTVRTKYGTKGELKSAVNTLHSNGIQVYGDVVMNHKAGADYTENVTAVEVNPSNRYQETSGEYNIQAWTGFNFPGRGTTYSNWKWQWFHFDGTDWDQSRSLSRIFKFDGKAWDWEVSSENGNYDYLMYADYDYDHPDVVNEMKKWGVWYANEVGLDGYRLDAVKHIKFQFLKDWVDGARAATGKEMFTVGEYWQNDLGALNNYLAKVNYNQSLFDAPLHYNFYAASTGGGYYDMRNILNNTLVASNPTKAVTLVENHDTQPGQSLESTVQPWFKPLAYAFILTRSGGYPSVFYGDMYGTKGTTTREIPALKSKIEPLLKARKDYAYGTQRDYIDNPDVIGWTREGDSTKAKSGLATVITDGPGGSKRMYVGTSNAGEIWYDLTGNRTDKITIGSDGYATFPVNGGSVSVWVQQ

SEQ ID NO: 37105 - protein, 480 aa, Cytophaga sp.
NGTMMQYFEWYVPNDGQQWNRLRTDAPYLSSVGITAVWTPPAYKGTSQADVGYGPYDLYDLGEFNQKGTVRTKYGTKGELKSAVNTLHSNGIQVYGDVVMNHKAGADYTENVTAVEVNPSNRYQETSGEYNIQAWTGFNFPGRGTTYSNWKWQWFHFDGTDWDQSRSLSRIFKFDGKAWDWEVSSENGNYDYLMYADYDYDHPDVVNEMKKWGVWYANEVGLDGYRLDAVKHIKFQFLKDWVDNARAATGKEMFTVGEYWQNDLGALNNYLAKVNYNQSLFDAPLHYNFYAASTAGGYYDMRNILNNTLVASNPTKAVTLVENHDTQPGQSLESTVQPWFKPLAYAFILTRSGGYPSVFYGDMYGTKGTTTREIPALKSKIEPLLKARKDYAYGTQRDYIDNPDVIGWTREGDSTKAKSGLATVITDGPGGSKRMYVGTSNAGEIWYDLTGNRTDKITIGSDGYATFPVNGGSVSVWVQQ

SEQ ID NO: 37106 - protein, 480 aa, Cytophaga sp.
NGTMMQYFEWYVPNDGQQWNRLRTDAPYLSSVGITAVWTPPAYKGTSQADVGYGPYDLYDLGEFNQKGTVRTKYGTKGELKSAVNTLHSNGIQVYGDVVMNHKAGADYTENVTAVEVNPSNRYQETSGEYNIQAWTGFNFPGRGTTYSNWKWQWFHFDGTDWDQSRSLSRIFKFDGKAWDWEVSSENGNYDYLMYADYDYDHPDVVNEMKKWGVWYANEVGLDGYRLDAVKHIKFQFLKDWVDNARAATGKEMFTVGEYWQNDLGALNNYLAKVNYNQSLFDAPLHYNFYAASTGGGYYDMRNILNNTLVASNPTKAVTLVENHDTQPGQSLESTVQPWFKPLAYAFILTRSGGYPSVFYGDMYGTKGTTTREIPALKSKIEPLLKARKDYAYGTQRDYIDNPDVIGWTREGDSTKAKSGLATVITDGPGGSKRMYVGTSNAGEAWYDLTGNRTDKITIGSDGYATFPVNGGSVSVWVQQ

SEQ ID NO: 37107 - protein, 480 aa, Cytophaga sp.
NGTMMQYFEWYVPNDGQQWNRLRTDAPYLSSVGITAVWTPPAYKGTSQADVGYGPYDLYDLGEFNQKGTVRTKYGTKGELKSAVNTLHSNGIQVYGDVVMNHKAGADYTENVTAVEVNPSNRYQETSGEYNIQAWTGFNFPGRGTTYSNWKWQWFHFDGTDWDQSRSLSRIFKFDGKAWDWEVSSENGNYDYLMYADYDYDHPDVVNEMKKWGVWYANEVGLDGYRLDAVKHIKFQFLKDWVDNARAATGKEMFTVGEYWQNDLGALNNYLAKVNYNQSLFDAPLHYNFYAASTGGGYYDMRNILNNTLVASNPTKAVTLVENHDTQPGQSLESTVQPWFKPLAYAFILTRSGGYPSVFYGDMYGTKGTTTREIPYLKSKIEPLLKARKDYAYGTQRDYIDNPDVIGWTREGDSTKAKSGLATVITDGPGGSKRMYVGTSNAGEIWYDLTGNRTDKITIGSDGYATFPVNGGSVSVWVQQ

SEQ ID NO: 37108 - protein, 480 aa, Cytophaga sp.
NGTMMQYFEWYVPNDGQQWNRLRTDAPYLSSVGITAVWTPPAYKGTSQADVGYGPYDLYDLGEFNQKGTVRTKYGTKGELKSAVNTLHSNGIQVYGDVVMNHKAGADYTENVTAVEVNPSNRYQETSGEYNIQAWTGFNFPGRGTTYSNWKWQWFHFDGTDWDQSRSLSRIFKFDGKAWDWEVSSENGNYDYLMYADYDYDHPDVVNEMKKWGVWYANEVGLDGYRLDAVKHIKFQFLKDWVDNARAATGKEMFTVGEYWQNDLGALNNYLAKVNYNQSLFDAPLHYNFYAASTGGGYYDMRNILNNTLVASNPTKAVTLVENHDTQPGQSLESTVQPWFKPLAYAFILTRSGGYPSVFYGDMYGTKGTTTREIPALKSKIEPLLKARKDYAYGTQDDYIDNPDVIGWTREGDSTKAKSGLATVITDGPGGSKRMYVGTSNAGEIWYDLTGNRTDKITIGSDGYATFPVNGGSVSVWVQQ

SEQ ID NO: 37109 - protein, 480 aa, Cytophaga sp.
NGTMMQYFEWYVPNDGQQWNRLSTDAPYLSSVGITAVWTPPAYKGTSQADVGYGPYDLYDLGEFNQKGTVRTKYGTKGELKSAVNTLHSNGIQVYGDVVMNHKAGADYTENVTAVEVNPSNRYQETSGEYNIQAWTGFNFPGRGTTYSNWKWQWFHFDGTDWDQSRSLSRIFKFDGKAWDWEVSSENGNYDYLMYADYDYDHPDVVNEMKKWGVWYANEVGLDGYRLDAVKHIKFQFLKDWVDNARAATGKEMFTVGEYWQNDLGALNNYLAKVNYNQSLFDAPLHYNFYAASTGGGYYDMRNILNNTLVASNPTKAVTLVENHDTQPGQSLESTVQPWFKPLAYAFILTRSGGYPSVFYGDMYGTKGTTTREIPALKSKIEPLLKARKDYAYGTQRDYIDNPDVIGWTREGDSTKAKSGLATVITDGPGGSKRMYVGTSNAGEIWYDLTGNRTDKITIGSDGYATFPVNGGSVSVWVQQ

SEQ ID NO: 37110 - protein, 480 aa, Cytophaga sp.
NGTMMQYFEWYVPNDGQQWNRLRTDAPYLSSVGITAVWTPPAYKGTSQADVGYGPYDLYDLGEFNQKGTVRTKYGTKGELKSAVNTLHSNGIQVYGDVVMNHKAGADYTENVTAVEVNPSNRYQETSGEYNIQAWTGFNFPGRGTTYSNWKWQWFHFDGTDWDQSRSLSRIFKFDGKAWDWEVSSENGNYDYLMYADYDYDHPDVVNEMKKWGVWYANEVGLDGYRLDAVKHIKFQFLKDWVDNARAATGKEMFTVGEYWQNDLGALNNYLAKVNYNQSLFDAPLHYNFYAASTGGGYYDMRNILNNTLVASNPTKAVTLVENHDTQPGQSLESTVQPWFKPLAYAFILTRSGGYPSVFYGDMYGTKGTTTREIPALKSKIEPLLKARKDYAYGTQRDYIDNPDVIGWTREGDSTKAKSGLATVITDGPGGSKRMYVGTSNAGEIWYDLTGNRTDNITIGSDGYATFPVNGGSVSVWVQQ

SEQ ID NO: 37111 - protein, 480 aa, Cytophaga sp.
NGTMMQYFEWYVPNDGQQWNRLRTDAPYLSSVGITAVWTPPAYKGTSQADVGYGPYDLYDLGEFNQKGTVRTKYGTKGELKSAVNTLHSNGIQVYGDVVMNHKAGADYTENVTAVEVNPSNRYQETSGEYNIQAWTGFNFPGRGTTYSNTKWQWFHFDGTDWDQSRSLSRIFKFDGKAWDWEVSSENGNYDYLMYADYDYDHPDVVNEMKKWGVWYANEVGLDGYRLDAVKHIKFQFLKDWVDNARAATGKEMFTVGEYWQNDLGALNNYLAKVNYNQSLFDAPLHYNFYAASTGGGYYDMRNILNNTLVASNPTKAVTLVENHDTQPGQSLESTVQPWFKPLAYAFILTRSGGYPSVFYGDMYGTKGTTTREIPALKSKIEPLLKARKDYAYGTQRDYIDNPDVIGWTREGDSTKAKSGLATVITDGPGGSKRMYVGTSNAGEIWYDLTGNRTDKITIGSDGYATFPVNGGSVSVWVQQ

SEQ ID NO: 37112 - protein, 480 aa, Cytophaga sp.
NGTMMQYFEWYVPNDGQQWNRLRTDAPYLSSVGITAVWTPPAYKGTSQADVGYGPYDLYDLGEFNQKGTVRTKYGTKGELKSAVNTLHSNGIQVYGDVVMNHKAGADYTENVTAVEVNPSNRYQETSGEYNIYAWTGFNFPGRGTTYSNWKWQWFHFDGTDWDQSRSLSRIFKFDGKAWDWEVSSENGNYDYLMYADYDYDHPDVVNEMKKWGVWYANEVGLDGYRLDAVKHIKFQFLKDWVDNARAATGKEMFTVGEYWQNDLGALNNYLAKVNYNQSLFDAPLHYNFYAASTGGGYYDMRNILNNTLVASNPTKAVTLVENHDTQPGQSLESTVQPWFKPLAYAFILTRSGGYPSVFYGDMYGTKGTTTREIPALKSKIEPLLKARKDYAYGTQRDYIDNPDVIGWTREGDSTKAKSGLATVITDGPGGSKRMYVGTSNAGEIWYDLTGNRTDKITIGSDGYATFPVNGGSVSVWVQQ

SEQ ID NO: 37113 - protein, 480 aa, Cytophaga sp.
NGTMMQYFEWYVPNDGQQWNRLRTDAPYLSSVGITAVWTPPAYKGTSQADVGYGPYDLYDLGEFNQKGTVRTKYGTKGELKSAVNTLHSNGIQVYGDVVMNHKAGADYTENVTAVEVNPSNRYQETSGEYNIQAWTGFNFPGRGTTYSNWKWQWFHFDGTDWDQSRSLSRIFKFDGKAWDWEVSSENGNYDYLMYADYDYDHPDVVNEMKKWGVWYANEVGLDGYRLDAVKHIKFQFLKDWVDNARAATGKEMFTVGEYWQNDLGALNNYLAKVNYNQSLFDAPLHYNFYAASTGGGYYDMRNILNNTLVASNPTKAVTLVENHDTQPGQSLESTVQPWFKPLAYAFILTRSGGYPSVFYGDMYGTKGTTTREIPALKSKIEPLLKARKDYAYGTQRDYIDNPDVIGWTREGDSTKAKSGLATVITDGPGGSKRMYVGTSNAGEIWYDLTGNRTDKITIGSDGYATFPVNGGSVSCWVQQ

SEQ ID NO: 37114 - protein, 480 aa, Cytophaga sp.
NGTMMQYFEWYVPNDGQQWNRLRTDAPYLSSVGITAVWTPPAYKGTSQADVGYGPYDLYDLGEFNQKGTVRTKYGTKGELKSAVNTLHSNGIQVYGDVVMNHKAGADYTENVTAVEVNPSNRYQETSGEYNIQAWTGFNFPGRGTTYSNWKWQWFHFDGTDWDQSRSLSRIFKFHGKAWDWEVSSENGNYDYLMYADYDYDHPDVVNEMKKWGVWYANEVGLDGYRLDAVKHIKFQFLKDWVDNARAATGKEMFTVGEYWQNDLGALNNYLAKVNYNQSLFDAPLHYNFYAASTGGGYYDMRNILNNTLVASNPTKAVTLVENHDTQPGQSLESTVQPWFKPLAYAFILTRSGGYPSVFYGDMYGTKGTTTREIPALKSKIEPLLKARKDYAYGTQRDYIDNPDVIGWTREGDSTKAKSGLATVITDGPGGSKRMYVGTSNAGEIWYDLTGNRTDKITIGSDGYATFPVNGGSVSVWVQQ

SEQ ID NO: 37115 - protein, 480 aa, Cytophaga sp.
NGTMMQYFEWYVPNDGQQWNRLRTDAPYLSSVGITAVWTPPAYKGTSQADVGYGPYDLYDLGEFPQKGTVRTKYGTKGELKSAVNTLHSNGIQVYGDVVMNHKAGADYTENVTAVEVNPSNRYQETSGEYNIQAWTGFNFPGRGTTYSNWKWQWFHFDGTDWDQSRSLSRIFKFDGKAWDWEVSSENGNYDYLMYADYDYDHPDVVNEMKKWGVWYANEVGLDGYRLDAVKHIKFQFLKDWVDNARAATGKEMFTVGEYWQNDLGALNNYLAKVNYNQSLFDAPLHYNFYAASTGGGYYDMRNILNNTLVASNPTKAVTLVENHDTQPGQSLESTVQPWFKPLAYAFILTRSGGYPSVFYGDMYGTKGTTTREIPALKSKIEPLLKARKDYAYGTQRDYIDNPDVIGWTREGDSTKAKSGLATVITDGPGGSKRMYVGTSNAGEIWYDLTGNRTDKITIGSDGYATFPVNGGSVSVWVQQ

SEQ ID NO: 37116 - protein, 480 aa, Cytophaga sp.
NGTMMQYFEWYVPNDGQQWNRLRTDAPYLSSVGITAVWTPPAYKGTSQADVGYGPYDLYDLGEFNQKGTVRTKYGTKGELKSAVNTLHSNGIQVYGDVVMNHKAGADYTENVTAVEVNPSNRYQETSGEYNIQAWTGFNFPGRGTTYSNWKWQWFHFDGTDWDQSRSLSRIFKFDGKAWDWEVSSENGNYDYLMYADYDYDHPDVVNEMKKWGVWYANEVGLDGYRLDAVKHIKFQFLKDWVDNARAATGKEMFTVGEYWQNDQGALNNYLAKVNYNQSLFDAPLHYNFYAASTGGGYYDMRNILNNTLVASNPTKAVTLVENHDTQPGQSLESTVQPWFKPLAYAFILTRSGGYPSVFYGDMYGTKGTTTREIPALKSKIEPLLKARKDYAYGTQRDYIDNPDVIGWTREGDSTKAKSGLATVITDGPGGSKRMYVGTSNAGEIWYDLTGNRTDKITIGSDGYATFPVNGGSVSVWVQQ

SEQ ID NO: 37117 - protein, 480 aa, Cytophaga sp.
NGTMMQYFEWYVPNDGQQWNRLRTDAPYLSSVGITAVWTPPAYKGTSQADVGYGPYDLYDLGEFNQKGTVRTKYGTKGELKSAVNTLHSNGIQVYGDVVMNHKAGADYTENVTAVEVNPSNRYQETSGEYNIQAWTGFNFPGRGTTYSNWKWQWFHFDGTDWDQSRSLSRIFKFDGKAWDWEVSSENGNYDYLMYADYDYDHPDVVNEMKKWGVWYANEVGLDGYRLDAVKHIKFHFLKDWVDNARAATGKEMFTVGEYWQNDLGALNNYLAKVNYNQSLFDAPLHYNFYAASTGGGYYDMRNILNNTLVASNPTKAVTLVENHDTQPGQSLESTVQPWFKPLAYAFILTRSGGYPSVFYGDMYGTKGTTTREIPALKSKIEPLLKARKDYAYGTQRDYIDNPDVIGWTREGDSTKAKSGLATVITDGPGGSKRMYVGTSNAGEIWYDLTGNRTDKITIGSDGYATFPVNGGSVSVWVQQ

SEQ ID NO: 37118 - protein, 480 aa, Cytophaga sp.
NGTMMQYFEWYVPNDGQQWNRLRTDAPYLSSVGITAVWTPPAYKGTSQADVGYGPYDLYDLGEFNQKGTVRTKYGTKGELKSAVNTLHSHGIQVYGDVVMNHKAGADYTENVTAVEVNPSNRYQETSGEYNIQAWTGFNFPGRGTTYSNWKWQWFHFDGTDWDQSRSLSRIFKFDGKAWDWEVSSENGNYDYLMYADYDYDHPDVVNEMKKWGVWYANEVGLDGYRLDAVKHIKFQFLKDWVDNARAATGKEMFTVGEYWQNDLGALNNYLAKVNYNQSLFDAPLHYNFYAASTGGGYYDMRNILNNTLVASNPTKAVTLVENHDTQPGQSLESTVQPWFKPLAYAFILTRSGGYPSVFYGDMYGTKGTTTREIPALKSKIEPLLKARKDYAYGTQRDYIDNPDVIGWTREGDSTKAKSGLATVITDGPGGSKRMYVGTSNAGEIWYDLTGNRTDKITIGSDGYATFPVNGGSVSVWVQQ

SEQ ID NO: 37119 - protein, 480 aa, Cytophaga sp.
NGTMMQYFEWYVPNDGQQWNRLRTDAPYLSSVGITAVWTPPAYKGTSQADVGYGPYDLYDLGEFNQKGTVRTKYGTKGELKCAVNTLHSNGIQVYGDVVMNHKAGADYTENVTAVEVNPSNRYQETSGEYNIQAWTGFNFPGRGTTYSNWKWQWFHFDGTDWDQSRSLSRIFKFDGKAWDWEVSSENGNYDYLMYADYDYDHPDVVNEMKKWGVWYANEVGLDGYRLDAVKHIKFQFLKDWVDNARAATGKEMFTVGEYWQNDLGALNNYLAKVNYNQSLFDAPLHYNFYAASTGGGYYDMRNILNNTLVASNPTKAVTLVENHDTQPGQSLESTVQPWFKPLAYAFILTRSGGYPSVFYGDMYGTKGTTTREIPALKSKIEPLLKARKDYAYGTQRDYIDNPDVIGWTREGDSTKAKSGLATVITDGPGGSKRMYVGTSNAGEIWYDLTGNRTDKITIGSDGYATFPVNGGSVSVWVQQ

SEQ ID NO: 37120 - protein, 480 aa, Cytophaga sp.
NGTMMQYFEWYVPNDGQQWNRLRTDAPYLSSVGITAVWTPPAYKGTSQADVGYGPYDLYDLGEFNQKGTVRTKYGTKGELKSAVNTLHSNGIQVYGDVVMNHKAGADYTENVTAVEVNPSNRYQETSGEYNIQAWTGFNFPGRGTTYSHWKWQWFHFDGTDWDQSRSLSRIFKFDGKAWDWEVSSENGNYDYLMYADYDYDHPDVVNEMKKWGVWYANEVGLDGYRLDAVKHIKFQFLKDWVDNARAATGKEMFTVGEYWQNDLGALNNYLAKVNYNQSLFDAPLHYNFYAASTGGGYYDMRNILNNTLVASNPTKAVTLVENHDTQPGQSLESTVQPWFKPLAYAFILTRSGGYPSVFYGDMYGTKGTTTREIPALKSKIEPLLKARKDYAYGTQRDYIDNPDVIGWTREGDSTKAKSGLATVITDGPGGSKRMYVGTSNAGEIWYDLTGNRTDKITIGSDGYATFPVNGGSVSVWVQQ

SEQ ID NO: 37121 - protein, 480 aa, Cytophaga sp.
NGTMMQYFEWYVPNDGQQWNRLRHDAPYLSSVGITAVWTPPAYKGTSQADVGYGPYDLYDLGEFNQKGTVRTKYGTKGELKSAVNTLHSNGIQVYGDVVMNHKAGADYTENVTAVEVNPSNRYQETSGEYNIQAWTGFNFPGRGTTYSNWKWQWFHFDGTDWDQSRSLSRIFKFDGKAWDWEVSSENGNYDYLMYADYDYDHPDVVNEMKKWGVWYANEVGLDGYRLDAVKHIKFQFLKDWVDNARAATGKEMFTVGEYWQNDLGALNNYLAKVNYNQSLFDAPLHYNFYAASTGGGYYDMRNILNNTLVASNPTKAVTLVENHDTQPGQSLESTVQPWFKPLAYAFILTRSGGYPSVFYGDMYGTKGTTTREIPALKSKIEPLLKARKDYAYGTQRDYIDNPDVIGWTREGDSTKAKSGLATVITDGPGGSKRMYVGTSNAGEIWYDLTGNRTDKITIGSDGYATFPVNGGSVSVWVQQ

SEQ ID NO: 37122 - protein, 480 aa, Cytophaga sp.
NGTMMQYFEWYVPNDGQQWNRLRTDAPYLSSVGITAVWTPPAYKGTSQADVGYGPYDLYDLGEFNQKGTVRTKYGTKGELKSAVNTLHSNGIQVYGDVVMNHKAGADYTENVTAVEVNPSNRYQETSGEYNIQAWTGFNFPGRGTTYSNWKWQWFHFDGTDWDQSRSLSRIFKFDGKAWDWEVSSENGNYDYLMYADYDYDHPDVVNEMKKWGVWYANEVGLDGYRLDAVKHIKFQFLKDWVDNARAATGKEMFTVGEYWQNDLGALNNYLAKVNYNQSLFDAPLHYNFYAASTGGGTYDMRNILNNTLVASNPTKAVTLVENHDTQPGQSLESTVQPWFKPLAYAFILTRSGGYPSVFYGDMYGTKGTTTREIPALKSKIEPLLKARKDYAYGTQRDYIDNPDVIGWTREGDSTKAKSGLATVITDGPGGSKRMYVGTSNAGEIWYDLTGNRTDKITIGSDGYATFPVNGGSVSVWVQQ

SEQ ID NO: 37123 - protein, 480 aa, Cytophaga sp.
NGTMMQYFEWYVPNDGQQWNRLRTDAPYLSSVGITAVWTPPAYKGTSQADVGYGPYDLYDLGEFNQKGTVRTKYGTKGELKSAVNTLHSNGIQVYGDVVMNHKAGADYTENVTAVEVNPSNRHQETSGEYNIQAWTGFNFPGRGTTYSNWKWQWFHFDGTDWDQSRSLSRIFKFDGKAWDWEVSSENGNYDYLMYADYDYDHPDVVNEMKKWGVWYANEVGLDGYRLDAVKHIKFQFLKDWVDNARAATGKEMFTVGEYWQNDLGALNNYLAKVNYNQSLFDAPLHYNFYAASTGGGYYDMRNILNNTLVASNPTKAVTLVENHDTQPGQSLESTVQPWFKPLAYAFILTRSGGYPSVFYGDMYGTKGTTTREIPALKSKIEPLLKARKDYAYGTQRDYIDNPDVIGWTREGDSTKAKSGLATVITDGPGGSKRMYVGTSNAGEIWYDLTGNRTDKITIGSDGYATFPVNGGSVSVWVQQ

SEQ ID NO: 37124 - protein, 480 aa, Cytophaga sp.
NGTMMQYFEWYVPNDGQQWNRLRTDAPYLSSVGITAVWTPPAYKGTSQADVGYGPYDLYDLGEFNQKGTVRTKYGTKGELKSAVNTLHSNGIQVYGDVVMNHKAGADYTENVTAVEVNPSNRYQETSGEYNIQAWTGFNFPGRGTTYSNWKWQWFHFDGTDWDQSRSLSRIFKFDGKAWDWEVSSENGNYDYLMYADYDYDHPDVVNEMKKWGVWYANEVGLDGYRLDAVKHIKFQFLKDWVDNARAATGKEMFTVGEYWQNDLGALNNYLAKVNYNQSLFDAPLHYNFYAASTGGGYYDMRNILNNTLVASNPTKAVTLVENHDTQPGQSLESTVQPWFKPLAYAFILTRSGGYPSVFYGDMYGTKGTTTREIPALKSKIEPLLKARKDYAYGTQRDYIDNPDVIGWTREGDSTKAKSGLATVITDGPGGSKRMYVGISNAGEIWYDLTGNRTDKITIGSDGYATFPVNGGSVSVWVQQ

SEQ ID NO: 37125 - protein, 480 aa, Cytophaga sp.
NGTMMQYFEWYVPNDGQQWNRLRTDAPYLSSVGITAVWTPPAYKGTSQADVGYGPYDLYDLGEFNQKGTVRTKYGTKGELKSAVNTLHSNGIQVYGDVVMNHKAGADYTENVTAVEVNPSNRYQETSGEYNIQAWTGFNFPGRGTTYSNWKWQWFHFDGTDWDQSRSLSRIFKFDGKAWDWEVSSENGNYDYLMYADYDYDHPDVVNEMKKWGVWYANEVGLDGYRLDAVKHIKFQFLKDWVDNARAATGKEMFTVGEYWQNDLGALNNYLAKVNYNQSLFDAPLHYNFYAASTGGGYYDMRNILNNTLVASNPTKAVTLVENHDTQPGQSLESTVQPWFKPLAYAFILTRKGGYPSVFYGDMYGTKGTTTREIPALKSKIEPLLKARKDYAYGTQRDYIDNPDVIGWTREGDSTKAKSGLATVITDGPGGSKRMYVGTSNAGEIWYDLTGNRTDKITIGSDGYATFPVNGGSVSVWVQQ

SEQ ID NO: 37126 - protein, 480 aa, Cytophaga sp.
NGTMMQYFEWYVPNDGQQWNRLRTDAPYLSSVGITAVWTPPAYKGTSQADVGYGPYDLYDLGEFYQKGTVRTKYGTKGELKSAVNTLHSNGIQVYGDVVMNHKAGADYTENVTAVEVNPSNRYQETSGEYNIQAWTGFNFPGRGTTYSNWKWQWFHFDGTDWDQSRSLSRIFKFDGKAWDWEVSSENGNYDYLMYADYDYDHPDVVNEMKKWGVWYANEVGLDGYRLDAVKHIKFQFLKDWVDNARAATGKEMFTVGEYWQNDLGALNNYLAKVNYNQSLFDAPLHYNFYAASTGGGYYDMRNILNNTLVASNPTKAVTLVENHDTQPGQSLESTVQPWFKPLAYAFILTRSGGYPSVFYGDMYGTKGTTTREIPALKSKIEPLLKARKDYAYGTQRDYIDNPDVIGWTREGDSTKAKSGLATVITDGPGGSKRMYVGTSNAGEIWYDLTGNRTDKITIGSDGYATFPVNGGSVSVWVQQ

SEQ ID NO: 37127 - protein, 480 aa, Cytophaga sp.
NGTMMQYFEWYVPNDGQQWNRLRTDAPYLSSVGITAVWTPPAYKGTSQADVGYGPYDLYDLGEFNQKGTVRTKYGTKGELKSAVNTLHSNGIQVYGDVVMNHKAGADYTENVTAVEVNPSNRYQETSGEYNIQAWTGFNFPGRGTTYSNWKWQWFHFDGTDWDQSRSLSRIFKFDGKAWDWEVSSENGNYDYLMYADYDYDHPDVVNEMKKWGVWYANEVGLDGYRLDAVKHIKFQFLKDWVDNARAATGKEMFTVGEYWQNDLGALNNYLLKVNYNQSLFDAPLHYNFYAASTGGGYYDMRNILNNTLVASNPTKAVTLVENHDTQPGQSLESTVQPWFKPLAYAFILTRSGGYPSVFYGDMYGTKGTTTREIPALKSKIEPLLKARKDYAYGTQRDYIDNPDVIGWTREGDSTKAKSGLATVITDGPGGSKRMYVGTSNAGEIWYDLTGNRTDKITIGSDGYATFPVNGGSVSVWVQQ

SEQ ID NO: 37128 - protein, 480 aa, Cytophaga sp.
NGTMMQYFEWYVPNDGQQWNRLRTDAPYLSSVGITAVWTPPAYKGTSQADVGYGPYDLYDLGEFNQKGTVRTKYGTKGELKSAVNTLHSNGIQVYGDVVMNHKAGADYTENVTAVEVNPSNRYQETSGEYNIQAWTGFNFPGRGTTYSNWKWQWFHFDGTDWDQSRSLSRIFKFDGKAWDWEVSSENGNYDYLMYADYDYDHPDVVNEMKKWGVWYANEVGLDGYRLDAVKHIKFQFLKDWVDNARAATGKEMFTVGEYWQNDLGALNNYLAKVNYNQSLFDAPLHYNFYAASTGGGYYDMRNILNNTLVASSPTKAVTLVENHDTQPGQSLESTVQPWFKPLAYAFILTRSGGYPSVFYGDMYGTKGTTTREIPALKSKIEPLLKARKDYAYGTQRDYIDNPDVIGWTREGDSTKAKSGLATVITDGPGGSKRMYVGTSNAGEIWYDLTGNRTDKITIGSDGYATFPVNGGSVSVWVQQ

SEQ ID NO: 37129 - protein, 480 aa, Cytophaga sp.
NGTMMQYFEWYVPNDGQQWNRLRTDAPYLSSVGITAVWTPPAYKGTSQADVGYGPYDLYDLGEFNQKGTVRTKYGTKGELKSAVNTLHSNGIQVYGDVVMNHKAGADYTENVTAVEVNPSNRYQETSGEYNIQAWTGFNFPGRGTTYSNWKWQWFHFDGTDWDQSRSLSRIFKFDGKAWDWEVSSENGNYDYLMYADYDYDHPDVVNEMKKWGVWYANEVGLDGYRLDAVKHIKFQFLKDWVDNARAATGKEMFTVGEYWQNDLGALNNYLAKVNYNQSLFDAPLHYNFYAASTGGGYYDMRNILNNTLVASNPTKAVTLVENHDTQPGQSLESTVQPWFKPLAYAFILTRLGGYPSVFYGDMYGTKGTTTREIPALKSKIEPLLKARKDYAYGTQRDYIDNPDVIGWTREGDSTKAKSGLATVITDGPGGSKRMYVGTSNAGEIWYDLTGNRTDKITIGSDGYATFPVNGGSVSVWVQQ

SEQ ID NO: 37130 - protein, 480 aa, Cytophaga sp.
NGTMMQYFEWYVPNDGQQWNRLRTDAPYLSSVGITAVWTPPAYKGTSQADVGYGPYDLYDLGEFNQKGTVRTKYGTKGELKSAVNTLHSNGIQVYGDVVMNHKAGADYTENVTAVEVNPSNRYQETSGEYNIQAWTGFNFPGRGTTYSNWKWQWFHFDGTDWDQSRSLSRIFKFDGKAWDWEVSSENGNYDYLMYADYDYDHPDVVNEMKKWGVWYANEVGLDGYRLDAVKHIKFQFLKDWVDNARAATGKEMFTVGEYWQNDLGALNNYLAKVNYNQSLFDAPLHYNFYAASKGGGYYDMRNILNNTLVASNPTKAVTLVENHDTQPGQSLESTVQPWFKPLAYAFILTRSGGYPSVFYGDMYGTKGTTTREIPALKSKIEPLLKARKDYAYGTQRDYIDNPDVIGWTREGDSTKAKSGLATVITDGPGGSKRMYVGTSNAGEIWYDLTGNRTDKITIGSDGYATFPVNGGSVSVWVQQ

SEQ ID NO: 37131 - protein, 480 aa, Cytophaga sp.
NGTMMQYFEWYVPNDGQQWNRLRTDAPYLSSVGITAVWTPPAYKGTSQADVGYGPYDLYDLGEFNQKGTVRTKYGTKGELKSAVNTLHSNGIQVYGDVVMNHKAGADYTENVTAVEVNPSNRWQETSGEYNIQAWTGFNFPGRGTTYSNWKWQWFHFDGTDWDQSRSLSRIFKFDGKAWDWEVSSENGNYDYLMYADYDYDHPDVVNEMKKWGVWYANEVGLDGYRLDAVKHIKFQFLKDWVDNARAATGKEMFTVGEYWQNDLGALNNYLAKVNYNQSLFDAPLHYNFYAASTGGGYYDMRNILNNTLVASNPTKAVTLVENHDTQPGQSLESTVQPWFKPLAYAFILTRSGGYPSVFYGDMYGTKGTTTREIPALKSKIEPLLKARKDYAYGTQRDYIDNPDVIGWTREGDSTKAKSGLATVITDGPGGSKRMYVGTSNAGEIWYDLTGNRTDKITIGSDGYATFPVNGGSVSVWVQQ

SEQ ID NO: 37132 - protein, 480 aa, Cytophaga sp.
NGTMMQYFEWYVPNDGQQWNRLRTDAPYLSSVGITAVWTPPAYKGTSQADVGYGPYDLYDLGEFNQKGTVRTKYGTKGELKSAVNTLHSNGIQVYGDVVMNHKAGADYTENVTAVEVNPSNRYQETSGEYNIQAWTGFNFPGRGTTYSNWKWQWFHFDGTDWDQSRSLSRIFKFDGKAWDWEVSSENGNYDYLMYADYDYDHPDVVNEMKKWGVWYANEVGLDGYRLDAVKHIKFQFLKDWVDNARAATGKEMFTVGEYWQNDLGALNNYLAKVNYNQSLFDAPLHYNFYAASTGGGYYDMRNILNNTLVASNPTKAVTLVENHDTQPGQSLESTVQPWFKPLAYAFILTRDGGYPSVFYGDMYGTKGTTTREIPALKSKIEPLLKARKDYAYGTQRDYIDNPDVIGWTREGDSTKAKSGLATVITDGPGGSKRMYVGTSNAGEIWYDLTGNRTDKITIGSDGYATFPVNGGSVSVWVQQ

SEQ ID NO: 37133 - protein, 480 aa, Cytophaga sp.
NGTMMQYFEWYVPNDGQQWNRLRTDAPYLSSVGITAVWTPPAYKGTSQADVGYGPYDLYDLGEFNQKGTVRTKYGTKGELKSAVNTLHSNGIQVYGDVVMNHKAGADYTENVTAVEVNPSNRYQETSGEYNIQAWTAFNFPGRGTTYSNWKWQWFHFDGTDWDQSRSLSRIFKFDGKAWDWEVSSENGNYDYLMYADYDYDHPDVVNEMKKWGVWYANEVGLDGYRLDAVKHIKFQFLKDWVDNARAATGKEMFTVGEYWQNDLGALNNYLAKVNYNQSLFDAPLHYNFYAASTGGGYYDMRNILNNTLVASNPTKAVTLVENHDTQPGQSLESTVQPWFKPLAYAFILTRSGGYPSVFYGDMYGTKGTTTREIPALKSKIEPLLKARKDYAYGTQRDYIDNPDVIGWTREGDSTKAKSGLATVITDGPGGSKRMYVGTSNAGEIWYDLTGNRTDKITIGSDGYATFPVNGGSVSVWVQQ

SEQ ID NO: 37134 - protein, 480 aa, Cytophaga sp.
NGTMMQYFEWYVPNDGQQWNRLRTDAPYLSSVGITAVWTPPAYKGTSQADVGYGPYDLYDLGEFNQKGTVRTKYGTKGELKSAVNTLHSNGIQVYGDVVMNHKAGADYTENVTAVEVNPSNRYQETSGEYNIQAWTGFNFPGRGTTYSNWKWQWFHFDGTDWDQSRSLSRIFKFDGKAWDWEVSSENGNYDYLMYADYDYDHPDVVNEMKKWGVWYANEVGLDGYRLDAVKHIKFQFLKDWVDNARAATGKEMFTVGEYWQNDLGALNNYLAKVNYNQSLFDAPLHYNFYAASTGGGYYDMRNILVNTLVASNPTKAVTLVENHDTQPGQSLESTVQPWFKPLAYAFILTRSGGYPSVFYGDMYGTKGTTTREIPALKSKIEPLLKARKDYAYGTQRDYIDNPDVIGWTREGDSTKAKSGLATVITDGPGGSKRMYVGTSNAGEIWYDLTGNRTDKITIGSDGYATFPVNGGSVSVWVQQ

SEQ ID NO: 37135 - protein, 480 aa, Cytophaga sp.
NGTMMQYFEWYVPNDGQQWNRLRTDAPYLSSVGITAVWTPPAYKGTSQADVGYGPYDLYDLGEFNQKGTVRTKYGTKGELKSAVNTLHSNGIQVYGDVVMNHKAGADYTENVTAVEVNPSNRYQETSGEYNIQAWTGFNFPGRGTTYSNWKWQWFHFDGTDWDQSRSLSRIFKFDGKAWDWEVSSENGNYDYLMYADYDYDHPDVVNEMKKWGVWYANEVGLDGYRLDAVKHIKFQFLKDWVDNARAATGKEMFTVGEYWQNDLGALNNYLAKVNYNQSLFDAPLHYNFYAASTGGGYYDMRNILNNTLVASNPTKAVTLVENHDTQPGQSLESTVQPWFKPLAYAFILTRSGGYPSVFYGDMYGTKGTTTREIPALKSKIEPLLKARKDYAYGTQRDYIDNPDVIGWTREGDSCKAKSGLATVITDGPGGSKRMYVGTSNAGEIWYDLTGNRTDKITIGSDGYATFPVNGGSVSVWVQQ

SEQ ID NO: 37136 - protein, 480 aa, Cytophaga sp.
NGTMMQYFEWYVPNDGQQWNRLRTDAPYLSSVGITAVWTPPAYKGTSQADVGYGPYDLYDLGEFNQKGTVRTKYGTKGELKSAVNMLHSNGIQVYGDVVMNHKAGADYTENVTAVEVNPSNRYQETSGEYNIQAWTGFNFPGRGTTYSNWKWQWFHFDGTDWDQSRSLSRIFKFDGKAWDWEVSSENGNYDYLMYADYDYDHPDVVNEMKKWGVWYANEVGLDGYRLDAVKHIKFQFLKDWVDNARAATGKEMFTVGEYWQNDLGALNNYLAKVNYNQSLFDAPLHYNFYAASTGGGYYDMRNILNNTLVASNPTKAVTLVENHDTQPGQSLESTVQPWFKPLAYAFILTRSGGYPSVFYGDMYGTKGTTTREIPALKSKIEPLLKARKDYAYGTQRDYIDNPDVIGWTREGDSTKAKSGLATVITDGPGGSKRMYVGTSNAGEIWYDLTGNRTDKITIGSDGYATFPVNGGSVSVWVQQ

SEQ ID NO: 37137 - protein, 480 aa, Cytophaga sp.
NGTMMQYFEWYVPNDGQQWNRLRTDAPYLSSVGITAVWTPPAYKGTSQADVGYGPYDLYDLGEFNQKGTVRTKYGTKGELKSAVNTLHSNGIQVYGDVVMNHKAGADYTENVTAVEVNPSNRYQETSGEYNIQAWTGFNFPGRGTTYSNWKWLWFHFDGTDWDQSRSLSRIFKFDGKAWDWEVSSENGNYDYLMYADYDYDHPDVVNEMKKWGVWYANEVGLDGYRLDAVKHIKFQFLKDWVDNARAATGKEMFTVGEYWQNDLGALNNYLAKVNYNQSLFDAPLHYNFYAASTGGGYYDMRNILNNTLVASNPTKAVTLVENHDTQPGQSLESTVQPWFKPLAYAFILTRSGGYPSVFYGDMYGTKGTTTREIPALKSKIEPLLKARKDYAYGTQRDYIDNPDVIGWTREGDSTKAKSGLATVITDGPGGSKRMYVGTSNAGEIWYDLTGNRTDKITIGSDGYATFPVNGGSVSVWVQQ

SEQ ID NO: 37138 - protein, 480 aa, Cytophaga sp.
NGTMMQYFEWYVPNDGQQWNRLRTDAPYLSSVGITAVWTPPAYKGTSQADVGYGPYDLYDLGEFNQKGTVRTKYGTKGELKSAVNTLHSNGIQVYGDVVMNHKAGADYTENVTAVEVNPSNRYQETSGEYNIQAWTGFNFPGRGTTYSNWKWQWFHFDGTDWDQSRSLSRIFKFDGKAWDWEVSSENGNYDYLMYADYDYDHPDVVNEMKKWGVWYANEVGLDGYRLDAVKHIKFQFLKDWVDNARAATGKEMFTVGEYWQNDLGALNNYLAKVNYNQSLFDAPLHYNFYAASTGGGYYDMRNILNNTLVASNPCKAVTLVENHDTQPGQSLESTVQPWFKPLAYAFILTRSGGYPSVFYGDMYGTKGTTTREIPALKSKIEPLLKARKDYAYGTQRDYIDNPDVIGWTREGDSTKAKSGLATVITDGPGGSKRMYVGTSNAGEIWYDLTGNRTDKITIGSDGYATFPVNGGSVSVWVQQ

SEQ ID NO: 37139 - protein, 480 aa, Cytophaga sp.
NGTMMQYFEWYVPNDGQQWNRLRTDAPYLSSVGITAVWTPPAYKGTSQADVGYGPYDLYDLGEFNQKGTVRTKYGTKGELKSAVNTLHSNGIQVYGDVVMNHKAGADYTENVTAVEVNPSNRYQETSGEYNIQAWTGFNFPGRGTTYSNWKWQWFHFDGTDWDQSRSLSRIFKFDGKAWDWEVSSENGNYDYLMYADYDYDHPDVVNEMKKWGVWYANEVGLDGYRLDAVKHIKFQFLKDWVDNARAATGKEMFTVGEYWQNDLGALNNYLAKVNYNQSLFDAPLHYNFYAASTGGGYYDMRNILNNTLVASNPTKAVTLVENHDTQPGQSLESTVQPWFKPLAYAFILTRSGGYPSVFYGDMYGTKGTTTREIPALKSKIEPLLKARKDYAYGTQRDYIDNPDVIGWTREGDSTKAKSGLATVITDGPGGSKRMYVGDSNAGEIWYDLTGNRTDKITIGSDGYATFPVNGGSVSVWVQQ

SEQ ID NO: 37140 - protein, 480 aa, Cytophaga sp.
NGTMMQYFEWYVPNDGQQWNRLRTDAPYLSSVGITAVWTPPAYKGTSQADVGYGPYDLYDLGEFNQKGTVRTKYGTKGELKSAVNTLHSNGIQVYGDVVMNHKAGADYTENVTAVEVNPSNRYQETSGEYNIQAWTGFNFPGRGTTYSNWKWQWFHFDGTDWDQSRSLSRIFKFDGKAWDWEVSSENGNYDYLMYADYDYDHPDVVNEMKKWGVWYANEVGLDGYRLDAVKHIKFQFLKDWVDNARAATGKEMFTVGEYWQNDLGALNNYLAKVNYNQSLFDAPLHYNFYAASTGGGYYDMRNILNNTLVASNPTKAVTLVENHDTQPGQSLESTVQPWFKPLAYAFILTRSGGYPSVFYGDMYGTKGTTTREIPALKSKIEPLLKARKDYAYGTQRDYIDNPDVIGWTREGDSIKAKSGLATVITDGPGGSKRMYVGTSNAGEIWYDLTGNRTDKITIGSDGYATFPVNGGSVSVWVQQ

SEQ ID NO: 37141 - protein, 480 aa, Cytophaga sp.
NGTMMQYFEWYVPNDGQQWNRLRTDAPYLSSVGITAVWTPPAYKGTSQADVGYGPYDLYDLGEFNQKGTVRTKYGTKGELKSAVNTLHSNGIQVYGDVVMNHKAGADYTENVTAVEVNPSNRYQETSGEYNIQAWTGFNFPGRGTTYSNWKWQWFHFDGTDWDQSRSLSRIFKFDGKAWDWEVSSENGNYDYLMYADYDYDHPDVVNEMKKWGVWYANEVGLDGYRLDAVKHIKFQFLKDWVDNARAATGKEMFTVGEYWQNDLGALNNYLAKVNYNQSLFDAPLHYNFYAASTRGGYYDMRNILNNTLVASNPTKAVTLVENHDTQPGQSLESTVQPWFKPLAYAFILTRSGGYPSVFYGDMYGTKGTTTREIPALKSKIEPLLKARKDYAYGTQRDYIDNPDVIGWTREGDSTKAKSGLATVITDGPGGSKRMYVGTSNAGEIWYDLTGNRTDKITIGSDGYATFPVNGGSVSVWVQQ

SEQ ID NO: 37142 - protein, 480 aa, Cytophaga sp.
NGTMMQYFEWYVPNDGQQWNRLRTDAPYLSSVGITAVWTPPAYKGTSQADVGYGPYDLYDLGEFNQKGTVRTKYGTKGELKSAVNTLHSNGIQVYGDVVMNHKAGADYTENVTAVEVNPSNRYQETSGEYNIQAWTGFNFPGRGTTYSNWKWQWFHFDGTDWDQSRSLSRIFKFDGKAWDWEVSSENGNYDYLMYADYDYDHPDVVNEMKKWGVWYANEVGLDGYRLDAVKHIKFQFLKDWVDNARAATGKEMFTVGEYWQNDLGALNNYLAKVNYNQSLFDAPLHYNFYAASTGGGYYDMRNILNNTLVASNPTKAVTLVENHDTQPGQSLESTVQPWFKPLAYAFILTRSGGYPSVFYGDMYGTKGTTTREIPALKSKIEPLLKARKDYAYGTQRDYIDNPDVIGWTREGDSTKAKSGLATVITDGPGGSKRMYVGTSNAGEQWYDLTGNRTDKITIGSDGYATFPVNGGSVSVWVQQ

SEQ ID NO: 37143 - protein, 480 aa, Cytophaga sp.
NGTMMQYFEWYVPNDGQQWNRLRTDAPYLSSVGITAVWTPPAYKGTSQADVGYGPYDLYDLGEFNQKGTVRTKYGTKGELKSAVNTLHSNGIQVYGDVVMNHKAGADYTENVTAVEVNPSNRYQETSGEYNIQAWTGFNFPGRGTTYSNWKWQWFHFDGTDWDQSRSLSRIFKFDGKAWDWEVSSENGNYDYLMYADYDYDHPDVVNEMKKWGVWYANEVGLDGYRLDAVKHIKFQFLKDWVDNARAATGKEMFTVGEYWQNDLGALNNYLAKVNYNQSLFDAPLHYNFYAASTGGGYYDMRNILNNTLVASNPTKAVTLVENHDTQPGQSLESTVQPWFKPLAYAFILTRSGGYPSVFYGDMYGTKGTTTREIPALKSKIEPLLKARKDYAYGWQRDYIDNPDVIGWTREGDSTKAKSGLATVITDGPGGSKRMYVGTSNAGEIWYDLTGNRTDKITIGSDGYATFPVNGGSVSVWVQQ

SEQ ID NO: 37144 - protein, 480 aa, Cytophaga sp.
NGTMMQYFEWYVPNDGQQWNRLRTDAPYLSSVGITAVWTPPAYKGTSQMDVGYGPYDLYDLGEFNQKGTVRTKYGTKGELKSAVNTLHSNGIQVYGDVVMNHKAGADYTENVTAVEVNPSNRYQETSGEYNIQAWTGFNFPGRGTTYSNWKWQWFHFDGTDWDQSRSLSRIFKFDGKAWDWEVSSENGNYDYLMYADYDYDHPDVVNEMKKWGVWYANEVGLDGYRLDAVKHIKFQFLKDWVDNARAATGKEMFTVGEYWQNDLGALNNYLAKVNYNQSLFDAPLHYNFYAASTGGGYYDMRNILNNTLVASNPTKAVTLVENHDTQPGQSLESTVQPWFKPLAYAFILTRSGGYPSVFYGDMYGTKGTTTREIPALKSKIEPLLKARKDYAYGTQRDYIDNPDVIGWTREGDSTKAKSGLATVITDGPGGSKRMYVGTSNAGEIWYDLTGNRTDKITIGSDGYATFPVNGGSVSVWVQQ

SEQ ID NO: 37145 - protein, 480 aa, Cytophaga sp.
NGTMMQYFEWYVPNDGQQWNRLRTDAPYLSSVGITAVWTPPAYKGTSQADVGYGPYDLYDLGEFNQKGTVRTKYGTKGELKSAVNTLHSNGIQVYGDVVMNHKAGADYTENVTAVEVNPSNRYQETSGEYNIQAWTGFNFPGRGTTYSNWKWQWFHFDGTDWDQSRSLSRIFKFDGKAWDWEVSSENGNYDYLMYADYDYDHPDVVNEMKKWGVWYANEVGLDGYRLDAVKHIKFQFLKDWVDNARAATGKEMFTVGEYWQNDLGALNNYLAKVNYNQSLFDAPLHYNFYAASTGGGYYDMRNILNNTLVASNPTKAVTLVENHDTQPGQSLESTVQPWFKPLAYAFILTRCGGYPSVFYGDMYGTKGTTTREIPALKSKIEPLLKARKDYAYGTQRDYIDNPDVIGWTREGDSTKAKSGLATVITDGPGGSKRMYVGTSNAGEIWYDLTGNRTDKITIGSDGYATFPVNGGSVSVWVQQ

SEQ ID NO: 37146 - protein, 480 aa, Cytophaga sp.
NGTMMQYFEWYVPNDGQQWNRLRTDAPYLSSVGITAVWTPPAYKGTSQADVGYGPYDLYDLGEFNQKGTVRTKYGTKGELKSAVNTLHSNGIQVYGDVVMNHKAGADYTENVTAVEVNPSNRYQETSGEYNIQAWTGFNFPGRGTTYSNWKWQWFHFDGTDWDQSRSLSRIFKFDGKAWDWEVSSENGNYDYLMYADYDYDHPDVVNEMKKWGVWYANEVGLDGYRLDAVKHIKFQFLKDWVDNARAATGKEMFTVGEYWQNDLGALNNYLAKVNYNQSLFDAPLHYNFYAASTGGGYYDMRNILNNTLVASNPTKAVTLVENHDTQPGQSLESTVQPWFKPLAYAFILTRSGGYPSVFYGDMYGTKGTTTREIPALKSKIEPLLKARKDYAYGTQRDYIDNPDVIGWTREGDSTKAKSGLATVITDGPGGSKRMYVGTSNAGEIWYDLTGNRTDKITIGSDGYAGFPVNGGSVSVWVQQ

SEQ ID NO: 37147 - protein, 480 aa, Cytophaga sp.
NGTMMQYFEWYVPNDGQQWNRLRTDAPYLSSVGITAVWTPPAYKGTSQADVGYGPYDLYDLGEFNQKGTVRTKYGTKGELKSAVNTLHSNGIQVYGDVVMNHKAGADYTENVTAVEVNPSNRYQETSGEYNIQAWTGFNFPGRGTTYSNWKWQWFHFDGTDWDQSRRLSRIFKFDGKAWDWEVSSENGNYDYLMYADYDYDHPDVVNEMKKWGVWYANEVGLDGYRLDAVKHIKFQFLKDWVDNARAATGKEMFTVGEYWQNDLGALNNYLAKVNYNQSLFDAPLHYNFYAASTGGGYYDMRNILNNTLVASNPTKAVTLVENHDTQPGQSLESTVQPWFKPLAYAFILTRSGGYPSVFYGDMYGTKGTTTREIPALKSKIEPLLKARKDYAYGTQRDYIDNPDVIGWTREGDSTKAKSGLATVITDGPGGSKRMYVGTSNAGEIWYDLTGNRTDKITIGSDGYATFPVNGGSVSVWVQQ

SEQ ID NO: 37148 - protein, 480 aa, Cytophaga sp.
NGTMMQYFEWYVPNDGQQWNRLRTDAPYLSSVGITAVWTPPAYKGTSQADVGYGPYDLYDLGEFNQKGTVRTKYGTKGELKSAVSTLHSNGIQVYGDVVMNHKAGADYTENVTAVEVNPSNRYQETSGEYNIQAWTGFNFPGRGTTYSNWKWQWFHFDGTDWDQSRSLSRIFKFDGKAWDWEVSSENGNYDYLMYADYDYDHPDVVNEMKKWGVWYANEVGLDGYRLDAVKHIKFQFLKDWVDNARAATGKEMFTVGEYWQNDLGALNNYLAKVNYNQSLFDAPLHYNFYAASTGGGYYDMRNILNNTLVASNPTKAVTLVENHDTQPGQSLESTVQPWFKPLAYAFILTRSGGYPSVFYGDMYGTKGTTTREIPALKSKIEPLLKARKDYAYGTQRDYIDNPDVIGWTREGDSTKAKSGLATVITDGPGGSKRMYVGTSNAGEIWYDLTGNRTDKITIGSDGYATFPVNGGSVSVWVQQ

SEQ ID NO: 37149 - protein, 480 aa, Cytophaga sp.
NGTMMQYFEWYVPNDGQQWNRLRTDAPYLSSVGITAVWTPPAYKGTSQADVGYGPYDLYDLGEFNQKGTVRTKYGTKGELKSAVNTLHSNGIQVYGDVVMNHKAGADYTENVTAVEVNPSNRYQETSGEYNIQAWTGFNFPGRGTTYSNWKWQWFHFDGTDWDQSRSLSRIFKFDGKAWDWEVSSENGNYDYLMYADYDYDHPDVVNEMKKWGVWYANEVGLDGYRLDAVKHIKFQFLKDWVDNARAATGKEMFTVGEYWQNDLGALNNYLAKVNYNQSLFDAPLHYNFYAASTGGGYYDMRNILNNTLVASNPTKAVTLVENHDTQPGQSLESTVQPWFKPLAYAFILTRSGGYPSVFYGDMYGTKGTTTREIPALKSKIEPLLKARKDYAYGTQRDYIDNPDVIGWTREGDSTKAKSGLATVITDGPGGSKRMYVGTSNAGEIWYDLTGNRTDKITIGSDGYALFPVNGGSVSVWVQQ

SEQ ID NO: 37150 - protein, 480 aa, Cytophaga sp.
NGTMMQYFEWYVPNDGQQWNRLRTDAPYLSSVGITAVWTPPAYKGTSQADVGYGPYDLYDLGEFNQKGTVRTKYGTKGELKSAVNTLHSNGIQVYGDVVMNHKAGADYTENVTAVEVNPSNRYQETSGEYNIQAWTGFNFPGRGTTYSNWKWQWFHFDGTDWDQSRSLSRIFKFDGKAWDWEVSSENGNYDYLMYADYDYDHPDVVNEMKKWGVWYANEVGLDGYRLDAVKHIKFQFLKDWVDNARAATGKEMFTVGEYWQNDLGALNNYLAKVNYNQSLFDAPLHYNFYAASDGGGYYDMRNILNNTLVASNPTKAVTLVENHDTQPGQSLESTVQPWFKPLAYAFILTRSGGYPSVFYGDMYGTKGTTTREIPALKSKIEPLLKARKDYAYGTQRDYIDNPDVIGWTREGDSTKAKSGLATVITDGPGGSKRMYVGTSNAGEIWYDLTGNRTDKITIGSDGYATFPVNGGSVSVWVQQ

SEQ ID NO: 37151 - protein, 480 aa, Cytophaga sp.
NGTMMQYFEWYVPNDGQQWNRLRTDAPYLSSVGITAVWTPPAYKGTSQADVGYGPYDLYDLGEFNQKGTVRTKYGTKGELKSAVNTLHSNGIQVYGDVVMNHKAGADYTENVTAVEVNPSNRYQETSGEYNIQAWTGFNFPGRGTTYSNWKWQWFHFDGTDWDQSRSLSRIFKFDGKAWDWEVSSENGNYDYLMYADYDYDHPDVVNEMKKWGVWYANEVGLDGYRLDAVKHIKFQFLKDWVDNARAATGKEMFTVGEYWQNDLGALNNYLAKVNYNQSLFDAPLHYNFYAASTGGGYYDMRNILNNTLVASNPTKAVTLVENHDTQPGQSLESTVQPWFKPLAYAFILTRSGGYPSVFYGDMYGTKGTTTREIPALKSKIEPLLKARKDYAYGTQRDYIDNPDVIGWTREGDSTKAKSGLATVITDGPGGSKRMYVGKSNAGEIWYDLTGNRTDKITIGSDGYATFPVNGGSVSVWVQQ

SEQ ID NO: 37152 - protein, 480 aa, Cytophaga sp.
NGTMMQYFEWYVPNDGQQWNRLRTDAPYLSSVGITAVWTPPAYKGTSQADVGYGPYDLYDLGEFNQKGTVRTKYGTKGELKSAVNTLHSNGIQVYGDVVMNHKAGADYTENVTAVEVNPSNRYQETSGEYNIQAWTGFNFPGRGTTYSNWKWQWFHFDGTDWDQSRSLSRIFKFDGKAWDWEVSSENGNYDYLMYADYDYDHPDVVNEMKKWGVWYANEVQLDGYRLDAVKHIKFQFLKDWVDNARAATGKEMFTVGEYWQNDLGALNNYLAKVNYNQSLFDAPLHYNFYAASTGGGYYDMRNILNNTLVASNPTKAVTLVENHDTQPGQSLESTVQPWFKPLAYAFILTRSGGYPSVFYGDMYGTKGTTTREIPALKSKIEPLLKARKDYAYGTQRDYIDNPDVIGWTREGDSTKAKSGLATVITDGPGGSKRMYVGTSNAGEIWYDLTGNRTDKITIGSDGYATFPVNGGSVSVWVQQ

SEQ ID NO: 37153 - protein, 480 aa, Cytophaga sp.
NGTMMQYFEWYVPNDGQQWNRLRTDAPYLSSVGITAVWMPPAYKGTSQADVGYGPYDLYDLGEFNQKGTVRTKYGTKGELKSAVNTLHSNGIQVYGDVVMNHKAGADYTENVTAVEVNPSNRYQETSGEYNIQAWTGFNFPGRGTTYSNWKWQWFHFDGTDWDQSRSLSRIFKFDGKAWDWEVSSENGNYDYLMYADYDYDHPDVVNEMKKWGVWYANEVGLDGYRLDAVKHIKFQFLKDWVDNARAATGKEMFTVGEYWQNDLGALNNYLAKVNYNQSLFDAPLHYNFYAASTGGGYYDMRNILNNTLVASNPTKAVTLVENHDTQPGQSLESTVQPWFKPLAYAFILTRSGGYPSVFYGDMYGTKGTTTREIPALKSKIEPLLKARKDYAYGTQRDYIDNPDVIGWTREGDSTKAKSGLATVITDGPGGSKRMYVGTSNAGEIWYDLTGNRTDKITIGSDGYATFPVNGGSVSVWVQQ

SEQ ID NO: 37154 - protein, 480 aa, Cytophaga sp.
NGTMMQYFEWYVPNDGQQWNRLRTDAPYLSSVGITAVWTPPAYKGTSQADVGYGPYDLYDLGEFNQKGTVRTKYGTKGELKSAVNTLHSNGIQVYGDVVMNHKAGADYTENVTAVEVNPSNRYQETSGEYNIQAWTGFNFPGRGTTYSNWKWQWFHFDGTDWDQSRSLSRIFKFDGKAWDWEVSSENGNYDYLMYADYDYDHPDVVNEMKKWGVWYANEVGLDGYRLDAVKHIKFQFLKDWVDNARAATGKEMFTVGEYWQNDLGALNNYLAKVNYNQSLFDAPLHYNFYAASTGGGYYDMRNILNNTLVASNPTKAVTLVENHDTQPGQSLESTVQPWFKPLAYAFILTRSGGYPSVFYGDMYGTKGTTTREIPALKSKIEPLLKARKDYAYGTQRDYIDNPDVIGWTREGDSTKAKSGLATVITDGPGGSKRMYVGTSNAGEIWYDLTGNRTDKITIGSDGYASFPVNGGSVSVWVQQ

SEQ ID NO: 37155 - protein, 480 aa, Cytophaga sp.
NGTMMQYFEWYVPNDGQQWNRLRTDAPYLSSVGITAVWTPPAYKGTSQADVGYGPYDLYDLGEFNQKGTVRTKYGTKGELKSAVNNLHSNGIQVYGDVVMNHKAGADYTENVTAVEVNPSNRYQETSGEYNIQAWTGFNFPGRGTTYSNWKWQWFHFDGTDWDQSRSLSRIFKFDGKAWDWEVSSENGNYDYLMYADYDYDHPDVVNEMKKWGVWYANEVGLDGYRLDAVKHIKFQFLKDWVDNARAATGKEMFTVGEYWQNDLGALNNYLAKVNYNQSLFDAPLHYNFYAASTGGGYYDMRNILNNTLVASNPTKAVTLVENHDTQPGQSLESTVQPWFKPLAYAFILTRSGGYPSVFYGDMYGTKGTTTREIPALKSKIEPLLKARKDYAYGTQRDYIDNPDVIGWTREGDSTKAKSGLATVITDGPGGSKRMYVGTSNAGEIWYDLTGNRTDKITIGSDGYATFPVNGGSVSVWVQQ

SEQ ID NO: 37156 - protein, 480 aa, Cytophaga sp.
NGTMMQYFEWYVPNDGQQWNRLRTDAPYLSSVGITAVWTPPAYKGTSQADVGYGPYDLYDLGEFNQKGTVRTKYGTKGELKSAVNTLHSNGIQVYGDVVMNHKAGADYTENVTAVEVNPSNRYQETSGEYNIQAWTGFNFPGRGTTYSNWKWQWFHFDGTDWDQSRSLSRIFKFDGKAWDWEVSSENGNYDYLMYADYDYDHPDVVNEMKKWGVWYANEVGLDGYRLDAVKHIKFMFLKDWVDNARAATGKEMFTVGEYWQNDLGALNNYLAKVNYNQSLFDAPLHYNFYAASTGGGYYDMRNILNNTLVASNPTKAVTLVENHDTQPGQSLESTVQPWFKPLAYAFILTRSGGYPSVFYGDMYGTKGTTTREIPALKSKIEPLLKARKDYAYGTQRDYIDNPDVIGWTREGDSTKAKSGLATVITDGPGGSKRMYVGTSNAGEIWYDLTGNRTDKITIGSDGYATFPVNGGSVSVWVQQ

SEQ ID NO: 37157 - protein, 480 aa, Cytophaga sp.
NGTMMQYFEWYVPNDGQQWNRLRTDAPYLSSVGITAVWTPPAYKGTSQADVGYGPYDLYDLGEFDQKGTVRTKYGTKGELKSAVNTLHSNGIQVYGDVVMNHKAGADYTENVTAVEVNPSNRYQETSGEYNIQAWTGFNFPGRGTTYSNWKWQWFHFDGTDWDQSRSLSRIFKFDGKAWDWEVSSENGNYDYLMYADYDYDHPDVVNEMKKWGVWYANEVGLDGYRLDAVKHIKFQFLKDWVDNARAATGKEMFTVGEYWQNDLGALNNYLAKVNYNQSLFDAPLHYNFYAASTGGGYYDMRNILNNTLVASNPTKAVTLVENHDTQPGQSLESTVQPWFKPLAYAFILTRSGGYPSVFYGDMYGTKGTTTREIPALKSKIEPLLKARKDYAYGTQRDYIDNPDVIGWTREGDSTKAKSGLATVITDGPGGSKRMYVGTSNAGEIWYDLTGNRTDKITIGSDGYATFPVNGGSVSVWVQQ

SEQ ID NO: 37158 - protein, 480 aa, Cytophaga sp.
NGTMMQYFEWYVPNDGQQWNRLRTDAPYLSSVGITAVWTPPAYKGTSQADVGYGPYDLYDLGEFNQKGTVRTKYGTKGELKSAVNTLHSNGIQVYGDVVMNHKAGADYTEQVTAVEVNPSNRYQETSGEYNIQAWTGFNFPGRGTTYSNWKWQWFHFDGTDWDQSRSLSRIFKFDGKAWDWEVSSENGNYDYLMYADYDYDHPDVVNEMKKWGVWYANEVGLDGYRLDAVKHIKFQFLKDWVDNARAATGKEMFTVGEYWQNDLGALNNYLAKVNYNQSLFDAPLHYNFYAASTGGGYYDMRNILNNTLVASNPTKAVTLVENHDTQPGQSLESTVQPWFKPLAYAFILTRSGGYPSVFYGDMYGTKGTTTREIPALKSKIEPLLKARKDYAYGTQRDYIDNPDVIGWTREGDSTKAKSGLATVITDGPGGSKRMYVGTSNAGEIWYDLTGNRTDKITIGSDGYATFPVNGGSVSVWVQQ

SEQ ID NO: 37159 - protein, 480 aa, Cytophaga sp.
NGTMMQYFEWYVPNDGQQWNRLRTDAPYLSSVGITAVWTPPAYKGTSQADVGYGPYDLYDLGEFNQKGTVRTKYGTKGELKSAVNTLHSNGIQVYGDVVMNHKAGADYTENVTAVEVNPSNRYQETSGEYNIQAWTGFNFPGRGTTYSNWKWQWFHFDGTDWDQSRSLSRIFKFDGKAWDWEVSSENGNYDYLMYADYDYDHPDVVNEMKKWGVWYANEVGLDGYRLDAVKHIKFQFLKDWVDNARAATGKEMFTVGEYWQNDLGALNNYLAKVNYNQSLFDAPLHYNFYAASTGGGYYDMRNILNNTLVASNPTKAVTLVENHDTQPGQSLESTVQPWFKPLAYAFILTRSGGYPSVFYGDMYGTKGTTTREIPALKRKIEPLLKARKDYAYGTQRDYIDNPDVIGWTREGDSTKAKSGLATVITDGPGGSKRMYVGTSNAGEIWYDLTGNRTDKITIGSDGYATFPVNGGSVSVWVQQ

SEQ ID NO: 37160 - protein, 480 aa, Cytophaga sp.
NGTMMQYFEWYVPNDGQQWNRLRTDAPYLSSVGITAVWTPPAYKGTSQADVGYGPYDLYDLGEFNQKGTVRTKYGTKGELKSAVNTLHSNGIQVYGDVVMNHKAGADYTENVTAVEVNPSNRYQETSGEYNIQAWTGFNFPGRGTTYSNWKWQWFHFDGTDWDQSRSLSRIFKFDGKAWDWEVSSENGNYDYLMYADYDYDHPDVVNEMKKWGVWYANEVGLDGYRLDAVKHIKFQFLKDWVDNARAATGKEMFTVGEYWQNDLGALNNYLAKVNYNQSLFDAPLHYNFYAASTGGGYYDMRNILNNTLVASNPTKAVTLVENHDTQPGQSLESTVQPWFKPLAYAFILTRSGGYPSVFYGDMYGTKGTTTREIPALKSKIEPLLKARKDYAYGTQRDYIDNPDVIGWTREGDSTKAKSGLATVITDGPGGSKRMYVGTSNAGEIWYDLTGNRTDKITIGSDGYATFPVNMGSVSVWVQQ

SEQ ID NO: 37161 - protein, 480 aa, Cytophaga sp.
NGTMMQYFEWYVPNDGQQWNRLRTDAPYLSSVGITAVWTPPAYKGTSQADVGYGPYDLYDLGEFNQKGTVRTKYGTKGELKSAVNTLHSNGIQVYGDVVMNHKAGADYTENVTAVEVNPSNRYQETSGEYNIQAWTGFNFPGRGTTYSNWKWQWFHFDGTDWDQSRSLSRIFKFDGKAWDWEVSSENGNYDYLMYADYDYDHPDVVNEMKKWGVWYANEVGLDGYRLDAVKHIKFQFLKDWVDNARAATGKEMFTVGEYWQNDLGALNNYLAKVNYNQSLFDAPLHYNFYAASTGGGYYDMRNILNNTLVASNPTKAVTLVENHDTQPGQSLESTVQPWFKPLAYAFILTRSGGYPSVFYGDMYGTKGTTTREIPALKSKIEPLLKARKDYAYGTQRDYIDNPDVIGWTREGDSTKAKSGLATVITDGPGGSKRMYVGTSNAGECWYDLTGNRTDKITIGSDGYATFPVNGGSVSVWVQQ

SEQ ID NO: 37162 - protein, 480 aa, Cytophaga sp.
NGTMMQYFEWYVPNDGQQWNRLRTDAPYLSSVGITAVWTPPAYKGTSQADVGYGPYDLYDLGEFNQKGTVRTKYGTKGELKSAVNTLHSNGIQVYGDVVMNHKAGADYTENVTAVEVNPSNRYQETSGEYNIQAWTGFNFPGRGTTYSNWKWQWFHFDGTDWDQSRSLSRIFKFDGKAWDWEVSSENGNYDYLMYADYDYDHPDVVNEMKKWGVWYANEVGLDGYRLDAVKHIKFQFLKDWVDNARAATGKEMFTVGEYWQNDLGALNNYLWKVNYNQSLFDAPLHYNFYAASTGGGYYDMRNILNNTLVASNPTKAVTLVENHDTQPGQSLESTVQPWFKPLAYAFILTRSGGYPSVFYGDMYGTKGTTTREIPALKSKIEPLLKARKDYAYGTQRDYIDNPDVIGWTREGDSTKAKSGLATVITDGPGGSKRMYVGTSNAGEIWYDLTGNRTDKITIGSDGYATFPVNGGSVSVWVQQ

SEQ ID NO: 37163 - protein, 480 aa, Cytophaga sp.
NGTMMQYFEWYVPNDGQQWNRLRTDAPYLSSVGITAVWTPPAYKGTSQADVGYGPYDLYDLGEFNQKGTVRTKYGTKGELKSAVNTLHSNGIQVYGDVVMNHKAGADYTENVTAVEVNPSNRYQETSGEYNIQAWTGFNFPGRGTTYSNWKWQWFHFDGTDWDQSRSLSRIFKFDGKAWDWEVSSENGNYDYLMYADYDYDHPDVVNEMKKWGVWYANEVGLDGYRLDAVKHIKFQFLKDWVDNARAATGKEMFTVGEYWQNDLGALNNYLAKVNYNQSLFDAPLHYNFYAASTGGGYYDMRNILNNTLVASNPTKAVTLVENHDTQPGQSLESTVQPWFKPLAYAFILTRSGGYPSVFYGDMYGTKGTTTREIPALKSKIEPLLKARKDYAYGTQRDYIDNPDVIGWTREGDSTKAKSGLATVITDGPGGSKRMYVGTNNAGEIWYDLTGNRTDKITIGSDGYATFPVNGGSVSVWVQQ

SEQ ID NO: 37164 - protein, 480 aa, Cytophaga sp.
NGTMMQYFEWYVPNDGQQWNRLREDAPYLSSVGITAVWTPPAYKGTSQADVGYGPYDLYDLGEFNQKGTVRTKYGTKGELKSAVNTLHSNGIQVYGDVVMNHKAGADYTENVTAVEVNPSNRYQETSGEYNIQAWTGFNFPGRGTTYSNWKWQWFHFDGTDWDQSRSLSRIFKFDGKAWDWEVSSENGNYDYLMYADYDYDHPDVVNEMKKWGVWYANEVGLDGYRLDAVKHIKFQFLKDWVDNARAATGKEMFTVGEYWQNDLGALNNYLAKVNYNQSLFDAPLHYNFYAASTGGGYYDMRNILNNTLVASNPTKAVTLVENHDTQPGQSLESTVQPWFKPLAYAFILTRSGGYPSVFYGDMYGTKGTTTREIPALKSKIEPLLKARKDYAYGTQRDYIDNPDVIGWTREGDSTKAKSGLATVITDGPGGSKRMYVGTSNAGEIWYDLTGNRTDKITIGSDGYATFPVNGGSVSVWVQQ

SEQ ID NO: 37165 - protein, 480 aa, Cytophaga sp.
NGTMMQYFEWYVPNDGQQWNRLRTDAPYLSSVGITAVWTPPAYKGTSQADVGYGPYDLYDLGEFNQKGTVRTKYGTKGELKSAVNELHSNGIQVYGDVVMNHKAGADYTENVTAVEVNPSNRYQETSGEYNIQAWTGFNFPGRGTTYSNWKWQWFHFDGTDWDQSRSLSRIFKFDGKAWDWEVSSENGNYDYLMYADYDYDHPDVVNEMKKWGVWYANEVGLDGYRLDAVKHIKFQFLKDWVDNARAATGKEMFTVGEYWQNDLGALNNYLAKVNYNQSLFDAPLHYNFYAASTGGGYYDMRNILNNTLVASNPTKAVTLVENHDTQPGQSLESTVQPWFKPLAYAFILTRSGGYPSVFYGDMYGTKGTTTREIPALKSKIEPLLKARKDYAYGTQRDYIDNPDVIGWTREGDSTKAKSGLATVITDGPGGSKRMYVGTSNAGEIWYDLTGNRTDKITIGSDGYATFPVNGGSVSVWVQQ

SEQ ID NO: 37166 - protein, 480 aa, Cytophaga sp.
NGTMMQYFEWYVPNDGQQWNRLRTDAPYLSSVGITAVWTPPAYKGTSQGDVGYGPYDLYDLGEFNQKGTVRTKYGTKGELKSAVNTLHSNGIQVYGDVVMNHKAGADYTENVTAVEVNPSNRYQETSGEYNIQAWTGFNFPGRGTTYSNWKWQWFHFDGTDWDQSRSLSRIFKFDGKAWDWEVSSENGNYDYLMYADYDYDHPDVVNEMKKWGVWYANEVGLDGYRLDAVKHIKFQFLKDWVDNARAATGKEMFTVGEYWQNDLGALNNYLAKVNYNQSLFDAPLHYNFYAASTGGGYYDMRNILNNTLVASNPTKAVTLVENHDTQPGQSLESTVQPWFKPLAYAFILTRSGGYPSVFYGDMYGTKGTTTREIPALKSKIEPLLKARKDYAYGTQRDYIDNPDVIGWTREGDSTKAKSGLATVITDGPGGSKRMYVGTSNAGEIWYDLTGNRTDKITIGSDGYATFPVNGGSVSVWVQQ

SEQ ID NO: 37167 - protein, 480 aa, Cytophaga sp.
NGTMMQYFEWYVPNDGQQWNRLRTDAPYLSSVGITAVWTPPAYKGTSQADVGYGPYDLYDLGEFNQKGTVRTKYGTKGELKSAVNTLHSNGIQVYGDVVMNHKAGADYTENVTAVEVNPSNRYQETSGEYNIQAWTGFNFPGRGTTYSEWKWQWFHFDGTDWDQSRSLSRIFKFDGKAWDWEVSSENGNYDYLMYADYDYDHPDVVNEMKKWGVWYANEVGLDGYRLDAVKHIKFQFLKDWVDNARAATGKEMFTVGEYWQNDLGALNNYLAKVNYNQSLFDAPLHYNFYAASTGGGYYDMRNILNNTLVASNPTKAVTLVENHDTQPGQSLESTVQPWFKPLAYAFILTRSGGYPSVFYGDMYGTKGTTTREIPALKSKIEPLLKARKDYAYGTQRDYIDNPDVIGWTREGDSTKAKSGLATVITDGPGGSKRMYVGTSNAGEIWYDLTGNRTDKITIGSDGYATFPVNGGSVSVWVQQ

SEQ ID NO: 37168 - protein, 480 aa, Cytophaga sp.
NGTMMQYFEWYVPNDGQQWNRLRTDAPYLSSVGITAVWTPPAYKGTSQADVGYGPYDLYDLGEFNQKGTVRTKYGTKGELKSAVNTLHSNGIQVYGDVVMNHKAGADYTENVTAVEVNPSNRYQETSGEYNIQAWTGFNFPGRGTTYSNWKWQWFHFDGTDWDQSRSLSRIFKFDGKAWDWEVSSENGNYDYLMYADYDYDHPDVVNEMKKWGVWYANEVGLDGYRLDAVKHIKFQFLKDWVDNARAATGKEMFTVGEYWQNDLGALNNYLAKVNYNQSLFDAPLHYNFYAASTGGGYYDMRNILWNTLVASNPTKAVTLVENHDTQPGQSLESTVQPWFKPLAYAFILTRSGGYPSVFYGDMYGTKGTTTREIPALKSKIEPLLKARKDYAYGTQRDYIDNPDVIGWTREGDSTKAKSGLATVITDGPGGSKRMYVGTSNAGEIWYDLTGNRTDKITIGSDGYATFPVNGGSVSVWVQQ

SEQ ID NO: 37169 - protein, 480 aa, Cytophaga sp.
NGTMMQYFEWYVPNDGQQWNRLRTDAPYLSSVGITAVWTPPAYKGTSQADVGYGPYDLYDLGEFNQKGTVRTKYGTKGELKSAVNTLHSNGIQVYGDVVMNHKAGADYTENVTAVEVNPSNRYQETSGEYNIQAWTGFNFPGRGTTYSNWKWQWFHFDGTDWDQSRSLSRIFKFDGKAWDWEVSSENGNYDYLMYADYDYDHPDVVNEMKKWGVWYANEVGLDGYRLDAVKHIKFQFLKDWVDNARAATGKEMFTVGEYWQNDLGALNNYLAKVNYNQSLFDAPLHYNFYAASTGGGYYDMRNILNNTLVASGPTKAVTLVENHDTQPGQSLESTVQPWFKPLAYAFILTRSGGYPSVFYGDMYGTKGTTTREIPALKSKIEPLLKARKDYAYGTQRDYIDNPDVIGWTREGDSTKAKSGLATVITDGPGGSKRMYVGTSNAGEIWYDLTGNRTDKITIGSDGYATFPVNGGSVSVWVQQ

SEQ ID NO: 37170 - protein, 480 aa, Cytophaga sp.
NGTMMQYFEWYVPNDGQQWNRLRTDAPYLSSVGITAVWTPPAYKGTSQADVGYGPYDLYDLGEFNQKGTVRTKYGTKGELKSAVNTLHSNGIQVYGDVVMNHKAGADYTENVTAVEVNPSNRYQETSGEYNIQAWTGFNFPGRGTTYSNWKWQWFHFDGTDWDQSRSLSRIFKFDGKAWDWEVSSENGNYDYLMYADYDYDHPDVVNEMKKWGVWYANEVGLDGYRLDAVKHIKFQFLKDWVDNARAATGKEMFTVGEYWQNDLGALNNYLAKVNYNQSLFDAPLHYNFYAASTGGGYYDMRNILNNTLVASNPTKAVTIVENHDTQPGQSLESTVQPWFKPLAYAFILTRSGGYPSVFYGDMYGTKGTTTREIPALKSKIEPLLKARKDYAYGTQRDYIDNPDVIGWTREGDSTKAKSGLATVITDGPGGSKRMYVGTSNAGEIWYDLTGNRTDKITIGSDGYATFPVNGGSVSVWVQQ

SEQ ID NO: 37171 - protein, 480 aa, Cytophaga sp.
NGTMMQYFEWYVPNDGQQWNRLRTDAPYLSSVGITAVWTPPAYKGTSQADVGYGPYDLYDLGEFNQKGTVRTKYGTKGELKSAVNTLHSNGIQVYGDVVMNHKAGADYTENVTAVEVNPSNRYQETSGEYNIQAWTGFNFPGRGTTYSNWKWQWFHFDGTDWDQSRSLSRIFKFDGKAWDWEVSSENGNYDYLMYADYDYDHPDVVNEMKKWGVWYANEVGLDGYRLDAVKHIKFEFLKDWVDNARAATGKEMFTVGEYWQNDLGALNNYLAKVNYNQSLFDAPLHYNFYAASTGGGYYDMRNILNNTLVASNPTKAVTLVENHDTQPGQSLESTVQPWFKPLAYAFILTRSGGYPSVFYGDMYGTKGTTTREIPALKSKIEPLLKARKDYAYGTQRDYIDNPDVIGWTREGDSTKAKSGLATVITDGPGGSKRMYVGTSNAGEIWYDLTGNRTDKITIGSDGYATFPVNGGSVSVWVQQ

SEQ ID NO: 37172 - protein, 480 aa, Cytophaga sp.
NGTMMQYFEWYVPNDGQQWNRLRTDAPYLSSVGITAVWTPPAYKGTSQADVGYGPYDLYDLGEFNQKGTVRTKYGTKGELKSAVNTLHSNGIQVYGDVVMNHKAGADYTENVTAVEVNPSNRYQETSGEYNIQAWTGFNFPGRGTTYSNWKWQWFHFDGTDWDQSRSLSRIFKFDGKAWDWEVSSENGNYDYLMYADYDYDHPDVVNEMKKWGVWYANEVGLDGYRLDAVKHIKFQFLKDWVDNARAATGKEMFTVGEYWQNDLGRLNNYLAKVNYNQSLFDAPLHYNFYAASTGGGYYDMRNILNNTLVASNPTKAVTLVENHDTQPGQSLESTVQPWFKPLAYAFILTRSGGYPSVFYGDMYGTKGTTTREIPALKSKIEPLLKARKDYAYGTQRDYIDNPDVIGWTREGDSTKAKSGLATVITDGPGGSKRMYVGTSNAGEIWYDLTGNRTDKITIGSDGYATFPVNGGSVSVWVQQ

SEQ ID NO: 37173 - protein, 480 aa, Cytophaga sp.
NGTMMQYFEWYVPNDGQQWNRLRTDAPYLSSVGITAVWTPPAYKGTSQADVGYGPYDLYDLGEFNQKGTVRTKYGTKGELKSAVNTLHSNGIQVYGDVVMNHKAGADYTENVTAVEVNPSNRYQETSPEYNIQAWTGFNFPGRGTTYSNWKWQWFHFDGTDWDQSRSLSRIFKFDGKAWDWEVSSENGNYDYLMYADYDYDHPDVVNEMKKWGVWYANEVGLDGYRLDAVKHIKFQFLKDWVDNARAATGKEMFTVGEYWQNDLGALNNYLAKVNYNQSLFDAPLHYNFYAASTGGGYYDMRNILNNTLVASNPTKAVTLVENHDTQPGQSLESTVQPWFKPLAYAFILTRSGGYPSVFYGDMYGTKGTTTREIPALKSKIEPLLKARKDYAYGTQRDYIDNPDVIGWTREGDSTKAKSGLATVITDGPGGSKRMYVGTSNAGEIWYDLTGNRTDKITIGSDGYATFPVNGGSVSVWVQQ

SEQ ID NO: 37174 - protein, 480 aa, Cytophaga sp.
NGTMMQYFEWYVPNDGQQWNRLMTDAPYLSSVGITAVWTPPAYKGTSQADVGYGPYDLYDLGEFNQKGTVRTKYGTKGELKSAVNTLHSNGIQVYGDVVMNHKAGADYTENVTAVEVNPSNRYQETSGEYNIQAWTGFNFPGRGTTYSNWKWQWFHFDGTDWDQSRSLSRIFKFDGKAWDWEVSSENGNYDYLMYADYDYDHPDVVNEMKKWGVWYANEVGLDGYRLDAVKHIKFQFLKDWVDNARAATGKEMFTVGEYWQNDLGALNNYLAKVNYNQSLFDAPLHYNFYAASTGGGYYDMRNILNNTLVASNPTKAVTLVENHDTQPGQSLESTVQPWFKPLAYAFILTRSGGYPSVFYGDMYGTKGTTTREIPALKSKIEPLLKARKDYAYGTQRDYIDNPDVIGWTREGDSTKAKSGLATVITDGPGGSKRMYVGTSNAGEIWYDLTGNRTDKITIGSDGYATFPVNGGSVSVWVQQ

SEQ ID NO: 37175 - protein, 480 aa, Cytophaga sp.
NGTMMQYFEWYVPNDGQQWNRLRTDAPYLSSVGITAVWTPPAYKGTSQADVGYGPYDLYDLGEFNQKGTVRTKYGTKGELKSAVNTLHSNGIQVYGDVVMNHKAGADYTENVTAVEVNPSNRYQETSGEYNIQAWTGFNFPGRGTTYSNWKWQWFHFDGTDWDQSRSLSRIFKFDGKAWDWEVSSENGNYDYLMYADYDYDHPDVVNEMKKWGVWYANEVGLDGYRLDAVKHIKFQFLKDWVDNARAATGKEMFTVGEYWQNDLGALNNYLAKVNYNQSLFDAPLHYNFYAASTGGGYYDMRNILNNTLVASNPTKAVTLVENHDTQPGQSLESTVQPWFKPLAYAFILTRSGGYPSVFYGDMYGTKGTTTREIPALKSKIEPLLKARKDYAYGTQRDYIDNPDVIGWTREGDSTDAKSGLATVITDGPGGSKRMYVGTSNAGEIWYDLTGNRTDKITIGSDGYATFPVNGGSVSVWVQQ

SEQ ID NO: 37176 - protein, 480 aa, Cytophaga sp.
NGTMMQYFEWYVPNDGQQWNRLRTDAPYLSSVGITAVWTPPAYKGTSQADVGYGPYDLYDLGEFNQKGTVRTKYGTKGELKSAVNTLHSNGIQVYGDVVMNHKAGADYTENVTAVEVNPSNRYQETSGEYNIQAWTGFNFPGRGTTYSNWKWQWFHFDGTDWDQSRSLSRIFKFDGKAWDWEVSSENGNYDYLMYADYDYDHPDVVNEMKKWGVWYANEVGLDGYRLDAVKHIKFQFLKDWVDNARAATGKEMFTVGEYWQNDLGALNNYLAKVNYNQSLFDAPLHYNFYAASTGGGYYDMRNILNNTLVASNPTKAVTLVENHDTQPGQSLESTVQPWFKPLAYAFILTRSGGYPSVFYGDMYGTKGTTTGEIPALKSKIEPLLKARKDYAYGTQRDYIDNPDVIGWTREGDSTKAKSGLATVITDGPGGSKRMYVGTSNAGEIWYDLTGNRTDKITIGSDGYATFPVNGGSVSVWVQQ

SEQ ID NO: 37177 - protein, 480 aa, Cytophaga sp.
NGTMMQYFEWYVPNDGQQWNRLRTDAPYLSSVGITAVWTPPAYKGTSQADVGYGPYDLYDLGEFNQKGTVRTKYGTKGELKSAVNTLHSNGIQVYGDVVMNHKAGADYTENVTAVEVNPSNRYQETSGEYNIQAWTGFNFPGRGTTYSNWKWQWFHFDGTDWDQSRSLSRIFKFDGKAWDWEVSSENGNYDYLMYADYDYDHPDVVNEMKKWGVWYANEVGLDGYRLDAVKHIKFQFLKDWVDNARAATGKEMFTVGEYWQNDLGALNNYLAKVNYNQSLFDAPLHYNFYAASTGGGYYDMRNILNNTLVASNPTKAVTLVENHDTQPGQSLESTVQPWFKPLAYAFILTRSGGYPSVFYGDMYGTKGTTTREIPALKVKIEPLLKARKDYAYGTQRDYIDNPDVIGWTREGDSTKAKSGLATVITDGPGGSKRMYVGTSNAGEIWYDLTGNRTDKITIGSDGYATFPVNGGSVSVWVQQ

SEQ ID NO: 37178 - protein, 480 aa, Cytophaga sp.
NGTMMQYFEWYVPNDGQQWNRLRTDAPYLSSVGITAVWTPPAYKGTSQADVGYGPYDLYDLGEFNQKGTVRTKYGTKGELKSAVNDLHSNGIQVYGDVVMNHKAGADYTENVTAVEVNPSNRYQETSGEYNIQAWTGFNFPGRGTTYSNWKWQWFHFDGTDWDQSRSLSRIFKFDGKAWDWEVSSENGNYDYLMYADYDYDHPDVVNEMKKWGVWYANEVGLDGYRLDAVKHIKFQFLKDWVDNARAATGKEMFTVGEYWQNDLGALNNYLAKVNYNQSLFDAPLHYNFYAASTGGGYYDMRNILNNTLVASNPTKAVTLVENHDTQPGQSLESTVQPWFKPLAYAFILTRSGGYPSVFYGDMYGTKGTTTREIPALKSKIEPLLKARKDYAYGTQRDYIDNPDVIGWTREGDSTKAKSGLATVITDGPGGSKRMYVGTSNAGEIWYDLTGNRTDKITIGSDGYATFPVNGGSVSVWVQQ

SEQ ID NO: 37179 - protein, 480 aa, Cytophaga sp.
NGTMMQYFEWYVPNDGQQWNRLRTDAPYLSSVGITAVWTPPAYKGTSQADVGYGPYDLYDLGEFNQKGTVRTKYGTKGELKSAVNTLHSNGIQVYGDVVMNHKAGADYTENVTAVEVNPSNRYQETSGEYNIQAWTGFNFPGRGTTYSNWKWQWFHFDGTDWDQSRSLSRIFKFDGKAWDWEVSSENGNYDYLMYADYDYDHPDVVNEMKKWGVWYANEVGLDGYRLDAVKHIKFQFLKDWVDNARAATGKEMFTVGEYWQNDLGALNNYLAKVNYNQSLFDAPLHYNFYAASTGGGYYDMRNILNNTLVASNPTKAVTLVENHDTQPGQSLESTVQPWFKPLAYAFILTRSGGYPSVFYGDMYGTKGTTTREIPALKSKIEPLLKARKDYAYGTQRDYIDNPDVIGWTREGDSTKAKSGLATVITDGPGGSKRMYVGTSNAGEIWYDLTGNRTDKIHIGSDGYATFPVNGGSVSVWVQQ

SEQ ID NO: 37180 - protein, 480 aa, Cytophaga sp.
NGTVMQYFEWYVPNDGQQWNRLRTDAPYLSSVGITAVWTPPAYKGTSQADVGYGPYDLYDLGEFNQKGTVRTKYGTKGELKSAVNTLHSNGIQVYGDVVMNHKAGADYTENVTAVEVNPSNRYQETSGEYNIQAWTGFNFPGRGTTYSNWKWQWFHFDGTDWDQSRSLSRIFKFDGKAWDWEVSSENGNYDYLMYADYDYDHPDVVNEMKKWGVWYANEVGLDGYRLDAVKHIKFQFLKDWVDNARAATGKEMFTVGEYWQNDLGALNNYLAKVNYNQSLFDAPLHYNFYAASTGGGYYDMRNILNNTLVASNPTKAVTLVENHDTQPGQSLESTVQPWFKPLAYAFILTRSGGYPSVFYGDMYGTKGTTTREIPALKSKIEPLLKARKDYAYGTQRDYIDNPDVIGWTREGDSTKAKSGLATVITDGPGGSKRMYVGTSNAGEIWYDLTGNRTDKITIGSDGYATFPVNGGSVSVWVQQ

SEQ ID NO: 37181 - protein, 480 aa, Cytophaga sp.
NGTMMQYFEWYVPNDGQQWNRLRTDAPYLSSVGITAVWTPPAYKGTSQADVGYGPYDLYDLGEFNQKGTVRTKYGTKGELKSAVNTLHSNGIQVYGDVVMNHKAGADYTENVTAVEVNPSNRYQETSGEYNIQAWTGFNFPGRGTTYSNWKWQWFHFDGTDWDQSRSLSRIFKFDGKAWDWEVSSENGNYDYLMYADYDYDHPDVVNEMKKWGVWYANEVGLDGYRLDAVKHIKFQFLKDWVDNARAATGKEMFTVGEYWQNDLGALNNYLAKVNYNQSLFDAPLHYNFYAASTGGGYYDMRNILNDTLVASNPTKAVTLVENHDTQPGQSLESTVQPWFKPLAYAFILTRSGGYPSVFYGDMYGTKGTTTREIPALKSKIEPLLKARKDYAYGTQRDYIDNPDVIGWTREGDSTKAKSGLATVITDGPGGSKRMYVGTSNAGEIWYDLTGNRTDKITIGSDGYATFPVNGGSVSVWVQQ

SEQ ID NO: 37182 - protein, 480 aa, Cytophaga sp.
NGTMMQYFEWYVPNDGQQWNRLRTDAPYLSSVGITAVWTPPAYKGTSQADVGYGPYDLYDLGEFNQKGTVRTKYGTKGELKSAVNTLHSNGIQVYGDVVMNHKAGADYTETVTAVEVNPSNRYQETSGEYNIQAWTGFNFPGRGTTYSNWKWQWFHFDGTDWDQSRSLSRIFKFDGKAWDWEVSSENGNYDYLMYADYDYDHPDVVNEMKKWGVWYANEVGLDGYRLDAVKHIKFQFLKDWVDNARAATGKEMFTVGEYWQNDLGALNNYLAKVNYNQSLFDAPLHYNFYAASTGGGYYDMRNILNNTLVASNPTKAVTLVENHDTQPGQSLESTVQPWFKPLAYAFILTRSGGYPSVFYGDMYGTKGTTTREIPALKSKIEPLLKARKDYAYGTQRDYIDNPDVIGWTREGDSTKAKSGLATVITDGPGGSKRMYVGTSNAGEIWYDLTGNRTDKITIGSDGYATFPVNGGSVSVWVQQ

SEQ ID NO: 37183 - protein, 480 aa, Cytophaga sp.
NGTMMQYFEWYVPNDGQQWNRLRTDAPYLSSVGITAVWTPPAYKGTSQADVGYGPYDLYDLGEFNQKGTVRTKYGTKGELKSAVNTLHSNGIQVYGDVVMNHKAGADYTENVTAVEVNPSNRYQETSGEYNIQAWTGFNFPGRGTTYSNWKWQWFHFDGTDWDQSRSLSRIFKFDGKAWDWEVSSENGNYDYLMYADYDYDHPDVVNEMKKWGVWYANEVGLDGYRLDAVKHIKFQFLKDWVDNARAATGKEMFTVGEYWQNDLGALNNYLAKVNYNQSLFDAPLHYNFYAASTGGGYYDMRNILNNTLVASNPTKAVTLVENHDTQPGQSLESTVQPWFKPLAYAFILTRSGGYPSVFYGDMYGTKGTTTREIPALKSKIEPLLKARKDYAYGMQRDYIDNPDVIGWTREGDSTKAKSGLATVITDGPGGSKRMYVGTSNAGEIWYDLTGNRTDKITIGSDGYATFPVNGGSVSVWVQQ

SEQ ID NO: 37184 - protein, 480 aa, Cytophaga sp.
NGTMMQYFEWYVPNDGQQWNRLRTDAPYLSSVGITAVWTPPAYKGTSQADVGYGPYDLYDLGEFNQKGTVRTKYGTKGELKMAVNTLHSNGIQVYGDVVMNHKAGADYTENVTAVEVNPSNRYQETSGEYNIQAWTGFNFPGRGTTYSNWKWQWFHFDGTDWDQSRSLSRIFKFDGKAWDWEVSSENGNYDYLMYADYDYDHPDVVNEMKKWGVWYANEVGLDGYRLDAVKHIKFQFLKDWVDNARAATGKEMFTVGEYWQNDLGALNNYLAKVNYNQSLFDAPLHYNFYAASTGGGYYDMRNILNNTLVASNPTKAVTLVENHDTQPGQSLESTVQPWFKPLAYAFILTRSGGYPSVFYGDMYGTKGTTTREIPALKSKIEPLLKARKDYAYGTQRDYIDNPDVIGWTREGDSTKAKSGLATVITDGPGGSKRMYVGTSNAGEIWYDLTGNRTDKITIGSDGYATFPVNGGSVSVWVQQ

SEQ ID NO: 37185 - protein, 480 aa, Cytophaga sp.
NGTMMQYFEWYVPNDGQQWNRLRTDAPYLSSVGITAVWTPPAYKGTSQADVGYGPYDLYDLGEFNQKGTVRTKYGTKGELKSAVNTLHSNGIQVYGDVVMNHKAGADYTEFVTAVEVNPSNRYQETSGEYNIQAWTGFNFPGRGTTYSNWKWQWFHFDGTDWDQSRSLSRIFKFDGKAWDWEVSSENGNYDYLMYADYDYDHPDVVNEMKKWGVWYANEVGLDGYRLDAVKHIKFQFLKDWVDNARAATGKEMFTVGEYWQNDLGALNNYLAKVNYNQSLFDAPLHYNFYAASTGGGYYDMRNILNNTLVASNPTKAVTLVENHDTQPGQSLESTVQPWFKPLAYAFILTRSGGYPSVFYGDMYGTKGTTTREIPALKSKIEPLLKARKDYAYGTQRDYIDNPDVIGWTREGDSTKAKSGLATVITDGPGGSKRMYVGTSNAGEIWYDLTGNRTDKITIGSDGYATFPVNGGSVSVWVQQ

SEQ ID NO: 37186 - protein, 480 aa, Cytophaga sp.
NGTMMQYFEWYVPNDGQQWNRLRTDAPYLSSVGITAVWTPPAYKGTSQADVGYGPYDLYDLGEFNQKGTVRTKYGTKGELKSAVNTLHSNGIQVYGDVVMNHKAGADYTENVTAVEVNPSNRYQETSGEYNIQAWTGFNFPGRGTTYSNWKWQWFHFDGTDWDQSRSLSRIFKFDGKAWDWEVSSENGNYDYLMYADYDYDHPDVVNEMKKWGVWYANEVGLDGYRLDAVKHIKFQFLKDWVDHARAATGKEMFTVGEYWQNDLGALNNYLAKVNYNQSLFDAPLHYNFYAASTGGGYYDMRNILNNTLVASNPTKAVTLVENHDTQPGQSLESTVQPWFKPLAYAFILTRSGGYPSVFYGDMYGTKGTTTREIPALKSKIEPLLKARKDYAYGTQRDYIDNPDVIGWTREGDSTKAKSGLATVITDGPGGSKRMYVGTSNAGEIWYDLTGNRTDKITIGSDGYATFPVNGGSVSVWVQQ

SEQ ID NO: 37187 - protein, 480 aa, Cytophaga sp.
NGTMMQYFEWYVPNDGQQWNRLRTDAPYLSSVGITAVWTPPAYKGTSQADVGYGPYDLYDLGEFNQKGTVRTKYGTKGELKSAVNTLHSNGIQVYGDVVMNHKAGADYTENVTAVEVNPSNRYQETSVEYNIQAWTGFNFPGRGTTYSNWKWQWFHFDGTDWDQSRSLSRIFKFDGKAWDWEVSSENGNYDYLMYADYDYDHPDVVNEMKKWGVWYANEVGLDGYRLDAVKHIKFQFLKDWVDNARAATGKEMFTVGEYWQNDLGALNNYLAKVNYNQSLFDAPLHYNFYAASTGGGYYDMRNILNNTLVASNPTKAVTLVENHDTQPGQSLESTVQPWFKPLAYAFILTRSGGYPSVFYGDMYGTKGTTTREIPALKSKIEPLLKARKDYAYGTQRDYIDNPDVIGWTREGDSTKAKSGLATVITDGPGGSKRMYVGTSNAGEIWYDLTGNRTDKITIGSDGYATFPVNGGSVSVWVQQ

SEQ ID NO: 37188 - protein, 480 aa, Cytophaga sp.
NGTMMQYFEWYVPNDGQQWNRLRTDAPYLSSVGITAVWTPPAYKGTSQADVGYGPYDLYDLGEFNQKGTVRTKYGTKGELKSAVNTLHSNGIQVYGDVVMNHKAGADYTENVTAVEVNPSNRYQETSGEYNIQAWTGFNFPGRGTTYSNWKWQWFHFDGTDWDQSRSLSRIFKFDGKAWDWEVSSENGNYDYLMYADYDYDHPDVVNEMKKWGVWYANEVGLDGYRLDAVKHIKFQFLKDWVDNARAATGKEMFTVGEYWQNDLGALHNYLAKVNYNQSLFDAPLHYNFYAASTGGGYYDMRNILNNTLVASNPTKAVTLVENHDTQPGQSLESTVQPWFKPLAYAFILTRSGGYPSVFYGDMYGTKGTTTREIPALKSKIEPLLKARKDYAYGTQRDYIDNPDVIGWTREGDSTKAKSGLATVITDGPGGSKRMYVGTSNAGEIWYDLTGNRTDKITIGSDGYATFPVNGGSVSVWVQQ

SEQ ID NO: 37189 - protein, 480 aa, Cytophaga sp.
NGTMMQYFEWYVPNDGQQWNRLRTDAPYLSSVGITAVWTPPAYKGTSQADVGYGPYDLYDLGEFNQKGTVRTKYGTKGELKSAVNTLHSNGIQVYGDVVMNHKAGADYTENVTAVEVNPSNRYQETSGEYNIQAWTGFNFPGRGTTYSNWKWQWFHFDGTDWDQSRSLSRIFKFDGKAWDWEVSSENGNYDYLMYADYDYDHPDVVNEMKKWGTWYANEVGLDGYRLDAVKHIKFQFLKDWVDNARAATGKEMFTVGEYWQNDLGALNNYLAKVNYNQSLFDAPLHYNFYAASTGGGYYDMRNILNNTLVASNPTKAVTLVENHDTQPGQSLESTVQPWFKPLAYAFILTRSGGYPSVFYGDMYGTKGTTTREIPALKSKIEPLLKARKDYAYGTQRDYIDNPDVIGWTREGDSTKAKSGLATVITDGPGGSKRMYVGTSNAGEIWYDLTGNRTDKITIGSDGYATFPVNGGSVSVWVQQ

SEQ ID NO: 37190 - protein, 480 aa, Cytophaga sp.
NGTMMQYFEWYVPNDGQQWNRLRTDAPYLSSVGITAVWTPPAYKGTSQADVGYGPYDLYDLGEFNQKGTVRTKYGTKGELKSAVNTLHSNGIQVYGDVVMNHKAGADYTENVTAVEVNPSNRYQETSGEYNIQAWTGFNFPGRGTTYSNWKWQWFHFDGTDWDQSRSLSRIFKFDGKAWDWEVSSENGNYDYLMYADYDYDHPDVVNEMKKWGVWYANEVGLDGYRLDAVKHIKFCFLKDWVDNARAATGKEMFTVGEYWQNDLGALNNYLAKVNYNQSLFDAPLHYNFYAASTGGGYYDMRNILNNTLVASNPTKAVTLVENHDTQPGQSLESTVQPWFKPLAYAFILTRSGGYPSVFYGDMYGTKGTTTREIPALKSKIEPLLKARKDYAYGTQRDYIDNPDVIGWTREGDSTKAKSGLATVITDGPGGSKRMYVGTSNAGEIWYDLTGNRTDKITIGSDGYATFPVNGGSVSVWVQQ

SEQ ID NO: 37191 - protein, 480 aa, Cytophaga sp.
NGTMMQYFEWYVPNDGQQWNRLRTDAPYLSSVGITAVWTPPAYKGTSQADVGYGPYDLYDLGEFNQKGTVRTKYGTKGELKSAVNTLHSNGIQVYGDVVMNHKAGADYTENVTAVEVNPSNRYQETSGEYNIQAWTGFNFPGRGTTYSNWKWQWFHFDGTDWDQSRSLSRIFKFHGKAWDWPVSSENGNYDYLMYADYDYDHPDVVNEMKKWGVWYANEVGLDGYRLDAVKHIKFSFLKDWVDNARAATGKEMFTVGEYWQNDLGALNNYLEKVNYNQSLFDAPLHYNFYAASTGGGYYDMRNILNNTLVASNPTKAVTLVENHDTQPGQSLESTVQPWFKPLAYAFILTRSGGYPAVFYGDMYGTKGTTTYEIPALKSKIEPLLKARKDYAYGTQRDYIDNPDVIGWTREGDSTKAKSGLATVITDGPGGSKRMYVGTSNAGEIWYDLTGNRTDKITIGSDGYATFPVNGGSVSVWVQQ

SEQ ID NO: 37192 - protein, 480 aa, Cytophaga sp.
NGTMMQYFEWYVPNDGQQWNRLRTDAPYLSSVGITAVWTPPAYKGTSQADVGYGPYDLYDLGEFNQKGTVRTKYGTKGELKSAVNTLHSNGIQVYGDVVMNHKAGADYTENVTAVEVNPSNRYQETSGEYNIQAWTGFNFPGRGTTYSNWKWQWFHFDGTDWDQSRSLSRIFKFDGKAWDWEVSSENGNYDYLMYADYDYDHPDVVNEMKKWGVWYANEVGLDGYRLDAVKHIKFQFLKDWVDNARAATGKEMFTVGEYWQNDLGALNNYLAKVNYNQSLFDAPLHYNFYAASTGGGYYDMRNILNNTLVASNPTKAVTLVENHDTQPGQSLESTVQPWFKPLAYAFILTRSGGYPSVFYGDMYGTKGTTTREIPALKSKIEPLLKARKSYAYGTQRDYIDNPDVIGWTREGDSTKAKSGLATVITDGPGGSKRMYVGTSNAGEIWYDLTGNRTDKITIGSDGYATFPVNGGSVSVWVQQ

SEQ ID NO: 37193 - protein, 480 aa, Cytophaga sp.
NGTMMQYFEWYVPNDGQQWNRLRTDAPYLSSVGITAVWTPPAYKGTSQADVGYGPYDLYDLGEFNQKGTVRTKYGTKGELKSAVNTLHSNGIQVYGDVVMNHKAGADYTENVTAVEVNPSNRYQETSGEYNIQAWTGFNFPGRGTTYSNWKWQWFHFDGTDWDQSRSLSRIFKFDGKAWDWEVSSENGNYDYLMYADYDYDHPDVVNEMKKWGVWYANEVGLDGYRLDAVKHIKFQFLKDWVDNARAATGKEMFTVGEYWQNDLGALNNYLAKVNYNQSLFDAPLHYNFYAASTGGGYYDMRNILHNTLVASNPTKAVTLVENHDTQPGQSLESTVQPWFKPLAYAFILTRSGGYPSVFYGDMYGTKGTTTREIPALKSKIEPLLKARKDYAYGTQRDYIDNPDVIGWTREGDSTKAKSGLATVITDGPGGSKRMYVGTSNAGEIWYDLTGNRTDKITIGSDGYATFPVNGGSVSVWVQQ

SEQ ID NO: 37194 - protein, 480 aa, Cytophaga sp.
NGTMMQYFEWYVPNDGQQWNRLRTDAPYLSSVGITAVWTPPAYKGTSQADVGYGPYDLYDLGEFNQKGTVRTKYGTKGELKSAVNTLHSNGIQVYGDVVMNHKAGADYTENVTAVEVNPSNRYQETSGEYNIQAWTGFNFPGRGTTYSNWKWQWFHFDGTDWDQSRSLSRIFKFDGKAWDWEVSSENGNYDYLMYADYDYDHPDVVNEMKKWGVWYANEVGLDGYRLDAVKHIKFQFLKDWVDNARAATGKEMFTVGEYWQNDLGALNNYLAKVNYNQSLFDAPLHYNFYAASTKGGYYDMRNILNNTLVASNPTKAVTLVENHDTQPGQSLESTVQPWFKPLAYAFILTRSGGYPSVFYGDMYGTKGTTTREIPALKSKIEPLLKARKDYAYGTQRDYIDNPDVIGWTREGDSTKAKSGLATVITDGPGGSKRMYVGTSNAGEIWYDLTGNRTDKITIGSDGYATFPVNGGSVSVWVQQ

SEQ ID NO: 37195 - protein, 480 aa, Cytophaga sp.
NGTMMQYFEWYVPNDGQQWNRLRTDAPYLSSVGITAVWTPPAYKGTSQADVGYGPYDLYDLGEFNQKGTVRTKYGTKGELKSAVNTLHSNGIQVYGDVVMNHKAGADYTENVTAVEVNPSNRYQETSGEYNIQAWTGFNFPGRGTTYSNWKWQWFHFDGTDWDQSRSLSRIFKFDGKAWDWEVSSENGNYDYLMYADYDYDHPDVVNEMKKWGVWYANEVGLDGYRLDAVKHIKFQFLKDWVDNARAATGKEMFTVGEYWQNDLGALNNYLAKVNYNQSLFDAPLHYNFYAASTGGGYYDMRNILNNTLVASNPTKAVTLVENHDTQPGQSLESTVQPWFKPLAYAFILTRSGGYPSVFYGDMYGTKGTTTREIPALKSKIEPLLKARKDYAYGTQRDYIDNPDVIGWTREGDSTKAKSGLATVITDGPGGSKRMYVGRSNAGEIWYDLTGNRTDKITIGSDGYATFPVNGGSVSVWVQQ

SEQ ID NO: 37196 - protein, 480 aa, Cytophaga sp.
NGTMMQYFEWYVPNDGQQWNRLRTDAPYLSSVGITAVWTPPAYKGTSQADVGYGPYDLYDLGEFNQKGTVRTKYGTKGELCSAVNTLHSNGIQVYGDVVMNHKAGADYTENVTAVEVNPSNRYQETSGEYNIQAWTGFNFPGRGTTYSNWKWQWFHFDGTDWDQSRSLSRIFKFDGKAWDWEVSSENGNYDYLMYADYDYDHPDVVNEMKKWGVWYANEVGLDGYRLDAVKHIKFQFLKDWVDNARAATGKEMFTVGEYWQNDLGALNNYLAKVNYNQSLFDAPLHYNFYAASTGGGYYDMRNILNNTLVASNPTKAVTLVENHDTQPGQSLESTVQPWFKPLAYAFILTRSGGYPSVFYGDMYGTKGTTTREIPALKSKIEPLLKARKDYAYGTQRDYIDNPDVIGWTREGDSTKAKSGLATVITDGPGGSKRMYVGTSNAGEIWYDLTGNRTDKITIGSDGYATFPVNGGSVSVWVQQ

SEQ ID NO: 37197 - protein, 480 aa, Cytophaga sp.
NGTMMQYFEWYVPNDGQQWNRLRTDAPYLSSVGITAVWTPPAYKGTSQADVGYGPYDLYDLGEFNQKGTVRTKYGTKGELKSAVNTLHSNGIQVYGDVVMNHKAGADYTENVTAVEVNPSNRYQETSGEYNIQAWTGFNFPGRGTTYSNWKWQWFHFDGTDWDQSRSLSRIFKFDGKAWDWEVSSENGNYDYLMYADYDYDHPDVVNEMKKWGVWYANEVGLDGYRLDAVKHIKFQFLKDWVDNARAATGKEMFTVGEYWQNDLGALNNYLAKVNYNQSLFDAPLHYNFYAASTGGGYYDMRNILNNTLVASNPTKAVTLVENHDTQPGQSLESTVQPWFKPLAYAFILTRSGGYPSVFYGDMYGTKGTTTREIPALKSKIEPLLKARKDYAYGTQRDYIDNPDVIGWTREGDSTKAKSGLATVITDGPGGSKRMYVGTSNAGEIWYDLTGNRTDKITIGSDGYATFPVNGGSVSAWVQQ

SEQ ID NO: 37198 - protein, 480 aa, Cytophaga sp.
NGTMMQYFEWYVPNDGQQWNRLRTDAPYLSSVGITAVWTPPAYKGTSQADVGYGPYDLYDLGEFNQKGTVRTKYGTKGELKSAVNTLHSNGIQVYGDVVMNHKAGADYTENVTAVEVNPSNRYQETSGEYNIQAWTGFNFPGRGTTYSNWKWQWFHFDGTDWDQSRSLSRIFKFDGKAWDWEVSSENGNYDYLMYADYDYDHPDVVNEMKKWGVWYANEVGLDGYRLDAVKHIKFQFLKDWVENARAATGKEMFTVGEYWQNDLGALNNYLAKVNYNQSLFDAPLHYNFYAASTGGGYYDMRNILNNTLVASNPTKAVTLVENHDTQPGQSLESTVQPWFKPLAYAFILTRSGGYPSVFYGDMYGTKGTTTREIPALKSKIEPLLKARKDYAYGTQRDYIDNPDVIGWTREGDSTKAKSGLATVITDGPGGSKRMYVGTSNAGEIWYDLTGNRTDKITIGSDGYATFPVNGGSVSVWVQQ

SEQ ID NO: 37199 - protein, 480 aa, Cytophaga sp.
NGTMMQYFEWYVPNDGQQWNRLRTDAPYLSSVGITAVWTPPAYKGTSQADVGYGPYDLYDLGEFNQKGTVRTKYGTKGELKSAVNTLHSNGIQVYGDVVMNHKAGADYTENVTAVEVNPSNRYQETSGEYNIQAWTGFNFPGRGTTYSNWKWQWFHFDGTDWDQSRSLSRIFKFDGKAWDWEVSSENGNYDYLMYADYDYDHPDVVNEMKKWGVWYANEVGLDGYRLDAVKHIKFQFLKDWVDNARAATGKEMFTVGEYWQNDLGQLNNYLAKVNYNQSLFDAPLHYNFYAASTGGGYYDMRNILNNTLVASNPTKAVTLVENHDTQPGQSLESTVQPWFKPLAYAFILTRSGGYPSVFYGDMYGTKGTTTREIPALKSKIEPLLKARKDYAYGTQRDYIDNPDVIGWTREGDSTKAKSGLATVITDGPGGSKRMYVGTSNAGEIWYDLTGNRTDKITIGSDGYATFPVNGGSVSVWVQQ

SEQ ID NO: 37200 - protein, 480 aa, Cytophaga sp.
NGTMMQYFEWYVPNDGQQWNRLRTDAPYLSSVGITAVWTPPAYKGTSQADVGYGPYDLYDLGEFNQKGTVRTKYGTKGELKSAVNTLHSNGIQVYGDVVMNHKAGADYTENVTAVEVNPSNRYQETSGEYNIQAWTGFNFPGRGTTYSNWKWQWFHFDGTDWDQSRSLSRIFKFDGKAWDWEVSSENGNYDYLMYADYDYDHPDVVNEMKKWGVWYANEVGLDGYRLDAVKHIKFQFLKDWVDNARAATGKEMFTVGEYWQNDLGALNNYLAKVNYNQSLFDAPLHYNFYAASTGGGYYDMRNILNNTLVASNPTKAVTLVENHDTQPGQSLESTVQPWFKPLAYAFILTRSGGYPSVFYGDMYGTKGTTTREIPALKSKIEPLLKARKDYAYGTQRDYIDNPDVIGWTREGDSKKAKSGLATVITDGPGGSKRMYVGTSNAGEIWYDLTGNRTDKITIGSDGYATFPVNGGSVSVWVQQ

SEQ ID NO: 37201 - protein, 480 aa, Cytophaga sp.
NGTMMQYFEWYVPNDGQQWNRLRTDAPYLSSVGITAVWTPPAYKGTSQADVGYGPYDLYDLGEFNQKGTVRTKYGTKGELKSAVNTLHSNGIQVYGDVVMNHKAGADYTENVTAVEVNPSNRYQETSCEYNIQAWTGFNFPGRGTTYSNWKWQWFHFDGTDWDQSRSLSRIFKFDGKAWDWEVSSENGNYDYLMYADYDYDHPDVVNEMKKWGVWYANEVGLDGYRLDAVKHIKFQFLKDWVDNARAATGKEMFTVGEYWQNDLGALNNYLAKVNYNQSLFDAPLHYNFYAASTGGGYYDMRNILNNTLVASNPTKAVTLVENHDTQPGQSLESTVQPWFKPLAYAFILTRSGGYPSVFYGDMYGTKGTTTREIPALKSKIEPLLKARKDYAYGTQRDYIDNPDVIGWTREGDSTKAKSGLATVITDGPGGSKRMYVGTSNAGEIWYDLTGNRTDKITIGSDGYATFPVNGGSVSVWVQQ

SEQ ID NO: 37202 - protein, 480 aa, Cytophaga sp.
NGTMMQYFEWYVPNDGQQWNRLRTDAPYLSSVGITAVWTPPAYKGTSQADVGYGPYDLYDLGEFNQKGTVRTKYGTKGELKSAVNTLHSNGIQVYGDVVMNHKAGADYTENVTAVEVNPSNRYQETSGEYNIQAWTGFNFPGRGTTYSNWKWQWFHFDGTDWDQSRSLSRIFKFAGKAWDWEVSSENGNYDYLMYADYDYDHPDVVNEMKKWGVWYANEVGLDGYRLDAVKHIKFQFLKDWVDNARAATGKEMFTVGEYWQNDLGALNNYLAKVNYNQSLFDAPLHYNFYAASTGGGYYDMRNILNNTLVASNPTKAVTLVENHDTQPGQSLESTVQPWFKPLAYAFILTRSGGYPSVFYGDMYGTKGTTTREIPALKSKIEPLLKARKDYAYGTQRDYIDNPDVIGWTREGDSTKAKSGLATVITDGPGGSKRMYVGTSNAGEIWYDLTGNRTDKITIGSDGYATFPVNGGSVSVWVQQ

SEQ ID NO: 37203 - protein, 480 aa, Cytophaga sp.
NGTMMQYFEWYVPNDGQQWNRLRTDAPYLSSVGITAVWTPPAYKGTSQADVGYGPYDLYDLGEFNQKGTVRTKYGTKGELKSAVNTLHSNGIQVYGDVVMNHKAGADYTENVTAVEVNPSNRYQETSGEYNICAWTGFNFPGRGTTYSNWKWQWFHFDGTDWDQSRSLSRIFKFDGKAWDWEVSSENGNYDYLMYADYDYDHPDVVNEMKKWGVWYANEVGLDGYRLDAVKHIKFQFLKDWVDNARAATGKEMFTVGEYWQNDLGALNNYLAKVNYNQSLFDAPLHYNFYAASTGGGYYDMRNILNNTLVASNPTKAVTLVENHDTQPGQSLESTVQPWFKPLAYAFILTRSGGYPSVFYGDMYGTKGTTTREIPALKSKIEPLLKARKDYAYGTQRDYIDNPDVIGWTREGDSTKAKSGLATVITDGPGGSKRMYVGTSNAGEIWYDLTGNRTDKITIGSDGYATFPVNGGSVSVWVQQ

SEQ ID NO: 37204 - protein, 480 aa, Cytophaga sp.
NGTMMQYFEWYVPNDGQQWNRLRTDAPYLSSVGITAVWTPPAYKGTSQADVGYGPYDLYDLGEFNQKGTVRTKYGTKGELKSAVNTLHSNGIQVYGDVVMNHKAGADYTENVTAVEVNPSNRYQETSGEYNIQAWTGFNFPGRGTTYSNWKWQWFHFDGTDWDQSRSLSRIFKFDGKAWDWEVSSENGNYDYLMYADYDYDHPDVVNEMKKWGVWYANEVGLDGYRLDAVKHIKFQFLKDWVDNARAATGKEMFTVGEYWQNDLGALNNYLAKVNYNQSLFDAPLHYNFYAASTGGGYYDMRNILNNTLVASWPTKAVTLVENHDTQPGQSLESTVQPWFKPLAYAFILTRSGGYPSVFYGDMYGTKGTTTREIPALKSKIEPLLKARKDYAYGTQRDYIDNPDVIGWTREGDSTKAKSGLATVITDGPGGSKRMYVGTSNAGEIWYDLTGNRTDKITIGSDGYATFPVNGGSVSVWVQQ

SEQ ID NO: 37205 - protein, 480 aa, Cytophaga sp.
NGTMMQYFEWYVPNDGQQWNRLRTDAPYLSSVGITAVWTPPAYKGTSQADVGYGPYDLYDLGEFNQKGTVRTKYGTKGELKSAVNTLHSNGIQVYGDVVMNHKAGADYTENVTAVEVNPSNRYQETSGEYNIQAWTGFNFPGRGTTYSNWKWQWFHFDGTDWDQSRSLSRIFKFDGKAWDWEVSSENGNYDYLMYADYDYDHPDVVNEMKKWGVWYANEVGLDGYRLDAVKHIKFQFLKDWVDNARAATGKEMFTVGEYWQNDLGVLNNYLAKVNYNQSLFDAPLHYNFYAASTGGGYYDMRNILNNTLVASNPTKAVTLVENHDTQPGQSLESTVQPWFKPLAYAFILTRSGGYPSVFYGDMYGTKGTTTREIPALKSKIEPLLKARKDYAYGTQRDYIDNPDVIGWTREGDSTKAKSGLATVITDGPGGSKRMYVGTSNAGEIWYDLTGNRTDKITIGSDGYATFPVNGGSVSVWVQQ

SEQ ID NO: 37206 - protein, 480 aa, Cytophaga sp.
NGTMMQYFEWYVPNDGQQWNRLRTDAPYLSSVGITAVWTPPAYKGTSQADVGYGPYDLYDLGEFNQKGTVRTKYGTKHELKSAVNTLHSNGIQVYGDVVMNHKAGADYTENVTAVEVNPSNRYQETSGEYNIQAWTGFNFPGRGTTYSNWKWQWFHFDGTDWDQSRSLSRIFKFDGKAWDWEVSSENGNYDYLMYADYDYDHPDVVNEMKKWGVWYANEVGLDGYRLDAVKHIKFQFLKDWVDNARAATGKEMFTVGEYWQNDLGALNNYLAKVNYNQSLFDAPLHYNFYAASTGGGYYDMRNILNNTLVASNPTKAVTLVENHDTQPGQSLESTVQPWFKPLAYAFILTRSGGYPSVFYGDMYGTKGTTTREIPALKSKIEPLLKARKDYAYGTQRDYIDNPDVIGWTREGDSTKAKSGLATVITDGPGGSKRMYVGTSNAGEIWYDLTGNRTDKITIGSDGYATFPVNGGSVSVWVQQ

SEQ ID NO: 37207 - protein, 480 aa, Cytophaga sp.
NGTMMQYFEWYVPNDGQQWNRLRTDAPYLSSVGITAVWTPPAYKGTSQADVGYGPYDLYDLGEFNQKGTVRTKYGTKGELKSAVNTLHSNGIQVYGDVVMNHKAGADYTENVTAVEVNPSNRYQETSGEYNIQAWTGFNFPGRGTTYSNWKWQWFHFDGTDWDQSRSLSRIFKFDGKAWDWEVSSENGNYDYLMYADYDYDHPDVVNEMKKWGVWYANEVGLDGYRLDAVKHIKFQFLKDWVDNARAATGKEMFTVGEYWQNDLGALNNYLAKVNYNQSLFDAPLHYNFYAASTGGGYYDMRNILNNTLVAQNPTKAVTLVENHDTQPGQSLESTVQPWFKPLAYAFILTRSGGYPSVFYGDMYGTKGTTTREIPALKSKIEPLLKARKDYAYGTQRDYIDNPDVIGWTREGDSTKAKSGLATVITDGPGGSKRMYVGTSNAGEIWYDLTGNRTDKITIGSDGYATFPVNGGSVSVWVQQ

SEQ ID NO: 37208 - protein, 480 aa, Cytophaga sp.
NGTMMQYFEWYVPNDGQQWNRLRFDAPYLSSVGITAVWTPPAYKGTSQADVGYGPYDLYDLGEFNQKGTVRTKYGTKGELKSAVNTLHSNGIQVYGDVVMNHKAGADYTENVTAVEVNPSNRYQETSGEYNIQAWTGFNFPGRGTTYSNWKWQWFHFDGTDWDQSRSLSRIFKFDGKAWDWEVSSENGNYDYLMYADYDYDHPDVVNEMKKWGVWYANEVGLDGYRLDAVKHIKFQFLKDWVDNARAATGKEMFTVGEYWQNDLGALNNYLAKVNYNQSLFDAPLHYNFYAASTGGGYYDMRNILNNTLVASNPTKAVTLVENHDTQPGQSLESTVQPWFKPLAYAFILTRSGGYPSVFYGDMYGTKGTTTREIPALKSKIEPLLKARKDYAYGTQRDYIDNPDVIGWTREGDSTKAKSGLATVITDGPGGSKRMYVGTSNAGEIWYDLTGNRTDKITIGSDGYATFPVNGGSVSVWVQQ

SEQ ID NO: 37209 - protein, 480 aa, Cytophaga sp.
NGTMMQYFEWYVPNDGQQWNRLRTDAPYLSSVGITAVWTPPAYKGTSQADVGYGPYDLYDLGEFNQKGTVRTKYGTKGELKSAVNTLHSNGIQVYGDVVMNHKAGADYTENVTAVEVNPSNRYQETSGEYNIQAWTGFNFPGRGTTYSNWKWQWFHFDGTDWDQSRSLSRIFKFDGKAWDWEVSSENGNYDYLMYADYDYDHPDVVNEMKKWGVWYANEVGLDGYRLDAVKHIKFQFLKDWVDNARAATGKEMFTVGEYWQNDLGALNNYLAKVNYNQSLFDAPLHYNFYAASTGGGYYDMRNILNNTLVASNPTKAVTLVENHDTQPGQSLESTVQPWFKPLAYAFILTRSGGYPSVFYGDMYGTKGTTTAEIPALKSKIEPLLKARKDYAYGTQRDYIDNPDVIGWTREGDSTKAKSGLATVITDGPGGSKRMYVGTSNAGEIWYDLTGNRTDKITIGSDGYATFPVNGGSVSVWVQQ

SEQ ID NO: 37210 - protein, 480 aa, Cytophaga sp.
NGTMMQYFEWYVPNDGQQWNRLRTDAPYLSSVGITAVWTPPAYKGTSQADVGYGPYDLYDLGEFNQKGTVRTKYGTKGELKSAVNTLHSNGIQVYGDVVMNHKAGADYTENVTAVEVNPSNRYQETSGEYNIQAWTGFNFPGRGTTYSNWKWQWFHFDGTDWDQSRSLSRIFKFDGKAWDWEVSSENGNYDYLMYADYDYDHPDVVNEMKKWGVWYANEVGLDGYRLDAVKHIKFQFLKDWVDNARAATGKEMFTVGEYWQNDLGALNNYLAKVNYNQSLFDAPLHYNFYAASRGGGYYDMRNILNNTLVASNPTKAVTLVENHDTQPGQSLESTVQPWFKPLAYAFILTRSGGYPSVFYGDMYGTKGTTTREIPALKSKIEPLLKARKDYAYGTQRDYIDNPDVIGWTREGDSTKAKSGLATVITDGPGGSKRMYVGTSNAGEIWYDLTGNRTDKITIGSDGYATFPVNGGSVSVWVQQ

SEQ ID NO: 37211 - protein, 480 aa, Cytophaga sp.
NGTMMQYFEWYVPNDGQQWNRLRTDAPYLSSVGITAVWTPPAYKGTSQADVGYGPYDLYDLGEFNQKGTVRTKYGTKGELKSAVNTLHSNGIQVYGDVVMNHKAGADYTENVTAVEVNPSNRYQETSGEYNIQAWTGFNFPGRGTTYSNWKWQWFHFDGTDWDQSRSLSRIFKFDGKAWDWEVSSENGNYDYLMYADYDYDHPDVVNEMKKWGVWYANEVGLDGYRLDAVKHIKFQFLKDWVDNARAATGKEMFTVGEYWQNDLGALNNYLAKVNYNQSLFDAPLHYNFYAASTGGGYYDMRNILNNTLVASNPDKAVTLVENHDTQPGQSLESTVQPWFKPLAYAFILTRSGGYPSVFYGDMYGTKGTTTREIPALKSKIEPLLKARKDYAYGTQRDYIDNPDVIGWTREGDSTKAKSGLATVITDGPGGSKRMYVGTSNAGEIWYDLTGNRTDKITIGSDGYATFPVNGGSVSVWVQQ

SEQ ID NO: 37212 - protein, 480 aa, Cytophaga sp.
NGTMMQYFEWYVPNDGQQWNRLRTDAPYLSSVGITAVWTPPAYKGTSQADVGYGPYDLYDLGEFNQKGTVRTKYGTKGELKSAVNTLHSNGIQVYGDVVMNHKAGADYTENVTAVEVNPSNRYQETSGEYNIQAWTGFNFPGRGTTYSNWKWQWFHFDGTDWDQSRSLSRIFKFDGKAWDWEVSSENGNYDYLMYADYDYDHPDVVNEMKKWGVWYANEVGLDGYRLDAVKHIKFQFLKDWVDNARAATGKEMFTVGEYWQNDLGALNNYLAKVNYNQSLFDAPLHYNFYAASTGGGYYDMRNILNNTLVASNPTKAVTLVENHDTQPGQSLESTVQPWFKPLAYAFILTRSGGYPSVFYGDMYGTKGTTTREIPALKIKIEPLLKARKDYAYGTQRDYIDNPDVIGWTREGDSTKAKSGLATVITDGPGGSKRMYVGTSNAGEIWYDLTGNRTDKITIGSDGYATFPVNGGSVSVWVQQ

SEQ ID NO: 37213 - protein, 480 aa, Cytophaga sp.
NGTMMQYFEWYVPNDGQQWNRLRTDAPYLSSVGITAVWTPPAYKGTSQADVGYGPYDLYDLGEFNQKGTVRTKYGTKGELKSAVNTLHSNGIQVYGDVVMNHKAGADYTENVTAVEVNPSNRYQETSGEYNIQAWTGFFFPGRGTTYSNWKWQWFHFDGTDWDQSRSLSRIFKFDGKAWDWEVSSENGNYDYLMYADYDYDHPDVVNEMKKWGVWYANEVGLDGYRLDAVKHIKFQFLKDWVDNARAATGKEMFTVGEYWQNDLGALNNYLAKVNYNQSLFDAPLHYNFYAASTGGGYYDMRNILNNTLVASNPTKAVTLVENHDTQPGQSLESTVQPWFKPLAYAFILTRSGGYPSVFYGDMYGTKGTTTREIPALKSKIEPLLKARKDYAYGTQRDYIDNPDVIGWTREGDSTKAKSGLATVITDGPGGSKRMYVGTSNAGEIWYDLTGNRTDKITIGSDGYATFPVNGGSVSVWVQQ

SEQ ID NO: 37214 - protein, 480 aa, Cytophaga sp.
NGTMMQYFEWYVPNDGQQWNRLRTDAPYLSSVGITAVWTPPAYKGTSQADVGYGPYDLYDLGEFNQKGTVRTKYGTKGELKSAVNTLHSNGIQVYGDVVMNHKAGADYTENVTAVEVNPSNRYQETSHEYNIQAWTGFNFPGRGTTYSNWKWQWFHFDGTDWDQSRSLSRIFKFDGKAWDWEVSSENGNYDYLMYADYDYDHPDVVNEMKKWGVWYANEVGLDGYRLDAVKHIKFQFLKDWVDNARAATGKEMFTVGEYWQNDLGALNNYLAKVNYNQSLFDAPLHYNFYAASTGGGYYDMRNILNNTLVASNPTKAVTLVENHDTQPGQSLESTVQPWFKPLAYAFILTRSGGYPSVFYGDMYGTKGTTTREIPALKSKIEPLLKARKDYAYGTQRDYIDNPDVIGWTREGDSTKAKSGLATVITDGPGGSKRMYVGTSNAGEIWYDLTGNRTDKITIGSDGYATFPVNGGSVSVWVQQ

SEQ ID NO: 37215 - protein, 480 aa, Cytophaga sp.
NGTMMQYFEWYVPNDGQQWNRLRTDAPYLSSVGITAVWTPPAYKGTSQADVGYGPYDLYDLGEFNQKGTVRTKYGTKGELKSAVNTLHSNGIQVYGDVVMNHKAGADYTENVTAVEVNPSNRYQETSGEYNIQAWTGFNFPGRGTTYSNWKWQWFHFDGTDWDQSRSLSRIFKFDGKAWDWEVSSENGNYDYLMYADYDYDHPDVVNEMKKWGVWYANEVGLDGYRLDAVKHIKFQFLKDWVDNARAATGKEMFTVGEYWQNDLGALNNYLAKVNYNQSLFDAPLHYNFYAASTGGGYYDMRNILNNTLVYSNPTKAVTLVENHDTQPGQSLESTVQPWFKPLAYAFILTRSGGYPSVFYGDMYGTKGTTTREIPALKSKIEPLLKARKDYAYGTQRDYIDNPDVIGWTREGDSTKAKSGLATVITDGPGGSKRMYVGTSNAGEIWYDLTGNRTDKITIGSDGYATFPVNGGSVSVWVQQ

SEQ ID NO: 37216 - protein, 480 aa, Cytophaga sp.
NGTMMQYFEWYVPNDGQQWNRLRTDAPYLSSVGITAVWTPPAYKGTSQADVGYGPYDLYDLGEFNQKGTVRTKYGTKGELKSAVNTLHSNGIQVYGDVVMNHKAGADYTENVTAVEVNPSNRYQETSGEYNIQAWTGFNFPGRGTTYSNWKWQWFHFDGTDWDQSRSLSRIFKFDGKAWDWEVSSENGNYDYLMYADYDYDHPDVVNEMKKWGVWYANEVGLDGYRLDAVKHIKFQFLKDWVDNARAATGKEMFTVGEYWQNDLGALNNYLAKVNYNQSLFDAPLHYNFYAASTGGGYYDMRNILCNTLVASNPTKAVTLVENHDTQPGQSLESTVQPWFKPLAYAFILTRSGGYPSVFYGDMYGTKGTTTREIPALKSKIEPLLKARKDYAYGTQRDYIDNPDVIGWTREGDSTKAKSGLATVITDGPGGSKRMYVGTSNAGEIWYDLTGNRTDKITIGSDGYATFPVNGGSVSVWVQQ

SEQ ID NO: 37217 - protein, 480 aa, Cytophaga sp.
NGTMMQYFEWYVPNDGQQWNRLRTDAPYLSSVGITAVWTPPAYKGTSQADVGYGPYDLYDLGEFNQKGTVRTKYGTKGELKSAVNTLHSNGIQVYGDVVMNHKAGADYTENVTAVEVNPSNRYQETSGEYNIQAWTGFNFPGRGTTYSNWKWQWFHFDGTDWDQSRSLSRIFKFDGKAWDWEVSSENGNYDYLMYADYDYDHPDVVNEMKKWGVWYANEVGLDGYRLDAVKHIKFQFLKDWVDNARAATGKEMFTVGEYWQNDLGALNNYLAKVNYNQSLFDAPLHYNFYAASTGGGYYDMRNILNNTLVASNPTKAVTLVENHDTQPGQSLESTVQPWFKPLAYAFILTRSGGYPSVFYGDMYGTKGTTTREIPALKSKIEPLLKARKDYAYGTQRDYIDNPDVIGWTREGDSTKAKSGLATVITDGPGGSKRMYVGTSNAGEIWYDLTGNRTDKITIGSDGYATFWVNGGSVSVWVQQ

SEQ ID NO: 37218 - protein, 480 aa, Cytophaga sp.
NGTMMQYFEWYVPNDGQQWNRLRTDAPYLSSVGITAVWTPPAYKGTSQADVGYGPYDLYDLGEFNQKGTVRTKYGTKGELKSAVNTLHSNGIQVYGDVVMNHKAGADYTENVTAVEVNPSNRYQETSGEYNIQAWTGFNFPGRGTTYSNWKWQWFHFDGTDWDQSRSLSRIFKFDGKAWDWEVSSENGNYDYLMYADYDYDHPDVVNEMKKWGVWYANEVGLDGYRLDAVKHIKFQFLKDWVDNARAATGKEMFTVGEYWQNDLGALNNYLAKVNYNQSLFDAPLHYNFYAASTGGGYYDMRNILNNTLVAWNPTKAVTLVENHDTQPGQSLESTVQPWFKPLAYAFILTRSGGYPSVFYGDMYGTKGTTTREIPALKSKIEPLLKARKDYAYGTQRDYIDNPDVIGWTREGDSTKAKSGLATVITDGPGGSKRMYVGTSNAGEIWYDLTGNRTDKITIGSDGYATFPVNGGSVSVWVQQ

SEQ ID NO: 37219 - protein, 480 aa, Cytophaga sp.
NGTMMQYFEWYVPNDGQQWNRLRTDAPYLSSVGITAVWTPPAYKGTSQADVGYGPYDLYDLGEFNQKGTVRTKYGTKGELKSAVNTLHSNGIQVYGDVVMNHKAGADYTENVTAVEVNPSNRYQETSGEYNIQAWTGFNFPGRGTTYSNWKWQWFHFDGTDWDQSRSFSRIFKFDGKAWDWEVSSENGNYDYLMYADYDYDHPDVVNEMKKWGVWYANEVGLDGYRLDAVKHIKFQFLKDWVDNARAATGKEMFTVGEYWQNDLGALNNYLAKVNYNQSLFDAPLHYNFYAASTGGGYYDMRNILNNTLVASNPTKAVTLVENHDTQPGQSLESTVQPWFKPLAYAFILTRSGGYPSVFYGDMYGTKGTTTREIPALKSKIEPLLKARKDYAYGTQRDYIDNPDVIGWTREGDSTKAKSGLATVITDGPGGSKRMYVGTSNAGEIWYDLTGNRTDKITIGSDGYATFPVNGGSVSVWVQQ

SEQ ID NO: 37220 - protein, 480 aa, Cytophaga sp.
NGTMMQYFEWYVPNDGQQWNRLRTDAPYLSSVGITAVWTPPAYKGTSQADVGYGPYDLYDLGEFNQKGTVRTKYGTKGELKSAVNTLHSNGIQVYGDVVMNHKAGADYTENVTAVEVNPSNRYQETSGEYNIQAWTGFNFPGRGTTYSNWKWQWFHFDGTDWDQSRSLSRIFKFDGKAWDWEVSSENGNYDYLMYADYDYDHPDVVNEMKKWGVWYANEVGLDGYRLDAVKHIKFQFLKDWVDNARAATGKEMFTVGEYWQNDLGALNNYLAKCNYNQSLFDAPLHYNFYAASTGGGYYDMRNILNNTLVASNPTKAVTLVENHDTQPGQSLESTVQPWFKPLAYAFILTRSGGYPSVFYGDMYGTKGTTTREIPALKSKIEPLLKARKDYAYGTQRDYIDNPDVIGWTREGDSTKAKSGLATVITDGPGGSKRMYVGTSNAGEIWYDLTGNRTDKITIGSDGYATFPVNGGSVSVWVQQ

SEQ ID NO: 37221 - protein, 480 aa, Cytophaga sp.
NGTMMQYFEWYVPNDGQQWNRLRTDAPYLSSVGITAVWTPPAYKGTSQADVGYGPYDLYDLGEFNQKGTVRTKYGTKGELKSAVNTLHSNGIQVYGDVVMNHKAGADYTENVTAVEVNPSNRYQETSGEYNIQAWTGFNFPGRGTTYSNWKWQWFHFDGTDWDQSRSLSRIFKFHGKAWDWPVSSENGNYDYLMYADYDYDHPDVVNEMKKWGVWYANEVGLDGYRLDAVKHIKFSFLKDWVDNARAATGKEMFTVGEYWQNDLGALNNYLAKVNYNQSLFDAPLHYNFYAASTGGGAYDMRNILNNTLVASNPTKAVTLVENHDTQPGQSLESTVQPWFKPLAYAFILTRSGGYPAVFYGDMYGTKGTTTYEIPALKSKIEPLLKARKDYAYGTQRDYIDNPDVIGWTREGDSTKAKSGLATVITDGPGGSKRMYVGTSNAGEIWYDLTGNRTDKITIGSDGYATFPVNGGSVSVWVQQ

SEQ ID NO: 37222 - protein, 480 aa, Cytophaga sp.
NGTMMQYFEWYVPNDGQQWNRLRTDAPYLSSVGITAVWTPPAYKGTSQADVGYGPYDLYDLGEFNQKGTVRTKYGTKGELKSAVNTLHSNGIQVYGDVVMNHKAGADYTENVTAVEVNPSNRYQETSGEYNIQAWTGFNFPGRGTTYSNWKWQWFHFDGTDWDQSRSLSRIFKFDGKAWDWEVSSENGNYDYLMYADYDYDHPDVVNEMKKWGVWYANEVGLDGYRLDAVKHIKFQFLKDWVDNARAATGKEMFTVGEYWQNDLGALNNYLAKVNYNQSLFDAPLHYNFYAASTGGGYYDMRNILNNTLVASNPTKAVTLVENHDTQPGQSLESTVQPWFKPLAYAFILTRSGGYPSVFYGDMYGTKGTTTREIPALKSKIEPLLKARKDYAYGTQRDYIDNPDVIGWTREGDSTKAKSGLATVITDGPGGSKRMYVGPSNAGEIWYDLTGNRTDKITIGSDGYATFPVNGGSVSVWVQQ

SEQ ID NO: 37223 - protein, 480 aa, Cytophaga sp.
NGTMMQYFEWYVPNDGQQWNRLRTDAPYLSSVGITAVWTPPAYKGTSQADVGYGPYDLYDLGEFNQKGTVRTKYGTKGELKSAVNTLHSNGIQVYGDVVMNHKAGADYTENVTAVEVNPSNRYQETSGEYNIQAWTGFNFPGRGTTYSNWKWQWFHFDGTDWDQSRSLSRIFKFDGKAWDWEVSSENGNYDYLMYADYDYDHPDVVNEMKKWGVWYANEVGLDGYRLDAVKHIKFQFLKDWVDNARAATGKEMFTVGEYWQNDLGALNNYLAKVNYNQSLFDAPLHYNFYAASTGGGYYDMRNILNNTLVASNPTKAVTLVENHDTQPGQSLESTVQPWFKPLAYAFILTRYGGYPSVFYGDMYGTKGTTTREIPALKSKIEPLLKARKDYAYGTQRDYIDNPDVIGWTREGDSTKAKSGLATVITDGPGGSKRMYVGTSNAGEIWYDLTGNRTDKITIGSDGYATFPVNGGSVSVWVQQ

SEQ ID NO: 37224 - protein, 480 aa, Cytophaga sp.
NGTMMQYFEWYVPNDGQQWNRLRTDAPYLSSVGITAVWTPPAYKGTSQCDVGYGPYDLYDLGEFNQKGTVRTKYGTKGELKSAVNTLHSNGIQVYGDVVMNHKAGADYTENVTAVEVNPSNRYQETSGEYNIQAWTGFNFPGRGTTYSNWKWQWFHFDGTDWDQSRSLSRIFKFDGKAWDWEVSSENGNYDYLMYADYDYDHPDVVNEMKKWGVWYANEVGLDGYRLDAVKHIKFQFLKDWVDNARAATGKEMFTVGEYWQNDLGALNNYLAKVNYNQSLFDAPLHYNFYAASTGGGYYDMRNILNNTLVASNPTKAVTLVENHDTQPGQSLESTVQPWFKPLAYAFILTRSGGYPSVFYGDMYGTKGTTTREIPALKSKIEPLLKARKDYAYGTQRDYIDNPDVIGWTREGDSTKAKSGLATVITDGPGGSKRMYVGTSNAGEIWYDLTGNRTDKITIGSDGYATFPVNGGSVSVWVQQ

SEQ ID NO: 37225 - protein, 480 aa, Cytophaga sp.
NGTMMQYFEWYVPNDGQQWNRLRTDAPYLSSVGITAVWTPPAYKGTSQADVGYGPYDLYDLGEFNQKGTVRTKYGTKGELKSAVNTLHSNGIQVYGDVVMNHKAGADYTENVTAVEVNPSNRYQETSGEYNIQAWTGFNFPGRGTTYSNWKWFWFHFDGTDWDQSRSLSRIFKFDGKAWDWEVSSENGNYDYLMYADYDYDHPDVVNEMKKWGVWYANEVGLDGYRLDAVKHIKFQFLKDWVDNARAATGKEMFTVGEYWQNDLGALNNYLAKVNYNQSLFDAPLHYNFYAASTGGGYYDMRNILNNTLVASNPTKAVTLVENHDTQPGQSLESTVQPWFKPLAYAFILTRSGGYPSVFYGDMYGTKGTTTREIPALKSKIEPLLKARKDYAYGTQRDYIDNPDVIGWTREGDSTKAKSGLATVITDGPGGSKRMYVGTSNAGEIWYDLTGNRTDKITIGSDGYATFPVNGGSVSVWVQQ

SEQ ID NO: 37226 - protein, 480 aa, Cytophaga sp.
NGTMMQYFEWYVPNDGQQWNRLRTDAPYLSSVGITAVWTPPAYKGTSQADVGYGPYDLYDLGEFNQKGTVRTKYGTKGELKSAVNTLHSNGIQVYGDVVMNHKAGADYTENVTAVEVNPSNRYQETSGEYNIQAWTGFNFPGRGTTYSNWKWQWFHFDGTDWDQSRSLSRIFKFDGKAWDWEVSSENGNYDYLMYADYDYDHPDVVNEMKKWGVWYANEVGLDGYRLDAVKHIKFQFLKDWVDNARAATGKEMFTVGEYWQNDLGALNNYLAKVNYNQSLFDAPLHYNFYAASTGGGYYDMRNILNNTLVASNPTKAVTLVENHDTQPGQSLESTVQPWFKPLAYAFILTRSGGYPSVFYGDMYGTKGTTTREIPALKSKIEPLLKARKDYAYGTQRDYIDNPDVIGWTREGDSTKAKSGLATVITDGPGGSKRMYVGTVNAGEIWYDLTGNRTDKITIGSDGYATFPVNGGSVSVWVQQ

SEQ ID NO: 37227 - protein, 480 aa, Cytophaga sp.
NGTMMQYFEWYVPNDGQQWNRLRTDAPYLSSVGITAVWTPPAYKGTSQADVGYGPYDLYDLGEFNQKGTVRTKYGTKGELKSAVNTLHSNGIQVYGDVVMNHKAGADYTENVTAVEVNPSNRYQETSGEYNIQAWTGFNFPGRGTTYSNWKWQWFHFDGTDWDQSRSLSRIFKFDGKAWDWEVSSENGNYDYLMYADYDYDHPDVVNEMKKWGVWYANEVGLDGYRLDAVKHIKFQFLKDWVDNARAATGKEMFTVGEYWQNDLGALNNYLAKVNYNQSLFDAPLHYNFYAASTGGGYYDMRNILNNTLVASNPTKAVTLVENHDTQPGQSLESTVQPWFKPLAYAFILTRSGGYPSVFYGDMYGTKGTTTREIPALKSKIEPLLKARKDYAYGTQRDYIDNPDVIGWTREGDSTKAKSGLATVITDGPGGSKRMYVGTSNAGEIWYDLTGNRTDKIYIGSDGYATFPVNGGSVSVWVQQ

SEQ ID NO: 37228 - protein, 480 aa, Cytophaga sp.
NGTMMQYFEWYVPNDGQQWNRLRTDAPYLSSVGITAVWTPPAYKGTSQADVGYGPYDLYDLGEFNQKGTVRTKYGTKGELKSAVNTLHSNGIQVYGDVVMNHKAGADYTENVTAVEVNPSNRYQETSGEYNIQAWTGFNFPGRGTTYSNWKWQWFHFDGTDWDQSRSLSRIFKFDGKAWDWEVSSENGNYDYLMYADYDYDHPDVVNEMKKWGVWYANEVGLDGYRLDAVKHIKFQFLKDWVDNARAATGKEMFTVGEYWQNDLGALNNYLAKVNYNQSLFDAPLHYNFYAASTGGGYYDMRNILNNTLVASNPTKAVTLVENHDTQPGQSLESTVQPWFKPLAYAFILTRSGGYPSVFYGDMYGTKGTTTREIPALKSKIEPLLKARKDYAYGTQRDYIDNPDVIGWTREGDSTKAKSGLATVITDGPGGSKRMYVGTSNAGEIWYDLTGNRTDKITIGSDGYATFDVNGGSVSVWVQQ

SEQ ID NO: 37229 - protein, 480 aa, Cytophaga sp.
NGTMMQYFEWYVPNDGQQWNRLRTDAPYLSSVGITAVWTPPAYKGTSQADVGYGPYDLYDLGEFNQKGTVRTKYGTKEELKSAVNTLHSNGIQVYGDVVMNHKAGADYTENVTAVEVNPSNRYQETSGEYNIQAWTGFNFPGRGTTYSNWKWQWFHFDGTDWDQSRSLSRIFKFDGKAWDWEVSSENGNYDYLMYADYDYDHPDVVNEMKKWGVWYANEVGLDGYRLDAVKHIKFQFLKDWVDNARAATGKEMFTVGEYWQNDLGALNNYLAKVNYNQSLFDAPLHYNFYAASTGGGYYDMRNILNNTLVASNPTKAVTLVENHDTQPGQSLESTVQPWFKPLAYAFILTRSGGYPSVFYGDMYGTKGTTTREIPALKSKIEPLLKARKDYAYGTQRDYIDNPDVIGWTREGDSTKAKSGLATVITDGPGGSKRMYVGTSNAGEIWYDLTGNRTDKITIGSDGYATFPVNGGSVSVWVQQ

SEQ ID NO: 37230 - protein, 480 aa, Cytophaga sp.
NGTMMQYFEWYVPNDGQQWNRLRTDAPYLSSVGITAVWTPPAYKGTSQADVGYGPYDLYDLGEFNQKGTVRTKYGTKGELKSAVNTLHSNGIQVYGDVVMNHKAGADYTENVTAVEVNPSNRYQETSGEYNIQAWTGFNFPGRGTTYSNWKWQWFHFDGTDWDQSRSLSRIFKFDGKAWDWEVSSENGNYDYLMYADYDYDHPDVVNEMKKWGVWYANEVGLDGYRLDAVKHIKFQFLKDWVDNARSATGKEMFTVGEYWQNDLGALNNYLAKVNYNQSLFDAPLHYNFYAASTGGGYYDMRNILNNTLVASNPTKAVTLVENHDTQPGQSLESTVQPWFKPLAYAFILTRSGGYPSVFYGDMYGTKGTTTREIPALKSKIEPLLKARKDYAYGTQRDYIDNPDVIGWTREGDSTKAKSGLATVITDGPGGSKRMYVGTSNAGEIWYDLTGNRTDKITIGSDGYATFPVNGGSVSVWVQQ

SEQ ID NO: 37231 - protein, 480 aa, Cytophaga sp.
NGTMMQYFEWYVPNDGQQWNRLRTDAPYLSSVGITAVWTPPAYKGTSQADVGYGPYDLYDLGEFNQKGTVRTKYGTKGELKSAVNTLHSNGIQVYGDVVMNHKAGADYTENVTAVEVNPSNRYQETSGEYNIQAWTGFNFPGRGTTYSNWKWQWFHFDGTDWDQSRSLSRIFKFDGKAWDWEVSSENGNYDYLMYADYDYDHPDVVNEMKKWGVWYANEVGLDGYRLDAVKHIKFQFLKDWVDNARAATGKEMFTVGEYWQNDLGALNNYLAKVNYNQSLFDAPLHYNFYAASTGGGYYDMRNILENTLVASNPTKAVTLVENHDTQPGQSLESTVQPWFKPLAYAFILTRSGGYPSVFYGDMYGTKGTTTREIPALKSKIEPLLKARKDYAYGTQRDYIDNPDVIGWTREGDSTKAKSGLATVITDGPGGSKRMYVGTSNAGEIWYDLTGNRTDKITIGSDGYATFPVNGGSVSVWVQQ

SEQ ID NO: 37232 - protein, 480 aa, Cytophaga sp.
NGTMMQYFEWYVPNDGQQWNRLRTDAPYLSSVGITAVWTPPAYKGTSQADVGYGPYDLYDLGEFNQKGTVRTKYGTKGELKSAVNTLHSNGIQVYGDVVMNHKAGADYTENVTAVEVNPSNRYQETSGEYNIQAWTGFNFPGRGTTYSNWKWQWFHFDGTDWDQSRSLSRIFKFDGKAWDWEVSSENGNYDYLMYADYDYDHPDVVNEMKKWGVWYANEVGLDGYRLDAVKHIKFQFLKDWVDNARAATGKEMFTVGEYWQNDLGALNNYLAKVNYNQSLFDAPLHYNFYAASTGGGEYDMRNILNNTLVASNPTKAVTLVENHDTQPGQSLESTVQPWFKPLAYAFILTRSGGYPSVFYGDMYGTKGTTTREIPALKSKIEPLLKARKDYAYGTQRDYIDNPDVIGWTREGDSTKAKSGLATVITDGPGGSKRMYVGTSNAGEIWYDLTGNRTDKITIGSDGYATFPVNGGSVSVWVQQ

SEQ ID NO: 37233 - protein, 480 aa, Cytophaga sp.
NGTMMQYFEWYVPNDGQQWNRLRTDAPYLSSVGITAVWTPPAYKGTSQADVGYGPYDLYDLGEFNQKGTVRTKYGTKGELKSAVNTLHSNGIQVYGDVVMNHKAGADYTENVTAVEVNPSNRYQETSGEYNIQAWTGFNFPGRGTTYSNWKWQWFHFDGTDWDQSRSLSRIFKFDGKAWDWEVSSENGNYDYLMYADYDYDHPDVVNEMKKWGVWYANEVGLDGYRLDAVKHIKFQFLKDWVDNARAATGKEMFTVGEYWQNDLGALNNYLAKVNYNQSLFDAPLHYNFYAASTGGGYYDMRNILNNTLVASNPTKAVTLVENHDTQPGQSLESTVQPWFKPLAYAFILTRSGGYPSVFYGDMYGTKGTTTREIPALKSKIEPLLKARKDYAYGTQRDYIDNPDVIGWTREGDSTKAKSGLATVITDGPGGSKRMYVGTSNAGEIWYDLTGNRTDKITIGSDGDATFPVNGGSVSVWVQQ

SEQ ID NO: 37234 - protein, 480 aa, Cytophaga sp.
NGTMMQYFEWYVPNDGQQWNRLRTDAPYLSSVGITAVWTPPAYKGTSQADVGYGPYDLYDLGEFNQKGTVRTKYGTKGELKSAVNTLHSNGIQVYGDVVMNHKAGADYTENVTAVEVNPSNRYQETSGEYYIQAWTGFNFPGRGTTYSNWKWQWFHFDGTDWDQSRSLSRIFKFDGKAWDWEVSSENGNYDYLMYADYDYDHPDVVNEMKKWGVWYANEVGLDGYRLDAVKHIKFQFLKDWVDNARAATGKEMFTVGEYWQNDLGALNNYLAKVNYNQSLFDAPLHYNFYAASTGGGYYDMRNILNNTLVASNPTKAVTLVENHDTQPGQSLESTVQPWFKPLAYAFILTRSGGYPSVFYGDMYGTKGTTTREIPALKSKIEPLLKARKDYAYGTQRDYIDNPDVIGWTREGDSTKAKSGLATVITDGPGGSKRMYVGTSNAGEIWYDLTGNRTDKITIGSDGYATFPVNGGSVSVWVQQ

SEQ ID NO: 37235 - protein, 480 aa, Cytophaga sp.
NGTMMQYFEWYVPNDGQQWNRLRTDAPYLSSVGITAVWTPPAYKGTSQADVGYGPYDLYDLGEFNQKGTVRTKYGTKGELKSAVNTLHSNGIQVYGDVVMNHKAGADYTENVTAVEVNPSNRYQETSGEYNIQAWTGFNFPGRGTTYSRWKWQWFHFDGTDWDQSRSLSRIFKFDGKAWDWEVSSENGNYDYLMYADYDYDHPDVVNEMKKWGVWYANEVGLDGYRLDAVKHIKFQFLKDWVDNARAATGKEMFTVGEYWQNDLGALNNYLAKVNYNQSLFDAPLHYNFYAASTGGGYYDMRNILNNTLVASNPTKAVTLVENHDTQPGQSLESTVQPWFKPLAYAFILTRSGGYPSVFYGDMYGTKGTTTREIPALKSKIEPLLKARKDYAYGTQRDYIDNPDVIGWTREGDSTKAKSGLATVITDGPGGSKRMYVGTSNAGEIWYDLTGNRTDKITIGSDGYATFPVNGGSVSVWVQQ

SEQ ID NO: 37236 - protein, 480 aa, Cytophaga sp.
NGTMMQYFEWYVPNDGQQWNRLRTDAPYLSSVGITAVWTPPAYKGTSQADVGYGPYDLYDLGEFNQKGTVRTKYGTKGELKSAVNTLHSNGIQVYGDVVMNHKAGADYTENVTAVEVNPSNRYQETSGEYNIQAWTGFNFPGRGTTYSNWKWQWFHFDGTDWDQSRSLSRIFKFDGKAWDWEVSSENGNYDYLMYADYDYDHPDVVNEMKKWGVWYANEVGLDGYRLDAVKHIKFQFLKDWVDNARAATGKEMFTVGEYWQNDLGALNNYLAKVNYNQSLFDAPLHYNFYAASTGGGYYDMRNILSNTLVASNPTKAVTLVENHDTQPGQSLESTVQPWFKPLAYAFILTRSGGYPSVFYGDMYGTKGTTTREIPALKSKIEPLLKARKDYAYGTQRDYIDNPDVIGWTREGDSTKAKSGLATVITDGPGGSKRMYVGTSNAGEIWYDLTGNRTDKITIGSDGYATFPVNGGSVSVWVQQ

SEQ ID NO: 37237 - protein, 480 aa, Cytophaga sp.
NGTMMQYFEWYVPNDGQQWNRLRTDAPYLSSVGITAVWTPPAYKGTSQADVGYGPYDLYDLGEFNQKGTVRTKYGTKGELKSAVNTLHSNGIQVYGDVVMNHKAGADYTENVTAVEVNPSNRYQETSGEYNIQAWTGFNFPGRGTTYSNWKWQWFHFDGTDWDQSRSLSRIFKFDGKAWDWEVSSENGNYDYLMYADYDYDHPDVVNEMKKWGVWYANEVGLDGYRLDAVKHIKFQFLKDWVDNARAATGKEMFTVGEYWQNDLGALNNYLAKVNYNQSLFDAPLHYNFYAASTGGGYYDMRNILNNTLVASNPTKAVTLVENHDTQPGQSLESTVQPWFKPLAYAFILTRSGGYPSVFYGDMYGTKGTTTREIPALKSKIEPLLKARKDYAYGTQRDYIDNPDVIGWTREGDSTKAKSGLATVITDGPGGSKRMYVGTSNAGEMWYDLTGNRTDKITIGSDGYATFPVNGGSVSVWVQQ

SEQ ID NO: 37238 - protein, 480 aa, Cytophaga sp.
NGTMMQYFEWYVPNDGQQWNRLRTDAPYLSSVGITAVWTPPAYKGTSQADVGYGPYDLYDLGEFNQKGTVRTKYGTKGELKSAVNTLHSNGIQVYGDVVMNHKAGADYTENVTAVEVNPSNRYQETSGEYNIQAWTGFNFPGRGTTYSNWKWQWFHFDGTDWDQSRSLSRIFKFDGKAWDWEVSSENGNYDYLMYADYDYDHPDVVNEMKKWGVWYANEVGLDGYRLDAVKHIKFGFLKDWVDNARAATGKEMFTVGEYWQNDLGALNNYLAKVNYNQSLFDAPLHYNFYAASTGGGYYDMRNILNNTLVASNPTKAVTLVENHDTQPGQSLESTVQPWFKPLAYAFILTRSGGYPSVFYGDMYGTKGTTTREIPALKSKIEPLLKARKDYAYGTQRDYIDNPDVIGWTREGDSTKAKSGLATVITDGPGGSKRMYVGTSNAGEIWYDLTGNRTDKITIGSDGYATFPVNGGSVSVWVQQ

SEQ ID NO: 37239 - protein, 480 aa, Cytophaga sp.
NGTMMQYFEWYVPNDGQQWNRLRTDAPYLSSVGITAVWTPPAYKGTSQADVGYGPYDLYDLGEFNQKGTVRTKYGTKGELKSAVNTLHSNGIQVYGDVVMNHKAGADYTENVTAVEVNPSNRYQETSGEYNIQAWTGFNFPGRGTTYSNWKWQWFHFDGTDWDQSRSLSRIFKFTGKAWDWEVSSENGNYDYLMYADYDYDHPDVVNEMKKWGVWYANEVGLDGYRLDAVKHIKFQFLKDWVDNARAATGKEMFTVGEYWQNDLGALNNYLAKVNYNQSLFDAPLHYNFYAASTGGGYYDMRNILNNTLVASNPTKAVTLVENHDTQPGQSLESTVQPWFKPLAYAFILTRSGGYPSVFYGDMYGTKGTTTREIPALKSKIEPLLKARKDYAYGTQRDYIDNPDVIGWTREGDSTKAKSGLATVITDGPGGSKRMYVGTSNAGEIWYDLTGNRTDKITIGSDGYATFPVNGGSVSVWVQQ

SEQ ID NO: 37240 - protein, 480 aa, Cytophaga sp.
NGTMMQYFEWYVPNDGQQWNRLRTDAPYLSSVGITAVWTPPAYKGTSQADVGYGPYDLYDLGEFNQKGTVRTKYGTKGELKSAVNTLHSNGIQVYGDVVMNHKAGADYTENVTAVEVNPSNRYQETSDEYNIQAWTGFNFPGRGTTYSNWKWQWFHFDGTDWDQSRSLSRIFKFDGKAWDWEVSSENGNYDYLMYADYDYDHPDVVNEMKKWGVWYANEVGLDGYRLDAVKHIKFQFLKDWVDNARAATGKEMFTVGEYWQNDLGALNNYLAKVNYNQSLFDAPLHYNFYAASTGGGYYDMRNILNNTLVASNPTKAVTLVENHDTQPGQSLESTVQPWFKPLAYAFILTRSGGYPSVFYGDMYGTKGTTTREIPALKSKIEPLLKARKDYAYGTQRDYIDNPDVIGWTREGDSTKAKSGLATVITDGPGGSKRMYVGTSNAGEIWYDLTGNRTDKITIGSDGYATFPVNGGSVSVWVQQ

SEQ ID NO: 37241 - protein, 480 aa, Cytophaga sp.
NGTMMQYFEWYVPNDGQQWNRLRTDAPYLSSVGITAVWTPPAYKGTSQADVGYGPYDLYDLGEFNQKGTVRTKYGTKGELKSAVNTLHSNGIQVYGDVVMNHKAGADYTENVTAVEVNPSNRYQETSGEYNIQAWTGFNFPGRGTTYSNWKWQWFHFDGTDWDQSRSLSRIFKFDGKAWDWEVSSENGNYDYLMYADYDYDHPDVVNEMKKWGVWYANEVGLDGYRLDAVKHIKFQFLKDWVDNARAATGKEMFTVGEYWQNDLGALNNYLAKVNYNQSLFDAPLHYNFYAASTGGGYYDMRNILNNTLVASNPTKAVTLVENHDTQPGQSLESTVQPWFKPLAYAFILTRSGGYPSVFYGDMYGTKGTTTREIPALKSKIEPLLKARKDYAYGTQRDYIDNPDVIGWTREGDSTVAKSGLATVITDGPGGSKRMYVGTSNAGEIWYDLTGNRTDKITIGSDGYATFPVNGGSVSVWVQQ

SEQ ID NO: 37242 - protein, 480 aa, Cytophaga sp.
NGTMMQYFEWYVPNDGQQWNRLRTDAPYLSSVGITAVWTPPAYKGTSQADVGYGPYDLYDLGEFNQKGTVRTKYGTKGELKSAVNTLHSNGIQVYGDVVMNHKAGADYTENVTAVEVNPSNRYQETSGEYNIQAWTGFNFPGRGTTYSNWKWQWFHFDGTDWDQSRSLSRIFKFDGKAWDWEVSSENGNYDYLMYADYDYDHPDVVNEMKKWGVWYANEVGLDGYRLDAVKHIKFQFLKDWVDNARAATGKEMFTVGEYWQNDLGALNNYLAKVNYNQSLFDAPLHYNFYAASTGGGYYDMRNILNNTLVASNPTKAVTLVENHDTQPGQSLESTVQPWFKPLAYAFILTRSGGYPSVFYGDMYGTKGTTTREIPALKSKIEPLLKARKDYAYGFQRDYIDNPDVIGWTREGDSTKAKSGLATVITDGPGGSKRMYVGTSNAGEIWYDLTGNRTDKITIGSDGYATFPVNGGSVSVWVQQ

SEQ ID NO: 37243 - protein, 480 aa, Cytophaga sp.
NGTMMQYFEWYVPNDGQQWNRLRTDAPYLSSVGITAVWTPPAYKGTSQADVGYGPYDLYDLGEFNQKGTVRTKYGTKGELKSAVNTLHSNGIQVYGDVVMNHKAGADYTENVTAVEVNPSNRYQETSGEYNIQAWTGFNFPGRGTTYSNWKWQWFHFDGTDWDQSRSLSRIFKFDGKAWDWEVSSENGNYDYLMYADYDYDHPDVVNEMKKWGVWYANEVGLDGYRLDAVKHIKFQFLKDWVDNARAATGKEMFTVGEYWQNDLGALNNYLAKVNYNQSLFDAPLHYNFYAASTGGGYYDMRNILNNTLVAHNPTKAVTLVENHDTQPGQSLESTVQPWFKPLAYAFILTRSGGYPSVFYGDMYGTKGTTTREIPALKSKIEPLLKARKDYAYGTQRDYIDNPDVIGWTREGDSTKAKSGLATVITDGPGGSKRMYVGTSNAGEIWYDLTGNRTDKITIGSDGYATFPVNGGSVSVWVQQ

SEQ ID NO: 37244 - protein, 480 aa, Cytophaga sp.
NGTMMQYFEWYVPNDGQQWNRLRTDAPYLSSVGITAVWTPPAYKGTSQADVGYGPYDLYDLGEFNQKGTVRTKYGTKGELKSAVNTLHSNGIQVYGDVVMNHKAGADYTENVTAVEVNPSNRYQETSGEYNIQAWTGFNFPGRGTTYSNWKWQWFHFDGTDWDQSRSLSRIFKFDGKAWDWEVSSENGNYDYLMYADYDYDHPDVVNEMKKWGVWYANEVGLDGYRLDAVKHIKFQFLKDWVDNARAATGKEMFTVGEYWQNDLGALNNYLAKVNYNQSLFDAPLHYNFYAASTVGGYYDMRNILNNTLVASNPTKAVTLVENHDTQPGQSLESTVQPWFKPLAYAFILTRSGGYPSVFYGDMYGTKGTTTREIPALKSKIEPLLKARKDYAYGTQRDYIDNPDVIGWTREGDSTKAKSGLATVITDGPGGSKRMYVGTSNAGEIWYDLTGNRTDKITIGSDGYATFPVNGGSVSVWVQQ

SEQ ID NO: 37245 - protein, 480 aa, Cytophaga sp.
NGTMMQYFEWYVPNDGQQWNRLRTDAPYLSSVGITAVWTPPAYKGTSQADVGYGPYDLYDLGEFNQKGTVRTKYGTKGELKSAVNTLHSNGIQVYGDVVMNHKAGADYTENVTAVEVNPSNRYQETSGEYNIQAWTGFNFPGRGTTYSNWKWQWKHFDGTDWDQSRSLSRIFKFDGKAWDWEVSSENGNYDYLMYADYDYDHPDVVNEMKKWGVWYANEVGLDGYRLDAVKHIKFQFLKDWVDNARAATGKEMFTVGEYWQNDLGALNNYLAKVNYNQSLFDAPLHYNFYAASTGGGYYDMRNILNNTLVASNPTKAVTLVENHDTQPGQSLESTVQPWFKPLAYAFILTRSGGYPSVFYGDMYGTKGTTTREIPALKSKIEPLLKARKDYAYGTQRDYIDNPDVIGWTREGDSTKAKSGLATVITDGPGGSKRMYVGTSNAGEIWYDLTGNRTDKITIGSDGYATFPVNGGSVSVWVQQ

SEQ ID NO: 37246 - protein, 480 aa, Cytophaga sp.
NGTMMQYFEWYVPNDGQQWNRLRTDAPYLSSVGITAVWTPPAYKGTSQADVGYGPYDLYDLGEFNQKGTVRTKYGTKGELKSAVNTLHSNGIQVYGDVVMNHKAGADYTENVTAVEVNPSNRYQETSGEYNIQAWTGFNFPGRGTTYSNWKWQWFHFDGTDWDQSRSLSRIFKFDGKAWDWEVSSENGNYDYLMYADYDYDHPDVVNEMKKWGVWYANEVGLDGYRLDAVKHIKFQFLKDWVDNARAATGKEMFTVGEYWQNDLGALNNYLAKVNYNQSLFDAPLHYNFYAASTGGGYYDMRNILNNTLVASNPTKAVTLVENHDTQPGQSLESTVQPWFKPLAYAFILTRSGGYPSVFYGDMYGTKGTTTREIPALKSKIEPLLKARKDYAYGTQRDYIDNPDVIGWTREGDSTKAKSGLATVITDGPGGSKRMYVGTSNAGEIWYDLTGNRTDKITIGSDGVATFPVNGGSVSVWVQQ

SEQ ID NO: 37247 - protein, 480 aa, Cytophaga sp.
NGTMMQYFEWYVPNDGQQWNRLRTDAPYLSSVGITAVWTPPAYKGTSQADVGYGPYDLYDLGEFNQKGTVRTKYGTKGELKSAVNTLHSNGIQVYGDVVMNHKAGADYTENVTAVEVNPSNRYQETSGEYNIQAWTGFNFPGRGTTYSNWKWQWSHFDGTDWDQSRSLSRIFKFDGKAWDWEVSSENGNYDYLMYADYDYDHPDVVNEMKKWGVWYANEVGLDGYRLDAVKHIKFQFLKDWVDNARAATGKEMFTVGEYWQNDLGALNNYLAKVNYNQSLFDAPLHYNFYAASTGGGYYDMRNILNNTLVASNPTKAVTLVENHDTQPGQSLESTVQPWFKPLAYAFILTRSGGYPSVFYGDMYGTKGTTTREIPALKSKIEPLLKARKDYAYGTQRDYIDNPDVIGWTREGDSTKAKSGLATVITDGPGGSKRMYVGTSNAGEIWYDLTGNRTDKITIGSDGYATFPVNGGSVSVWVQQ

SEQ ID NO: 37248 - protein, 480 aa, Cytophaga sp.
NGTMMQYFEWYVPNDGQQWNRLRVDAPYLSSVGITAVWTPPAYKGTSQADVGYGPYDLYDLGEFNQKGTVRTKYGTKGELKSAVNTLHSNGIQVYGDVVMNHKAGADYTENVTAVEVNPSNRYQETSGEYNIQAWTGFNFPGRGTTYSNWKWQWFHFDGTDWDQSRSLSRIFKFDGKAWDWEVSSENGNYDYLMYADYDYDHPDVVNEMKKWGVWYANEVGLDGYRLDAVKHIKFQFLKDWVDNARAATGKEMFTVGEYWQNDLGALNNYLAKVNYNQSLFDAPLHYNFYAASTGGGYYDMRNILNNTLVASNPTKAVTLVENHDTQPGQSLESTVQPWFKPLAYAFILTRSGGYPSVFYGDMYGTKGTTTREIPALKSKIEPLLKARKDYAYGTQRDYIDNPDVIGWTREGDSTKAKSGLATVITDGPGGSKRMYVGTSNAGEIWYDLTGNRTDKITIGSDGYATFPVNGGSVSVWVQQ

SEQ ID NO: 37249 - protein, 480 aa, Cytophaga sp.
NGTMMQYFEWYVPNDGQQWNRLRTDAPYLSSVGITAVWTPPAYKGTSQADVGYGPYDLYDLGEFNQKGTVRTKYGTKGELKSAVNTLHSNGIQVYGDVVMNHKAGADYTENVTAVEVNPSNRYQETSGEYNIQAWTGFNFPGRGTTYSNWKWQWFHFDGTDWDQSRSLSRIFKFDGKAWDWEVSSENGNYDYLMYADYDYDHPDVVNEMKKWGVWYANEVGLDGYRLDAVKHIKFQFLKDWVDNARAATGKEMFTVGEYWQNDLGALNNYLAKVNYNQSLFDAPLHYNFYAASTGGGYYDMRNILNNTLVASTPTKAVTLVENHDTQPGQSLESTVQPWFKPLAYAFILTRSGGYPSVFYGDMYGTKGTTTREIPALKSKIEPLLKARKDYAYGTQRDYIDNPDVIGWTREGDSTKAKSGLATVITDGPGGSKRMYVGTSNAGEIWYDLTGNRTDKITIGSDGYATFPVNGGSVSVWVQQ

SEQ ID NO: 37250 - protein, 480 aa, Cytophaga sp.
NGTMMQYFEWYVPNDGQQWNRLRTDAPYLSSVGITAVWTPPAYKGTSQADVGYGPYDLYDLGEFNQKGTVRTKYGTKGELKSAVNTLHSNGIQVYGDVVMNHKAGADYTENVTAVEVNPSNRYQETSGEYNIQAWTGFNFPGRGTTYSNWKWQWFHFDGTDWDQSRSLSRIFKFDGKAWDWEVSSENGNYDYLMYADYDYDHPDVVNEMKKWGVWYANEVGLDGYRLDAVKHIKFQFLKDWVDNARAATGKEMFTVGEYWQNDLGALNNYLAKVNYNQSLFDAPLHYNFYAASTGGGYYDMRNILNNTLVASNPTKAVTLVENHDTQPGQSLESTVQPWFKPLAYAFILTRSGGYPSVFYGDMYGTKGTTTREIPALKSKIEPLLKARKDYAYGTQRDYIDNPDVIGWTREGDSTHAKSGLATVITDGPGGSKRMYVGTSNAGEIWYDLTGNRTDKITIGSDGYATFPVNGGSVSVWVQQ

SEQ ID NO: 37251 - protein, 480 aa, Cytophaga sp.
NGTMMQYFEWYVPNDGQQWNRLRTDAPYLSSVGITAVWTPPAYKGTSQADVGYGPYDLYDLGEFNQKGTVRTKYGTKGELKSAVNTLHSNGIQVYGDVVMNHKAGADYTENVTAVEVNPSNRYQETSGEYNIQAWTGFNFPGRGTTYSNWKWQWFHFDGTDWDQSRSLSRIFKFDGKAWDWEVSSENGNYDYLMYADYDYDHPDVVNEMKKWGVWYANEVGLDGYRLDAVKHIKFQFLKDWVDNARAATGKEMFTVGEYWQNDLGALNNYLAKVNYNQSLFDAPLHYNFYAASTGGGYYDMRNILNNTLVASNPTKAVTLVENHDTQPGQSLESTVQPWFKPLAYAFILTRSGGYPSVFYGDMYGTKGTTTREIPALKSKIEPLLKARKDYAYGTQMDYIDNPDVIGWTREGDSTKAKSGLATVITDGPGGSKRMYVGTSNAGEIWYDLTGNRTDKITIGSDGYATFPVNGGSVSVWVQQ

SEQ ID NO: 37252 - protein, 480 aa, Cytophaga sp.
NGTMMQYFEWYVPNDGQQWNRLRTDAPYLSSVGITAVWTPPAYKGTSQADVGYGPYDLYDLGEFNQKGTVRTKYGTKGELKSAVNTLHSNGIQVYGDVVMNHKAGADYTENVTAVEVNPSNRYQETSGEYNIQAWTGFNFPGRGTTYSNWKWQWFHFDGTDWDGSRSLSRIFKFDGKAWDWEVSSENGNYDYLMYADYDYDHPDVVNEMKKWGVWYANEVGLDGYRLDAVKHIKFQFLKDWVDNARAATGKEMFTVGEYWQNDLGALNNYLAKVNYNQSLFDAPLHYNFYAASTGGGYYDMRNILNNTLVASNPTKAVTLVENHDTQPGQSLESTVQPWFKPLAYAFILTRSGGYPSVFYGDMYGTKGTTTREIPALKSKIEPLLKARKDYAYGTQRDYIDNPDVIGWTREGDSTKAKSGLATVITDGPGGSKRMYVGTSNAGEIWYDLTGNRTDKITIGSDGYATFPVNGGSVSVWVQQ

SEQ ID NO: 37253 - protein, 480 aa, Cytophaga sp.
NGTMMQYFEWYVPNDGQQWNRLRTDAPYLSSVGITAVWTPPAYKGTSQADVGYGPYDLYDLGEFNQKGTVRTKYGTKGELKSAVNTLHSNGIQVYGDVVMNHKAGADYTENVTAVEVNPSNRYQETSGEYNIQAWTGFNFPGRGTTYSNWKWQWFHFDGTDWDQSRSLSRIFKFDGKAWDWEVSSENGNYDYLMYADYDYDHPDVVNEMKKWGVWYANEVGLDGYRLDAVKHIKFQFLKDWVDNARAATGKEMFTVGEYWQNDLGALNNYLAKVNYNQSLFDAPLHYNFYAASTGGGYYDMRNILNNTLVASNPTKAVTLVENHDTQPGQSLESTVQPWFKPLAYAFILTRSGGYPSVFYGDMYGTKGTTTREIPALKSKIEPLLKARKDYAYGTQRDYIDNPDVIGWTREGDSTKAKSGLATVITDGPGGSKRMYVGTSNAGEIWYDLTGNRTDKITIGSDGYATFPVNNGSVSVWVQQ

SEQ ID NO: 37254 - protein, 480 aa, Cytophaga sp.
NGTMMQYFEWYVPNDGQQWNRLRTDAPYLSSVGITAVWTPPAYKGTSQADVGYGPYDLYDLGEFNQKGTVRTKYGTKGELKSAVNTLHSNGIQVYGDVVMNHKAGADYTENVTAVEVNPSNRYQETSMEYNIQAWTGFNFPGRGTTYSNWKWQWFHFDGTDWDQSRSLSRIFKFDGKAWDWEVSSENGNYDYLMYADYDYDHPDVVNEMKKWGVWYANEVGLDGYRLDAVKHIKFQFLKDWVDNARAATGKEMFTVGEYWQNDLGALNNYLAKVNYNQSLFDAPLHYNFYAASTGGGYYDMRNILNNTLVASNPTKAVTLVENHDTQPGQSLESTVQPWFKPLAYAFILTRSGGYPSVFYGDMYGTKGTTTREIPALKSKIEPLLKARKDYAYGTQRDYIDNPDVIGWTREGDSTKAKSGLATVITDGPGGSKRMYVGTSNAGEIWYDLTGNRTDKITIGSDGYATFPVNGGSVSVWVQQ

SEQ ID NO: 37255 - protein, 480 aa, Cytophaga sp.
NGTMMQYFEWYVPNDGQQWNRLRTDAPYLSSVGITAVWTPPAYKGTSQADVGYGPYDLYDLGEFNQKGTVRTKYGTKGELKSAVNTLHSNGIQVYGDVVMNHKAGADYTENVTAVEVNPSNRYQETSGEYNIQAWTGFNFPGRGTTYSNWKWQWFHFDGTDWDQSRSLSRIFKFDGKAWDWEVSSENGNYDYLMYADYDYDHPDVVNEMKKWGVWYANEVGLDGYRLDAVKHIKFQFLKDWVDNARAATGKEMFTVGEYWQNDLGALNNYLAKVNYNQSLFDAPLHYNFYAASTGGGYYDMRNILNNTLVASNPTKAVTLVENHDTQPGQSLESTVQPWFKPLAYAFILTRSGGYPSVFYGDMYGTKGTTTREIPALKSKIEPLLKARKDYAYGTQRDYIDNPDVIGWTREGDSTKAKSGLATVITDGPGGSKRMYVGTSNAGEIWYDLTGNRTDKITIGSDGYATFRVNGGSVSVWVQQ

SEQ ID NO: 37256 - protein, 480 aa, Cytophaga sp.
NGTMMQYFEWYVPNDGQQWNRLRTDAPYLSSVGITAVWTPPAYKGTSQADVGYGPYDLYDLGEFNQKGTVRTKYGTKGELKSAVNTLHSNGIQVYGDVVMNHKAGADYTENVTAVEVNPSNRYQETSGEYGIQAWTGFNFPGRGTTYSNWKWQWFHFDGTDWDQSRSLSRIFKFDGKAWDWEVSSENGNYDYLMYADYDYDHPDVVNEMKKWGVWYANEVGLDGYRLDAVKHIKFQFLKDWVDNARAATGKEMFTVGEYWQNDLGALNNYLAKVNYNQSLFDAPLHYNFYAASTGGGYYDMRNILNNTLVASNPTKAVTLVENHDTQPGQSLESTVQPWFKPLAYAFILTRSGGYPSVFYGDMYGTKGTTTREIPALKSKIEPLLKARKDYAYGTQRDYIDNPDVIGWTREGDSTKAKSGLATVITDGPGGSKRMYVGTSNAGEIWYDLTGNRTDKITIGSDGYATFPVNGGSVSVWVQQ

SEQ ID NO: 37257 - protein, 480 aa, Cytophaga sp.
NGTMMQYFEWYVPNDGQQWNRLRTDAPYLSSVGITAVWTPPAYKGTSQADVGYGPYDLYDLGEFNQKGTVRTKYGTKGELKSAVNTLHSNGIQVYGDVVMNHKAGADYTENVTAVEVNPSNRYQETSGEYNIQAWTGFNFPGRGTTYSNWKWQWFHFDGTDWDQSRSLSRIFKFDGKAWDWEVSSENGNYDYLMYADYDYDHPDVVNEMKKWGVWYANEVGLDGYRLDAVKHIKFQFLKDWVDNARAATGKEMFTVGEYWQNDLGALNNYLAKVNYNQSLFDAPLHYNFYAASTGGGYYDMRNILNNTLVASNPTKAVTLVENHDTQPGQSLESTVQPWFKPLAYAFILTRSGGYPSVFYGDMYGTKGTTTREIPALKSKIEPLLKARKDYAYGTQRDYIDNPDVIGWTREGDSTKAKSGLATVITDGPGGSKRMYVGTSNAGEIWYDLTGNRTDKITIGSDGYATFPVNVGSVSVWVQQ

SEQ ID NO: 37258 - protein, 480 aa, Cytophaga sp.
NGTMMQYFEWYVPNDGQQWNRLRTDAPYLSSVGITAVWTPPAYKGTSQADVGYGPYDLYDLGEFNQKGTVRTKYGTKGELKSAVNTLHSNGIQVYGDVVMNHKAGADYTENVTAVEVNPSNRYQETSGEYNIQAWTGFNFPGRGTTYSNWKWQWFHFDGTDWDQSRSLSRIFKFDGKAWDWEVSSENGNYDYLMYADYDYDHPDVVNEMKKWGVWYANEVGLDGYRLDAVKHIKFQFLKDWVDNARAATGKEMFTVGEYWQNDLGALNNYLAKVNYNQSLFDAPLHYNFYAASTGGGYYDMRNILNNTLVASNPTKAVTLVENHDTQPGQSLESTVQPWFKPLAYAFILTRSGGYPSVFYGDMYGTKGTTTREIPKLKSKIEPLLKARKDYAYGTQRDYIDNPDVIGWTREGDSTKAKSGLATVITDGPGGSKRMYVGTSNAGEIWYDLTGNRTDKITIGSDGYATFPVNGGSVSVWVQQ

SEQ ID NO: 37259 - protein, 480 aa, Cytophaga sp.
NGTMMQYFEWYVPNDGQQWNRLRTDAPYLSSVGITAVWTPPAYKGTSQADVGYGPYDLYDLGEFNQKGTVRTKYGTKGELKSAVNTLHSNGIQVYGDVVMNHKAGADYTENVTAVEVNPSNRYQETSGEYNIQAWTGFNFPGRGTTYSNWKWSWFHFDGTDWDQSRSLSRIFKFDGKAWDWEVSSENGNYDYLMYADYDYDHPDVVNEMKKWGVWYANEVGLDGYRLDAVKHIKFQFLKDWVDNARAATGKEMFTVGEYWQNDLGALNNYLAKVNYNQSLFDAPLHYNFYAASTGGGYYDMRNILNNTLVASNPTKAVTLVENHDTQPGQSLESTVQPWFKPLAYAFILTRSGGYPSVFYGDMYGTKGTTTREIPALKSKIEPLLKARKDYAYGTQRDYIDNPDVIGWTREGDSTKAKSGLATVITDGPGGSKRMYVGTSNAGEIWYDLTGNRTDKITIGSDGYATFPVNGGSVSVWVQQ

SEQ ID NO: 37260 - protein, 480 aa, Cytophaga sp.
NGTMMQYFEWYVPNDGQQWNRLRTDAPYLSSVGITAVWTPPAYKGTSQADVGYGPYDLYDLGEFNQKGTVRTKYGTKGELKSAVNTLHSNGIQVYGDVVMNHKAGADYTENVTAVEVNPSNRYQETSGEYNIQAWTGFNFPGRGTTYSNWKWQWFHFDGTDWDQSRSLSRIFKFDGKAWDWEVSSENGNYDYLMYADYDYDHPDVVNEMKKWGVWYANEVDLDGYRLDAVKHIKFQFLKDWVDNARAATGKEMFTVGEYWQNDLGALNNYLAKVNYNQSLFDAPLHYNFYAASTGGGYYDMRNILNNTLVASNPTKAVTLVENHDTQPGQSLESTVQPWFKPLAYAFILTRSGGYPSVFYGDMYGTKGTTTREIPALKSKIEPLLKARKDYAYGTQRDYIDNPDVIGWTREGDSTKAKSGLATVITDGPGGSKRMYVGTSNAGEIWYDLTGNRTDKITIGSDGYATFPVNGGSVSVWVQQ

SEQ ID NO: 37261 - protein, 480 aa, Cytophaga sp.
NGTMMQYFEWYVPNDGQQWNRLRTDAPYLSSVGITAVWTPPAYKGTSQADVGYGPYDLYDLGEFNQKGTVRTKYGTKGELKSAVNTLHSNGIQVYGDVVMNHKAGADYTENVTAVEVNPSNRYQETSGEYNIQAWTGFNFPGRGTTYSNWKWQWFHFDGTDWDQSRSLSRIFKFDGKAWDWEVSSENGNYDYLMYADYDYDHPDVVNEMKKWGVWYANEVGLDGYRLDAVKHIKFQFLKDWVDNARAATGKEMFTVGEYWQNDLGDLNNYLAKVNYNQSLFDAPLHYNFYAASTGGGYYDMRNILNNTLVASNPTKAVTLVENHDTQPGQSLESTVQPWFKPLAYAFILTRSGGYPSVFYGDMYGTKGTTTREIPALKSKIEPLLKARKDYAYGTQRDYIDNPDVIGWTREGDSTKAKSGLATVITDGPGGSKRMYVGTSNAGEIWYDLTGNRTDKITIGSDGYATFPVNGGSVSVWVQQ

SEQ ID NO: 37262 - protein, 480 aa, Cytophaga sp.
NGTMMQYFEWYVPNDGQQWVRLRTDAPYLSSVGITAVWTPPAYKGTSQADVGYGPYDLYDLGEFNQKGTVRTKYGTKGELKSAVNTLHSNGIQVYGDVVMNHKAGADYTENVTAVEVNPSNRYQETSGEYNIQAWTGFNFPGRGTTYSNWKWQWFHFDGTDWDQSRSLSRIFKFDGKAWDWEVSSENGNYDYLMYADYDYDHPDVVNEMKKWGVWYANEVGLDGYRLDAVKHIKFQFLKDWVDNARAATGKEMFTVGEYWQNDLGALNNYLAKVNYNQSLFDAPLHYNFYAASTGGGYYDMRNILNNTLVASNPTKAVTLVENHDTQPGQSLESTVQPWFKPLAYAFILTRSGGYPSVFYGDMYGTKGTTTREIPALKSKIEPLLKARKDYAYGTQRDYIDNPDVIGWTREGDSTKAKSGLATVITDGPGGSKRMYVGTSNAGEIWYDLTGNRTDKITIGSDGYATFPVNGGSVSVWVQQ

SEQ ID NO: 37263 - protein, 480 aa, Cytophaga sp.
NGTMMQYFEWYVPNDGQQWNRLRTDAPYLSSVGITAVWTPPAYKGTSQADVGYGPYDLYDLGEFNQKGTVRTKYGTKGELKSAVNTLHSNGIQVYGDVVMNHKAGADYTENVTAVEVNPSNRYQETSGEYNIQAWTGFNFPGRGTTYSNWKWQWFHFDGTDWDQSRSLSRIFKFDGKAWDWEVSSENGNYDYLMYADYDYDHPDVVNEMKKWGVWYANEVGLDGYRLDAVKHIKFQFLKDWVDNARCATGKEMFTVGEYWQNDLGALNNYLAKVNYNQSLFDAPLHYNFYAASTGGGYYDMRNILNNTLVASNPTKAVTLVENHDTQPGQSLESTVQPWFKPLAYAFILTRSGGYPSVFYGDMYGTKGTTTREIPALKSKIEPLLKARKDYAYGTQRDYIDNPDVIGWTREGDSTKAKSGLATVITDGPGGSKRMYVGTSNAGEIWYDLTGNRTDKITIGSDGYATFPVNGGSVSVWVQQ

SEQ ID NO: 37264 - protein, 480 aa, Cytophaga sp.
NGTMMQYFEWYVPNDGQQWNRLRTDAPYLSSVGITAVWTPPAYKGTSQADVGYGPYDLYDLGEFNQKGTVRTKYGTKGELKSAVNTLHSNGIQVYGDVVMNHKAGADYTENVTAVEVNPSNRYQETSGEYNITAWTGFNFPGRGTTYSNWKWQWFHFDGTDWDQSRSLSRIFKFDGKAWDWEVSSENGNYDYLMYADYDYDHPDVVNEMKKWGVWYANEVGLDGYRLDAVKHIKFQFLKDWVDNARAATGKEMFTVGEYWQNDLGALNNYLAKVNYNQSLFDAPLHYNFYAASTGGGYYDMRNILNNTLVASNPTKAVTLVENHDTQPGQSLESTVQPWFKPLAYAFILTRSGGYPSVFYGDMYGTKGTTTREIPALKSKIEPLLKARKDYAYGTQRDYIDNPDVIGWTREGDSTKAKSGLATVITDGPGGSKRMYVGTSNAGEIWYDLTGNRTDKITIGSDGYATFPVNGGSVSVWVQQ

SEQ ID NO: 37265 - protein, 480 aa, Cytophaga sp.
NGTMMQYFEWYVPNDGQQWNRLRTDAPYLSSVGITAVWTPPAYKGTSQADVGYGPYDLYDLGEFNQKGTVRTKYGTKGELKSAVNTLHSNGIQVYGDVVMNHKAGADYTENVTAVEVNPSNRYQETSGEYNIQAWTGFNFPGRGTTYSNWKWQWFHFDGTDWDQSRSLSRIFKFDGKAWDWEVSSENGNYDYLMYADYDYDHPDVVNEMKKWGVWYANEVGLDGYRLDAVKHIKFQFLKDWVDNARAATGKEMFTVGEYWQNDLGALNNYLAKVNYNQSLFDAPLHYNFYAASTGGGYYDMRNILNNTLVASNPTKAVTLVENHDTQPGQSLESTVQPWFKPLAYAFILTRSGGYPSVFYGDMYGTKGTTTREIPALKSYIEPLLKARKDYAYGTQRDYIDNPDVIGWTREGDSTKAKSGLATVITDGPGGSKRMYVGTSNAGEIWYDLTGNRTDKITIGSDGYATFPVNGGSVSVWVQQ

SEQ ID NO: 37266 - protein, 480 aa, Cytophaga sp.
NGTMMQYFEWYVPNDGQQWNRLRTDAPYLSSVGITAVWTPPAYKGTSQADVGYGPYDLYDLGEFNQKGTVRTKYGTKGELKSAVNTLHSNGIQVYGDVVMNHKAGADYTENVTAVEVNPSNRYQETSGEYNIQAWTGFNFPGRGTTYSNWKWQWFHFDGTDWDQSRSLSRIFKFDGKAWDWEVSSENGNYDYLMYADYDYDHPDVVNEMKKWGVWYANEVGLDGYRLDAVKHIKFQFLKDWVDNARAATGKEMFTVGEYWQNDLGALNNYLAKVNYNQSLFDAPLHYNFYAASTGGGYYDMRNILNNTLVASNPTKAVTLVENHDTQPGQSLESTVQPWFKPLAYAFILTRSGGYPSVFYGDMYGTKGTTTREIPALKSKIEPLLKARKDYAYGTQRDYIDNPDVIGWTREGDSTKAKSGLATVITDGPGGSKRMYVGTSNAGEWWYDLTGNRTDKITIGSDGYATFPVNGGSVSVWVQQ

SEQ ID NO: 37267 - protein, 480 aa, Cytophaga sp.
NGTMMQYFEWYVPNDGQQWNRLRTDAPYLSSVGITAVWTPPAYKGTSQADVGYGPYDLYDLGEFNQKGTVRTKYGTKGELKSAVNTLHSNGIQVYGDVVMNHKAGADYTENVTAVEVNPSNRYQETSGEYNIQAWTGFNFPGRGTTYSNWKWQWFHFDGTDWDQSRSLSRIFKFDGKAWDWEVSSENGNYDYLMYADYDYDHPDVVNEMKKWGVWYANEVGLDGYRLDAVKHIKFQFLKDWVDNARAATGKEMFTVGEYWQNDLGALNNYLAKVNYNQSLFDAPLHYNFYAASTGGGYYDMRNILNNTLVESNPTKAVTLVENHDTQPGQSLESTVQPWFKPLAYAFILTRSGGYPSVFYGDMYGTKGTTTREIPALKSKIEPLLKARKDYAYGTQRDYIDNPDVIGWTREGDSTKAKSGLATVITDGPGGSKRMYVGTSNAGEIWYDLTGNRTDKITIGSDGYATFPVNGGSVSVWVQQ

SEQ ID NO: 37268 - protein, 480 aa, Cytophaga sp.
NGTMMQYFEWYVPNDGQQWNRLRTDAPYLSSVGITAVWTPPAYKGTSQADVGYGPYDLYDLGEFNQKGTVRTKYGTKGELKSAVNTLHSNGIQVYGDVVMNHKAGADYTENVTAVEVNPSNRYQETSGEYNIQAWTGFNFPGRGTTYSNWKWQWFHFDGTDWDNSRSLSRIFKFDGKAWDWEVSSENGNYDYLMYADYDYDHPDVVNEMKKWGVWYANEVGLDGYRLDAVKHIKFQFLKDWVDNARAATGKEMFTVGEYWQNDLGALNNYLAKVNYNQSLFDAPLHYNFYAASTGGGYYDMRNILNNTLVASNPTKAVTLVENHDTQPGQSLESTVQPWFKPLAYAFILTRSGGYPSVFYGDMYGTKGTTTREIPALKSKIEPLLKARKDYAYGTQRDYIDNPDVIGWTREGDSTKAKSGLATVITDGPGGSKRMYVGTSNAGEIWYDLTGNRTDKITIGSDGYATFPVNGGSVSVWVQQ

SEQ ID NO: 37269 - protein, 480 aa, Cytophaga sp.
NGTMMQYFEWYVPNDGQQWNRLRTDAPYLSSVGITAVWTPPAYKGTSQADVGYGPYDLYDLGEFNQKGTVRTKYGTKGELKSAVNTLHSNGIQVYGDVVMNHKAGADYTENVTAVEVNPSNRYQETSGEYNIQAWTGFNFPGRGTTYSNFKWQWFHFDGTDWDQSRSLSRIFKFDGKAWDWPVSSENGNYDYLMYADYDYDHPDVVNEMKKWGVWYANEVGLDGYRLDAVKHIKFSFLKDWVDNARAATGKEMFTVGEYWQNDLGALNNYLAKVNYNQSLFDAPLHYNFYAASTGGGDYDMRNILNNTLVASNPTKAVTLVENHDTQPGQSLESTVQPWFKPLAYAFILTRSGGYPSVFYGDMYGTKGTTTREIPALKSKIEPLLKARKDYAYGTQRDYIDNPDVIGWTREGDSTKAKSGLATVITDGPGGSKRMYVGTSNAGEIWYDLTGNRTDKITIGSDGYATFPVNTESVSVWVQQ

SEQ ID NO: 37270 - protein, 480 aa, Cytophaga sp.
NGTMMQYFEWYVPNDGQQWNRLRTDAPYLSSVGITAVWTPPAYKGTSQADVGYGPYDLYDLGEFNQKGTVRTKYGTKGELKSAVNTLHSNGIQVYGDVVMNHKAGADYTENVTAVEVNPSNRYQETSGEYNIQAWTGFNFPGRGTTYSNWKWQWFHFDGTDWDQSRSLSRIFKFDGKAWDWEVSSENGNYDYLMYADYDYDHPDVVNEMKKWGVWYANEVGLDGYRLDAVKHIKFQFLKDWVDNARAATGKEMFTVGEYWQNDLGALNNYLAKVNYNQSLFDAPLHYNFYAASTGGGYYDMRNILNNTLVASNPTKAVTLVENHDTQPGQSLESTVQPWFKPLAYAFILTRHGGYPSVFYGDMYGTKGTTTREIPALKSKIEPLLKARKDYAYGTQRDYIDNPDVIGWTREGDSTKAKSGLATVITDGPGGSKRMYVGTSNAGEIWYDLTGNRTDKITIGSDGYATFPVNGGSVSVWVQQ

SEQ ID NO: 37271 - protein, 480 aa, Cytophaga sp.
NGTMMQYFEWYVPNDGQQWNRLRTDAPYLSSVGITAVWTPPAYKGTSQADVGYGPYDLYDLGEFNQKGTVRTKYGTKGELKSAVNALHSNGIQVYGDVVMNHKAGADYTENVTAVEVNPSNRYQETSGEYNIQAWTGFNFPGRGTTYSNWKWQWFHFDGTDWDQSRSLSRIFKFDGKAWDWEVSSENGNYDYLMYADYDYDHPDVVNEMKKWGVWYANEVGLDGYRLDAVKHIKFQFLKDWVDNARAATGKEMFTVGEYWQNDLGALNNYLAKVNYNQSLFDAPLHYNFYAASTGGGYYDMRNILNNTLVASNPTKAVTLVENHDTQPGQSLESTVQPWFKPLAYAFILTRSGGYPSVFYGDMYGTKGTTTREIPALKSKIEPLLKARKDYAYGTQRDYIDNPDVIGWTREGDSTKAKSGLATVITDGPGGSKRMYVGTSNAGEIWYDLTGNRTDKITIGSDGYATFPVNGGSVSVWVQQ

SEQ ID NO: 37272 - protein, 480 aa, Cytophaga sp.
NGTMMQYFEWYVPNDGQQWNRLRTDAPYLSSVGITAVWTPPAYKGTSQADVGYGPYDLYDLGEFNQKGTVRTKYGTKGELKSAVNTLHSNGIQVYGDVVMNHKAGADYTENVTAVEVNPSNRYQETSGEYNIQAWTGFNFPGRGTTYSNWKWQWFHFDGTDWDQSRSLSRIFKFDGKAWDWEVSSENGNYDYLMYADYDYDHPDVVNEMKKWGVWYANEVGLDGYRLDAVKHIKFQFLKDWVDNARAATGKEMFTVGEYWQNDLGALNNYLAKVNYNQSLFDAPLHYNFYAASTGGGYYDMRNILNNTLVASNPTKAVTLVENHDTQPGQSLESTVQPWFKPLAYAFILTRSGGYPSVFYGDMYGTKGTTTREIPALKSKIEPLLKARKDYAYGTQRDYIDEPDVIGWTREGDSTKAKSGLATVITDGPGGSKRMYVGTSNAGEIWYDLTGNRTDKITIGSDGYATFPVNGGSVSVWVQQ

SEQ ID NO: 37273 - protein, 480 aa, Cytophaga sp.
NGTMMQYFEWYVPNDGQQWNRLRTDAPYLSSVGITAVWTPPAYKGTSQADVGYGPYDLYDLGEFNQKGTVRTKYGTKFELKSAVNTLHSNGIQVYGDVVMNHKAGADYTENVTAVEVNPSNRYQETSGEYNIQAWTGFNFPGRGTTYSNWKWQWFHFDGTDWDQSRSLSRIFKFDGKAWDWEVSSENGNYDYLMYADYDYDHPDVVNEMKKWGVWYANEVGLDGYRLDAVKHIKFQFLKDWVDNARAATGKEMFTVGEYWQNDLGALNNYLAKVNYNQSLFDAPLHYNFYAASTGGGYYDMRNILNNTLVASNPTKAVTLVENHDTQPGQSLESTVQPWFKPLAYAFILTRSGGYPSVFYGDMYGTKGTTTREIPALKSKIEPLLKARKDYAYGTQRDYIDNPDVIGWTREGDSTKAKSGLATVITDGPGGSKRMYVGTSNAGEIWYDLTGNRTDKITIGSDGYATFPVNGGSVSVWVQQ

SEQ ID NO: 37274 - protein, 480 aa, Cytophaga sp.
NGTMMQYFEWYVPNDGQQWNRLRTDAPYLSSVGITAVWTPPAYKGTSQADVGYGPYDLYDLGEFNQKGTVRTKYGTKGELKSAVNTLHSNGIQVYGDVVMNHKAGADYTENVTAVEVNPSNRYQETSGEYNIQAWTGFNFPGRGTTYSNWKWQWFHFDGTDWDQSRSLSRIFKFDGKAWDWEVSSENGNYDYLMYADYDYDHPDVVNEMKKWGVWYANEVGLDGYRLDAVKHIKFQFLKDWVDNARAATGKEMFTVGEYWQNDLGALNNYLAKVNYNQSLFDAPLHYNFYAASTDGGYYDMRNILNNTLVASNPTKAVTLVENHDTQPGQSLESTVQPWFKPLAYAFILTRSGGYPSVFYGDMYGTKGTTTREIPALKSKIEPLLKARKDYAYGTQRDYIDNPDVIGWTREGDSTKAKSGLATVITDGPGGSKRMYVGTSNAGEIWYDLTGNRTDKITIGSDGYATFPVNGGSVSVWVQQ

SEQ ID NO: 37275 - protein, 480 aa, Cytophaga sp.
NGTMMQYFEWYVPNDGQQWNRLRTDAPYLSSVGITAVWTPPAYKGTSQADVGYGPYDLYDLGEFNQKGTVRTKYGTKGELKSAVNTLHSNGIQVYGDVVMNHKAGADYTENVTAVEVNPSNRYQETSGEYNIQAWTGFNFPGRGTTYSNWKWQWFHFDGTDWDQSRSLSRIFKFYGKAWDWEVSSENGNYDYLMYADYDYDHPDVVNEMKKWGVWYANEVGLDGYRLDAVKHIKFQFLKDWVDNARAATGKEMFTVGEYWQNDLGALNNYLAKVNYNQSLFDAPLHYNFYAASTGGGYYDMRNILNNTLVASNPTKAVTLVENHDTQPGQSLESTVQPWFKPLAYAFILTRSGGYPSVFYGDMYGTKGTTTREIPALKSKIEPLLKARKDYAYGTQRDYIDNPDVIGWTREGDSTKAKSGLATVITDGPGGSKRMYVGTSNAGEIWYDLTGNRTDKITIGSDGYATFPVNGGSVSVWVQQ

SEQ ID NO: 37276 - protein, 480 aa, Cytophaga sp.
NGTMMQYFEWYVPNDGQQWNRLRTDAPYLSSVGITAVWTPPAYKGTSQADVGYGPYDLYDLGEFNQKGTVRTKYGTKGELKSAVNTLHSNGIQVYGDVVMNHKAGADYTENVTAVEVNPSNRCQETSGEYNIQAWTGFNFPGRGTTYSNWKWQWFHFDGTDWDQSRSLSRIFKFDGKAWDWEVSSENGNYDYLMYADYDYDHPDVVNEMKKWGVWYANEVGLDGYRLDAVKHIKFQFLKDWVDNARAATGKEMFTVGEYWQNDLGALNNYLAKVNYNQSLFDAPLHYNFYAASTGGGYYDMRNILNNTLVASNPTKAVTLVENHDTQPGQSLESTVQPWFKPLAYAFILTRSGGYPSVFYGDMYGTKGTTTREIPALKSKIEPLLKARKDYAYGTQRDYIDNPDVIGWTREGDSTKAKSGLATVITDGPGGSKRMYVGTSNAGEIWYDLTGNRTDKITIGSDGYATFPVNGGSVSVWVQQ

SEQ ID NO: 37277 - protein, 480 aa, Cytophaga sp.
NGTMMQYFEWYVPNDGQQWNRLRTDAPYLSSVGITAVWTPPAYKGTSQADVGYGPYDLYDLGEFNQKGTVRTKYGTKGELKSAVTTLHSNGIQVYGDVVMNHKAGADYTENVTAVEVNPSNRYQETSGEYNIQAWTGFNFPGRGTTYSNWKWQWFHFDGTDWDQSRSLSRIFKFDGKAWDWEVSSENGNYDYLMYADYDYDHPDVVNEMKKWGVWYANEVGLDGYRLDAVKHIKFQFLKDWVDNARAATGKEMFTVGEYWQNDLGALNNYLAKVNYNQSLFDAPLHYNFYAASTGGGYYDMRNILNNTLVASNPTKAVTLVENHDTQPGQSLESTVQPWFKPLAYAFILTRSGGYPSVFYGDMYGTKGTTTREIPALKSKIEPLLKARKDYAYGTQRDYIDNPDVIGWTREGDSTKAKSGLATVITDGPGGSKRMYVGTSNAGEIWYDLTGNRTDKITIGSDGYATFPVNGGSVSVWVQQ

SEQ ID NO: 37278 - protein, 480 aa, Cytophaga sp.
NGTMMQYFEWYVPNDGQQWNRLRTDAPYLSSVGITAVWTPPAYKGTSQADVGYGPYDLYDLGEFNQKGTVRTKYGTKGELKSAVNTLHSNGIQVYGDVVMNHKAGADYTENVTAVEVNPSNRYQETSGEYNIQAWTGFNFPGRGTTYSNWKWQWFHFDGTDWDQSRSLSRIFKFQGKAWDWEVSSENGNYDYLMYADYDYDHPDVVNEMKKWGVWYANEVGLDGYRLDAVKHIKFQFLKDWVDNARAATGKEMFTVGEYWQNDLGALNNYLAKVNYNQSLFDAPLHYNFYAASTGGGYYDMRNILNNTLVASNPTKAVTLVENHDTQPGQSLESTVQPWFKPLAYAFILTRSGGYPSVFYGDMYGTKGTTTREIPALKSKIEPLLKARKDYAYGTQRDYIDNPDVIGWTREGDSTKAKSGLATVITDGPGGSKRMYVGTSNAGEIWYDLTGNRTDKITIGSDGYATFPVNGGSVSVWVQQ

SEQ ID NO: 37279 - protein, 480 aa, Cytophaga sp.
NGTMMQYFEWYVPNDGQQWNRLRTDAPYLSSVGITAVWTPPAYKGTSQADVGYGPYDLYDLGEFNQKGTVRTKYGTKGELKSAVNTLHSNGIQVYGDVVMNHKAGADYTENVTAVEVNPSNRYQETSGEYNIQAWTGFNFPGRGTTYSNWKWQWFHFDGTDWDQSRSLSRIFKFDGKAWDWEVSSENGNYDYLMYADYDYDHPDVVNEMKKWGVWYANEVGLDGYRLDAVKHIKFQFLKDWVDNARAATGKEMFTVGEYWQNDLGALNNYLQKVNYNQSLFDAPLHYNFYAASTGGGYYDMRNILNNTLVASNPTKAVTLVENHDTQPGQSLESTVQPWFKPLAYAFILTRSGGYPSVFYGDMYGTKGTTTREIPALKSKIEPLLKARKDYAYGTQRDYIDNPDVIGWTREGDSTKAKSGLATVITDGPGGSKRMYVGTSNAGEIWYDLTGNRTDKITIGSDGYATFPVNGGSVSVWVQQ

SEQ ID NO: 37280 - protein, 480 aa, Cytophaga sp.
NGTMMQYFEWYVPNDGQQWNRLRTDAPYLSSVGITAVWTPPAYKGTSQADVGYGPYDLYDLGEFNQKGTVRTKYGTKGELKSAVNTLHSNGIQVYGDVVMNHKAGADYTENVTAVEVNPSNRYQETSQEYNIQAWTGFNFPGRGTTYSNWKWQWFHFDGTDWDQSRSLSRIFKFDGKAWDWEVSSENGNYDYLMYADYDYDHPDVVNEMKKWGVWYANEVGLDGYRLDAVKHIKFQFLKDWVDNARAATGKEMFTVGEYWQNDLGALNNYLAKVNYNQSLFDAPLHYNFYAASTGGGYYDMRNILNNTLVASNPTKAVTLVENHDTQPGQSLESTVQPWFKPLAYAFILTRSGGYPSVFYGDMYGTKGTTTREIPALKSKIEPLLKARKDYAYGTQRDYIDNPDVIGWTREGDSTKAKSGLATVITDGPGGSKRMYVGTSNAGEIWYDLTGNRTDKITIGSDGYATFPVNGGSVSVWVQQ

SEQ ID NO: 37281 - protein, 480 aa, Cytophaga sp.
NGTMMQYFEWYVPNDGQQWNRLRTDAPYLSSVGITAVWTPPAYKGTSQADVGYGPYDLYDLGEFNQKGTVRTKYGTKGELKSAVNTLHSNGIQVYGDVVMNHKAGADYTENVTAVEVNPSNRYQETSGEYNIQAWTGFNFPGRGTTYSNWKWQWFHFDGTDWDQSRSLSRIFKFDGKAWDWEVSSENGNYDYLMYADYDYDHPDVVNEMKKWGVWYANEVGLDGYRLDAVKHIKFQFLKDWVHNARAATGKEMFTVGEYWQNDLGALNNYLAKVNYNQSLFDAPLHYNFYAASTGGGYYDMRNILNNTLVASNPTKAVTLVENHDTQPGQSLESTVQPWFKPLAYAFILTRSGGYPSVFYGDMYGTKGTTTREIPALKSKIEPLLKARKDYAYGTQRDYIDNPDVIGWTREGDSTKAKSGLATVITDGPGGSKRMYVGTSNAGEIWYDLTGNRTDKITIGSDGYATFPVNGGSVSVWVQQ

SEQ ID NO: 37282 - protein, 480 aa, Cytophaga sp.
NGTMMQYFEWYVPNDGQQWNRLRTDAPYLSSVGITAVWTPPAYKGTSQADVGYGPYDLYDLGEFNQKGTVRTKYGTKGELKSAVNTLHSNGIQVYGDVVMNHKAGADYTENVTAVEVNPSNRYQETSGEYNIQAWTGFNFPGRGTTYSNWKWQWQHFDGTDWDQSRSLSRIFKFDGKAWDWEVSSENGNYDYLMYADYDYDHPDVVNEMKKWGVWYANEVGLDGYRLDAVKHIKFQFLKDWVDNARAATGKEMFTVGEYWQNDLGALNNYLAKVNYNQSLFDAPLHYNFYAASTGGGYYDMRNILNNTLVASNPTKAVTLVENHDTQPGQSLESTVQPWFKPLAYAFILTRSGGYPSVFYGDMYGTKGTTTREIPALKSKIEPLLKARKDYAYGTQRDYIDNPDVIGWTREGDSTKAKSGLATVITDGPGGSKRMYVGTSNAGEIWYDLTGNRTDKITIGSDGYATFPVNGGSVSVWVQQ

SEQ ID NO: 37283 - protein, 480 aa, Cytophaga sp.
NGTMMQYFEWYVPNDGQQWNRLRTDAPYLSSVGITAVWTPPAYKGTSQADVGYGPYDLYDLGEFNQKGTVRTKYGTKGELKSAVNTLHSNGIQVYGDVVMNHKAGADYTENVTAVEVNPSNRYQETSGEYNIQAWTGFNFPGRGTTYSNWKWQWFHFDGTDWDQSRSLSRIFKFDGKAWDWEVSSENGNYDYLMYADYDYDHPDVVREMKKWGVWYANEVGLDGYRLDAVKHIKFQFLKDWVDNARAATGKEMFTVGEYWQNDLGALNNYLAKVNYNQSLFDAPLHYNFYAASTGGGYYDMRNILNNTLVASNPTKAVTLVENHDTQPGQSLESTVQPWFKPLAYAFILTRSGGYPSVFYGDMYGTKGTTTREIPALKSKIEPLLKARKDYAYGTQRDYIDNPDVIGWTREGDSTKAKSGLATVITDGPGGSKRMYVGTSNAGEIWYDLTGNRTDKITIGSDGYATFPVNGGSVSVWVQQ

SEQ ID NO: 37284 - protein, 480 aa, Cytophaga sp.
NGTMMQYFEWYVPNDGQQWNRLRTDAPYLSSVGITAVWTPPAYKGTSQADVGYGPYDLYDLGEFNQKGTVRTKYGTKGELKSAVNTLHSNGIQVYGDVVMNHKAGADYTENVTAVEVNPSNRYQETSGEYNIQAWTGFNFPGRGTTYSNWKWQWFHFDGTDWDQSRSLSRIFKFDGKAWDWEVSSENGNYDYLMYADYDYDHPDVVNEMKKWGVWYANEVGLDGYRLDAVKHIKFQFLKDWVDNARAATGKEMFTVGEYWQNDLGALNNYLAKVNYNQSLFDAPLHYNFYAASTGGGYYDMRNILNNTLVASNPTKAVTLVENHDTQPGQSLESTVQPWFKPLAYAFILTRSGGYPSVFYGDMYGTKGTTTREIPALKSKIEPLLKARKDYAYGDQRDYIDNPDVIGWTREGDSTKAKSGLATVITDGPGGSKRMYVGTSNAGEIWYDLTGNRTDKITIGSDGYATFPVNGGSVSVWVQQ

SEQ ID NO: 37285 - protein, 480 aa, Cytophaga sp.
NGTMMQYFEWYVPNDGQQWNRLRTDAPYLSSVGITAVWTPPAYKGTSQADVGYGPYDLYDLGEFNQKGTVRTKYGTKGELKSAVNTLHSNGIQVYGDVVMNHKAGADYTENVTAVEVNPSNRYQETSGEYNIQAWTGFNFPGRGTTYSNWKWQWFHFDGTDWDQSRSLSRIFKFDGKAWDWEVSSENGNYDYLMYADYDYDHPDVVNEMKKWGVWYANEVGLDGYRLDAVKHIKFQFLKDWVDNARAATGKEMFTVGEYWQNDLGALNNYLAKVNYNQSLFDAPLHYNFYAASTGGGYYDMRNILNNTLVASNPTKAVTLVENHDTQPGQSLESTVQPWFKPLAYAFILTRSGGYPSVFYGDMYGTKGTTTREIPHLKSKIEPLLKARKDYAYGTQRDYIDNPDVIGWTREGDSTKAKSGLATVITDGPGGSKRMYVGTSNAGEIWYDLTGNRTDKITIGSDGYATFPVNGGSVSVWVQQ

SEQ ID NO: 37286 - protein, 480 aa, Cytophaga sp.
NGTMMQYFEWYVPNDGQQWNRLRTDAPYLSSVGITAVWTPPAYKGTSQADVGYGPYDLYDLGEFNQKGTVRTKYGTKGELKSAVNTLHSNGIQVYGDVVMNHKAGADYTENVTAVEVNPSNRYQETSGEYNIQAWTGFNFPGRGTTYSNWKWQWFHFDGTDWDHSRSLSRIFKFDGKAWDWEVSSENGNYDYLMYADYDYDHPDVVNEMKKWGVWYANEVGLDGYRLDAVKHIKFQFLKDWVDNARAATGKEMFTVGEYWQNDLGALNNYLAKVNYNQSLFDAPLHYNFYAASTGGGYYDMRNILNNTLVASNPTKAVTLVENHDTQPGQSLESTVQPWFKPLAYAFILTRSGGYPSVFYGDMYGTKGTTTREIPALKSKIEPLLKARKDYAYGTQRDYIDNPDVIGWTREGDSTKAKSGLATVITDGPGGSKRMYVGTSNAGEIWYDLTGNRTDKITIGSDGYATFPVNGGSVSVWVQQ

SEQ ID NO: 37287 - protein, 480 aa, Cytophaga sp.
NGTMMQYFEWYVPNDGQQWNRLRTDAPYLSSVGITAVWTPPAYKGTSQADVGYGPYDLYDLGEFNQKGTVRTKYGTKGELKSAVNTLHSNGIQVYGDVVMNHKAGADYTENVTAVEVNPSNRYQETSGEYNIQAWTGFNFPGRGTTYSNWKWQWFHFDGTDWDQSRSLSRIFKFDGKAWDWEVSSENGNYDYLMYADYDYDHPDVVNEMKKWGVWYANEVGLDGYRLDAVKHIKFQFLKDWVDNARAATGKEMFTVGEYWQNDLGALNNYLAKVNYNQSLFDAPLHYNFYAASTGGGYYDMRNILNNTLVASNPTKAVTLVENHDTQPGQSLESTVQPWFKPLAYAFILTRSGGYPSVFYGDMYGTKGTTTREIPALKSKIEPLLKARKDYAYGTQRDYIDNPDVIGWTREGDSTRAKSGLATVITDGPGGSKRMYVGTSNAGEIWYDLTGNRTDKITIGSDGYATFPVNGGSVSVWVQQ

SEQ ID NO: 37288 - protein, 480 aa, Cytophaga sp.
NGTMMQYFEWYVPNDGQQWNRLRTDAPYLSSVGITAVWTPPAYKGTSQADVGYGPYDLYDLGEFNQKGTVRTKYGTKGELKSAVWTLHSNGIQVYGDVVMNHKAGADYTENVTAVEVNPSNRYQETSGEYNIQAWTGFNFPGRGTTYSNWKWQWFHFDGTDWDQSRSLSRIFKFDGKAWDWEVSSENGNYDYLMYADYDYDHPDVVNEMKKWGVWYANEVGLDGYRLDAVKHIKFQFLKDWVDNARAATGKEMFTVGEYWQNDLGALNNYLAKVNYNQSLFDAPLHYNFYAASTGGGYYDMRNILNNTLVASNPTKAVTLVENHDTQPGQSLESTVQPWFKPLAYAFILTRSGGYPSVFYGDMYGTKGTTTREIPALKSKIEPLLKARKDYAYGTQRDYIDNPDVIGWTREGDSTKAKSGLATVITDGPGGSKRMYVGTSNAGEIWYDLTGNRTDKITIGSDGYATFPVNGGSVSVWVQQ

SEQ ID NO: 37289 - protein, 480 aa, Cytophaga sp.
NGTMMQYFEWYVPNDGQQWNRLRTDAPYLSSVGITAVWTPPAYKGTSQADVGYGPYDLYDLGEFNQKGTVRTKYGTKGELKSAVNTLHSNGIQVYGDVVMNHKAGADYTENVTAVEVNPSNRYQETSGEYAIQAWTGFNFPGRGTTYSNWKWQWFHFDGTDWDQSRSLSRIFKFDGKAWDWEVSSENGNYDYLMYADYDYDHPDVVNEMKKWGVWYANEVGLDGYRLDAVKHIKFQFLKDWVDNARAATGKEMFTVGEYWQNDLGALNNYLAKVNYNQSLFDAPLHYNFYAASTGGGYYDMRNILNNTLVASNPTKAVTLVENHDTQPGQSLESTVQPWFKPLAYAFILTRSGGYPSVFYGDMYGTKGTTTREIPALKSKIEPLLKARKDYAYGTQRDYIDNPDVIGWTREGDSTKAKSGLATVITDGPGGSKRMYVGTSNAGEIWYDLTGNRTDKITIGSDGYATFPVNGGSVSVWVQQ

SEQ ID NO: 37290 - protein, 480 aa, Cytophaga sp.
NGTMMQYFEWYVPNDGQQWNRLRTDAPYLSSVGITAVWTPPAYKGTSQADVGYGPYDLYDLGEFNQKGTVRTKYGTKGELKSAVNTLHSNGIQVYGDVVMNHKAGADYTENVTAVEVNPSNRYQETSGEYLIQAWTGFNFPGRGTTYSNWKWQWFHFDGTDWDQSRSLSRIFKFDGKAWDWEVSSENGNYDYLMYADYDYDHPDVVNEMKKWGVWYANEVGLDGYRLDAVKHIKFQFLKDWVDNARAATGKEMFTVGEYWQNDLGALNNYLAKVNYNQSLFDAPLHYNFYAASTGGGYYDMRNILNNTLVASNPTKAVTLVENHDTQPGQSLESTVQPWFKPLAYAFILTRSGGYPSVFYGDMYGTKGTTTREIPALKSKIEPLLKARKDYAYGTQRDYIDNPDVIGWTREGDSTKAKSGLATVITDGPGGSKRMYVGTSNAGEIWYDLTGNRTDKITIGSDGYATFPVNGGSVSVWVQQ

SEQ ID NO: 37291 - protein, 480 aa, Cytophaga sp.
NGTMMQYFEWYVPNDGQQWNRLRTDAPYLSSVGITAVWTPPAYKGTSQADVGYGPYDLYDLGEFNQKGTVRTKYGTKGELKSAVNTLHSNGIQVYGDVVMNHKAGADYTENVTAVEVNPSNRYQETSGEYNIQAWTGFNFPGRGTTYSNWKWQWFHFDGTDWDQSRSLSRIFKFDGKAWDWEVSSENGNYDYLMYADYDYDHPDVVNEMKKWGVWYANEVGLDGYRLDAVKHIKFQFLKDWVDNARAATGKEMFTVGEYWQNDLGALNNYLAKVNYNQSLFDAPLHYNFYAASTGGGYYDMRNILNNTLVAYNPTKAVTLVENHDTQPGQSLESTVQPWFKPLAYAFILTRSGGYPSVFYGDMYGTKGTTTREIPALKSKIEPLLKARKDYAYGTQRDYIDNPDVIGWTREGDSTKAKSGLATVITDGPGGSKRMYVGTSNAGEIWYDLTGNRTDKITIGSDGYATFPVNGGSVSVWVQQ

SEQ ID NO: 37292 - protein, 480 aa, Cytophaga sp.
NGTMMQYFEWYVPNDGQQWNRLRTDAPYLSSVGITAVWTPPAYKGTSQADVGYGPYDLYDLGEFNQKGTVRTKYGTKGELKSAVNTLHSNGIQVYGDVVMNHKAGADYTENVTAVEVNPSNRYQETSGEYNIQAWTGFNFPGRGTTYSNWKWQWFHFDGTDWDQSRSLSRIFKFDGKAWDWEVSSENGNYDYLMYADYDYDHPDVVNEMKKWGVWYANEVGLDGYRLDAVKHIKFQFLKDWVDNARAATGKEMFTVGEYWQNDLGALNNYLCKVNYNQSLFDAPLHYNFYAASTGGGYYDMRNILNNTLVASNPTKAVTLVENHDTQPGQSLESTVQPWFKPLAYAFILTRSGGYPSVFYGDMYGTKGTTTREIPALKSKIEPLLKARKDYAYGTQRDYIDNPDVIGWTREGDSTKAKSGLATVITDGPGGSKRMYVGTSNAGEIWYDLTGNRTDKITIGSDGYATFPVNGGSVSVWVQQ

SEQ ID NO: 37293 - protein, 480 aa, Cytophaga sp.
NGTMMQYFEWYVPNDGQQWNRLRTDAPYLSSVGITAVWTPPAYKGTSQADVGYGPYDLYDLGEFNQKGTVRTKYGTKGELKSAVITLHSNGIQVYGDVVMNHKAGADYTENVTAVEVNPSNRYQETSGEYNIQAWTGFNFPGRGTTYSNWKWQWFHFDGTDWDQSRSLSRIFKFDGKAWDWEVSSENGNYDYLMYADYDYDHPDVVNEMKKWGVWYANEVGLDGYRLDAVKHIKFQFLKDWVDNARAATGKEMFTVGEYWQNDLGALNNYLAKVNYNQSLFDAPLHYNFYAASTGGGYYDMRNILNNTLVASNPTKAVTLVENHDTQPGQSLESTVQPWFKPLAYAFILTRSGGYPSVFYGDMYGTKGTTTREIPALKSKIEPLLKARKDYAYGTQRDYIDNPDVIGWTREGDSTKAKSGLATVITDGPGGSKRMYVGTSNAGEIWYDLTGNRTDKITIGSDGYATFPVNGGSVSVWVQQ

SEQ ID NO: 37294 - protein, 480 aa, Cytophaga sp.
NGTMMQYFEWYVPNDGQQWNRLRTDAPYLSSVGITAVWTPPAYKGTSQADVGYGPYDLYDLGEFNQKGTVRTKYGTKGELKSAVNTLHSNGIQVYGDVVMNHKAGADYTENVTAVEVNPSNRYQETSGEYNIQAWTGFNFPGRGTTYSNWKWQWFHFDGTDWDQSRSLSRIFKFDGKAWDWEVSSENGNYDYLMYADYDYDHPDVVNEMKKWGVWYANEVGLDGYRLDAVKHIKFQFLKDWVDNARAATGKEMFTVGEYWQNDLGALNNYLAKVNYNQSLFDAPLHYNFYAASTGGGYYDMRNILNNTLVASNPTKAVTLVENHDTQPGQSLESTVQPWFKPLAYAFILTRSGGYPSVFYGDMYGTKGTTTREIPALKSKIEPLLKARKDYAYGTQRDYIDNPDVIGWTREGDSTKAKSGLATVITDGPGGSKRMYVGTSNAGEIWYDLTGNRTDKITIGSDGYATFPVNGGSVSVWVQQ

SEQ ID NO: 37295 - protein, 480 aa, Cytophaga sp.
NGTMMQYFEWYVPNDGQQWNRLRTDAPYLSSVGITAVWTPPAYKGTSQADVGYGPYDLYDLGEFNQKGTVRTKYGTKGELKSAVNTLHSNGIQVYGDVVMNHKAGADYTENVTAVEVNPSNRYQETSGEYNIQAWTGFNFPGRGTTYSNWKWQWFHFDGTDWDQSRSLSRIFKFDGKAWDWEVSSENGNYDYLMYADYDYDHPDVVNEMKKWGVWYANEVGLDGYRLDAVKHIKFQFLKDWVDNARAATGKEMFTVGEYWQNDLGALNNYLAKVNYNQSLFDAPLHYNFYAASTGGGYYDMRNILNNTLVASNPTKAVTLVENHDTQPGQSLESTVQPWFKPLAYAFILTRSGGYPSVFYGDMYGTKGTTTREIPALKSKIEPLLKARKDYAYGTQRDYIDNPDVIGWTREGDSTKAKSGLATVITDGPGGSKRMYVGTENAGEIWYDLTGNRTDKITIGSDGYATFPVNGGSVSVWVQQ

SEQ ID NO: 37296 - protein, 480 aa, Cytophaga sp.
NGTMMQYFEWYVPNDGQQWNRLRTDAPYLSSVGITAVWTPPAYKGTSQADVGYGPYDLYDLGEFNQKGTVRTKYGTKGELKSAVNTLHSNGIQVYGDVVMNHKAGADYTENVTAVEVNPSNRYQETSGEYNIQAWTGFNFPGRGTTYSNWKWQWFHFDGTDWDQSRSLSRIFKFDGKAWDWEVSSENGNYDYLMYADYDYDHPDVVNEMKKWGVWYANEVGLDGYRLDAVKHIKFQFLKDWVDNARAATGKEMFTVGEYWQNDLGALNNYLAKVNYNQSLFDAPLHYNFYAASTGGGYYDMRNILNNTLVASNPTKAVTLVENHDTQPGQSLESTVQPWFKPLAYAFILTRSGGYPSVFYGDMYGTKGTTTREIPALKSKIEPLLKARKDYAYGTQRDYIDNPDVIGWTREGDSTKAKSGLATVITDGPGGSKRMYVGTSNAGEIWYDLTGNRTDKQTIGSDGYATFPVNGGSVSVWVQQ

SEQ ID NO: 37297 - protein, 480 aa, Cytophaga sp.
NGTMMQYFEWYVPNDGQQWNRLRTDAPYLSSVGITAVWTPPAYKGTSQADVGYGPYDLYDLGEFNQKGTVRTKYGTKGELKSAVNTLHSNGIQVYGDVVMNHKAGADYTESVTAVEVNPSNRYQETSGEYNIQAWTGFNFPGRGTTYSNWKWQWFHFDGTDWDQSRSLSRIFKFDGKAWDWEVSSENGNYDYLMYADYDYDHPDVVNEMKKWGVWYANEVGLDGYRLDAVKHIKFQFLKDWVDNARAATGKEMFTVGEYWQNDLGALNNYLAKVNYNQSLFDAPLHYNFYAASTGGGYYDMRNILNNTLVASNPTKAVTLVENHDTQPGQSLESTVQPWFKPLAYAFILTRSGGYPSVFYGDMYGTKGTTTREIPALKSKIEPLLKARKDYAYGTQRDYIDNPDVIGWTREGDSTKAKSGLATVITDGPGGSKRMYVGTSNAGEIWYDLTGNRTDKITIGSDGYATFPVNGGSVSVWVQQ

SEQ ID NO: 37298 - protein, 480 aa, Cytophaga sp.
NGTMMQYFEWYVPNDGQQWNRLRTDAPYLSSVGITAVWTPPAYKGTSQADVGYGPYDLYDLGEFNQKGTVRTKYGTKGELKSAVNTLHSNGIQVYGDVVMNHKAGADYTENVTAVEVNPSNRYQETSGEYNIQAWTGFNFPGRGTTYSPWKWQWFHFDGTDWDQSRSLSRIFKFDGKAWDWEVSSENGNYDYLMYADYDYDHPDVVNEMKKWGVWYANEVGLDGYRLDAVKHIKFQFLKDWVDNARAATGKEMFTVGEYWQNDLGALNNYLAKVNYNQSLFDAPLHYNFYAASTGGGYYDMRNILNNTLVASNPTKAVTLVENHDTQPGQSLESTVQPWFKPLAYAFILTRSGGYPSVFYGDMYGTKGTTTREIPALKSKIEPLLKARKDYAYGTQRDYIDNPDVIGWTREGDSTKAKSGLATVITDGPGGSKRMYVGTSNAGEIWYDLTGNRTDKITIGSDGYATFPVNGGSVSVWVQQ

SEQ ID NO: 37299 - protein, 480 aa, Cytophaga sp.
NGTMMQYFEWYVPNDGQQWNRLRTDAPYLSSVGITAVWTPPAYKGTSQADVGYGPYDLYDLGEFNQKGTVRTKYGTKGELKSAVNTLHSNGIQVYGDVVMNHKAGADYTENVTAVEVNPSNRYQETSGEYNIQAWTGFNFPGRGTTYSNWKWQWFHFDGTDWDQSRSLSRIFKFDGKAWDWEVSSENGNYDYLMYADYDYDHPDVVNEMKKWGVWYANEVGLDGYRLDAVKHIKFQFLKDWVDNARAATGKEMFTVGEYWQNDLGALNNYLAKVNYNQSLFDAPLHYNFYAASTGGGYYDMRNILNNTLVASNPTKAVTLVENHDTQPGQSLESTVQPWFKPLAYAFILTRSGGYPSVFYGDMYGTKGTTTREIPALKSKIEPLLKARKDYAYGTQRDYIDNPDVIGWTREGDSTKAKSGLATAITDGPGGSKRMYVGTSNAGEIWYDLTGNRTDKITIGSDGYATFPVNGGSVSVWVQQ

SEQ ID NO: 37300 - protein, 480 aa, Cytophaga sp.
NGTMMQYFEWYVPNDGQQWNRLRTDAPYLSSVGITAVWTPPAYKGTSQADVGYGPYDLYDLGEFNQKGTVRTKYGTKIELKSAVNTLHSNGIQVYGDVVMNHKAGADYTENVTAVEVNPSNRYQETSGEYNIQAWTGFNFPGRGTTYSNWKWQWFHFDGTDWDQSRSLSRIFKFDGKAWDWEVSSENGNYDYLMYADYDYDHPDVVNEMKKWGVWYANEVGLDGYRLDAVKHIKFQFLKDWVDNARAATGKEMFTVGEYWQNDLGALNNYLAKVNYNQSLFDAPLHYNFYAASTGGGYYDMRNILNNTLVASNPTKAVTLVENHDTQPGQSLESTVQPWFKPLAYAFILTRSGGYPSVFYGDMYGTKGTTTREIPALKSKIEPLLKARKDYAYGTQRDYIDNPDVIGWTREGDSTKAKSGLATVITDGPGGSKRMYVGTSNAGEIWYDLTGNRTDKITIGSDGYATFPVNGGSVSVWVQQ

SEQ ID NO: 37301 - protein, 480 aa, Cytophaga sp.
NGTMMQYFEWYVPNDGQQWNRLRTDAPYLSSVGITAVWTPPAYKGTSQADVGYGPYDLYDLGEFNQKGTVRTKYGTKGELKSAVNTLHSNGIQVYGDVVMNHKAGADYTENVTAVEVNPSNRYQETSGEYNIQAWTGFNFPGRGTTYSNWKWQWFHFDGTDWDQSRSLSRIFKFDGKAWDWEVSSENGNYDYLMYADYDYDHPDVVNEMKKWGVWYANEVGLDGYRLDAVKHIKFQFLKDWVDNARAATGKEMFTVGEYWQNDLGALNNYLAKVNYNQSLFDAPLHYNFYAASTGGGYYDMREILNNTLVASNPTKAVTLVENHDTQPGQSLESTVQPWFKPLAYAFILTRSGGYPSVFYGDMYGTKGTTTREIPALKSKIEPLLKARKDYAYGTQRDYIDNPDVIGWTREGDSTKAKSGLATVITDGPGGSKRMYVGTSNAGEIWYDLTGNRTDKITIGSDGYATFPVNGGSVSVWVQQ

SEQ ID NO: 37302 - protein, 480 aa, Cytophaga sp.
NGTMMQYFEWYVPNDGQQWNRLRTDAPYLSSVGITAVWTPPAYKGTSQADVGYGPYDLYDLGEFNQKGTVRTKYGTKGELKSAVNTLHSNGIQVYGDVVMNHKAGADYTENVTAVEVNPSNRYQETSGEYNIQAWTGFNFPGRGTTYSNWKWQWFHFDGTDWDQSRSLSRIFKFDGKAWDWEVSSENGNYDYLMYADYDYDHPDVVNEMKKWGVWYANEVGLDGYRLDAVKHIKFQFLKDWVDNARAATGKEMFTVGEYWQNDLGALNNYLAKVNYNQSLFDAPLHYNFYAASTGGGYYDMRNILNNTLVASNPTKAVTLVENHDTQPGQSLESTVQPWFKPLAYAFILTRSGGYPSVFYGDMYGTKGTTTREIPALKSGIEPLLKARKDYAYGTQRDYIDNPDVIGWTREGDSTKAKSGLATVITDGPGGSKRMYVGTSNAGEIWYDLTGNRTDKITIGSDGYATFPVNGGSVSVWVQQ

SEQ ID NO: 37303 - protein, 480 aa, Cytophaga sp.
NGTMMQYFEWYVPNDGQQWNRLRTDAPYLSSVGITAVWTPPAYKGTSQADVGYGPYDLYDLGEFNQKGTVRTKYGTKGELKSAVNTLHSNGIQVYGDVVMNHKAGADYTENVTAVEVNPSNRYQETSGEYNIQAWTGFNFPGRGTTYSNWKWQWFHFDGTDWDQSRSLSRIFKFDGKAWDWEVSSENGNYDYLMYADYDYDHPDVVNEMKKWGVWYANEVGLDGYRLDAVKHIKFQFLKDWVDNARAATGKEMFTVGEYWQNDLGALNNYLAKVNYNQSLFDAPLHYNFYAASTGGGYYDMRNILNNTLVASNPTKAVTLVENHDTQPGQSLESTVQPWFKPLAYAFILTRSGGYPSVFYGDMYGTKGTTTREIPALKSKIEPLLKARKDYAYGTQCDYIDNPDVIGWTREGDSTKAKSGLATVITDGPGGSKRMYVGTSNAGEIWYDLTGNRTDKITIGSDGYATFPVNGGSVSVWVQQ

SEQ ID NO: 37304 - protein, 480 aa, Cytophaga sp.
NGTMMQYFEWYVPNDGQQWNRLRTDAPYLSSVGITAVWTPPAYKGTSQADVGYGPYDLYDLGEFNQKGTVRTKYGTKGELKSAVNFLHSNGIQVYGDVVMNHKAGADYTENVTAVEVNPSNRYQETSGEYNIQAWTGFNFPGRGTTYSNWKWQWFHFDGTDWDQSRSLSRIFKFDGKAWDWEVSSENGNYDYLMYADYDYDHPDVVNEMKKWGVWYANEVGLDGYRLDAVKHIKFQFLKDWVDNARAATGKEMFTVGEYWQNDLGALNNYLAKVNYNQSLFDAPLHYNFYAASTGGGYYDMRNILNNTLVASNPTKAVTLVENHDTQPGQSLESTVQPWFKPLAYAFILTRSGGYPSVFYGDMYGTKGTTTREIPALKSKIEPLLKARKDYAYGTQRDYIDNPDVIGWTREGDSTKAKSGLATVITDGPGGSKRMYVGTSNAGEIWYDLTGNRTDKITIGSDGYATFPVNGGSVSVWVQQ

SEQ ID NO: 37305 - protein, 480 aa, Cytophaga sp.
NGTMMQYFEWYVPNDGQQWNRLRTDAPYLSSVGITAVWTPPAYKGTSQADVGYGPYDLYDLGEFNQKGTVRTKYGTKGELKSAVNTLHSNGIQVYGDVVMNHKAGADYTENVTAVEVNPSNRYQETSGEYNIQAWTGFNFPGRGTTYSNWKWQWFHFDGTDWDQSRSLSRIFKFDGKAWDWEVSSENGNYDYLMYADYDYDHPDVVNEMKKWGVWYANEVGLDGYRLDAVKHIKFQFLKDWVDNARAATGKEMFTVGEYWQNDLGALNNYLAKVNYNQSLFDAPLHYNFYAASTGGGYYDMRNILNNTLVASNPTKAVTLVENHDTQPGQSLESTVQPWFKPLAYAFILTRSGGYPSVFYGDMYGTKGTTTREIPALKSHIEPLLKARKDYAYGTQRDYIDNPDVIGWTREGDSTKAKSGLATVITDGPGGSKRMYVGTSNAGEIWYDLTGNRTDKITIGSDGYATFPVNGGSVSVWVQQ

SEQ ID NO: 37306 - protein, 480 aa, Cytophaga sp.
NGTMMQYFEWYVPNDGQQWNRLRTDAPYLSSVGITAVWTPPAYKGTSQADVGYGPYDLYDLGEFNQKGTVRTKYGTKGELKSAVNTLHSNGIQVYGDVVMNHKAGADYTENVTAVEVNPSNRYQETSGEYNIQAWTGFNFPGRGTTYSNWKWQWFHFDGTDWDQSRSLSRIFKFDGKAWDWEVSSENGNYDYLMYADYDYDHPDVVNEMKKWGVWYANEVGLDGYRLDAVKHIKFQFLKDWVDNARAATGKEMFTVGEYWQNDLGALNNYLAKVNYNQSLFDAPLHYNFYAASTGGGYYDMRNILNNTLVASNPTKAVTLVENHDTQPGQSLESTVQPWFKPLAYAFILTRSGGYPSVFYGDMYGTKGTTTREIPALKSKIEPLLKARKDYAYGTQRDYIDGPDVIGWTREGDSTKAKSGLATVITDGPGGSKRMYVGTSNAGEIWYDLTGNRTDKITIGSDGYATFPVNGGSVSVWVQQ

SEQ ID NO: 37307 - protein, 480 aa, Cytophaga sp.
NGTMMQYFEWYVPNDGQQWNRLRTDAPYLSSVGITAVWTPPAYKGTSQADVGYGPYDLYDLGEFNQKGTVRTKYGTKGELKSAVNTLHSNGIQVYGDVVMNHKAGADYTENVTAVEVNPSNRYQETSGEYNIQAWTGFNFPGRGTTYSNWKWQWFHFDGTDWDQSRSLSRIFKFDGKAWDWEVSSENGNYDYLMYADYDYDHPDVVNEMKKWGVWYANEVGLDGYRLDAVKHIKFQFLKDWVDNARAATGKEMFTVGEYWQNDLGALNNYLAKVNYNQSLFDAPLHYNFYAASTGGGYYDMRNILNNTLVASNPTKAVTLVENHDTQPGQSLESTVQPWFKPLAYAFILTRSGGYPSVFYGDMYGTKGTTTREIPALKSKIEPLLKARKDYAYGTQRDYIDNPDVIGWTREGDSTWAKSGLATVITDGPGGSKRMYVGTSNAGEIWYDLTGNRTDKITIGSDGYATFPVNGGSVSVWVQQ

SEQ ID NO: 37308 - protein, 480 aa, Cytophaga sp.
NGTMMQYFEWYDPNDGQQWNRLRTDAPYLSSVGITAVWTPPAYKGTSQADVGYGPYDLYDLGEFNQKGTVRTKYGTKGELKSAVNTLHSNGIQVYGDVVMNHKAGADYTENVTAVEVNPSNRYQETSGEYNIQAWTGFNFPGRGTTYSNWKWQWFHFDGTDWDQSRSLSRIFKFDGKAWDWEVSSENGNYDYLMYADYDYDHPDVVNEMKKWGVWYANEVGLDGYRLDAVKHIKFQFLKDWVDNARAATGKEMFTVGEYWQNDLGALNNYLAKVNYNQSLFDAPLHYNFYAASTGGGYYDMRNILNNTLVASNPTKAVTLVENHDTQPGQSLESTVQPWFKPLAYAFILTRSGGYPSVFYGDMYGTKGTTTREIPALKSKIEPLLKARKDYAYGTQRDYIDNPDVIGWTREGDSTKAKSGLATVITDGPGGSKRMYVGTSNAGEIWYDLTGNRTDKITIGSDGYATFPVNGGSVSVWVQQ

SEQ ID NO: 37309 - protein, 480 aa, Cytophaga sp.
NGTMMQYFEWYVPNDGQQWNRLRTDAPYLSSVGITAVWTPPAYKGTSQADVGYGPYDLYDLGEFNQKGTVRTKYGTKGELKHAVNTLHSNGIQVYGDVVMNHKAGADYTENVTAVEVNPSNRYQETSGEYNIQAWTGFNFPGRGTTYSNWKWQWFHFDGTDWDQSRSLSRIFKFDGKAWDWEVSSENGNYDYLMYADYDYDHPDVVNEMKKWGVWYANEVGLDGYRLDAVKHIKFQFLKDWVDNARAATGKEMFTVGEYWQNDLGALNNYLAKVNYNQSLFDAPLHYNFYAASTGGGYYDMRNILNNTLVASNPTKAVTLVENHDTQPGQSLESTVQPWFKPLAYAFILTRSGGYPSVFYGDMYGTKGTTTREIPALKSKIEPLLKARKDYAYGTQRDYIDNPDVIGWTREGDSTKAKSGLATVITDGPGGSKRMYVGTSNAGEIWYDLTGNRTDKITIGSDGYATFPVNGGSVSVWVQQ

SEQ ID NO: 37310 - protein, 480 aa, Cytophaga sp.
NGTMMQYFEWYVPNDGQQWNRLRTDAPYLSSVGITAVWTPPAYKGTSQADVGYGPYDLYDLGEFNQKGTVRTKYGTKGELASAVNTLHSNGIQVYGDVVMNHKAGADYTENVTAVEVNPSNRYQETSGEYNIQAWTGFNFPGRGTTYSNWKWQWFHFDGTDWDQSRSLSRIFKFDGKAWDWEVSSENGNYDYLMYADYDYDHPDVVNEMKKWGVWYANEVGLDGYRLDAVKHIKFQFLKDWVDNARAATGKEMFTVGEYWQNDLGALNNYLAKVNYNQSLFDAPLHYNFYAASTGGGYYDMRNILNNTLVASNPTKAVTLVENHDTQPGQSLESTVQPWFKPLAYAFILTRSGGYPSVFYGDMYGTKGTTTREIPALKSKIEPLLKARKDYAYGTQRDYIDNPDVIGWTREGDSTKAKSGLATVITDGPGGSKRMYVGTSNAGEIWYDLTGNRTDKITIGSDGYATFPVNGGSVSVWVQQ

SEQ ID NO: 37311 - protein, 480 aa, Cytophaga sp.
NGTMMQYFEWYVPNDGQQWNRLRTDAPYLSSVGITAVWTPPAYKGTSQADVGYGPYDLYDLGEFNQKGTVRTKYGTKGELKSAVNTLHSNGIQVYGDVVMNHKAGADYTENVTAVEVNPSNRYQETSGEYNIQAWTGFNFPGRGTTYSNWKWQWFHFDGTDWDQSRSLSRIFKFDGKAWDWEVSSENGNYDYLMYADYDYDHPDVVNEMKKWGVWYANEVGLDGYRLDAVKHIKFQFLKDWVDNARAATGKEMFTVGEYWQNDLGALNNYLAKVNYNQSLFDAPLHYNFYAASTGGGYYDMRNILNNTLVASNPTKAVTLVENHDTQPGQSLESTVQPWFKPLAYAFILTRSGGYPSVFYGDMYGTKGTTTREIPALKSKIEPLLKARKDYAYGTQRDYIDNPDVIGWTREGDSTKAKSGLATVITDGPGGSKRMYVGTSNAGEIWYDLTGNRTDKITIGSDGYATFIVNGGSVSVWVQQ

SEQ ID NO: 37312 - protein, 480 aa, Cytophaga sp.
NGTMMQYFEWYVPNDGQQWNRLRTDAPYLSSVGITAVWTPPAYKGTSQADVGYGPYDLYDLGEFNQKGTVRTKYGTKGELKSAVNTLHSNGIQVYGDVVMNHKAGADYTENVTAVEVNPSNRYQETSGEYNIQAWTGFNFPGRGTTYSNWKWQWFHFDGTDWDQSRSLSRIFKFMGKAWDWEVSSENGNYDYLMYADYDYDHPDVVNEMKKWGVWYANEVGLDGYRLDAVKHIKFQFLKDWVDNARAATGKEMFTVGEYWQNDLGALNNYLAKVNYNQSLFDAPLHYNFYAASTGGGYYDMRNILNNTLVASNPTKAVTLVENHDTQPGQSLESTVQPWFKPLAYAFILTRSGGYPSVFYGDMYGTKGTTTREIPALKSKIEPLLKARKDYAYGTQRDYIDNPDVIGWTREGDSTKAKSGLATVITDGPGGSKRMYVGTSNAGEIWYDLTGNRTDKITIGSDGYATFPVNGGSVSVWVQQ

SEQ ID NO: 37313 - protein, 480 aa, Cytophaga sp.
NGTMMQYFEWYVPNDGQQWNRLRTDAPYLSSVGITAVWTPPAYKGTSQADVGYGPYDLYDLGEFNQKGTVRTKYGTKGELKSAVNTLHSNGIQVYGDVVMNHKAGADYTENVTAVEVNPSNRYQETSGEYNIQAWTGFNFPGRGTTYSNWKWQWFHFDGTDWDQSRSLSRIFKFDGKAWDWEVSSENGNYDYLMYADYDYDHPDVVNEMKKWGVWYANEVGLDGYRLDAVKHIKFQFLKDWVDNARAATGKEMFTVGEYWQNDLGALNNYLAKVNYNQSLFDAPLHYNFYAASTGGGYYDMRNILNNTLVASNPTKAVTLVENHDTQPGQSLESTVQPWFKPLAYAFILTRFGGYPSVFYGDMYGTKGTTTREIPALKSKIEPLLKARKDYAYGTQRDYIDNPDVIGWTREGDSTKAKSGLATVITDGPGGSKRMYVGTSNAGEIWYDLTGNRTDKITIGSDGYATFPVNGGSVSVWVQQ

SEQ ID NO: 37314 - protein, 480 aa, Cytophaga sp.
NGTMMQYFEWYVPNDGQQWNRLRTDAPYLSSVGITAVWTPPAYKGTSQADVGYGPYDLYDLGEFNQKGTVRTKYGTKGELKSAVNTLHSNGIQVYGDVVMNHKAGADYTENVTAVEVNPSNRYQETSGEYNIQAWTGFVFPGRGTTYSNWKWQWFHFDGTDWDQSRSLSRIFKFDGKAWDWEVSSENGNYDYLMYADYDYDHPDVVNEMKKWGVWYANEVGLDGYRLDAVKHIKFQFLKDWVDNARAATGKEMFTVGEYWQNDLGALNNYLAKVNYNQSLFDAPLHYNFYAASTGGGYYDMRNILNNTLVASNPTKAVTLVENHDTQPGQSLESTVQPWFKPLAYAFILTRSGGYPSVFYGDMYGTKGTTTREIPALKSKIEPLLKARKDYAYGTQRDYIDNPDVIGWTREGDSTKAKSGLATVITDGPGGSKRMYVGTSNAGEIWYDLTGNRTDKITIGSDGYATFPVNGGSVSVWVQQ

SEQ ID NO: 37315 - protein, 480 aa, Cytophaga sp.
NGTMMQYFEWYVPNDGQQWNRLRTDAPYLSSVGITAVWTPPAYKGTSQADVGYGPYDLYDLGEFNQKGTVRTKYGTKGELKSAVNTLHSNGIQVYGDVVMNHKAGADYTENVTAVEVNPSNRYQETSGEYNIQAWTGFNFPGRGTTYSNWKWQWFHFDGTDWDQSRSLSRIFKFSGKAWDWEVSSENGNYDYLMYADYDYDHPDVVNEMKKWGVWYANEVGLDGYRLDAVKHIKFQFLKDWVDNARAATGKEMFTVGEYWQNDLGALNNYLAKVNYNQSLFDAPLHYNFYAASTGGGYYDMRNILNNTLVASNPTKAVTLVENHDTQPGQSLESTVQPWFKPLAYAFILTRSGGYPSVFYGDMYGTKGTTTREIPALKSKIEPLLKARKDYAYGTQRDYIDNPDVIGWTREGDSTKAKSGLATVITDGPGGSKRMYVGTSNAGEIWYDLTGNRTDKITIGSDGYATFPVNGGSVSVWVQQ

SEQ ID NO: 37316 - protein, 480 aa, Cytophaga sp.
NGTMMQYFEWYVPNDGQQWNRLRTDAPYLSSVGITAVWTPPAYKGTSQADVGYGPYDLYDLGEFNQKGTVRTKYGTKGELKSAVNTLHSNGIQVYGDVVMNHKAGADYTENVTAVEVNPSNRYQETSGEYNIQAWTGFNFPGRGTTYSNWKWQWFHFDGTDWDQSRSLSRIFKFDGKAWDWEVSSENGNYDYLMYADYDYDHPDVVNEMKKWGVWYANEVGLDGYRLDAVKHIKFQFLKDWVDNARAATGKEMFTVGEYWQNDLGALNNYLAKVNYNQSLFDAPLHYNFYAASTGGGYYDMRNILNNTLVRSNPTKAVTLVENHDTQPGQSLESTVQPWFKPLAYAFILTRSGGYPSVFYGDMYGTKGTTTREIPALKSKIEPLLKARKDYAYGTQRDYIDNPDVIGWTREGDSTKAKSGLATVITDGPGGSKRMYVGTSNAGEIWYDLTGNRTDKITIGSDGYATFPVNGGSVSVWVQQ

SEQ ID NO: 37317 - protein, 480 aa, Cytophaga sp.
NGTMMQYFEWYVPNDGQQWNRLRTDAPYLSSVGITAVWTPPAYKGTSQADVGYGPYDLYDLGEFNQKGTVRTKYGTKGELKSAVNTLHSNGIQVYGDVVMNHKAGADYTENVTAVEVNPSNRYQETSGEYNIQAWTGFNFPGRGTTYSNWKWAWFHFDGTDWDQSRSLSRIFKFDGKAWDWEVSSENGNYDYLMYADYDYDHPDVVNEMKKWGVWYANEVGLDGYRLDAVKHIKFQFLKDWVDNARAATGKEMFTVGEYWQNDLGALNNYLAKVNYNQSLFDAPLHYNFYAASTGGGYYDMRNILNNTLVASNPTKAVTLVENHDTQPGQSLESTVQPWFKPLAYAFILTRSGGYPSVFYGDMYGTKGTTTREIPALKSKIEPLLKARKDYAYGTQRDYIDNPDVIGWTREGDSTKAKSGLATVITDGPGGSKRMYVGTSNAGEIWYDLTGNRTDKITIGSDGYATFPVNGGSVSVWVQQ

SEQ ID NO: 37318 - protein, 480 aa, Cytophaga sp.
NGTMMQYFEWYVPNDGQQWNRLRTDAPYLSSVGITAVWTPPAYKGTSQADVGYGPYDLYDLGEFNQKGTVRTKYGTKGELKSAVNTLHSNGIQVYGDVVMNHKAGADYTENVTAVEVNPSNRYQETSGEYNIQAWTGFNFPGRGTTYSNWKWQWVHFDGTDWDQSRSLSRIFKFDGKAWDWEVSSENGNYDYLMYADYDYDHPDVVNEMKKWGVWYANEVGLDGYRLDAVKHIKFQFLKDWVDNARAATGKEMFTVGEYWQNDLGALNNYLAKVNYNQSLFDAPLHYNFYAASTGGGYYDMRNILNNTLVASNPTKAVTLVENHDTQPGQSLESTVQPWFKPLAYAFILTRSGGYPSVFYGDMYGTKGTTTREIPALKSKIEPLLKARKDYAYGTQRDYIDNPDVIGWTREGDSTKAKSGLATVITDGPGGSKRMYVGTSNAGEIWYDLTGNRTDKITIGSDGYATFPVNGGSVSVWVQQ

SEQ ID NO: 37319 - protein, 480 aa, Cytophaga sp.
NGTMMQYFEWYVPNDGQQWNRLRTDAPYLSSVGITAVWTPPAYKGTSQADVGYGPYDLYDLGEFNQKGTVRTKYGTKGELKSAVNTLHSNGIQVYGDVVMNHKAGADYTENVTAVEVNPSNRYQETSGEYNIQAWTGFNFPGRGTTYSNWKWQWFHFDGTDWDQSRSLSRIFKFDGKAWDWEVSSENGNYDYLMYADYDYDHPDVVNEMKKWGVWYANEVGLDGYRLDAVKHIKFQFLKDWVDNARAATGKEMFTVGEYWQNDLGALNNYLGKVNYNQSLFDAPLHYNFYAASTGGGYYDMRNILNNTLVASNPTKAVTLVENHDTQPGQSLESTVQPWFKPLAYAFILTRSGGYPSVFYGDMYGTKGTTTREIPALKSKIEPLLKARKDYAYGTQRDYIDNPDVIGWTREGDSTKAKSGLATVITDGPGGSKRMYVGTSNAGEIWYDLTGNRTDKITIGSDGYATFPVNGGSVSVWVQQ

SEQ ID NO: 37320 - protein, 480 aa, Cytophaga sp.
NGTMMQYFEWYVPNDGQQWNRLRTDAPYLSSVGITAVWTPPAYKGTSQADVGYGPYDLYDLGEFNQKGTVRTKYGTKGELKSAVNTLHSNGIQVYGDVVMNHKAGADYTENVTAVEVNPSNRYQETSGEYNIQAWTGFNFPGRGTTYSNWKWQWFHFDGTDWDQSRSLSRIFKFDGKAWDWEVSSENGNYDYLMYADYDYDHPDVVNEMKKWGVWYANEVGLDGYRLDAVKHIKFQFLKDWVDNARAATGKEMFTVGEYWQNDLGALNNYLAKVNYNQSLFDAPLHYNFYAASTGGGYYDMRVILNNTLVASNPTKAVTLVENHDTQPGQSLESTVQPWFKPLAYAFILTRSGGYPSVFYGDMYGTKGTTTREIPALKSKIEPLLKARKDYAYGTQRDYIDNPDVIGWTREGDSTKAKSGLATVITDGPGGSKRMYVGTSNAGEIWYDLTGNRTDKITIGSDGYATFPVNGGSVSVWVQQ

SEQ ID NO: 37321 - protein, 480 aa, Cytophaga sp.
NGTMMQYFEWYVPNDGQQWNRLRTDAPYLSSVGITAVWTPPAYKGTSQADVGYGPYDLYDLGEFNQKGTVRTKYGTKGELKSAVNTLHSNGIQVYGDVVMNHKAGADYTENVTAVEVNPSNRYQETSGEYNIQAWTGFNFPGRGTTYSNWKWQWFHFDGTDWDQSRSLSRIFKFDGKAWDWEVSSENGNYDYLMYADYDYDHPDVVNEMKKWGVWYANEVGLDGYRLDAVKHIKFQFLKDWVDNARAATGKEMFTVGEYWQNDLGALNNYLAKVNYNQSLFDAPLHYNFYAASTGGGYYDMRNILNNTLVASNPTKAVTLVENHDTQPGQSLESTVQPWFKPLAYAFILTRSGGYPSVFYGDMYGTKGTTTREIPALKSKIEPLLKARKDYAYGTQRDYIDNPDVIGWTREGDSTKAKSGLATVITDGPGGSKRMYVGTGNAGEIWYDLTGNRTDKITIGSDGYATFPVNGGSVSVWVQQ

SEQ ID NO: 37322 - protein, 480 aa, Cytophaga sp.
NGTMMQYFEWYVPNDGQQWNRLRTDAPYLSSVGITAVWTPPAYKGTSQADVGYGPYDLYDLGEFNQKGTVRTKYGTKGELKSAVNTLHSNGIQVYGDVVMNHKAGADYTENVTAVEVNPSNRYQETSGEYNIQAWTGFNFPGRGTTYSNWKWQWFHFDGTDWDQSRSLSRIFKFDGKAWDWEVSSENGNYDYLMYADYDYDHPDVVNEMKKWGVWYANEVGLDGYRLDAVKHIKFQFLKDWVDNARAATGKEMFTVGEYWQNDLGALNNYLAKVNYNQSLFDAPLHYNFYAASTGGGYYDMRNILNNTLVASNPTKAVTLVENHDTQPGQSLESTVQPWFKPLAYAFILTRSGGYPSVFYGDMYGTKGTTTREIPALKSKIEPLLKARKDYAYGTQRDYIDNPDVIGWTREGDSTKAKSGLATVITDGPGGSKRMYVGTSNAGEIWYDMTGNRTDKITIGSDGYATFPVNGGSVSVWVQQ

SEQ ID NO: 37323 - protein, 480 aa, Cytophaga sp.
NGTMMQYFEWYVPNDGQQWNRLRTDAPYLSSVGITAVWTPPAYKGTSQADVGYGPYDLYDLGEFNQKGTVRTKYGTKGELKSAVNTLHSNGIQVYGDVVMNHKAGADETENVTAVEVNPSNRYQETSGEYNIQAWTGFNFPGRGTTYSNWKWQWFHFDGTDWDQSRSLSRIFKFDGKAWDWEVSSENGNYDYLMYADYDYDHPDVVNEMKKWGVWYANEVGLDGYRLDAVKHIKFQFLKDWVDNARAATGKEMFTVGEYWQNDLGALNNYLAKVNYNQSLFDAPLHYNFYAASTGGGYYDMRNILNNTLVASNPTKAVTLVENHDTQPGQSLESTVQPWFKPLAYAFILTRSGGYPSVFYGDMYGTKGTTTREIPALKSKIEPLLKARKDYAYGTQRDYIDNPDVIGWTREGDSTKAKSGLATVITDGPGGSKRMYVGTSNAGEIWYDLTGNRTDKITIGSDGYATFPVNGGSVSVWVQQ

SEQ ID NO: 37324 - protein, 480 aa, Cytophaga sp.
NGTMMQYFEWYVPNDGQQWNRLRTDAPYLSSVGITAVWTPPAYKGTSQADVGYGPYDLYDLGEFNQKGTVRTKYGTKGELKSAVNTLHSNGIQVYGDVVMNHKAGADYTENVTAVEVNPSNRYQETSGEYNIQAWTGFNFPGRGTTYSNWKWQWFHFDGTDWDQSRSLSRIFKFDGKAWDWEVSSENGNYDYLMYADYDYDHPDVVNEMKKWGVWYANEVGLDGYRLDAVKHIKFQFLKDWVDQARAATGKEMFTVGEYWQNDLGALNNYLAKVNYNQSLFDAPLHYNFYAASTGGGYYDMRNILNNTLVASNPTKAVTLVENHDTQPGQSLESTVQPWFKPLAYAFILTRSGGYPSVFYGDMYGTKGTTTREIPALKSKIEPLLKARKDYAYGTQRDYIDNPDVIGWTREGDSTKAKSGLATVITDGPGGSKRMYVGTSNAGEIWYDLTGNRTDKITIGSDGYATFPVNGGSVSVWVQQ

SEQ ID NO: 37325 - protein, 480 aa, Cytophaga sp.
NGTMMQYFEWYVPNDGQQWNRLRTDAPYLSSVGITAVWTPPAYKGISQADVGYGPYDLYDLGEFNQKGTVRTKYGTKGELKSAVNTLHSNGIQVYGDVVMNHKAGADYTENVTAVEVNPSNRYQETSGEYNIQAWTGFNFPGRGTTYSNWKWQWFHFDGTDWDQSRSLSRIFKFDGKAWDWEVSSENGNYDYLMYADYDYDHPDVVNEMKKWGVWYANEVGLDGYRLDAVKHIKFQFLKDWVDNARAATGKEMFTVGEYWQNDLGALNNYLAKVNYNQSLFDAPLHYNFYAASTGGGYYDMRNILNNTLVASNPTKAVTLVENHDTQPGQSLESTVQPWFKPLAYAFILTRSGGYPSVFYGDMYGTKGTTTREIPALKSKIEPLLKARKDYAYGTQRDYIDNPDVIGWTREGDSTKAKSGLATVITDGPGGSKRMYVGTSNAGEIWYDLTGNRTDKITIGSDGYATFPVNGGSVSVWVQQ

SEQ ID NO: 37326 - protein, 480 aa, Cytophaga sp.
NGTMMQYFEWYVPNDGQQWNRLRTDAPYLSSVGITAVWTPPAYKGTSQLDVGYGPYDLYDLGEFNQKGTVRTKYGTKGELKSAVNTLHSNGIQVYGDVVMNHKAGADYTENVTAVEVNPSNRYQETSGEYNIQAWTGFNFPGRGTTYSNWKWQWFHFDGTDWDQSRSLSRIFKFDGKAWDWEVSSENGNYDYLMYADYDYDHPDVVNEMKKWGVWYANEVGLDGYRLDAVKHIKFQFLKDWVDNARAATGKEMFTVGEYWQNDLGALNNYLAKVNYNQSLFDAPLHYNFYAASTGGGYYDMRNILNNTLVASNPTKAVTLVENHDTQPGQSLESTVQPWFKPLAYAFILTRSGGYPSVFYGDMYGTKGTTTREIPALKSKIEPLLKARKDYAYGTQRDYIDNPDVIGWTREGDSTKAKSGLATVITDGPGGSKRMYVGTSNAGEIWYDLTGNRTDKITIGSDGYATFPVNGGSVSVWVQQ

SEQ ID NO: 37327 - protein, 480 aa, Cytophaga sp.
NGTMMQYFEWYVPNDGQQWNRLRTDAPYLSSVGITAVWTPPAYKGTSQADVGYGPYDLYDLGEFNQKGTVRTKYGTKGELKSAVNTLHSNGIQVYGDVVMNHKAGADYTERVTAVEVNPSNRYQETSGEYNIQAWTGFNFPGRGTTYSNWKWQWFHFDGTDWDQSRSLSRIFKFDGKAWDWEVSSENGNYDYLMYADYDYDHPDVVNEMKKWGVWYANEVGLDGYRLDAVKHIKFQFLKDWVDNARAATGKEMFTVGEYWQNDLGALNNYLAKVNYNQSLFDAPLHYNFYAASTGGGYYDMRNILNNTLVASNPTKAVTLVENHDTQPGQSLESTVQPWFKPLAYAFILTRSGGYPSVFYGDMYGTKGTTTREIPALKSKIEPLLKARKDYAYGTQRDYIDNPDVIGWTREGDSTKAKSGLATVITDGPGGSKRMYVGTSNAGEIWYDLTGNRTDKITIGSDGYATFPVNGGSVSVWVQQ

SEQ ID NO: 37328 - protein, 480 aa, Cytophaga sp.
NGTMMQYFEWYVPNDGQQWNRLRTDAPYLSSVGITAVWTPPAYKGTSQADVGYGPYDLYDLGEFNQKGTVRTKYGTKGELKSAVNTLHSNGIQVYGDVVMNHKAGADYTENVTAVEVNPSNRYQETSGEYNIQAWTGFNFPGRGTTYSNWKWQWFHFDGTDWDQSRSLSRIFKFDGKAWDWEVSSENGNYDYLMYADYDYDHPDVVNEMKKWGVWYANEVGLDGYRLDAVKHIKFQFLKDWVDNARAATGKEMFTVGEYWQNDLGALNNYLAKVNYNQSLFDAPLHYNFYAASTGGGWYDMRNILNNTLVASNPTKAVTLVENHDTQPGQSLESTVQPWFKPLAYAFILTRSGGYPSVFYGDMYGTKGTTTREIPALKSKIEPLLKARKDYAYGTQRDYIDNPDVIGWTREGDSTKAKSGLATVITDGPGGSKRMYVGTSNAGEIWYDLTGNRTDKITIGSDGYATFPVNGGSVSVWVQQ

SEQ ID NO: 37329 - protein, 480 aa, Cytophaga sp.
NGTMMQYFEWYVPNDGQQWNRLRTDAPYLSSVGITAVWTPPAYKGTSQADVGYGPYDLYDLGEFSQKGTVRTKYGTKGELKSAVNTLHSNGIQVYGDVVMNHKAGADYTENVTAVEVNPSNRYQETSGEYNIQAWTGFNFPGRGTTYSNWKWQWFHFDGTDWDQSRSLSRIFKFDGKAWDWEVSSENGNYDYLMYADYDYDHPDVVNEMKKWGVWYANEVGLDGYRLDAVKHIKFQFLKDWVDNARAATGKEMFTVGEYWQNDLGALNNYLAKVNYNQSLFDAPLHYNFYAASTGGGYYDMRNILNNTLVASNPTKAVTLVENHDTQPGQSLESTVQPWFKPLAYAFILTRSGGYPSVFYGDMYGTKGTTTREIPALKSKIEPLLKARKDYAYGTQRDYIDNPDVIGWTREGDSTKAKSGLATVITDGPGGSKRMYVGTSNAGEIWYDLTGNRTDKITIGSDGYATFPVNGGSVSVWVQQ

SEQ ID NO: 37330 - protein, 480 aa, Cytophaga sp.
NGTMMQYFEWYVPNDGQQWNRLRTDAPYLSSVGITAVWTPPAYKGTSQADVGYGPYDLYDLGEFNQKGTVRTKYGTKGELKSAVNTLHSNGIQVYGDVVMNHKAGADYTENVTAVEVNPSNRYQETSGEYNIQAWTGFNFPGRGTTYSNWKWQWFHFDGTDWDQSRSLSRIFKFDGKAWDWEVSSENGNYDYLMYADYDYDHPDVVNEMKKWGVWYANEVGLDGYRLDAVKHIKFQFLKDWVDNARAATGKEMFTVGEYWQNDLGALNNYLAKVNYNQSLFDAPLHYNFYAASTGGGYYDMRNILNNTLVASNPTKAVTLVENHDTQPGQSLESTVQPWFKPLAYAFILTRSGGYPSVFYGDMYGTKGTTTREIPNLKSKIEPLLKARKDYAYGTQRDYIDNPDVIGWTREGDSTKAKSGLATVITDGPGGSKRMYVGTSNAGEIWYDLTGNRTDKITIGSDGYATFPVNGGSVSVWVQQ

SEQ ID NO: 37331 - protein, 480 aa, Cytophaga sp.
NGTMMQYFEWYVPNDGQQWNRLRTDAPYLSSVGITAVWTPPAYKGTSQADVGYGPYDLYDLGEFNQKGTVRTKYGTKGELKSAVLTLHSNGIQVYGDVVMNHKAGADYTENVTAVEVNPSNRYQETSGEYNIQAWTGFNFPGRGTTYSNWKWQWFHFDGTDWDQSRSLSRIFKFDGKAWDWEVSSENGNYDYLMYADYDYDHPDVVNEMKKWGVWYANEVGLDGYRLDAVKHIKFQFLKDWVDNARAATGKEMFTVGEYWQNDLGALNNYLAKVNYNQSLFDAPLHYNFYAASTGGGYYDMRNILNNTLVASNPTKAVTLVENHDTQPGQSLESTVQPWFKPLAYAFILTRSGGYPSVFYGDMYGTKGTTTREIPALKSKIEPLLKARKDYAYGTQRDYIDNPDVIGWTREGDSTKAKSGLATVITDGPGGSKRMYVGTSNAGEIWYDLTGNRTDKITIGSDGYATFPVNGGSVSVWVQQ

SEQ ID NO: 37332 - protein, 480 aa, Cytophaga sp.
NGTMMQYFEWYVPNDGQQWNRLRTDAPYLSSVGITAVWTPPAYKGTSQADVGYGPYDLYDLGEFNQKGTVRTKYGTKGELKSAVNTLHSNGIQVYGDVVMNHKAGADYTENVTAVEVNPSNRYQETSGEYNIQAWTGFMFPGRGTTYSNWKWQWFHFDGTDWDQSRSLSRIFKFDGKAWDWEVSSENGNYDYLMYADYDYDHPDVVNEMKKWGVWYANEVGLDGYRLDAVKHIKFQFLKDWVDNARAATGKEMFTVGEYWQNDLGALNNYLAKVNYNQSLFDAPLHYNFYAASTGGGYYDMRNILNNTLVASNPTKAVTLVENHDTQPGQSLESTVQPWFKPLAYAFILTRSGGYPSVFYGDMYGTKGTTTREIPALKSKIEPLLKARKDYAYGTQRDYIDNPDVIGWTREGDSTKAKSGLATVITDGPGGSKRMYVGTSNAGEIWYDLTGNRTDKITIGSDGYATFPVNGGSVSVWVQQ

SEQ ID NO: 37333 - protein, 480 aa, Cytophaga sp.
NGTMMQYFEWYVPNDGQQWNRLRTDAPYLSSVGITAVWTPPAYKGTSQADVGYGPYDLYDLGEFNQKGTVRTKYGTKGELKSAVDTLHSNGIQVYGDVVMNHKAGADYTENVTAVEVNPSNRYQETSGEYNIQAWTGFNFPGRGTTYSNWKWQWFHFDGTDWDQSRSLSRIFKFDGKAWDWEVSSENGNYDYLMYADYDYDHPDVVNEMKKWGVWYANEVGLDGYRLDAVKHIKFQFLKDWVDNARAATGKEMFTVGEYWQNDLGALNNYLAKVNYNQSLFDAPLHYNFYAASTGGGYYDMRNILNNTLVASNPTKAVTLVENHDTQPGQSLESTVQPWFKPLAYAFILTRSGGYPSVFYGDMYGTKGTTTREIPALKSKIEPLLKARKDYAYGTQRDYIDNPDVIGWTREGDSTKAKSGLATVITDGPGGSKRMYVGTSNAGEIWYDLTGNRTDKITIGSDGYATFPVNGGSVSVWVQQ

SEQ ID NO: 37334 - protein, 480 aa, Cytophaga sp.
NGTMMQYFEWYVPNDGQQWNRLRTDAPYLSSVGITAVWTPPAYKGTSQADVGYGPYDLYDLGEFNQKGTVRTKYGTKGELKSAVNTLHSNGIQVYGDVVMNHKAGADYTENVTAVEVNPSNRYQETSGEYNIQAWTGFNFPGRGTTYSNWKWQWFHFDGTDWDQSRSLSRIFKFDGKAWDWEVSSENGNYDYLMYADYDYDHPDVVNEMKKWGVWYANEVGLDGYRLDAVKHIKFQFLKDWVDNARAATGKEMFTVGEYWQNDLGALNNYLAKVNYNQSLFDAPLHYNFYAASTGGGYYDMRNILNNTLVASNPTKAVTLVENHDTQPGQSLESTVQPWFKPLAYAFILTRSGGYPSVFYGDMYGTKGTTTREIPALKSKIEPLLKARKDYAYGTQRDYIDNPDVIGWTREGDSTKAKSGLATVITDGPGGSKRMYVGTSNAGEIWYDLTGNRTDKITIGSDGYATFCVNGGSVSVWVQQ

SEQ ID NO: 37335 - protein, 480 aa, Cytophaga sp.
NGTMMQYFEWYVPNDGQQWNRLRTDAPYLSSVGITAVWTPPAYKGTSQADVGYGPYDLYDLGEFNQKGTVRTKYGTKGELKSAVNTLHSNGIQVYGDVVMNHKAGADYTENVTAVEVNPSNRYQETSGEYNIWAWTGFNFPGRGTTYSNWKWQWFHFDGTDWDQSRSLSRIFKFDGKAWDWEVSSENGNYDYLMYADYDYDHPDVVNEMKKWGVWYANEVGLDGYRLDAVKHIKFQFLKDWVDNARAATGKEMFTVGEYWQNDLGALNNYLAKVNYNQSLFDAPLHYNFYAASTGGGYYDMRNILNNTLVASNPTKAVTLVENHDTQPGQSLESTVQPWFKPLAYAFILTRSGGYPSVFYGDMYGTKGTTTREIPALKSKIEPLLKARKDYAYGTQRDYIDNPDVIGWTREGDSTKAKSGLATVITDGPGGSKRMYVGTSNAGEIWYDLTGNRTDKITIGSDGYATFPVNGGSVSVWVQQ

SEQ ID NO: 37336 - protein, 480 aa, Cytophaga sp.
NGTMMQYFEWYVPNDGQQWNRLRTDAPYLSSVGITAVWTPPAYKGTSQADVGYGPYDLYDLGEFNQKGTVRTKYGTKGELKSAVNTLHSNGIQVYGDVVMNHKAGADYTENVTAVEVNPSNRYQETSGEYNIQAWTGFNFPGRGTTYSNWKWQWFHFDGTDWDQSRSLSRIFKFDGKAWDWEVSSENGNYDYLMYADYDYDHPDVVNEMKKWGVWYANEVGLDGYRLDAVKHIKFQFLKDWVDNARAATGKEMFTVGEYWQNDLGTLNNYLAKVNYNQSLFDAPLHYNFYAASTGGGYYDMRNILNNTLVASNPTKAVTLVENHDTQPGQSLESTVQPWFKPLAYAFILTRSGGYPSVFYGDMYGTKGTTTREIPALKSKIEPLLKARKDYAYGTQRDYIDNPDVIGWTREGDSTKAKSGLATVITDGPGGSKRMYVGTSNAGEIWYDLTGNRTDKITIGSDGYATFPVNGGSVSVWVQQ

SEQ ID NO: 37337 - protein, 480 aa, Cytophaga sp.
NGTMMQYFEWYVPNDGQQWNRLRTDAPYLSSVGITAVWTPPAYKGTSQADVGYGPYDLYDLGEFNQKGTVRTKYGTKGELKSAVNTLHSNGIQVYGDVVMNHKAGADYTENVTAVEVNPSNRYQETSFEYNIQAWTGFNFPGRGTTYSNWKWQWFHFDGTDWDQSRSLSRIFKFDGKAWDWEVSSENGNYDYLMYADYDYDHPDVVNEMKKWGVWYANEVGLDGYRLDAVKHIKFQFLKDWVDNARAATGKEMFTVGEYWQNDLGALNNYLAKVNYNQSLFDAPLHYNFYAASTGGGYYDMRNILNNTLVASNPTKAVTLVENHDTQPGQSLESTVQPWFKPLAYAFILTRSGGYPSVFYGDMYGTKGTTTREIPALKSKIEPLLKARKDYAYGTQRDYIDNPDVIGWTREGDSTKAKSGLATVITDGPGGSKRMYVGTSNAGEIWYDLTGNRTDKITIGSDGYATFPVNGGSVSVWVQQ

SEQ ID NO: 37338 - protein, 480 aa, Cytophaga sp.
NGTMMQYFEWYVPNDGQQWNRLRTDAPYLSSVGITAVWTPPAYKGTSQADVGYGPYDLYDLGEFNQKGTVRTKYGTKGELKSAVNTLHSFGIQVYGDVVMNHKAGADYTENVTAVEVNPSNRYQETSGEYNIQAWTGFNFPGRGTTYSNWKWQWFHFDGTDWDQSRSLSRIFKFDGKAWDWEVSSENGNYDYLMYADYDYDHPDVVNEMKKWGVWYANEVGLDGYRLDAVKHIKFQFLKDWVDNARAATGKEMFTVGEYWQNDLGALNNYLAKVNYNQSLFDAPLHYNFYAASTGGGYYDMRNILNNTLVASNPTKAVTLVENHDTQPGQSLESTVQPWFKPLAYAFILTRSGGYPSVFYGDMYGTKGTTTREIPALKSKIEPLLKARKDYAYGTQRDYIDNPDVIGWTREGDSTKAKSGLATVITDGPGGSKRMYVGTSNAGEIWYDLTGNRTDKITIGSDGYATFPVNGGSVSVWVQQ

SEQ ID NO: 37339 - protein, 480 aa, Cytophaga sp.
NGTMMQYFEWYVPNDGQQWNRLRTDAPYLSSVGITAVWTPPAYKGTSQADVGYGPYDLYDLGEFNQKGTVRTKYGTKGELKSAVNTLHSNGIQVYGDVVMNHKAGADYTENVTAVEVNPSNRYQETSGEYNIQAWTGFNFPGRGTTYSNWKWQWFHFDGTDWDQSRSLSRIFKFDGKAWDWEVSSENGNYDYLMYADYDYDHPDVVNEMKKWGVWYANEVGLDGYRLDAVKHIKFQFLKDWVDNARAATGKEMFTVGEYWQNDLGALNNYLAKVNYNQSLFDAPLHYNFYAASTGGGYYDMRNILNNTLVASNPTKAVTLVENHDTQPGQSLESTVQPWFKPLAYAFILTRSGGYPSVFYGDMYGTKGTTTEEIPALKSKIEPLLKARKDYAYGTQRDYIDNPDVIGWTREGDSTKAKSGLATVITDGPGGSKRMYVGTSNAGEIWYDLTGNRTDKITIGSDGYATFPVNGGSVSVWVQQ

SEQ ID NO: 37340 - protein, 480 aa, Cytophaga sp.
NGTMMQYFEWYVPNDGQQWNRLRTDAPYLSSVGITAVWTPPAYKGTSQADVGYGPYDLYDLGEFNQKGTVRTKYGTKGELKSAVNTLHSNGIQVYGDVVMNHKAGADYTENVTAVEVNPSNRYQETSGEYNIQAWTGFNFPGRGTTYSNWKWQWFHFDGTDWDQSRSLSRIFKFDGKAWDWEVSSENGNYDYLMYADYDYDHPDVVNEMKKWGVWYANEVGLDGYRLDAVKHIKFQFLKDWVDNARAATGKEMFTVGEYWQNDLGALNNYLAKVNYNQSLFDAPLHYNFYAASTGGGYYDMRNILNNTLVASNPTKAVTLVENHDTQPGQSLESTVQPWFKPLAYAFILTRSGGYPSVFYGDMYGTKGTTTREIPALKSKIEPLLKARKDYAYGTQRDYIDNPDVIGWTREGDSTKAKSGLATVITDGPGGSKRMYVGTSNAGEKWYDLTGNRTDKITIGSDGYATFPVNGGSVSVWVQQ

SEQ ID NO: 37341 - protein, 480 aa, Cytophaga sp.
NGTMMQYFEWYVPNDGQQWNRLRTDAPYLSSVGITAVWTPPAYKGTSQADVGYGPYDLYDLGEFNQKGTVRTKYGTKGELKSAVNTLHSNGIQVYGDVVMNHKAGADYTENVTAVEVNPSNRYQETSGEYNIQAWTGFNFPGRGTTYSNWKWQWFHFDGTDWDQSRSLSRIFKFDGKAWDWEVSSENGNYDYLMYADYDYDHPDVVNEMKKWGVWYANEVGLDGYRLDAVKHIKFQFLKDWVDNARAATGKEMFTVGEYWQNDLGALNNYLAKVNYNQSLFDAPLHYNFYAASTGGGYYDMRNILNNTLVASNPTKAVTLVENHDTQPGQSLESTVQPWFKPLAYAFILTRSGGYPSVFYGDMYGTKGTTTREIPALKSKIEPLLKARKDYAYGTQRDYIDNPDVIGWTREGDSTKAKSGLATVITDGPGGSKRMYVGGSNAGEIWYDLTGNRTDKITIGSDGYATFPVNGGSVSVWVQQ

SEQ ID NO: 37342 - protein, 480 aa, Cytophaga sp.
NGTMMQYFEWYVPNDGQQWNRLRTDAPYLSSVGITAVWTPPAYKGTSQADVGYGPYDLYDLGEFNQKGTVRTKYGTKGELKSAVNTLHSNGIQVYGDVVMNHKAGADYTENVTAVEVNPSNRYQETSGEYNIQAWTGFNFPGRGTTYSNWKWQWFHFDGTDWDQSRSLSRIFKFDGKAWDWEVSSENGNYDYLMYADYDYDHPDVVNEMKKWGVWYANEVGLDGYRLDAVKHIKFQFLKDWVDNARAATGKEMFTVGEYWQNDLGALNNYLAKVNYNQSLFDAPLHYNFYAASTGGGYYDMRNILNNTLVASCPTKAVTLVENHDTQPGQSLESTVQPWFKPLAYAFILTRSGGYPSVFYGDMYGTKGTTTREIPALKSKIEPLLKARKDYAYGTQRDYIDNPDVIGWTREGDSTKAKSGLATVITDGPGGSKRMYVGTSNAGEIWYDLTGNRTDKITIGSDGYATFPVNGGSVSVWVQQ

SEQ ID NO: 37343 - protein, 480 aa, Cytophaga sp.
NGTMMQYFEWYVPNDGQQWNRLRTDAPYLSSVGITAVWTPPAYKGTSQADVGYGPYDLYDLGEFNQKGTVRTKYGTKGELKSAVNTLHSNGIQVYGDVVMNHKAGADYTENVTAVEVNPSNRYQETSGEYNIQAWTGFKFPGRGTTYSNWKWQWFHFDGTDWDQSRSLSRIFKFDGKAWDWEVSSENGNYDYLMYADYDYDHPDVVNEMKKWGVWYANEVGLDGYRLDAVKHIKFQFLKDWVDNARAATGKEMFTVGEYWQNDLGALNNYLAKVNYNQSLFDAPLHYNFYAASTGGGYYDMRNILNNTLVASNPTKAVTLVENHDTQPGQSLESTVQPWFKPLAYAFILTRSGGYPSVFYGDMYGTKGTTTREIPALKSKIEPLLKARKDYAYGTQRDYIDNPDVIGWTREGDSTKAKSGLATVITDGPGGSKRMYVGTSNAGEIWYDLTGNRTDKITIGSDGYATFPVNGGSVSVWVQQ

SEQ ID NO: 37344 - protein, 480 aa, Cytophaga sp.
NGTMMQYFEWYVPNDGQQWNRLRTDAPYLSSVGITAVWTPPAYKGTSQADVGYGPYDLYDLGEFNQKGTVRTKYGTKGELKSAVNTLHSNGIQVYGDVVMNHKAGADYTENVTAVEVNPSNRYQETSGEYNIQAWTGFNFPGRGTTYSNWKWQWFHFDGTDWDQSRSLSRIFKFCGKAWDWEVSSENGNYDYLMYADYDYDHPDVVNEMKKWGVWYANEVGLDGYRLDAVKHIKFQFLKDWVDNARAATGKEMFTVGEYWQNDLGALNNYLAKVNYNQSLFDAPLHYNFYAASTGGGYYDMRNILNNTLVASNPTKAVTLVENHDTQPGQSLESTVQPWFKPLAYAFILTRSGGYPSVFYGDMYGTKGTTTREIPALKSKIEPLLKARKDYAYGTQRDYIDNPDVIGWTREGDSTKAKSGLATVITDGPGGSKRMYVGTSNAGEIWYDLTGNRTDKITIGSDGYATFPVNGGSVSVWVQQ

SEQ ID NO: 37345 - protein, 480 aa, Cytophaga sp.
NGTMMQYFEWYVPNDGQQWNRLRTDAPYLSSVGITAVWTPPAYKGTSQADVGYGPYDLYDLGEFNQKGTVRTKYGTKGELKSAVNTLHSNGIQVYGDVVMNHKAGADYTENVTAVEVNPSNRYQETSGEYNIQAWTGFNFPGRGTTYSNWKWQWFHFDGTDWDQSRSNSRIFKFDGKAWDWEVSSENGNYDYLMYADYDYDHPDVVNEMKKWGVWYANEVGLDGYRLDAVKHIKFQFLKDWVDNARAATGKEMFTVGEYWQNDLGALNNYLAKVNYNQSLFDAPLHYNFYAASTGGGYYDMRNILNNTLVASNPTKAVTLVENHDTQPGQSLESTVQPWFKPLAYAFILTRSGGYPSVFYGDMYGTKGTTTREIPALKSKIEPLLKARKDYAYGTQRDYIDNPDVIGWTREGDSTKAKSGLATVITDGPGGSKRMYVGTSNAGEIWYDLTGNRTDKITIGSDGYATFPVNGGSVSVWVQQ

SEQ ID NO: 37346 - protein, 480 aa, Cytophaga sp.
NGTMMQYFEWYVPNDGQQWNRLRTDAPYLSSVGITAVWTPPAYKGTSQADVGYGPYDLYDLGEFNQKGTVRTKYGTKTELKSAVNTLHSNGIQVYGDVVMNHKAGADYTENVTAVEVNPSNRYQETSGEYNIQAWTGFNFPGRGTTYSNWKWQWFHFDGTDWDQSRSLSRIFKFDGKAWDWEVSSENGNYDYLMYADYDYDHPDVVNEMKKWGVWYANEVGLDGYRLDAVKHIKFQFLKDWVDNARAATGKEMFTVGEYWQNDLGALNNYLAKVNYNQSLFDAPLHYNFYAASTGGGYYDMRNILNNTLVASNPTKAVTLVENHDTQPGQSLESTVQPWFKPLAYAFILTRSGGYPSVFYGDMYGTKGTTTREIPALKSKIEPLLKARKDYAYGTQRDYIDNPDVIGWTREGDSTKAKSGLATVITDGPGGSKRMYVGTSNAGEIWYDLTGNRTDKITIGSDGYATFPVNGGSVSVWVQQ

SEQ ID NO: 37347 - protein, 480 aa, Cytophaga sp.
NGTMMQYFEWYVPNDGQQWNRLRTDAPYLSSVGITAVWTPPAYKGTSQADVGYGPYDLYDLGEFNQKGTVRTKYGTKGELKSAVNTLHSNGIQVYGDVVMNHKAGADYTENVTAVEVNPSNRYQETSGEYNIQAWTGFNFPGRGTTYSNWKWQWFHFDGTDWDQSRSLSRIFKFDGKAWDWEVSSENGNYDYLMYADYDYDHPDVVNEMKKWGVWYANEVGLDGYRLDAVKHIKFQFLKDWVDNARAATGKEMFTVGEYWQNDLGALGNYLAKVNYNQSLFDAPLHYNFYAASTGGGYYDMRNILNNTLVASNPTKAVTLVENHDTQPGQSLESTVQPWFKPLAYAFILTRSGGYPSVFYGDMYGTKGTTTREIPALKSKIEPLLKARKDYAYGTQRDYIDNPDVIGWTREGDSTKAKSGLATVITDGPGGSKRMYVGTSNAGEIWYDLTGNRTDKITIGSDGYATFPVNGGSVSVWVQQ

SEQ ID NO: 37348 - protein, 480 aa, Cytophaga sp.
NGTMMQYFEWYVPNDGQQWNRLRTDAPYLSSVGITAVWTPPAYKGTSQADVGYGPYDLYDLGEFNQKGTVRTKYGTKGELKSAVNTLHSNGIQVYGDVVMNHKAGADYTENVTAVEVNPSNRYQETSGEYNIQAWTGFNFPGRGTTYSNWKWQWFHFDGTDWDQSRSLSRIFKFDGKAWDWEVSSENGNYDYLMYADYDYDHPDVVNEMKKWGVWYANEVGLDGYRLDAVKHIKFQFLKDWVDNARAATGKEMFTVGEYWQNDLGALNNYLAKVNYNQSLFDAPLHYNFYAASTGGGYYDMRNILNNTLVASNPTKAVTLVENHDTQPGQSLESTVQPWFKPLAYAFILTRSGGYPSVFYGDMYGTKGTTTREIPALKSKIEPLLKARKDYAYGTQWDYIDNPDVIGWTREGDSTKAKSGLATVITDGPGGSKRMYVGTSNAGEIWYDLTGNRTDKITIGSDGYATFPVNGGSVSVWVQQ

SEQ ID NO: 37349 - protein, 480 aa, Cytophaga sp.
NGTMMQYFEWYVPNDGQQWNRLRTDAPYLSSVGITAVWTPPAYKGTSQADVGYGPYDLYDLGEFNQKGTVRTKYGTKGELKSAVNTLHSNGIQVYGDVVMNHKAGADYTENVTAVEVNPSNRYQETSGEYNIQAWTGFNFPGRGTTYSNWKWQWFHFDGTDWDQSRSLSRIFKFDGKAWDWEVSSENGNYDYLMYADYDYDHPDVVNEMKKWGVWYANEVGLDGYRLDAVKHIKFQFLKDWVDNARAATGKEMFTVGEYWQNDLGALNNYLAKVNYNQSLFDAPLHYNFYAASTGGGYYDMRNILNNTLVASNPTKAVTLVENHDTQPGQSLESTVQPWFKPLAYAFILTRSGGYPSVFYGDMYGTKGTTTREIPALKSKIEPLLKARKDYAYGTQRDYIDNPDVIGWTREGDSTKAKSGLATVITDGPGGSKRMYVGTSNAGEIWYDLTGNRTDKITIGSDGYATFPVNPGSVSVWVQQ

SEQ ID NO: 37350 - protein, 480 aa, Cytophaga sp.
NGTMMQYFEWYVPNDGQQWNRLRTDAPYLSSVGITAVWTPPAYKGTSQADVGYGPYDLYDLGEFNQKGTVRTKYGTKGELKSAVNTLHSNGIQVYGDVVMNHKAGADYTENVTAVEVNPSNRYQETSGEYNIQAWTGFNFPGRGTTYSNWKWQWFHFDGTDWDQSRSLSRIFKFDGKAWDWEVSSENGNYDYLMYADYDYDHPDVVNEMKKWGVWYANEVGLDGYRLDAVKHIKFQFLKDWVDNARAATGKEMFTVGEYWQNDLGALNNYLAKVNYNQSLFDAPLHYNFYAASTGGGYYDMRNILNNTLVANNPTKAVTLVENHDTQPGQSLESTVQPWFKPLAYAFILTRSGGYPSVFYGDMYGTKGTTTREIPALKSKIEPLLKARKDYAYGTQRDYIDNPDVIGWTREGDSTKAKSGLATVITDGPGGSKRMYVGTSNAGEIWYDLTGNRTDKITIGSDGYATFPVNGGSVSVWVQQ

SEQ ID NO: 37351 - protein, 480 aa, Cytophaga sp.
NGTMMQYFEWYVPNDGQQWNRLRTDAPYLSSVGITAVWTPPAYKGTSQADVGYGPYDLYDLGEFNQKGTVRTKYGTKGELKSAVNTLHSNGIQVYGDVVMNHKAGADYTENVTAVEVNPSNRYQETSGEYNIQAWTGFNFPGRGTTYSNWKWQWFHFDGTDWDQSRSLSRIFKFDGKAWDWEVSSENGNYDYLMYADYDYDHPDVVNEMKKWGVWYANEVGLDGYRLDAVKHIKFQFLKDWVNNARAATGKEMFTVGEYWQNDLGALNNYLAKVNYNQSLFDAPLHYNFYAASTGGGYYDMRNILNNTLVASNPTKAVTLVENHDTQPGQSLESTVQPWFKPLAYAFILTRSGGYPSVFYGDMYGTKGTTTREIPALKSKIEPLLKARKDYAYGTQRDYIDNPDVIGWTREGDSTKAKSGLATVITDGPGGSKRMYVGTSNAGEIWYDLTGNRTDKITIGSDGYATFPVNGGSVSVWVQQ

SEQ ID NO: 37352 - protein, 480 aa, Cytophaga sp.
NGTMMQYFEWYVPNDGQQWNRLRTDAPYLSSVGITAVWTPPAYKGTSQADVGYGPYDLYDLGEFNQKGTVRTKYGTKGELKSAVNTLHSNGIQVYGDVVMNHKAGADYTENVTAVEVNPSNRYQETSGEYNIQAWTGFNFPGRGTTYSNWKWQWFHFDGTDWDQSRSLSRIFKFDGKAWDWEVSSENGNYDYLMYADYDYDHPDVVNEMKKWGVWYANEVGLDGYRLDAVKHIKFQFLKDWVDNARAATGKEMFTVGEYWQNDLGALNNYLAKVNYNQSLFDAPLHYNFYAASTGGGYYDMRNILNNTLVASNPTKAVTLVENHDTQPGQSLESTVQPWFKPLAYAFILTRSGGYPSVFYGDMYGTKGTTTREIPALKSKIEPLLKARKDYAYGTQQDYIDNPDVIGWTREGDSTKAKSGLATVITDGPGGSKRMYVGTSNAGEIWYDLTGNRTDKITIGSDGYATFPVNGGSVSVWVQQ

SEQ ID NO: 37353 - protein, 480 aa, Cytophaga sp.
NGTMMQYFEWYVPNDGQQWNRLRTDAPYLSSVGITAVWTPPAYKGTSQADVGYGPYDLYDLGEFNQKGTVRTKYGTKGELKSAVNTLHSNGIQVYGDVVMNHKAGADYTENVTAVEVNPSNRYQETSGEYNIQAWTGFNFPGRGTTYSNWKWQWFHFDGTDWDQSRSLSRIFKFDGKAWDWEVSSENGNYDYLMYADYDYDHPDVVNEMKKWGVWYANEVGLDGYRLDAVKHIKFQFLKDWVDNARAATGKEMFTVGEYWQNDLGALNNYLAKVNYNQSLFDAPLHYNFYAASTGGGFYDMRNILNNTLVASNPTKAVTLVENHDTQPGQSLESTVQPWFKPLAYAFILTRSGGYPSVFYGDMYGTKGTTTREIPALKSKIEPLLKARKDYAYGTQRDYIDNPDVIGWTREGDSTKAKSGLATVITDGPGGSKRMYVGTSNAGEIWYDLTGNRTDKITIGSDGYATFPVNGGSVSVWVQQ

SEQ ID NO: 37354 - protein, 480 aa, Cytophaga sp.
NGTMMQYFEWYVPNDGQQWNRLRTDAPYLSSVGITAVWTPPAYKGTSQADVGYGPYDLYDLGEFNQKGTVRTKYGTKGELKSAVNTLHSNGIQVYGDVVMNHKAGADYTENVTAVEVNPSNRYQETSGEYNIQAWTGFNFPGRGTTYSNWKWQWFHFDGTDWDQSRSLSRIFKFDGKAWDWEVSSENGNYDYLMYADYDYDHPDVVNEMKKWGVWYANEVGLDGYRLDAVKHIKFQFLKDWVDNARAATGKEMFTVGEYWQNDLGALNNYLAKVNYNQSLFDAPLHYNFYAASTGGGYYDMRNILNNTLVASNPTKAVTLVENHDTQPGQSLESTVQPWFKPLAYAFILTRSGGYPSVFYGDMYGTKGTTTREIPALKSKIEPLLKARKDYAYGTQRDYIDNPDVIGWTREGDSTKAKSGLATVITDGPGGSKRMYVGTSNAGEIWYDLTGNRTDKITIGSDGYATFPVNRGSVSVWVQQ

SEQ ID NO: 37355 - protein, 480 aa, Cytophaga sp.
NGTMMQYFEWYVPNDGQQWNRLRTDAPYLSSVGITAVWTPPAYKGTSQADVGYGPYDLYDLGEFNQKGTVRTKYGTKGELKSAVNTLHSNGIQVYGDVVMNHKAGADYTENVTAVEVNPSNRYQETSGEYNIQAWTGFNFPGRGTTYSNWKWGWFHFDGTDWDQSRSLSRIFKFDGKAWDWEVSSENGNYDYLMYADYDYDHPDVVNEMKKWGVWYANEVGLDGYRLDAVKHIKFQFLKDWVDNARAATGKEMFTVGEYWQNDLGALNNYLAKVNYNQSLFDAPLHYNFYAASTGGGYYDMRNILNNTLVASNPTKAVTLVENHDTQPGQSLESTVQPWFKPLAYAFILTRSGGYPSVFYGDMYGTKGTTTREIPALKSKIEPLLKARKDYAYGTQRDYIDNPDVIGWTREGDSTKAKSGLATVITDGPGGSKRMYVGTSNAGEIWYDLTGNRTDKITIGSDGYATFPVNGGSVSVWVQQ

SEQ ID NO: 37356 - protein, 480 aa, Cytophaga sp.
NGTMMQYFEWYVPNDGQQWNRLRTDAPYLSSVGITAVWTPPAYKGTSQADVGYGPYDLYDLGEFNQKGTVRTKYGTKGELKSAVNTLHSNGIQVYGDVVMNHKAGADYTENVTAVEVNPSNRYQETSGEYNIQAWTGFNFPGRGTTYSNWKWQWFHFDGTDWDQSRSLSRIFKFDGKAWDWEVSSENGNYDYLMYADYDYDHPDVVNEMKKWGVWYANEVGLDGYRLDAVKHIKFQFLKDWVDNARAATGKEMFTVGEYWQNDLGALNNYLAKVNYNQSLFDAPLHYNFYAASTGGGYYDMRNILNNTLVASNPTKAVTLVENHDTQPGQSLESTVQPWFKPLAYAFILTRSGGYPSVFYGDMYGTKGTTTREIPALKSKIEPLLKARKDYAYGTQRDYIDNPDVIGWTREGDSTKAKSGLATVITDGPGGSKRMYVGTSNAGEIWYDLTGNRTDKITIGSDGYATFPVNLGSVSVWVQQ

SEQ ID NO: 37357 - protein, 480 aa, Cytophaga sp.
NGTMMQYFEWYVPNDGQQWNRLRTDAPYLSSVGITAVWTPPAYKGTSQFDVGYGPYDLYDLGEFNQKGTVRTKYGTKGELKSAVNTLHSNGIQVYGDVVMNHKAGADYTENVTAVEVNPSNRYQETSGEYNIQAWTGFNFPGRGTTYSNWKWQWFHFDGTDWDQSRSLSRIFKFDGKAWDWEVSSENGNYDYLMYADYDYDHPDVVNEMKKWGVWYANEVGLDGYRLDAVKHIKFQFLKDWVDNARAATGKEMFTVGEYWQNDLGALNNYLAKVNYNQSLFDAPLHYNFYAASTGGGYYDMRNILNNTLVASNPTKAVTLVENHDTQPGQSLESTVQPWFKPLAYAFILTRSGGYPSVFYGDMYGTKGTTTREIPALKSKIEPLLKARKDYAYGTQRDYIDNPDVIGWTREGDSTKAKSGLATVITDGPGGSKRMYVGTSNAGEIWYDLTGNRTDKITIGSDGYATFPVNGGSVSVWVQQ

SEQ ID NO: 37358 - protein, 480 aa, Cytophaga sp.
NGTMMQYFEWYVPNDGQQWNRLRTDAPYLSSVGITAVWTPPAYKGTSQADVGYGPYDLYDLGEFNQKGTVRTKYGTKGELKSAVNTLHSNGIQVYGDVVMNHKAGADYTENVTAVEVNPSNRYQETSGEYNIQAWTGFNFPGRGTTYSNWKWQWFHFDGTDWDQSRSLSRIFKFIGKAWDWEVSSENGNYDYLMYADYDYDHPDVVNEMKKWGVWYANEVGLDGYRLDAVKHIKFQFLKDWVDNARAATGKEMFTVGEYWQNDLGALNNYLAKVNYNQSLFDAPLHYNFYAASTGGGYYDMRNILNNTLVASNPTKAVTLVENHDTQPGQSLESTVQPWFKPLAYAFILTRSGGYPSVFYGDMYGTKGTTTREIPALKSKIEPLLKARKDYAYGTQRDYIDNPDVIGWTREGDSTKAKSGLATVITDGPGGSKRMYVGTSNAGEIWYDLTGNRTDKITIGSDGYATFPVNGGSVSVWVQQ

SEQ ID NO: 37359 - protein, 480 aa, Cytophaga sp.
NGTMMQYFEWYVPNDGQQWNRLRTDAPYLSSVGITAVWTPPAYKGTSQADVGYGPYDLYDLGEFNQKGTVRTKYGTKGELKSAVNTLHSNGIQVYGDVVMNHKAGADYTENVTAVEVNPSNRYQETSGEYNIQAWTGFNFPGRGTTYSNWKWQWFHFDGTDWDQSRSLSRIFKFDGKAWDWEVSSENGNYDYLMYADYDYDHPDVVNELKKWGVWYANEVGLDGYRLDAVKHIKFQFLKDWVDNARAATGKEMFTVGEYWQNDLGALNNYLAKVNYNQSLFDAPLHYNFYAASTGGGYYDMRNILNNTLVASNPTKAVTLVENHDTQPGQSLESTVQPWFKPLAYAFILTRSGGYPSVFYGDMYGTKGTTTREIPALKSKIEPLLKARKDYAYGTQRDYIDNPDVIGWTREGDSTKAKSGLATVITDGPGGSKRMYVGTSNAGEIWYDLTGNRTDKITIGSDGYATFPVNGGSVSVWVQQ

SEQ ID NO: 37360 - protein, 480 aa, Cytophaga sp.
NGTMMQYFEWYVPNDGQQWNRLRTDAPYLSSVGITAVWTPPAYKGTSQADVGYGPYDLYDLGEFNQKGTVRTKYGTKGELKSAVNTLHSNGIQVYGDVVMNHKAGADYTENVTAVEVNPSNRYQETSGEYNIQAWTGFNFPGRGTTYSNWKWQWFHFDGTDWDQSRSLSRIFKFDGKAWDWEVSSENGNYDYLMYADYDYDHPDVVNEMKKWGVWYANEVGLDGYRLDAVKHIKFQFLKDWVDNARAATGKEMFTVGEYWQNDLGALNNYLAKVNYNQSLFDAPLHYNFYAASTGGGYYDMRNILNNTLVASNPTKAVTLVENHDTQPGQSLESTVQPWFKPLAYAFILTRSGGYPSVFYGDMYGTKGTTTREIPALKSKIEPLLKARKDYAYGTQRDYIDNPDVIGWTREGDSTMAKSGLATVITDGPGGSKRMYVGTSNAGEIWYDLTGNRTDKITIGSDGYATFPVNGGSVSVWVQQ

SEQ ID NO: 37361 - protein, 480 aa, Cytophaga sp.
NGTMMQYFEWYVPNDGQQWNRLRTDAPYLSSVGITAVWTPPAYKGTSQADVGYGPYDLYDLGEFNQKGTVRTKYGTKGELKSAVNTLHSNGIQVYGDVVMNHKAGADYTENVTAVEVNPSNRYQETSGEYNIQAWTGFNFPGRGTTYSNWKWQWFHFDGTDWDQSRSLSRIFKFDGKAWDWEVSSENGNYDYLMYADYDYDHPDVVNEMKKWGVWYANEVGLDGYRLDAVKHIKFQFLKDWVDNARAATGKEMFTVGEYWQNDLGALNNYLAKVNYNQSLFDAPLHYNFYAASTGGGYYDMRNILNNTLVASNPTKAVTLVENHDTQPGQSLESTVQPWFKPLAYAFILTRSGGYPSVFYGDMYGTKGTTTREIPALKSKIEPLLKARKDYAYGTQRDYIDNPDVIGWTREGDSYKAKSGLATVITDGPGGSKRMYVGTSNAGEIWYDLTGNRTDKITIGSDGYATFPVNGGSVSVWVQQ

SEQ ID NO: 37362 - protein, 480 aa, Cytophaga sp.
NGTMMQYFEWYVPNDGQQWNRLRTDAPYLSSVGITAVWTPPAYKGTSQADVGYGPYDLYDLGEFNQKGTVRTKYGTKGELKSAVNTLHSNGMQVYGDVVMNHKAGADYTENVTAVEVNPSNRYQETSGEYNIQAWTGFNFPGRGTTYSNWKWQWFHFDGTDWDQSRSLSRIFKFDGKAWDWEVSSENGNYDYLMYADYDYDHPDVVNEMKKWGVWYANEVGLDGYRLDAVKHIKFQFLKDWVDNARAATGKEMFTVGEYWQNDLGALNNYLAKVNYNQSLFDAPLHYNFYAASTGGGYYDMRNILNNTLVASNPTKAVTLVENHDTQPGQSLESTVQPWFKPLAYAFILTRSGGYPSVFYGDMYGTKGTTTREIPALKSKIEPLLKARKDYAYGTQRDYIDNPDVIGWTREGDSTKAKSGLATVITDGPGGSKRMYVGTSNAGEIWYDLTGNRTDKITIGSDGYATFPVNGGSVSVWVQQ

SEQ ID NO: 37363 - protein, 480 aa, Cytophaga sp.
NGTMMQYFEWYVPNDGQQWNRLCTDAPYLSSVGITAVWTPPAYKGTSQADVGYGPYDLYDLGEFNQKGTVRTKYGTKGELKSAVNTLHSNGIQVYGDVVMNHKAGADYTENVTAVEVNPSNRYQETSGEYNIQAWTGFNFPGRGTTYSNWKWQWFHFDGTDWDQSRSLSRIFKFDGKAWDWEVSSENGNYDYLMYADYDYDHPDVVNEMKKWGVWYANEVGLDGYRLDAVKHIKFQFLKDWVDNARAATGKEMFTVGEYWQNDLGALNNYLAKVNYNQSLFDAPLHYNFYAASTGGGYYDMRNILNNTLVASNPTKAVTLVENHDTQPGQSLESTVQPWFKPLAYAFILTRSGGYPSVFYGDMYGTKGTTTREIPALKSKIEPLLKARKDYAYGTQRDYIDNPDVIGWTREGDSTKAKSGLATVITDGPGGSKRMYVGTSNAGEIWYDLTGNRTDKITIGSDGYATFPVNGGSVSVWVQQ

SEQ ID NO: 37364 - protein, 480 aa, Cytophaga sp.
NGTMMQYFEWYVPNDGQQWNRLRTDAPYLSSVGITAVWTPPAYKGTSQADVGYGPYDLYDLGEFNQKGTVRTKYGTKGELKSAVNTLHSNGIQVYGDVVMNHKAGADYTENVTAVEVNPSNRYQETSGEYNIQAWTGFNFPGRGTTYSNWKWQWFHFDGTDWDQSRSLSRIFKFDGKAWDWEVSSENGNYDYLMYADYDYDHPDVVNEMKKWGVWYANEVGLDGYRLDAVKHIKFQFLKDWVDNARAATGKEMFTVGEYWQNDLGALNNYLAKVNYNQSLFDAPLHYNFYAASTGGGYYDMRNILNNTLVASNPTKAVTLVENHDTQPGQSLESTVQPWFKPLAYAFILTRSGGYPSVFYGDMYGTKGTTTREIPALKSKIEPLLKARKDYAYGTQRDYIDNPDVIGWTREGDSTKAKSGLATVITDGPGGSKRMYVGTSNAGEIWYDLTGNRTDKITIGSDGYAAFPVNGGSVSVWVQQ

SEQ ID NO: 37365 - protein, 480 aa, Cytophaga sp.
NGTMMQYFEWYVPNDGQQWARLRTDAPYLSSVGITAVWTPPAYKGTSQADVGYGPYDLYDLGEFNQKGTVRTKYGTKGELKSAVNTLHSNGIQVYGDVVMNHKAGADYTENVTAVEVNPSNRYQETSGEYNIQAWTGFNFPGRGTTYSNWKWQWFHFDGTDWDQSRSLSRIFKFDGKAWDWEVSSENGNYDYLMYADYDYDHPDVVNEMKKWGVWYANEVGLDGYRLDAVKHIKFQFLKDWVDNARAATGKEMFTVGEYWQNDLGALNNYLAKVNYNQSLFDAPLHYNFYAASTGGGYYDMRNILNNTLVASNPTKAVTLVENHDTQPGQSLESTVQPWFKPLAYAFILTRSGGYPSVFYGDMYGTKGTTTREIPALKSKIEPLLKARKDYAYGTQRDYIDNPDVIGWTREGDSTKAKSGLATVITDGPGGSKRMYVGTSNAGEIWYDLTGNRTDKITIGSDGYATFPVNGGSVSVWVQQ

SEQ ID NO: 37366 - protein, 480 aa, Cytophaga sp.
NGTMMQYFEWYVPNDGQQWNRLRTDAPYLSSVGITAVWTPPAYKGTSQADVGYGPYDLYDLGEFNQKGTVRTKYGTKGELKSAVNTLHSNGIQVYGDVVMNHKAGADYTENVTAVEVNPSNRYQETSGEYNIQAWTGFNFPGRGTTYSNWKWQWFHFDGTDWDPSRSLSRIFKFDGKAWDWEVSSENGNYDYLMYADYDYDHPDVVNEMKKWGVWYANEVGLDGYRLDAVKHIKFQFLKDWVDNARAATGKEMFTVGEYWQNDLGALNNYLAKVNYNQSLFDAPLHYNFYAASTGGGYYDMRNILNNTLVASNPTKAVTLVENHDTQPGQSLESTVQPWFKPLAYAFILTRSGGYPSVFYGDMYGTKGTTTREIPALKSKIEPLLKARKDYAYGTQRDYIDNPDVIGWTREGDSTKAKSGLATVITDGPGGSKRMYVGTSNAGEIWYDLTGNRTDKITIGSDGYATFPVNGGSVSVWVQQ

SEQ ID NO: 37367 - protein, 480 aa, Cytophaga sp.
NGTMMQYFEWYVPNDGQQWNRLRTDAPYLSSVGITAVWTPPAYKGTSQADVGYGPYDLYDLGEFNQKGTVRTKYGTKGELKSAVNTLHSNGIQVYGDVVMNHKAGADYTENVTAVEVNPSNRYQETSGEYNIQAWTGFNFPGRGTTYSNWKWQWFHFDGTDWDQSRSLSRIFKFDGKAWDWEVSSENGNYDYLMYADYDYDHPDVVNEMKKWGVWYANEVGLDGYRLDAVKHIKFQFLKDWVDNARAATGKEMFTVGEYWQNDLGALNNYLAKVNYNQSLFDAPLHYNFYAASTGGGYYDMRNILNNTLVASNPTKAVTLVENHDTQPGQSLESTVQPWFKPLAYAFILTRSGGYPSVFYGDMYGTKGTTTREIPALKSKIEPLLKARKTYAYGTQRDYIDNPDVIGWTREGDSTKAKSGLATVITDGPGGSKRMYVGTSNAGEIWYDLTGNRTDKITIGSDGYATFPVNGGSVSVWVQQ

SEQ ID NO: 37368 - protein, 480 aa, Cytophaga sp.
NGTMMQYFEWYVPNDGQQWCRLRTDAPYLSSVGITAVWTPPAYKGTSQADVGYGPYDLYDLGEFNQKGTVRTKYGTKGELKSAVNTLHSNGIQVYGDVVMNHKAGADYTENVTAVEVNPSNRYQETSGEYNIQAWTGFNFPGRGTTYSNWKWQWFHFDGTDWDQSRSLSRIFKFDGKAWDWEVSSENGNYDYLMYADYDYDHPDVVNEMKKWGVWYANEVGLDGYRLDAVKHIKFQFLKDWVDNARAATGKEMFTVGEYWQNDLGALNNYLAKVNYNQSLFDAPLHYNFYAASTGGGYYDMRNILNNTLVASNPTKAVTLVENHDTQPGQSLESTVQPWFKPLAYAFILTRSGGYPSVFYGDMYGTKGTTTREIPALKSKIEPLLKARKDYAYGTQRDYIDNPDVIGWTREGDSTKAKSGLATVITDGPGGSKRMYVGTSNAGEIWYDLTGNRTDKITIGSDGYATFPVNGGSVSVWVQQ

SEQ ID NO: 37369 - protein, 480 aa, Cytophaga sp.
NGTMMQYFEWYVPNDGQQWNRLRTDAPYLSSVGITAVWTPPAYKGTSQADVGYGPYDLYDLGEFNQKGTVRTKYGTKGELKSAVNTLHSNGIQVYGDVVMNHKAGADYTENVTAVEVNPSNRYQETSGEYNIQAWTGFNFPGRGTTYSNWKWQWFHFDGTDWDQSRSLSRIFKFDGKAWDWEVSSENGNYDYLMYADYDYDHPDVVNEMKKWGVWYANEVGLDGYRLDAVKHIKFQFLKDWVDNARAATGKEMFTVGEYWQNDLGALNNYLAKVNYNQSLFDAPLHYNFYAASTGGGYYDMRNILNNTLVASNPQKAVTLVENHDTQPGQSLESTVQPWFKPLAYAFILTRSGGYPSVFYGDMYGTKGTTTREIPALKSKIEPLLKARKDYAYGTQRDYIDNPDVIGWTREGDSTKAKSGLATVITDGPGGSKRMYVGTSNAGEIWYDLTGNRTDKITIGSDGYATFPVNGGSVSVWVQQ

SEQ ID NO: 37370 - protein, 480 aa, Cytophaga sp.
NGTMMQYFEWYVPNDGQQWNRLRTDAPYLSSVGITAVWTPPAYKGTSQADVGYGPYDLYDLGEFNQKGTVRTKYGTKGELKSAVNTLHSNGIQVYGDVVMNHKAGADYTENVTAVEVNPSNRYQETSGEYNIQAWTGFNFPGRGTTYSCWKWQWFHFDGTDWDQSRSLSRIFKFDGKAWDWEVSSENGNYDYLMYADYDYDHPDVVNEMKKWGVWYANEVGLDGYRLDAVKHIKFQFLKDWVDNARAATGKEMFTVGEYWQNDLGALNNYLAKVNYNQSLFDAPLHYNFYAASTGGGYYDMRNILNNTLVASNPTKAVTLVENHDTQPGQSLESTVQPWFKPLAYAFILTRSGGYPSVFYGDMYGTKGTTTREIPALKSKIEPLLKARKDYAYGTQRDYIDNPDVIGWTREGDSTKAKSGLATVITDGPGGSKRMYVGTSNAGEIWYDLTGNRTDKITIGSDGYATFPVNGGSVSVWVQQ

SEQ ID NO: 37371 - protein, 480 aa, Cytophaga sp.
NGTMMQYFEWYVPNDGQQWNRLRTDAPYLSSVGITAVWTPPAYKGTSQADVGYGPYDLYDLGEFNQKGTVRTKYGTKGELKSAVNTLHSNGIQVYGDVVMNHKAGADYTENVTAVEVNPSNRYQETSGEYNIQAWTGFNFPGRGTTYSNWKWQWFHFDGTDWDQSRSLSRIFKFDGKAWDWEVSSENGNYDYLMYADYDYDHPDVVNEMKKWGVWYANEVGLDGYRLDAVKHIKFQFLKDWVDNARAATGKEMFTVGEYWQNDLGALNNYLAKVNYNQSLFDAPLHYNFYAASTGGGYYDMRNILNNTLVASNPTKAVTLVENHDTQPGQSLESTVQPWFKPLAYAFILTRSGGYPSVFYGDMYGTKGTTTFEIPALKSKIEPLLKARKDYAYGTQRDYIDNPDVIGWTREGDSTKAKSGLATVITDGPGGSKRMYVGTSNAGEIWYDLTGNRTDKITIGSDGYATFPVNGGSVSVWVQQ

SEQ ID NO: 37372 - protein, 480 aa, Cytophaga sp.
NGTMMQYFEWYVPNDGQQWNRLRTDAPYLSSVGITAVWTPPAYKGTSQADVGYGPYDLYDLGEFNQKGTVRTKYGTKGELKSAVNTLHSNGIQVYGDVVMNHKAGADYTENVTAVEVNPSNRYQETSGEYNIQAWTGFNFPGRGTTYSNRKWQWFHFDGTDWDQSRSLSRIFKFDGKAWDWEVSSENGNYDYLMYADYDYDHPDVVNEMKKWGVWYANEVGLDGYRLDAVKHIKFQFLKDWVDNARAATGKEMFTVGEYWQNDLGALNNYLAKVNYNQSLFDAPLHYNFYAASTGGGYYDMRNILNNTLVASNPTKAVTLVENHDTQPGQSLESTVQPWFKPLAYAFILTRSGGYPSVFYGDMYGTKGTTTREIPALKSKIEPLLKARKDYAYGTQRDYIDNPDVIGWTREGDSTKAKSGLATVITDGPGGSKRMYVGTSNAGEIWYDLTGNRTDKITIGSDGYATFPVNGGSVSVWVQQ

SEQ ID NO: 37373 - protein, 480 aa, Cytophaga sp.
NGTMMQYFEWYVPNDGQQWNRLRTDAPYLSSVGITAVWTPPAYKGTSQADVGYGPYDLYDLGEFNQKGTVRTKYGTKGELKSAVNTLHSNGIQVYGDVVMNHKAGADYTENVTAVEVNPSNRYQETSGEYNIQAWTGFNFPGRGTTYSNWKWQWFHFDGTDWDQSRSLSRIFKFDGKAWDWEVSSENGNYDYLMYADYDYDHPDVVNEMKKWGVWYANEVGLDGYRLDAVKHIKFKFLKDWVDNARAATGKEMFTVGEYWQNDLGALNNYLAKVNYNQSLFDAPLHYNFYAASTGGGYYDMRNILNNTLVASNPTKAVTLVENHDTQPGQSLESTVQPWFKPLAYAFILTRSGGYPSVFYGDMYGTKGTTTREIPALKSKIEPLLKARKDYAYGTQRDYIDNPDVIGWTREGDSTKAKSGLATVITDGPGGSKRMYVGTSNAGEIWYDLTGNRTDKITIGSDGYATFPVNGGSVSVWVQQ

SEQ ID NO: 37374 - protein, 480 aa, Cytophaga sp.
NGTMMQYFEWYVPNDGQQWNRLRTDAPYLSSVGITAVWTPPAYKGTSQADVGYGPYDLYDLGEFNQKGTVRTKYGTKGELKSAVNTLHSNGIQVYGDVVMNHKAGADYTENVTAVEVNPSNRYQETSGEYNIQAWTGFNFPGRGTTYSNWKWQWFHFDGTDWDQSRSLSRIFKFDGKAWDWEVSSENGNYDYLMYADYDYDHPDVVNEMKKWGVWYANEVGLDGYRLDAVKHIKFQFLKDWVDNARAATGKEMFTVGEYWQNDLGALNNYLAKVNYNQSLFDAPLHYNFYAASTMGGYYDMRNILNNTLVASNPTKAVTLVENHDTQPGQSLESTVQPWFKPLAYAFILTRSGGYPSVFYGDMYGTKGTTTREIPALKSKIEPLLKARKDYAYGTQRDYIDNPDVIGWTREGDSTKAKSGLATVITDGPGGSKRMYVGTSNAGEIWYDLTGNRTDKITIGSDGYATFPVNGGSVSVWVQQ

SEQ ID NO: 37375 - protein, 480 aa, Cytophaga sp.
NGTMMQYFEWYVPNDGQQWSRLRTDAPYLSSVGITAVWTPPAYKGTSQADVGYGPYDLYDLGEFNQKGTVRTKYGTKGELKSAVNTLHSNGIQVYGDVVMNHKAGADYTENVTAVEVNPSNRYQETSGEYNIQAWTGFNFPGRGTTYSNWKWQWFHFDGTDWDQSRSLSRIFKFDGKAWDWEVSSENGNYDYLMYADYDYDHPDVVNEMKKWGVWYANEVGLDGYRLDAVKHIKFQFLKDWVDNARAATGKEMFTVGEYWQNDLGALNNYLAKVNYNQSLFDAPLHYNFYAASTGGGYYDMRNILNNTLVASNPTKAVTLVENHDTQPGQSLESTVQPWFKPLAYAFILTRSGGYPSVFYGDMYGTKGTTTREIPALKSKIEPLLKARKDYAYGTQRDYIDNPDVIGWTREGDSTKAKSGLATVITDGPGGSKRMYVGTSNAGEIWYDLTGNRTDKITIGSDGYATFPVNGGSVSVWVQQ

SEQ ID NO: 37376 - protein, 480 aa, Cytophaga sp.
NGTMMQYFEWYVPNDGQQWNRLRTDAPYLSSVGITAVWTPPAYKGTSQADVGYGPYDLYDLGEFNQKGTVRTKYGTKGELKSAVNTLHSNGIQVYGDVVMNHKAGADYTENVTAVEVNPSNRYQETSGEYNIQAWTGFNFPGRGTTYSNWKWQWFHFDGTDWDQSRSLSRIFKFDGKAWDWEVSSENGNYDYLMYADYDYDHPDVVNEMKKWGVWYANEVGLDGYRLDAVKHIKFQFLKDWVDNARAATGKEMFTVGEYWQNDLGALNNYLAKVNYNQSLFDAPLHYNFYAASTGGGYYDMRNILNNTLVASNPTKAVTLVENHDTQPGQSLESTVQPWFKPLAYAFILTRSGGYPSVFYGDMYGTKGTTTREIPALKSKIEPLLKARKDYAYGQQRDYIDNPDVIGWTREGDSTKAKSGLATVITDGPGGSKRMYVGTSNAGEIWYDLTGNRTDKITIGSDGYATFPVNGGSVSVWVQQ

SEQ ID NO: 37377 - protein, 480 aa, Cytophaga sp.
NGTMMQYFEWYVPNDGQQWNRLRTDAPYLSSVGITAVWTPPAYKGTSQADVGYGPYDLYDLGEFNQKGTVRTKYGTKGELKSAVNTLHSNGIQVYGDVVMNHKAGADYTENVTAVEVNPSNRYQETSGEYNIQAWTGFNFPGRGTTYSNWKWRWFHFDGTDWDQSRSLSRIFKFDGKAWDWEVSSENGNYDYLMYADYDYDHPDVVNEMKKWGVWYANEVGLDGYRLDAVKHIKFQFLKDWVDNARAATGKEMFTVGEYWQNDLGALNNYLAKVNYNQSLFDAPLHYNFYAASTGGGYYDMRNILNNTLVASNPTKAVTLVENHDTQPGQSLESTVQPWFKPLAYAFILTRSGGYPSVFYGDMYGTKGTTTREIPALKSKIEPLLKARKDYAYGTQRDYIDNPDVIGWTREGDSTKAKSGLATVITDGPGGSKRMYVGTSNAGEIWYDLTGNRTDKITIGSDGYATFPVNGGSVSVWVQQ

SEQ ID NO: 37378 - protein, 480 aa, Cytophaga sp.
NGTMMQYFEWYVPNDGQQWNRLRTDAPYLSSVGITAVWTPPAYKGTSQADVGYGPYDLYDLGEFNQKGTVRTKYGTKGELKSAVNTLHSNGIQVYGDVVMNHKAGADYTENVTAVEVNPSNRYQETSGEYNIQAWTGFNFPGRGTTYSNWKWQWFHFDGTDWDQSRSLSRIFKFDGKAWDWEVSSENGNYDYLMYADYDYDHPDVVNEMKKWGVWYANEVGLDGYRLDAVKHIKFQFLKDWVDNARNATGKEMFTVGEYWQNDLGALNNYLAKVNYNQSLFDAPLHYNFYAASTGGGYYDMRNILNNTLVASNPTKAVTLVENHDTQPGQSLESTVQPWFKPLAYAFILTRSGGYPSVFYGDMYGTKGTTTREIPALKSKIEPLLKARKDYAYGTQRDYIDNPDVIGWTREGDSTKAKSGLATVITDGPGGSKRMYVGTSNAGEIWYDLTGNRTDKITIGSDGYATFPVNGGSVSVWVQQ

SEQ ID NO: 37379 - protein, 480 aa, Cytophaga sp.
NGTMMQYFEWYVPNDGQQWNRLRTDAPYLSSVGITAVWTPPAYKGTSQADVGYGPYDLYDLGEFCQKGTVRTKYGTKGELKSAVNTLHSNGIQVYGDVVMNHKAGADYTENVTAVEVNPSNRYQETSGEYNIQAWTGFNFPGRGTTYSNWKWQWFHFDGTDWDQSRSLSRIFKFDGKAWDWEVSSENGNYDYLMYADYDYDHPDVVNEMKKWGVWYANEVGLDGYRLDAVKHIKFQFLKDWVDNARAATGKEMFTVGEYWQNDLGALNNYLAKVNYNQSLFDAPLHYNFYAASTGGGYYDMRNILNNTLVASNPTKAVTLVENHDTQPGQSLESTVQPWFKPLAYAFILTRSGGYPSVFYGDMYGTKGTTTREIPALKSKIEPLLKARKDYAYGTQRDYIDNPDVIGWTREGDSTKAKSGLATVITDGPGGSKRMYVGTSNAGEIWYDLTGNRTDKITIGSDGYATFPVNGGSVSVWVQQ

SEQ ID NO: 37380 - protein, 480 aa, Cytophaga sp.
NGTMMQYFEWYVPNDGQQWNRLRTDAPYLSSVGITAVWTPPAYKGTSQADVGYGPYDLYDLGEFNQKGTVRTKYGTKGELKSAVNTLHSNGIQVYGDVVMNHKAGADYTENVTAVEVNPSNRYQETSGEYNIQAWTGFNFPGRGTTYSNWKWQWFHFDGTDWDQSRSLSRIFKFDGKAWDWEVSSENGNYDYLMYADYDYDHPDVVNEMKKWGVWYANEVGLDGYRLDAVKHIKFQFLKDWVDNARAATGKEMFTVGEYWQNDLGALNNYLAKVNYNQSLFDAPLHYNFYAASTGGGYYDMRNILNNTLVASNPTKAVTLVENHDTQPGQSLESTVQPWFKPLAYAFILTRSGGYPSVFYGDMYGTKGTTTREIPALKSKIEPLLKARKDYAYGTQRDYIDNPDVIGWTREGDSTKAKSGLATVITDGPGGSKRMYVGSSNAGEIWYDLTGNRTDKITIGSDGYATFPVNGGSVSVWVQQ

SEQ ID NO: 37381 - protein, 480 aa, Cytophaga sp.
NGTMMQYFEWYVPNDGQQWNRLRTDAPYLSSVGITAVWTPPAYKGTSQADVGYGPYDLYDLGEFNQKGTVRTKYGTKGELKSAVNTLHSNGIQVYGDVVMNHKAGADYTENVTAVEVNPSNRYQETSGEYNIQAWTGFNFPGRGTTYSNWKWQWFHFDGTDWDQSRSLSRIFKFDGKAWDWEVSSENGNYDYLMYADYDYDHPDVVNEMKKWGVWYANEVGLDGYRLDAVKHIKFQFLKDWVDNARAATGKEMFTVGEYWQNDLGALNNYLAKVNYNQSLFDAPLHYNFYAASTGGGYYDMRNILNNTLVASNPTKAVTLVENHDTQPGQSLESTVQPWFKPLAYAFILTRSGGYPSVFYGDMYGTKGTTTREIPMLKSKIEPLLKARKDYAYGTQRDYIDNPDVIGWTREGDSTKAKSGLATVITDGPGGSKRMYVGTSNAGEIWYDLTGNRTDKITIGSDGYATFPVNGGSVSVWVQQ

SEQ ID NO: 37382 - protein, 480 aa, Cytophaga sp.
NGTMMQYFEWYVPNDGQQWNRLRTDAPYLSSVGITAVWTPPAYKGTSQADVGYGPYDLYDLGEFNQKGTVRTKYGTKGELKSAVNTLHSNGIQVYGDVVMNHKAGADYTENVTAVEVNPSNRYQETSGEYNIQAWTGFNFPGRGTTYSNWKWQWFHFDGTDWDQSRSLSRIFKFDGKAWDWEVSSENGNYDYLMYADYDYDHPDVVNEMKKWGVWYANEVGLDGYRLDAVKHIKFQFLKDWVTNARAATGKEMFTVGEYWQNDLGALNNYLAKVNYNQSLFDAPLHYNFYAASTGGGYYDMRNILNNTLVASNPTKAVTLVENHDTQPGQSLESTVQPWFKPLAYAFILTRSGGYPSVFYGDMYGTKGTTTREIPALKSKIEPLLKARKDYAYGTQRDYIDNPDVIGWTREGDSTKAKSGLATVITDGPGGSKRMYVGTSNAGEIWYDLTGNRTDKITIGSDGYATFPVNGGSVSVWVQQ

SEQ ID NO: 37383 - protein, 480 aa, Cytophaga sp.
NGTMMQYFEWYVPNDGQQWNRLRTDAPYLSSVGITAVWTPPAYKGTSQADVGYGPYDLYDLGEFNQKGTVRTKYGTKGELKSAVNTLHSNGIQVYGDVVMNHKAGADYTENVTAVEVNPSNRMQETSGEYNIQAWTGFNFPGRGTTYSNWKWQWFHFDGTDWDQSRSLSRIFKFDGKAWDWEVSSENGNYDYLMYADYDYDHPDVVNEMKKWGVWYANEVGLDGYRLDAVKHIKFQFLKDWVDNARAATGKEMFTVGEYWQNDLGALNNYLAKVNYNQSLFDAPLHYNFYAASTGGGYYDMRNILNNTLVASNPTKAVTLVENHDTQPGQSLESTVQPWFKPLAYAFILTRSGGYPSVFYGDMYGTKGTTTREIPALKSKIEPLLKARKDYAYGTQRDYIDNPDVIGWTREGDSTKAKSGLATVITDGPGGSKRMYVGTSNAGEIWYDLTGNRTDKITIGSDGYATFPVNGGSVSVWVQQ

SEQ ID NO: 37384 - protein, 480 aa, Cytophaga sp.
NGTMMQYFEWYVPNDGQQWNRLRTDAPYLSSVGITAVWTPPAYKGTSQADVGYGPYDLYDLGEFNQKGTVRTKYGTKGELKSAVNTLHSNGIQVYGDVVMNHKAGADYTENVTAVEVNPSNRYQETSGEYNIQAWTGFNFPGRGTTYSNWKWQWFHFDGTDWDQSRSLSRIFKFDGKAWDWEVSSENGNYDYLMYADYDYDHPDVVNEMKKWGVWYANEVGLDGYRLDAVKHIKFQFLKDWVDNARAATGKEMFTVGEYWQNDLGALKNYLAKVNYNQSLFDAPLHYNFYAASTGGGYYDMRNILNNTLVASNPTKAVTLVENHDTQPGQSLESTVQPWFKPLAYAFILTRSGGYPSVFYGDMYGTKGTTTREIPALKSKIEPLLKARKDYAYGTQRDYIDNPDVIGWTREGDSTKAKSGLATVITDGPGGSKRMYVGTSNAGEIWYDLTGNRTDKITIGSDGYATFPVNGGSVSVWVQQ

SEQ ID NO: 37385 - protein, 480 aa, Cytophaga sp.
NGTMMQYFEWYVPNDGQQWNRLRTDAPYLSSVGITAVWTPPAYKGTSQADVGYGPYDLYDLGEFNQKGTVRTKYGTKGELKSAVNTLHSNGIQVYGDVVMNHKAGADYTENVTAVEVNPSNRYQETSGEYNIQAWTGFNFPGRGTTYSNWKWQWFHFDGTDWDQSRSLSRIFKFDGKAWDWEVSSENGNYDYLMYADYDYDHPDVVNEMKKWGVWYANEVGLDGYRLDAVKHIKFQFLKDWVDNARAATGKEMFTVGEYWQNDLGALNNYLAKVNYNQSLFDAPLHYNFYAASTGGGCYDMRNILNNTLVASNPTKAVTLVENHDTQPGQSLESTVQPWFKPLAYAFILTRSGGYPSVFYGDMYGTKGTTTREIPALKSKIEPLLKARKDYAYGTQRDYIDNPDVIGWTREGDSTKAKSGLATVITDGPGGSKRMYVGTSNAGEIWYDLTGNRTDKITIGSDGYATFPVNGGSVSVWVQQ

SEQ ID NO: 37386 - protein, 480 aa, Cytophaga sp.
NGTMMQYFEWYVPNDGQQWNRLRTDAPYLSSVGITAVWTPPAYKGTSQADVGYGPYDLYDLGEFNQKGTVRTKYGTKGELKSAVNTLHSNGIQVYGDVVMNHKAGADYTENVTAVEVNPSNRYQETSGEYNIQAWTGFNFPGRGTTYSNWKWQWFHFDGTDWDQSRSLSRIFKFDGKAWDWEVSSENGNYDYLMYADYDYDHPDVVNEMKKWGVWYANEVGLDGYRLDAVKHIKFQFLKDWVDNARAATGKEMFTVGEYWQNDLGALNNYLAKVNYNQSLFDAPLHYNFYAASTGGGYYDMRNILNNTLVASNPTKAVTLVENHDTQPGQSLESTVQPWFKPLAYAFILTRSGGYPSVFYGDMYGTKGTTTREIPALKSKIEPLLKARKDYAYGTQRDYIDDPDVIGWTREGDSTKAKSGLATVITDGPGGSKRMYVGTSNAGEIWYDLTGNRTDKITIGSDGYATFPVNGGSVSVWVQQ

SEQ ID NO: 37387 - protein, 480 aa, Cytophaga sp.
NGTMMQYFEWYVPNDGQQWNRLRTDAPYLSSVGITAVWTPPAYKGTSQADVGYGPYDLYDLGEFNQKGTVRTKYGTKGELKSAVNTLHSNGIQVYGDVVMNHKAGADYTENVTAVEVNPSNRYQETSGEYNIQAWTGFNFPGRGTTYSNWKWQWFHFDGTDWDQSRSLSRIFKFDGKAWDWEVSSENGNYDYLMYADYDYDHPDVVNEMKKWGVWYANEVGLDGYRLDAVKHIKFQFLKDWVDNARAATGKEMFTVGEYWQNDLGALNNYLAKVNYNQSLFDAPLHYNFYAASTGGGYYDMRNILNNTLVASNPTKAVTLVENHDTQPGQSLESTVQPWFKPLAYAFILTRSGGYPSVFYGDMYGTKGTTTREIPALKSKIEPLLKARKDYAYGTQRDYIDNPDVIGWTREGDSTKAKSGLATVITDGPGGSKRMYVGMSNAGEIWYDLTGNRTDKITIGSDGYATFPVNGGSVSVWVQQ

SEQ ID NO: 37388 - protein, 480 aa, Cytophaga sp.
NGTMMQYFEWYVPNDGQQWNRLRTDAPYLSSVGITAVWTPPAYKGTSQADVGYGPYDLYDLGEFNQKGTVRTKYGTKGELKSAVNTLHSNGIQVYGDVVMNHKAGADYTENVTAVEVNPSNRYQETSGEYNIQAWTGFNFPGRGTTYSNWKWQWFHFDGTDWDQSRSLSRIFKFDGKAWDWEVSSENGNYDYLMYADYDYDHPDVVNEMKKWGVWYANEVGLDGYRLDAVKHIKFQFLKDWVDNARAATGKEMFTVGEYWQNDLGALNNYLAKVNYNQSLFDAPLHYNFYAASTGGGYYDMRNILNNTLVASNPTKAVTLVENHDTQPGQSLESTVQPWFKPLAYAFILTRSGGYPSVFYGDMYGTKGTTTREIPALKSKIEPLLKARKDYAYGGQRDYIDNPDVIGWTREGDSTKAKSGLATVITDGPGGSKRMYVGTSNAGEIWYDLTGNRTDKITIGSDGYATFPVNGGSVSVWVQQ

SEQ ID NO: 37389 - protein, 480 aa, Cytophaga sp.
NGTMMQYFEWYVPNDGQQWNRLRTDAPYLSSVGITAVWTPPAYKGTSQADVGYGPYDLYDLGEFNQKGTVRTKYGTKGELKSAVNTLHSNGIQVYGDVVMNHKAGADYTENVTAVEVNPSNRYQETSLEYNIQAWTGFNFPGRGTTYSNWKWQWFHFDGTDWDQSRSLSRIFKFDGKAWDWEVSSENGNYDYLMYADYDYDHPDVVNEMKKWGVWYANEVGLDGYRLDAVKHIKFQFLKDWVDNARAATGKEMFTVGEYWQNDLGALNNYLAKVNYNQSLFDAPLHYNFYAASTGGGYYDMRNILNNTLVASNPTKAVTLVENHDTQPGQSLESTVQPWFKPLAYAFILTRSGGYPSVFYGDMYGTKGTTTREIPALKSKIEPLLKARKDYAYGTQRDYIDNPDVIGWTREGDSTKAKSGLATVITDGPGGSKRMYVGTSNAGEIWYDLTGNRTDKITIGSDGYATFPVNGGSVSVWVQQ

SEQ ID NO: 37390 - protein, 480 aa, Cytophaga sp.
NGTMMQYFEWYVPNDGQQWNRLRTDAPYLSSVGITAVWTPPAYKGTSQADVGYGPYDLYDLGEFNQKGTVRTKYGTKGELKSAVNTLHSNGIQVYGDVVMNHKAGADYTENVTAVEVNPSNRYQETSGEYNIQAWTGFNFPGRGTTYSNWKWQWFHFDGTDWDQSRSLSRIFKFDGKAWDWEVSSENGNYDYLMYADYDYDHPDVVNEMKKWGVWYANEVGLDGYRLDAVKHIKFQFLKDWVDNARAATGKEMFTVGEYWQNDLGALNNYLAKVNYNQSLFDAPLHYNFYAASTGGGYYDMRNILNNTLVASNPTKAVTLVENHDTQPGQSLESTVQPWFKPLAYAFILTRSGGYPSVFYGDMYGTKGTTTIEIPALKSKIEPLLKARKDYAYGTQRDYIDNPDVIGWTREGDSTKAKSGLATVITDGPGGSKRMYVGTSNAGEIWYDLTGNRTDKITIGSDGYATFPVNGGSVSVWVQQ

SEQ ID NO: 37391 - protein, 480 aa, Cytophaga sp.
NGTMMQYFEWYVPNDGQQWNRLRTDAPYLSSVGITAVWTPPAYKGTSQADVGYGPYDLYDLGEFNQKGTVRTKYGTKGELKSAVNTLHSNGIQVYGDVVMNHKAGADYTENVTAVEVNPSNRYQETSGEYNIQAWTGFNFPGRGTTYSNWKWQWFHFDGTDWDQSRSLSRIFKFDGKAWDWEVSSENGNYDYLMYADYDYDHPDVVNEMKKWGVWYANEVGLDGYRLDAVKHIKFQFLKDWVDNARAATGKEMFTVGEYWQNDLGALNNYLMKVNYNQSLFDAPLHYNFYAASTGGGYYDMRNILNNTLVASNPTKAVTLVENHDTQPGQSLESTVQPWFKPLAYAFILTRSGGYPSVFYGDMYGTKGTTTREIPALKSKIEPLLKARKDYAYGTQRDYIDNPDVIGWTREGDSTKAKSGLATVITDGPGGSKRMYVGTSNAGEIWYDLTGNRTDKITIGSDGYATFPVNGGSVSVWVQQ

SEQ ID NO: 37392 - protein, 480 aa, Cytophaga sp.
NGTMMQYFEWYVPNDGQQWNRLRTDAPYLSSVGITAVWTPPAYKGTSQADVGYGPYDLYDLGEFNQKGTVRTKYGTKGELKSAVNTLHSNGIQVYGDVVMNHKAGADYTENVTAVEVNPSNRYQETSGEYNIQAWTGFNFPGRGTTYSNWKWQWFHFDGTDWDQSRSLSRIFKFDGKAWDWEVSSENGNYDYLMYADYDYDHPDVVNEMKKWGVWYANEVGLDGYRLDAVKHIKFQFLKDWVDNARAATGKEMFTVGEYWQNDLGALNNYLAKVNYNQSLFDAPLHYNFYAASTGGGYYDMRNILNNTLVASNPTKAVTLVENHDTQPGQSLESTVQPWFKPLAYAFILTRSGGYPSVFYGDMYGTKGTTTREIPALKSKIEPLLKARKDYAYGTQRDYIDNPDVIGWTREGDSTKAKSGLATVITDGPGGSKRMYCGTSNAGEIWYDLTGNRTDKITIGSDGYATFPVNGGSVSVWVQQ

SEQ ID NO: 37393 - protein, 480 aa, Cytophaga sp.
NGTMMQYFEWYVPNDGQQWNRLRTDAPYLSSVGITAVWTPPAYKGTSQADVGYGPYDLYDLGEFNQKGTVRTKYGTKGELKSAVNTLHSNGIQVYGDVVMNHKAGADYTENVTAVEVNPSNRNQETSGEYNIQAWTGFNFPGRGTTYSNFKWQWFHFDGTDWDQSRSLSRIFKFTGKAWDWPVSSENGNYDYLMYADIDYDHPDVVNEMKKWGVWYANEVGLDGYRLDAVKHIKFYFLKDWVDNARAATGKEMFTVGEYWQNDLGALNNYLAWVNYNQSLFDAPLHYNFYAASTGGGYYDMRNILNNTLVASNPTKAVTLVENHDTQPGQSLESTVQPWFKPLAYAFILTRSGGYPSVFYGDMYGTKGTTTREIPALKSKIEPLLKARKDYAYGTQRDYIDNPDVIGWTREGDSTKAKSGLATVITDGPGGSKRMYVGTSNAGEIWYDLTGNRTDKITIGSDGYATFPVNGGSVSVWVQQ

SEQ ID NO: 37394 - protein, 480 aa, Cytophaga sp.
NGTMMQYFEWYVPNDGQQWNRLRTDAPYLSSVGITAVWTPPAYKGTSQADVGYGPYDLYDLGEFNQKGTVRTKYGTKGELKSAVNTLHSNGIQVYGDVVMNHKAGADYTENVTAVEVNPSNRYQETSGEYNIQAWTGFNFPGRGTTYSNWKWNWFHFDGTDWDQSRSLSRIFKFDGKAWDWEVSSENGNYDYLMYADYDYDHPDVVNEMKKWGVWYANEVGLDGYRLDAVKHIKFQFLKDWVDNARAATGKEMFTVGEYWQNDLGALNNYLAKVNYNQSLFDAPLHYNFYAASTGGGYYDMRNILNNTLVASNPTKAVTLVENHDTQPGQSLESTVQPWFKPLAYAFILTRSGGYPSVFYGDMYGTKGTTTREIPALKSKIEPLLKARKDYAYGTQRDYIDNPDVIGWTREGDSTKAKSGLATVITDGPGGSKRMYVGTSNAGEIWYDLTGNRTDKITIGSDGYATFPVNGGSVSVWVQQ

SEQ ID NO: 37395 - protein, 480 aa, Cytophaga sp.
NGTMMQYFEWYVPNDGQQWNRLRTDAPYLSSVGITAVWTPPAYKGTSQADVGYGPYDLYDLGEFNQKGTVRTKYGTKGELKSAVNTLHSNGIQVYGDVVMNHKAGADYTEEVTAVEVNPSNRYQETSGEYNIQAWTGFNFPGRGTTYSNWKWQWFHFDGTDWDQSRSLSRIFKFDGKAWDWEVSSENGNYDYLMYADYDYDHPDVVNEMKKWGVWYANEVGLDGYRLDAVKHIKFQFLKDWVDNARAATGKEMFTVGEYWQNDLGALNNYLAKVNYNQSLFDAPLHYNFYAASTGGGYYDMRNILNNTLVASNPTKAVTLVENHDTQPGQSLESTVQPWFKPLAYAFILTRSGGYPSVFYGDMYGTKGTTTREIPALKSKIEPLLKARKDYAYGTQRDYIDNPDVIGWTREGDSTKAKSGLATVITDGPGGSKRMYVGTSNAGEIWYDLTGNRTDKITIGSDGYATFPVNGGSVSVWVQQ

SEQ ID NO: 37396 - protein, 480 aa, Cytophaga sp.
NGTMMQYFEWYVPNDGQQWNRLRTDAPYLSSVGITAVWTPPAYKGTSQADVGYGPYDLYDLGEFNQKGTVRTKYGTKGELKSAVNTLHSNGIQVYGDVVMNHKAGADYTENVTAVEVNPSNRYQETSGEYNIQAWTGFNFPGRGTTYSNWKWQWFHFDGTDWDQSRSLSRIFKFDGKAWDWEVSSENGNYDYLMYADYDYDHPDVVNEMKKWGVWYANEVGLDGYRLDAVKHIKFQFLKDWVDNARAATGKEMFTVGEYWQNDLGALNNYLAKVNYNQSLFDAPLHYNFYAASTGGGYYDMRNILNNTLVASNPTKAVTLVENHDTQPGQSLESTVQPWFKPLAYAFILTRSGGYPSVFYGDMYGTKGTTTREIPALKSKIEPLLKARKDYAYGTQRDYIDNPDVIGWTREGDSTKAKSGLATVITDGPGGSKRMYVGTSNAGEIWYDWTGNRTDKITIGSDGYATFPVNGGSVSVWVQQ

SEQ ID NO: 37397 - protein, 480 aa, Cytophaga sp.
NGTMMQYFEWYVPNDGQQWNRLRTDAPYLSSVGITAVWTPPAYKGTSQADVGYGPYDLYDLGEFNQKGTVRTKYGTKGELKSAVNTLHSNGIQVYGDVVMNHKAGADYTENVTAVEVNPSNRYQETSGEYNIQAWTGFNFPGRGTTYSNWKWQWFHFDGTDWDQSRSLSRIFKFDGKAWDWEVSSENGNYDYLMYADYDYDHPDVVNEMKKWGVWYANEVGLDGYRLDAVKHIKFQFLKDWVDNARAATGKEMFTVGEYWQNDLGALNNYLAKVNYNQSLFDAPLHYNFYAASTGGGYYDMRNILNNTLVASNPTKAVTLVENHDTQPGQSLESTVQPWFKPLAYAFILTRSGGYPSVFYGDMYGTKGTTTREIPALKSKIEPLLKARKDYAYGTQRDYIDNPDVIGWTREGDSTKAKSGLATVITDGPGGSKRMYVGCSNAGEIWYDLTGNRTDKITIGSDGYATFPVNGGSVSVWVQQ

SEQ ID NO: 37398 - protein, 480 aa, Cytophaga sp.
NGTMMQYFEWYVPNDGQQWNRLRTDAPYLSSVGITAVWTPPAYKGTSQADVGYGPYDLYDLGEFNQKGTVRTKYGTKGELKSAVNTLHSNGIQVYGDVVMNHKAGADYTENVTAVEVNPSNRYQETSGEYNIQAWTGFNFPGRGTTYSNWKWQWFHFDGTDWDQSRSLSRIFKFDGKAWDWEVSSENGNYDYLMYADYDYDHPDVVNEMKKWGVWYANEVGLDGYRLDAVKHIKFDFLKDWVDNARAATGKEMFTVGEYWQNDLGALNNYLAKVNYNQSLFDAPLHYNFYAASTGGGYYDMRNILNNTLVASNPTKAVTLVENHDTQPGQSLESTVQPWFKPLAYAFILTRSGGYPSVFYGDMYGTKGTTTREIPALKSKIEPLLKARKDYAYGTQRDYIDNPDVIGWTREGDSTKAKSGLATVITDGPGGSKRMYVGTSNAGEIWYDLTGNRTDKITIGSDGYATFPVNGGSVSVWVQQ

SEQ ID NO: 37399 - protein, 480 aa, Cytophaga sp.
NGTMMQYFEWYVPNDGQQWNRLRTDAPYLSSVGITAVWTPPAYKGTSQADVGYGPYDLYDLGEFNQKGTVRTKYGTKGELKSAVNTLHSNGIQVYGDVVMNHKAGADYTENVTAVEVNPSNRYQETSGEYNIQAWTGFNFPGRGTTYSNWKWQWFHFDGTDWDQSRSLSRIFKFDGKAWDWEVSSENGNYDYLMYADYDYDHPDVVNEMKKWGVWYANEVGLDGYRLDAVKHIKFQFLKDWVDNARLATGKEMFTVGEYWQNDLGALNNYLAKVNYNQSLFDAPLHYNFYAASTGGGYYDMRNILNNTLVASNPTKAVTLVENHDTQPGQSLESTVQPWFKPLAYAFILTRSGGYPSVFYGDMYGTKGTTTREIPALKSKIEPLLKARKDYAYGTQRDYIDNPDVIGWTREGDSTKAKSGLATVITDGPGGSKRMYVGTSNAGEIWYDLTGNRTDKITIGSDGYATFPVNGGSVSVWVQQ

SEQ ID NO: 37400 - protein, 480 aa, Cytophaga sp.
NGTMMQYFEWYVPNDGQQWNRLRTDAPYLSSVGITAVWTPPAYKGTSQADVGYGPYDLYDLGEFNQKGTVRTKYGTKGELKSAVNTLHSNGIQVYGDVVMNHKAGADYTENVTAVEVNPSNRYQETSGEYNIQAWTGFNFPGRGTTYSNWKWQWFHFDGTDWDQSRSHSRIFKFDGKAWDWEVSSENGNYDYLMYADYDYDHPDVVNEMKKWGVWYANEVGLDGYRLDAVKHIKFQFLKDWVDNARAATGKEMFTVGEYWQNDLGALNNYLAKVNYNQSLFDAPLHYNFYAASTGGGYYDMRNILNNTLVASNPTKAVTLVENHDTQPGQSLESTVQPWFKPLAYAFILTRSGGYPSVFYGDMYGTKGTTTREIPALKSKIEPLLKARKDYAYGTQRDYIDNPDVIGWTREGDSTKAKSGLATVITDGPGGSKRMYVGTSNAGEIWYDLTGNRTDKITIGSDGYATFPVNGGSVSVWVQQ

SEQ ID NO: 37401 - protein, 480 aa, Cytophaga sp.
NGTMMQYFEWYVPNDGQQWNRLRTDAPYLSSVGITAVWTPPAYKGTSQADVGYGPYDLYDLGEFNQKGTVRTKYGTKGELKSAVNTLHSNGIQVYGDVVMNHKAGADYTENVTAVEVNPSNRYQETSGEYNIQAWTGFNFPGRGTTYSNWKWQWFHFDGTDWDQSRSLSRIFKFDGKAWDWEVSSENGNYDYLMYADYDYDHPDVVNEMKKWGVWYANEVGLDGYRLDAVKHIKFQFLKDWVDNARAATGKEMFTVGEYWQNDLGALNNYLAKVNYNQSLFDAPLHYNFYAASTGGGYYDMRNILNNTLVASNPTKAVTLVENHDTQPGQSLESTVQPWFKPLAYAFILTRSGGYPSVFYGDMYGTKGTTTREIPELKSKIEPLLKARKDYAYGTQRDYIDNPDVIGWTREGDSTKAKSGLATVITDGPGGSKRMYVGTSNAGEIWYDLTGNRTDKITIGSDGYATFPVNGGSVSVWVQQ

SEQ ID NO: 37402 - protein, 480 aa, Cytophaga sp.
NGTMMQYFEWYVPNDGQQWNRLRTDAPYLSSVGITAVWTPPAYKGTSQADVGYGPYDLYDLGEFNQKGTVRTKYGTKGELKSAVNTLHSNGIQVYGDVVMNHKAGADYTENVTAVEVNPSNRYQETSGEYNIQAWTGFNFPGRGTTYSNWKWQWFHFDGTDWDQSRSLSRIFKFDGKAWDWEVSSENGNYDYLMYADYDYDHPDVVNEMKKWGVWYANEVGLDGYRLDAVKHIKFQFLKDWVDNARAATGKEMFTVGEYWQNDLGALNNYLAKVNYNQSCFDAPLHYNFYAASTGGGYYDMRNILNNTLVASNPTKAVTLVENHDTQPGQSLESTVQPWFKPLAYAFILTRSGGYPSVFYGDMYGTKGTTTREIPALKSKIEPLLKARKDYAYGTQRDYIDNPDVIGWTREGDSTKAKSGLATVITDGPGGSKRMYVGTSNAGEIWYDLTGNRTDKITIGSDGYATFPVNGGSVSVWVQQ

SEQ ID NO: 37403 - protein, 480 aa, Cytophaga sp.
NGTMMQYFEWYVPNDGQQWNRLRTDAPYLSSVGITAVWTPPAYKGTSQADVGYGPYDLYDLGEFNQKGTVRTKYGTKGELKSAVNTLHSNGIQVYGDVVMNHKAGADYTENVTAVEVNPSNRYQETSGEYNIQAWTGFNFPGRGTTYSNWKWQWFHFDGTDWDQSRSLSRIFKFDGKAWDWEVSSENGNYDYLMYADYDYDHPDVVNEMKKWGVWYANEVGLDGYRLDAVKHIKFQFLKDWVDNARAATGKEMFTVGEYWQNDLGALNNYLAKVNYNQSLFDAPLHYNFYAASTGGGYYDMRNILNNTLVASNPTKAVTLVENHDTQPGQSLESTVQPWFKPLAYAFILTRSGGYPSVFYGDMYGTKGTTTREIPALKSKIEPLLKARKDYAYGTQRDYIDNPDVIGWTREGDSTKAKSGLATIITDGPGGSKRMYVGTSNAGEIWYDLTGNRTDKITIGSDGYATFPVNGGSVSVWVQQ

SEQ ID NO: 37404 - protein, 480 aa, Cytophaga sp.
NGTMMQYFEWYVPNDGQQWNRLRTDAPYLSSVGITAVWTPPAYKGTSQADVGYGPYDLYDLGEFNQKGTVRTKYGTKGELKSAVNTLHSNGIQVYGDVVMNHKAGADYTENVTAVEVNPSNRYQETSGEYNIQAWTGFNFPGRGTTYSNWKWQWFHFDGTDWDQSRSLSRIFKFDGKAWDWEVSSENGNYDYLMYADYDYDHPDVVNEMKKWGVWYANEVGLDGYRLDAVKHIKFQFLKDWVDNARAATGKEMFTVGEYWQNDLGALNNYLAKVNYNQSLFDAPLHYNFYAASTGGGYYDMRNILNNTLVASNPTKAVTLVENHDTQPGQSLESTVQPWFKPLAYAFILTRSGGYPSVFYGDMYGTKGTTTREIPALKSKIEPLLKARKDYAYGTQRDYIDNPDVIGWTREGDSTKAKSGLATVITDGPGGSKRMYVGTSNAGEIWYDLTGNRTDKIQIGSDGYATFPVNGGSVSVWVQQ

SEQ ID NO: 37405 - protein, 480 aa, Cytophaga sp.
NGTMMQYFEWYVPNDGQQWNRLRTDAPYLSSVGITAVWTPPAYKGTSQADVGYGPYDLYDLGEFNQKGTVRTKYGTKGELKSAVNTLHSNGIQVYGDVVMNHKAGADYTEWVTAVEVNPSNRYQETSGEYNIQAWTGFNFPGRGTTYSNWKWQWFHFDGTDWDQSRSLSRIFKFDGKAWDWEVSSENGNYDYLMYADYDYDHPDVVNEMKKWGVWYANEVGLDGYRLDAVKHIKFQFLKDWVDNARAATGKEMFTVGEYWQNDLGALNNYLAKVNYNQSLFDAPLHYNFYAASTGGGYYDMRNILNNTLVASNPTKAVTLVENHDTQPGQSLESTVQPWFKPLAYAFILTRSGGYPSVFYGDMYGTKGTTTREIPALKSKIEPLLKARKDYAYGTQRDYIDNPDVIGWTREGDSTKAKSGLATVITDGPGGSKRMYVGTSNAGEIWYDLTGNRTDKITIGSDGYATFPVNGGSVSVWVQQ

SEQ ID NO: 37406 - protein, 480 aa, Cytophaga sp.
NGTMMQYFEWYVPNDGQQWNRLRTDAPYLSSVGITAVWTPPAYKGTSQADVGYGPYDLYDLGEFNQKGTVRTKYGTKGELKSAVNTLHSNGIQVYGDVVMNHKAGADYTENVTAVEVNPSNRYQETSGEYNIQAWTGFNFPGRGTTYSNWKWQWFHFDGTDWDQSRSLSRIFKFWGKAWDWEVSSENGNYDYLMYADYDYDHPDVVNEMKKWGVWYANEVGLDGYRLDAVKHIKFQFLKDWVDNARAATGKEMFTVGEYWQNDLGALNNYLAKVNYNQSLFDAPLHYNFYAASTGGGYYDMRNILNNTLVASNPTKAVTLVENHDTQPGQSLESTVQPWFKPLAYAFILTRSGGYPSVFYGDMYGTKGTTTREIPALKSKIEPLLKARKDYAYGTQRDYIDNPDVIGWTREGDSTKAKSGLATVITDGPGGSKRMYVGTSNAGEIWYDLTGNRTDKITIGSDGYATFPVNGGSVSVWVQQ

SEQ ID NO: 37407 - protein, 480 aa, Cytophaga sp.
NGTMMQYFEWYVPNDGQQWNRLRTDAPYLSSVGITAVWTPPAYKGTSQADVGYGPYDLYDLGEFNQKGTVRTKYGTKGELKSATNTLHSNGIQVYGDVVMNHKAGADYTENVTAVEVNPSNRYQETSGEYNIQAWTGFNFPGRGTTYSNWKWQWFHFDGTDWDQSRSLSRIFKFDGKAWDWEVSSENGNYDYLMYADYDYDHPDVVNEMKKWGVWYANEVGLDGYRLDAVKHIKFQFLKDWVDNARAATGKEMFTVGEYWQNDLGALNNYLAKVNYNQSLFDAPLHYNFYAASTGGGYYDMRNILNNTLVASNPTKAVTLVENHDTQPGQSLESTVQPWFKPLAYAFILTRSGGYPSVFYGDMYGTKGTTTREIPALKSKIEPLLKARKDYAYGTQRDYIDNPDVIGWTREGDSTKAKSGLATVITDGPGGSKRMYVGTSNAGEIWYDLTGNRTDKITIGSDGYATFPVNGGSVSVWVQQ

SEQ ID NO: 37408 - protein, 480 aa, Cytophaga sp.
NGTMMQYFEWYVPNDGQQWNRLRTDAPYLSSVGITAVWTPPAYKGTSQADVGYGPYDLYDLGEFNQKGTVRTKYGTKGELKSAVNTLHSNGIQVYGDVVMNHKAGADYTENVTAVEVNPSNRYQETSGEYNIQAWTGFNFPGRGTTYSNWKWQWFHFDGTDWDQSRSLSRIFKFDGKAWDWEVSSENGNYDYLMYADYDYDHPDVVNEMKKWGVWYANEVGLDGYRLDAVKHIKFQFLKDWVDNARAATGKEMFTVGEYWQNDLGALNNYLAKVNYNQSLFDAPLHYNFYAASMGGGYYDMRNILNNTLVASNPTKAVTLVENHDTQPGQSLESTVQPWFKPLAYAFILTRSGGYPSVFYGDMYGTKGTTTREIPALKSKIEPLLKARKDYAYGTQRDYIDNPDVIGWTREGDSTKAKSGLATVITDGPGGSKRMYVGTSNAGEIWYDLTGNRTDKITIGSDGYATFPVNGGSVSVWVQQ

SEQ ID NO: 37409 - protein, 480 aa, Cytophaga sp.
NGTMMQYFEWYNPNDGQQWNRLRTDAPYLSSVGITAVWTPPAYKGTSQADVGYGPYDLYDLGEFNQKGTVRTKYGTKGELKSAVNTLHSNGIQVYGDVVMNHKAGADYTENVTAVEVNPSNRYQETSGEYNIQAWTGFNFPGRGTTYSNWKWQWFHFDGTDWDQSRSLSRIFKFDGKAWDWEVSSENGNYDYLMYADYDYDHPDVVNEMKKWGVWYANEVGLDGYRLDAVKHIKFQFLKDWVDNARAATGKEMFTVGEYWQNDLGALNNYLAKVNYNQSLFDAPLHYNFYAASTGGGYYDMRNILNNTLVASNPTKAVTLVENHDTQPGQSLESTVQPWFKPLAYAFILTRSGGYPSVFYGDMYGTKGTTTREIPALKSKIEPLLKARKDYAYGTQRDYIDNPDVIGWTREGDSTKAKSGLATVITDGPGGSKRMYVGTSNAGEIWYDLTGNRTDKITIGSDGYATFPVNGGSVSVWVQQ

SEQ ID NO: 37410 - protein, 480 aa, Cytophaga sp.
NGTMMQYFEWYVPNDGQQWNRLRTDAPYLSSVGITAVWTPPAYKGTSQADVGYGPYDLYDLGEFNQKGTVRTKYGTKGELKSAVNTLHSNGIQVYGDVVMNHKAGADYTENVTAVEVNPSNRYQETSGEYNIEAWTGFNFPGRGTTYSNWKWQWFHFDGTDWDQSRSLSRIFKFDGKAWDWEVSSENGNYDYLMYADYDYDHPDVVNEMKKWGVWYANEVGLDGYRLDAVKHIKFQFLKDWVDNARAATGKEMFTVGEYWQNDLGALNNYLAKVNYNQSLFDAPLHYNFYAASTGGGYYDMRNILNNTLVASNPTKAVTLVENHDTQPGQSLESTVQPWFKPLAYAFILTRSGGYPSVFYGDMYGTKGTTTREIPALKSKIEPLLKARKDYAYGTQRDYIDNPDVIGWTREGDSTKAKSGLATVITDGPGGSKRMYVGTSNAGEIWYDLTGNRTDKITIGSDGYATFPVNGGSVSVWVQQ

SEQ ID NO: 37411 - protein, 480 aa, Cytophaga sp.
NGTMMQYFEWYVPNDGQQWNRLRTDAPYLSSVGITAVWTPPAYKGTSQADVGYGPYDLYDLGEFNQKGTVRTKYGTKGELESAVNTLHSNGIQVYGDVVMNHKAGADYTENVTAVEVNPSNRYQETSGEYNIQAWTGFNFPGRGTTYSNWKWQWFHFDGTDWDQSRSLSRIFKFDGKAWDWEVSSENGNYDYLMYADYDYDHPDVVNEMKKWGVWYANEVGLDGYRLDAVKHIKFQFLKDWVDNARAATGKEMFTVGEYWQNDLGALNNYLAKVNYNQSLFDAPLHYNFYAASTGGGYYDMRNILNNTLVASNPTKAVTLVENHDTQPGQSLESTVQPWFKPLAYAFILTRSGGYPSVFYGDMYGTKGTTTREIPALKSKIEPLLKARKDYAYGTQRDYIDNPDVIGWTREGDSTKAKSGLATVITDGPGGSKRMYVGTSNAGEIWYDLTGNRTDKITIGSDGYATFPVNGGSVSVWVQQ

SEQ ID NO: 37412 - protein, 480 aa, Cytophaga sp.
NGTMMQYFEWYVPNDGQQWNRLRTDAPYLSSVGITAVWTPPAYKGTSQADVGYGPYDLYDLGEFNQKGTVRTKYGTKGELKSAVNTLHSNGIQVYGDVVMNHKAGADYTENVTAVEVNPSNRYQETSGEYNIQAWTGFNFPGRGTTYSNWKWQWFHFDGTDWDKSRSLSRIFKFDGKAWDWEVSSENGNYDYLMYADYDYDHPDVVNEMKKWGVWYANEVGLDGYRLDAVKHIKFQFLKDWVDNARAATGKEMFTVGEYWQNDLGALNNYLAKVNYNQSLFDAPLHYNFYAASTGGGYYDMRNILNNTLVASNPTKAVTLVENHDTQPGQSLESTVQPWFKPLAYAFILTRSGGYPSVFYGDMYGTKGTTTREIPALKSKIEPLLKARKDYAYGTQRDYIDNPDVIGWTREGDSTKAKSGLATVITDGPGGSKRMYVGTSNAGEIWYDLTGNRTDKITIGSDGYATFPVNGGSVSVWVQQ

SEQ ID NO: 37413 - protein, 480 aa, Cytophaga sp.
NGTMMQYFEWYVPNDGQQWNRLRTDAPYLSSVGITAVWTPPAYKGTSQADVGYGPYDLYDLGEFNQKGTVRTKYGTKGELKSAVNTLHSNGIQVYGDVVMNHKAGADYTENVTAVEVNPSNRYQETSGEYNIQAWTGFNFPGRGTTYSNWKWQWFHFDGTDWDQSRNLSRIFKFDGKAWDWEVSSENGNYDYLMYADYDYDHPDVVNEMKKWGVWYANEVGLDGYRLDAVKHIKFQFLKDWVDNARAATGKEMFTVGEYWQNDLGALNNYLAKVNYNQSLFDAPLHYNFYAASTGGGYYDMRNILNNTLVASNPTKAVTLVENHDTQPGQSLESTVQPWFKPLAYAFILTRSGGYPSVFYGDMYGTKGTTTREIPALKSKIEPLLKARKDYAYGTQRDYIDNPDVIGWTREGDSTKAKSGLATVITDGPGGSKRMYVGTSNAGEIWYDLTGNRTDKITIGSDGYATFPVNGGSVSVWVQQ

SEQ ID NO: 37414 - protein, 480 aa, Cytophaga sp.
NGTMMQYFEWYVPNDGQQWNRLRTDAPYLSSVGITAVWTPPAYKGTSQADVGYGPYDLYDLGEFNQKGTVRTKYGTKGELKSAVNTLHSNGIQVYGDVVMNHKAGADYTENVTAVEVNPSNRYQETSGEYNIQAWTGFNFPGRGTTYSNWKWQWFHFDGTDWDQSRSLSRIFKFDGKAWDWEVSSENGNYDYLMYADYDYDHPDVVGEMKKWGVWYANEVGLDGYRLDAVKHIKFQFLKDWVDNARAATGKEMFTVGEYWQNDLGALNNYLAKVNYNQSLFDAPLHYNFYAASTGGGYYDMRNILNNTLVASNPTKAVTLVENHDTQPGQSLESTVQPWFKPLAYAFILTRSGGYPSVFYGDMYGTKGTTTREIPALKSKIEPLLKARKDYAYGTQRDYIDNPDVIGWTREGDSTKAKSGLATVITDGPGGSKRMYVGTSNAGEIWYDLTGNRTDKITIGSDGYATFPVNGGSVSVWVQQ

SEQ ID NO: 37415 - protein, 480 aa, Cytophaga sp.
NGTMMQYFEWYVPNDGQQWNRLRTDAPYLSSVGITAVWTPPAYKGTSQADVGYGPYDLYDLGEFNQKGTVRTKYGTKGELKSAVNTLHSNGIQVYGDVVMNHKAGADYTENVTAVEVNPSNRYQETSGEYNIQAWTGFNFPGRGTTYSNWKWQWFHFDGTDWDQSRSLSRIFKFDGKAWDWEVSSENGNYDYLMYADYDYDHPDVVNEMKKWGVWYANEVGLDGYRLDAVKHIKFQFLKDWVDNARAATGKEMFTVGEYWQNDLGALNNYLAKVNYNQSLFDAPLHYNFYAASTGGGYYDMRNILNNTLVASNPTKAVTLVENHDTQPGQSLESTVQPWFKPLAYAFILTRSGGYPSVFYGDMYGTKGTTTREIPALKFKIEPLLKARKDYAYGTQRDYIDNPDVIGWTREGDSTKAKSGLATVITDGPGGSKRMYVGTSNAGEIWYDLTGNRTDKITIGSDGYATFPVNGGSVSVWVQQ

SEQ ID NO: 37416 - protein, 480 aa, Cytophaga sp.
NGTMMQYFEWYVPNDGQQWNRLRTDAPYLSSVGITAVWTPPAYKGTSQADVGYGPYDLYDLGEFNQKGTVRTKYGTKGELKSAVNTLHSNGIQVYGDVVMNHKAGADYTENVTAVEVNPSNRYQETSGEYNIQAWTGFNFPGRGTTYSNWKWQWFHFDGTDWDQSRSLSRIFKFDGKAWDWEVSSENGNYDYLMYADYDYDHPDVVNEMKKWGVWYANEVGLDGYRLDAVKHIKFQFLKDWVDNARAATGKEMFTVGEYWQNDLGALNNYLAKVNYNQSLFDAPLHYNFYAASTGGGYYDMRNILNNTLVASNPTKAVTLVENHDTQPGQSLESTVQPWFKPLAYAFILTRSGGYPSVFYGDMYGTKGTTTREIPALKSKIEPLLKARKDYAYGTQRDYIDNPDVIGWTREGDSHKAKSGLATVITDGPGGSKRMYVGTSNAGEIWYDLTGNRTDKITIGSDGYATFPVNGGSVSVWVQQ

SEQ ID NO: 37417 - protein, 480 aa, Cytophaga sp.
NGTMMQYFEWYVPNDGQQWNRLRTDAPYLSSVGITAVWTPPAYKGTSQADVGYGPYDLYDLGEFNQKGTVRTKYGTKGELKSAVNTLHSNGIQVYGDVVMNHKAGADYTENVTAVEVNPSNRYQETSGEYNIQAWTGFNFPGRGTTYSNWKWQWFHFDGTDWDQSRSLSRIFKFDGKAWDWEVSSENGNYDYLMYADYDYDHPDVVNEMKKWGVWYANEVGLDGYRLDAVKHIKFQFLKDWVDNARAATGKEMFTVGEYWQNDLGALNNYLAKVNYNQSLFDAPLHYNFYAASTGGGYYDMRNILNNTLVASNPTKAVTLVENHDTQPGQSLESTVQPWFKPLAYAFILTRIGGYPSVFYGDMYGTKGTTTREIPALKSKIEPLLKARKDYAYGTQRDYIDNPDVIGWTREGDSTKAKSGLATVITDGPGGSKRMYVGTSNAGEIWYDLTGNRTDKITIGSDGYATFPVNGGSVSVWVQQ

SEQ ID NO: 37418 - protein, 480 aa, Cytophaga sp.
NGTMMQYFEWYVPNDGQQWNRLRTDAPYLSSVGITAVWTPPAYKGTSQADVGYGPYDLYDLGEFNQKGTVRTKYGTKGELKSAVNTLHSNGIQVYGDVVMNHKAGADYTENVTAVEVNPSNRYQETSGEYNIQAWTGFNFPGRGTTYSNWKWQWFHFDGTDWDQSRSLSRIFKFDGKAWDWEVSSENGNYDYLMYADYDYDHPDVVNEMKKWGVWYANEVGLDGYRLDAVKHIKFQFLKDWVDNARAATGKEMFTVGEYWQNDLGYLNNYLAKVNYNQSLFDAPLHYNFYAASTGGGYYDMRNILNNTLVASNPTKAVTLVENHDTQPGQSLESTVQPWFKPLAYAFILTRSGGYPSVFYGDMYGTKGTTTREIPALKSKIEPLLKARKDYAYGTQRDYIDNPDVIGWTREGDSTKAKSGLATVITDGPGGSKRMYVGTSNAGEIWYDLTGNRTDKITIGSDGYATFPVNGGSVSVWVQQ

SEQ ID NO: 37419 - protein, 480 aa, Cytophaga sp.
NGTMMQYFEWYVPNDGQQWNRLRTDAPYLSSVGITAVWTPPAYKGTSQADVGYGPYDLYDLGEFNQKGTVRTKYGTKGELKSAVNTLHSNGIQVYGDVVMNHKAGADYTENVTAVEVNPSNRYQETSGEYNIQAWTGFNFPGRGTTYSNWKWQWFHFDGTDWDQSRSLSRIFKFDGKAWDWEVSSENGNYDYLMYADYDYDHPDVVNEMKKWGVWYANEVGLDGYRLDAVKHIKFQFLKDWVDNARAATGKEMFTVGEYWQNDLGALNNYLAKVNYNQSLFDAPLHYNFYAASTGGGYYDMRNILNNTLVASNPTKAVTLVENHDTQPGQSLESTVQPWFKPLAYAFILTRSGGYPSVFYGDMYGTKGTTTREIPALKSKIEPLLKARKDYAYGTQRDYIDNPDVIGWTREGDSTKAKSGLATVITDGPGGSKRMYVGTSNAGEIWYDLTGNRTDKITIGSDGRATFPVNGGSVSVWVQQ

SEQ ID NO: 37420 - protein, 480 aa, Cytophaga sp.
NGTMMQYFEWYVPNDGQQWNRLRTDAPYLSSVGITAVWTPPAYKGTSQADVGYGPYDLYDLGEFNQKGTVRTKYGTKGELKSAVNTLHSNGIQVYGDVVMNHKAGADYTENVTAVEVNPSNRYQETSGEYNIQAWTGFNFPGRGTTYSNWKWQWFHFDGTDWDQSRSLSRIFKFDGKAWDWEVSSENGNYDYLMYADYDYDHPDVVNEMKKWGVWYANEVGLDGYRLDAVKHIKFQFLKDWVDNARAATGKEMFTVGEYWQNDLGALRNYLAKVNYNQSLFDAPLHYNFYAASTGGGYYDMRNILNNTLVASNPTKAVTLVENHDTQPGQSLESTVQPWFKPLAYAFILTRSGGYPSVFYGDMYGTKGTTTREIPALKSKIEPLLKARKDYAYGTQRDYIDNPDVIGWTREGDSTKAKSGLATVITDGPGGSKRMYVGTSNAGEIWYDLTGNRTDKITIGSDGYATFPVNGGSVSVWVQQ

SEQ ID NO: 37421 - protein, 480 aa, Cytophaga sp.
NGTMMQYFEWYVPNDGQQWNRLRTDAPYLSSVGITAVWTPPAYKGTSQADVGYGPYDLYDLGEFNQKGTVRTKYGTKGELKSAVNTLHSNGIQVYGDVVMNHKAGADYTENVTAVEVNPSNRYQETSGEYNIQAWTGFNFPGRGTTYSNWKWQWFHFDGTDWDQSRSLSRIFKFDGKAWDWEVSSENGNYDYLMYADYDYDHPDVVNEMKKWGVWYANEVGLDGYRLDAVKHIKFQFLKDWVDNARAATGKEMFTVGEYWQNDLGALNNYLKKVNYNQSLFDAPLHYNFYAASTGGGYYDMRNILNNTLVASNPTKAVTLVENHDTQPGQSLESTVQPWFKPLAYAFILTRSGGYPSVFYGDMYGTKGTTTREIPALKSKIEPLLKARKDYAYGTQRDYIDNPDVIGWTREGDSTKAKSGLATVITDGPGGSKRMYVGTSNAGEIWYDLTGNRTDKITIGSDGYATFPVNGGSVSVWVQQ

SEQ ID NO: 37422 - protein, 480 aa, Cytophaga sp.
NGTMMQYFEWYVPNDGQQWNRLRTDAPYLSSVGITAVWTPPAYKGTSQADVGYGPYDLYDLGEFNQKGTVRTKYGTKGELKSAVNTLHSNGIQVYGDVVMNHKAGADYTENVTAVEVNPSNRYQETSGEYNIQAWTGFNFPGRGTTYSNWKWQWFHFDGTDWDQSRSLSRIFKFDGKAWDWEVSSENGNYDYLMYADYDYDHPDVVNEMKKWGVWYANEVGLDGYRLDAVKHIKFQFLKDWVDNARAATGKEMFTVGEYWQNDLGALNNYLAKVNYNQSLFDAPLHYNFYAASTGGGYYDMRNILNNTLVASNPTKAVTLVENHDTQPGQSLESTVQPWFKPLAYAFILTRSGGYPSVFYGDMYGTKGTTTREIPALKSKIEPLLKARKDYAYGTQRDYIDNPDVIGWTREGDSTKAKSGLATCITDGPGGSKRMYVGTSNAGEIWYDLTGNRTDKITIGSDGYATFPVNGGSVSVWVQQ

SEQ ID NO: 37423 - protein, 480 aa, Cytophaga sp.
NGTMMQYFEWYVPNDGQQWNRLRTDAPYLSSVGITAVWTPPAYKGTSQADVGYGPYDLYDLGEFNQKGTVRTKYGTKGELKSAVNTLHSAGIQVYGDVVMNHKAGADYTENVTAVEVNPSNRYQETSGEYNIQAWTGFNFPGRGTTYSNWKWQWFHFDGTDWDQSRSLSRIFKFDGKAWDWEVSSENGNYDYLMYADYDYDHPDVVNEMKKWGVWYANEVGLDGYRLDAVKHIKFQFLKDWVDNARAATGKEMFTVGEYWQNDLGALNNYLAKVNYNQSLFDAPLHYNFYAASTGGGYYDMRNILNNTLVASNPTKAVTLVENHDTQPGQSLESTVQPWFKPLAYAFILTRSGGYPSVFYGDMYGTKGTTTREIPALKSKIEPLLKARKDYAYGTQRDYIDNPDVIGWTREGDSTKAKSGLATVITDGPGGSKRMYVGTSNAGEIWYDLTGNRTDKITIGSDGYATFPVNGGSVSVWVQQ

SEQ ID NO: 37424 - protein, 480 aa, Cytophaga sp.
NGTMMQYFEWYVPNDGQQWNRLRTDAPYLSSVGITAVWTPPAYKGTSQADVGYGPYDLYDLGEFNQKGTVRTKYGTKGELTSAVNTLHSNGIQVYGDVVMNHKAGADYTENVTAVEVNPSNRYQETSGEYNIQAWTGFNFPGRGTTYSNWKWQWFHFDGTDWDQSRSLSRIFKFDGKAWDWEVSSENGNYDYLMYADYDYDHPDVVNEMKKWGVWYANEVGLDGYRLDAVKHIKFQFLKDWVDNARAATGKEMFTVGEYWQNDLGALNNYLAKVNYNQSLFDAPLHYNFYAASTGGGYYDMRNILNNTLVASNPTKAVTLVENHDTQPGQSLESTVQPWFKPLAYAFILTRSGGYPSVFYGDMYGTKGTTTREIPALKSKIEPLLKARKDYAYGTQRDYIDNPDVIGWTREGDSTKAKSGLATVITDGPGGSKRMYVGTSNAGEIWYDLTGNRTDKITIGSDGYATFPVNGGSVSVWVQQ

SEQ ID NO: 37425 - protein, 480 aa, Cytophaga sp.
NGTMMQYFEWYVPNDGQQWNRLRTDAPYLSSVGITAVWTPPAYKGTSQADVGYGPYDLYDLGEFNQKGTVRTKYGTKGELKSAVNTLHSNGIQVYGDVVMNHKAGADYTENVTAVEVNPSNRYQETSGEYNIQAWTGFNFPGRGTTYSNWKWQWFHFDGTDWDQSRSLSRIFKFDGKAWDWEVSSENGNYDYLMYADYDYDHPDVVNEMKKWGVWYANEVGLDGYRLDAVKHIKFQFLKDWVDNARAATGKEMFTVGEYWQNDLGALNNYLAKVNYNQSLFDAPLHYNFYAASTGGGYYDMRNILNNTLVASNPTKAVTLVENHDTQPGQSLESTVQPWFKPLAYAFILTRSGGYPSVFYGDMYGTKGTTTREIPGLKSKIEPLLKARKDYAYGTQRDYIDNPDVIGWTREGDSTKAKSGLATVITDGPGGSKRMYVGTSNAGEIWYDLTGNRTDKITIGSDGYATFPVNGGSVSVWVQQ

SEQ ID NO: 37426 - protein, 480 aa, Cytophaga sp.
NGTMMQYFEWYVPNDGQQWNRLRTDAPYLSSVGITAVWTPPAYKGTSQADVGYGPYDLYDLGEFNQKGTVRTKYGTKGELKSAVNTLHSNGIQVYGDVVMNHKAGADYTENVTAVEVNPSNRYQETSGEYNIQAWTGFNFPGRGTTYSKWKWQWFHFDGTDWDQSRSLSRIFKFDGKAWDWEVSSENGNYDYLMYADYDYDHPDVVNEMKKWGVWYANEVGLDGYRLDAVKHIKFQFLKDWVDNARAATGKEMFTVGEYWQNDLGALNNYLAKVNYNQSLFDAPLHYNFYAASTGGGYYDMRNILNNTLVASNPTKAVTLVENHDTQPGQSLESTVQPWFKPLAYAFILTRSGGYPSVFYGDMYGTKGTTTREIPALKSKIEPLLKARKDYAYGTQRDYIDNPDVIGWTREGDSTKAKSGLATVITDGPGGSKRMYVGTSNAGEIWYDLTGNRTDKITIGSDGYATFPVNGGSVSVWVQQ

SEQ ID NO: 37427 - protein, 480 aa, Cytophaga sp.
NGTMMQYFEWYVPNDGQQWNRLRTDAPYLSSVGITAVWTPPAYKGTSQADVGYGPYDLYDLGEFNQKGTVRTKYGTKGELKSAVNTLHSTGIQVYGDVVMNHKAGADYTENVTAVEVNPSNRYQETSGEYNIQAWTGFNFPGRGTTYSNWKWQWFHFDGTDWDQSRSLSRIFKFDGKAWDWEVSSENGNYDYLMYADYDYDHPDVVNEMKKWGVWYANEVGLDGYRLDAVKHIKFQFLKDWVDNARAATGKEMFTVGEYWQNDLGALNNYLAKVNYNQSLFDAPLHYNFYAASTGGGYYDMRNILNNTLVASNPTKAVTLVENHDTQPGQSLESTVQPWFKPLAYAFILTRSGGYPSVFYGDMYGTKGTTTREIPALKSKIEPLLKARKDYAYGTQRDYIDNPDVIGWTREGDSTKAKSGLATVITDGPGGSKRMYVGTSNAGEIWYDLTGNRTDKITIGSDGYATFPVNGGSVSVWVQQ

SEQ ID NO: 37428 - protein, 480 aa, Cytophaga sp.
NGTMMQYFEWYIPNDGQQWNRLRTDAPYLSSVGITAVWTPPAYKGTSQADVGYGPYDLYDLGEFNQKGTVRTKYGTKGELKSAVNTLHSNGIQVYGDVVMNHKAGADYTENVTAVEVNPSNRYQETSGEYNIQAWTGFNFPGRGTTYSNWKWQWFHFDGTDWDQSRSLSRIFKFDGKAWDWEVSSENGNYDYLMYADYDYDHPDVVNEMKKWGVWYANEVGLDGYRLDAVKHIKFQFLKDWVDNARAATGKEMFTVGEYWQNDLGALNNYLAKVNYNQSLFDAPLHYNFYAASTGGGYYDMRNILNNTLVASNPTKAVTLVENHDTQPGQSLESTVQPWFKPLAYAFILTRSGGYPSVFYGDMYGTKGTTTREIPALKSKIEPLLKARKDYAYGTQRDYIDNPDVIGWTREGDSTKAKSGLATVITDGPGGSKRMYVGTSNAGEIWYDLTGNRTDKITIGSDGYATFPVNGGSVSVWVQQ

SEQ ID NO: 37429 - protein, 480 aa, Cytophaga sp.
NGTMMQYFEWYVPNDGQQWNRLRTDAPYLSSVGITAVWTPPAYKGTSQADVGYGPYDLYDLGEFNQKGTVRTKYGTKGELKSAVNTLHSNGIQVYGDVVMNHKAGADYTENVTAVEVNPSNRYQETSGEYNIQAWTGFNFPGRGTTYSNWKWQWFHFDGTDWDQSRSLSRIFKFDGKAWDWEVSSENGNYDYLMYADYDYDHPDVVNEMKKWGVWYANEVGLDGYRLDAVKHIKFQFLKDWVDNARAATGKEMFTVGEYWQNDLGALNNYLAKVNYNQSLFDAPLHYNFYAASTGGGYYDMRNILNNTLVASNPTKAVTLVENHDTQPGQSLESTVQPWFKPLAYAFILTRSGGYPSVFYGDMYGTKGTTTREIPALKSKIEPLLKARKDYAYGTQRDYIDNPDVIGWTREGDSTKAKSGLATVITDGPGGSKRMYVGTSNAGEGWYDLTGNRTDKITIGSDGYATFPVNGGSVSVWVQQ

SEQ ID NO: 37430 - protein, 480 aa, Cytophaga sp.
NGTMMQYFEWYVPNDGQQWNRLRTDAPYLSSVGITAVWTPPAYKGTSQADVGYGPYDLYDLGEFNQKGTVRTKYGTKGELKSAVNTLHSNGIQVYGDVVMNHKAGADYTENVTAVEVNPSNRYQETSGEYNIQAWTGFNFPGRGTTYSNWKWQWFHFDGTDWDQSRSLSRIFKFDGKAWDWEVSSENGNYDYLMYADIDYDHPDVVNEMKKWGVWYANEVGLDGYRLDAVKHIKFQFLKDWVDNARAATGKEMFTVGEYWQNDLGALNNYLAKVNYNQSLFDAPLHYNFYAASTGGGYYDMRNILNNTLVASNPTKAVTLVENHDTQPGQSLESTVQPWFKPLAYAFILTRSGGYPSVFYGDMYGTKGTTTREIPALKSKIEPLLKARKDYAYGTQRDYIDNPDVIGWTREGDSTKAKSGLATVITDGPGGSKRMYVGTSNAGEIWYDLTGNRTDKITIGSDGYATFPVNGGSVSVWVQQ

SEQ ID NO: 37431 - protein, 480 aa, Cytophaga sp.
NGTMMQYFEWYVPNDGQQWNRLRTDAPYLSSVGITAVWTPPAYKGTSQADVGYGPYDLYDLGEFNQKGTVRTKYGTKGELKSAVNTLHSNGIQVYGDVVMNHKAGADYTENVTAVEVNPSNRYQETSGEYNIQAWTGFNFPGRGTTYSNWKWQWFHFDGTDWDQSRSLSRIFKFDGKAWDWEVSSENGNYDYLMYADYDYDHPDVVNEMKKWGVWYANEVGLDGYRLDAVKHIKFQFLKDWVDNARWATGKEMFTVGEYWQNDLGALNNYLAKVNYNQSLFDAPLHYNFYAASTGGGYYDMRNILNNTLVASNPTKAVTLVENHDTQPGQSLESTVQPWFKPLAYAFILTRSGGYPSVFYGDMYGTKGTTTREIPALKSKIEPLLKARKDYAYGTQRDYIDNPDVIGWTREGDSTKAKSGLATVITDGPGGSKRMYVGTSNAGEIWYDLTGNRTDKITIGSDGYATFPVNGGSVSVWVQQ

SEQ ID NO: 37432 - protein, 480 aa, Cytophaga sp.
NGTMMQYFEWYVPNDGQQWNRLRTDAPYLSSVGITAVWTPPAYKGTSQADVGYGPYDLYDLGEFNQKGTVRTKYGTKGELKSAVNTLHSNGIQVYGDVVMNHKAGADYTENVTAVEVNPSNRYQETSGEYNIQAWTGFNFPGRGTTYSNWKWQWFHFDGTDWDQSRSLSRIFKFDGKAWDWEVSSENGNYDYLMYADYDYDHPDVVNEMKKWGVWYANEVGLDGYRLDAVKHIKFQFLKDWVDNARAATGKEMFTVGEYWQNDLGALNNYLAKVNYNQSLFDAPLHYNFYAASTGGGYYDMRNILNNTLVASNPTKAVTLVENHDTQPGQSLESTVQPWFKPLAYAFILTRSGGYPSVFYGDMYGTKGTTTREIPALKGKIEPLLKARKDYAYGTQRDYIDNPDVIGWTREGDSTKAKSGLATVITDGPGGSKRMYVGTSNAGEIWYDLTGNRTDKITIGSDGYATFPVNGGSVSVWVQQ

SEQ ID NO: 37433 - protein, 480 aa, Cytophaga sp.
NGTMMQYFEWYVPNDGQQWNRLRTDAPYLSSVGITAVWTPPAYKGTSQADVGYGPYDLYDLGEFNQKGTVRTKYGTKGELKSAVNTLHSNGIQVYGDVVMNHKAGADYTENVTAVEVNPSNRYQETSGEYNIQAWTGFNFPGRGTTYSNWKWQWFHFDGTDWDQSRSLSRIFKFDGKAWDWEVSSENGNYDYLMYADYDYDHPDVVNEMKKWGVWYANEVGLDGYRLDAVKHIKFQFLKDWVDNARAATGKEMFTVGEYWQNDLGALNNYLAKVNYNQSLFDAPLHYNFYAASTGGGYYDMRNILNNTLVASKPTKAVTLVENHDTQPGQSLESTVQPWFKPLAYAFILTRSGGYPSVFYGDMYGTKGTTTREIPALKSKIEPLLKARKDYAYGTQRDYIDNPDVIGWTREGDSTKAKSGLATVITDGPGGSKRMYVGTSNAGEIWYDLTGNRTDKITIGSDGYATFPVNGGSVSVWVQQ

SEQ ID NO: 37434 - protein, 480 aa, Cytophaga sp.
NGTMMQYFEWYVPNDGQQWNRLRTDAPYLSSVGITAVWTPPAYKGTSQADVGYGPYDLYDLGEFNQKGTVRTKYGTKGELKSAVNTLHSNGIQVYGDVVMNHKAGADYTENVTAVEVNPSNRYQETSGEYNIQAWTGFNFPGRGTTYSNWKWQWFHFDGTDWDQSRSLSRIFKFDGKAWDWEVSSENGNYDYLMYADYDYDHPDVVNEMKKWGVWYANEVGLDGYRLDAVKHIKFQFLKDWVDNARAATGKEMFTVGEYWQNDLGALNNYLAKVNYNQSLFDAPLHYNFYAASTGGGYYDMRNILNNTLVASNPTKAVTLVENHDTQPGQSLESTVQPWFKPLAYAFILTRSGGYPSVFYGDMYGTKGTTTREIPALKSFIEPLLKARKDYAYGTQRDYIDNPDVIGWTREGDSTKAKSGLATVITDGPGGSKRMYVGTSNAGEIWYDLTGNRTDKITIGSDGYATFPVNGGSVSVWVQQ

SEQ ID NO: 37435 - protein, 480 aa, Cytophaga sp.
NGTMMQYFEWYVPNDGQQWNRLRTDAPYLSSVGITAVWTPPAYKGTSQADVGYGPYDLYDLGEFNQKGTVRTKYGTKGELKSAVCTLHSNGIQVYGDVVMNHKAGADYTENVTAVEVNPSNRYQETSGEYNIQAWTGFNFPGRGTTYSNWKWQWFHFDGTDWDQSRSLSRIFKFDGKAWDWEVSSENGNYDYLMYADYDYDHPDVVNEMKKWGVWYANEVGLDGYRLDAVKHIKFQFLKDWVDNARAATGKEMFTVGEYWQNDLGALNNYLAKVNYNQSLFDAPLHYNFYAASTGGGYYDMRNILNNTLVASNPTKAVTLVENHDTQPGQSLESTVQPWFKPLAYAFILTRSGGYPSVFYGDMYGTKGTTTREIPALKSKIEPLLKARKDYAYGTQRDYIDNPDVIGWTREGDSTKAKSGLATVITDGPGGSKRMYVGTSNAGEIWYDLTGNRTDKITIGSDGYATFPVNGGSVSVWVQQ

SEQ ID NO: 37436 - protein, 480 aa, Cytophaga sp.
NGTMMQYFEWYVPNDGQQWNRLRTDAPYLSSVGITAVWTPPAYKGTSQADVGYGPYDLYDLGEFNQKGTVRTKYGTKGELKSAVVTLHSNGIQVYGDVVMNHKAGADYTENVTAVEVNPSNRYQETSGEYNIQAWTGFNFPGRGTTYSNWKWQWFHFDGTDWDQSRSLSRIFKFDGKAWDWEVSSENGNYDYLMYADYDYDHPDVVNEMKKWGVWYANEVGLDGYRLDAVKHIKFQFLKDWVDNARAATGKEMFTVGEYWQNDLGALNNYLAKVNYNQSLFDAPLHYNFYAASTGGGYYDMRNILNNTLVASNPTKAVTLVENHDTQPGQSLESTVQPWFKPLAYAFILTRSGGYPSVFYGDMYGTKGTTTREIPALKSKIEPLLKARKDYAYGTQRDYIDNPDVIGWTREGDSTKAKSGLATVITDGPGGSKRMYVGTSNAGEIWYDLTGNRTDKITIGSDGYATFPVNGGSVSVWVQQ

SEQ ID NO: 37437 - protein, 480 aa, Cytophaga sp.
NGTMMQYFEWYVPNDGQQWNRLRTDAPYLSSVGITAVWTPPAYKGTSQADVGYGPYDLYDLGEFNQKGTVRTKYGTKGELKSAVNTLHSNGIQVYGDVVMNHKAGADYTENVTAVEVNPSNRYQETSGEYNIQAWTGFNFPGRGTTYSNWKWQWFHFDGTDWDQSRSLSRIFKFDGKAWDWEVSSENGNYDYLMYADYDYDHPDVVNEMKKWGVWYANEVGLDGYRLDAVKHIKFQFLKDWVDNARAATGKEMFTVGEYWQNDLGALNNYLAKVNYNQSLFDAPLHYNFYAASTGGGYYDMRNILGNTLVASNPTKAVTLVENHDTQPGQSLESTVQPWFKPLAYAFILTRSGGYPSVFYGDMYGTKGTTTREIPALKSKIEPLLKARKDYAYGTQRDYIDNPDVIGWTREGDSTKAKSGLATVITDGPGGSKRMYVGTSNAGEIWYDLTGNRTDKITIGSDGYATFPVNGGSVSVWVQQ

SEQ ID NO: 37438 - protein, 480 aa, Cytophaga sp.
NGTMMQYFEWYVPNDGQQWNRLRTDAPYLSSVGITAVWTPPAYKGTSQADVGYGPYDLYDLGEFNQKGTVRTKYGTKGELSSAVNTLHSNGIQVYGDVVMNHKAGADYTENVTAVEVNPSNRYQETSGEYNIQAWTGFNFPGRGTTYSNWKWQWFHFDGTDWDQSRSLSRIFKFDGKAWDWEVSSENGNYDYLMYADYDYDHPDVVNEMKKWGVWYANEVGLDGYRLDAVKHIKFQFLKDWVDNARAATGKEMFTVGEYWQNDLGALNNYLAKVNYNQSLFDAPLHYNFYAASTGGGYYDMRNILNNTLVASNPTKAVTLVENHDTQPGQSLESTVQPWFKPLAYAFILTRSGGYPSVFYGDMYGTKGTTTREIPALKSKIEPLLKARKDYAYGTQRDYIDNPDVIGWTREGDSTKAKSGLATVITDGPGGSKRMYVGTSNAGEIWYDLTGNRTDKITIGSDGYATFPVNGGSVSVWVQQ

SEQ ID NO: 37439 - protein, 480 aa, Cytophaga sp.
NGTMMQYFEWYVPNDGQQWNRLRTDAPYLSSVGITAVWTPPAYKGTSQADVGYGPYDLYDLGEFNQKGTVRTKYGTKGELKSAVNTLHSNGIQVYGDVVMNHKAGADYTENVTAVEVNPSNRYQETSGEYNIQAWTGFNFPGRGTTYSNWKWQWFHFDGTDWDQSRSLSRIFKFDGKAWDWEVSSENGNYDYLMYADYDYDHPDVVNEMKKWGVWYANEVGLDGYRLDAVKHIKFQFLKDWVDNARAATGKEMFTVGEYWQNDLGALNNYLAKVNYNQSLFDAPLHYNFYAASTGGGYYDMRNILNNTLVASNPTKAVTLVENHDTQPGQSLESTVQPWFKPLAYAFILTRSGGYPSVFYGDMYGTKGTTTREIPALKSRIEPLLKARKDYAYGTQRDYIDNPDVIGWTREGDSTKAKSGLATVITDGPGGSKRMYVGTSNAGEIWYDLTGNRTDKITIGSDGYATFPVNGGSVSVWVQQ

SEQ ID NO: 37440 - protein, 480 aa, Cytophaga sp.
NGTMMQYFEWYVPNDGQQWNRLRTDAPYLSSVGITAVWTPPAYKGTSQADVGYGPYDLYDLGEFNQKGTVRTKYGTKGELKSAVNTLHSNGIQVYGDVVMNHKAGADYTENVTAVEVNPSNRYQETSGEYNIQAWTGFNFPGRGTTYSNWKWQWFHFDGTDWDQSRSLSRIFKFDGKAWDWEVSSENGNYDYLMYADYDYDHPDVVNEMKKWGVWYANEVGLDGYRLDAVKHIKFQFLKDWVDNARAATGKEMFTVGEYWQNDLGALNNYLAKVNYNQSLFDAPLHYNFYAASTGGGYYDMRNILNNTLVASNPTKAVTLVENHDTQPGQSLESTVQPWFKPLAYAFILTRSGGYPSVFYGDMYGTKGTTTREIPALKSKIEPLLKARKDYAYGTQRDYIDNPDVIGWTREGDSTKAKSGLATVITDGPGGSKRMYVGTSNAGEIWYDLTGNRTDKIDIGSDGYATFPVNGGSVSVWVQQ

SEQ ID NO: 37441 - protein, 480 aa, Cytophaga sp.
NGTMMQYFEWYVPNDGQQWNRLRTDAPYLSSVGITAVWTPPAYKGTSQADVGYGPYDLYDLGEFNQKGTVRTKYGTKGELKSAVNTLHSNGIQVYGDVVMNHKAGADYTENVTAVEVNPSNRYQETSGEYNIQAWTGFNFPGRGTTYSNWKWQWFHFDGTDWDQSRSLSRIFKFDGKAWDWEVSSENGNYDYLMYADYDYDHPDVVNEMKKWGVWYANEVGLDGYRLDAVKHIKFQFLKDWVDNARAATGKEMFTVGEYWQNDLGALNNYLTKVNYNQSLFDAPLHYNFYAASTGGGYYDMRNILNNTLVASNPTKAVTLVENHDTQPGQSLESTVQPWFKPLAYAFILTRSGGYPSVFYGDMYGTKGTTTREIPALKSKIEPLLKARKDYAYGTQRDYIDNPDVIGWTREGDSTKAKSGLATVITDGPGGSKRMYVGTSNAGEIWYDLTGNRTDKITIGSDGYATFPVNGGSVSVWVQQ

SEQ ID NO: 37442 - protein, 480 aa, Cytophaga sp.
NGTMMQYFEWYVPNDGQQWNRLRTDAPYLSSVGITAVWTPPAYKGTSQADVGYGPYDLYDLGEFNQKGTVRTKYGTKGELKSAVNTLHSNGIQVYGDVVMNHKAGADYTENVTAVEVNPSNRYQETSGEYNIQAWTGFNFPGRGTTYSNWKWQWFHFDGTDWDQSRSLSRIFKFDGKAWDWEVSSENGNYDYLMYADYDYDHPDVVNEMKKWGVWYANEVGLDGYRLDAVKHIKFNFLKDWVDNARAATGKEMFTVGEYWQNDLGALNNYLAKVNYNQSLFDAPLHYNFYAASTGGGYYDMRNILNNTLVASNPTKAVTLVENHDTQPGQSLESTVQPWFKPLAYAFILTRSGGYPSVFYGDMYGTKGTTTREIPALKSKIEPLLKARKDYAYGTQRDYIDNPDVIGWTREGDSTKAKSGLATVITDGPGGSKRMYVGTSNAGEIWYDLTGNRTDKITIGSDGYATFPVNGGSVSVWVQQ

SEQ ID NO: 37443 - protein, 480 aa, Cytophaga sp.
NGTMMQYFEWYVPNDGQQWNRLRTDAPYLSSVGITAVWTPPAYKGTSQADVGYGPYDLYDLGEFNQKGTVRTKYGTKGELKSAVNTLHSNGIQVYGDVVMNHKAGADYTENVTAVEVNPSNRYQETSGEYNIQAWTGFNFPGRGTTYSNWKWQWFHFDGTDWDQSRSLSRIFKFDGKAWDWEVSSENGNYDYLMYADYDYDHPDVVNEMKKWGVWYANEVGLDGYRLDAVKHIKFQFLKDWVDNARAATGKEMFTVGEYWQNDLGALNNYLAKVNYNQSLFDAPLHYNFYAASTGGGYYDMRNILNNTLVASNPTKAVTLVENHDTQPGQSLESTVQPWFKPLAYAFILTRSGGYPSVFYGDMYGTKGTTTREIPVLKSKIEPLLKARKDYAYGTQRDYIDNPDVIGWTREGDSTKAKSGLATVITDGPGGSKRMYVGTSNAGEIWYDLTGNRTDKITIGSDGYATFPVNGGSVSVWVQQ

SEQ ID NO: 37444 - protein, 480 aa, Cytophaga sp.
NGTMMQYFEWYVPNDGQQWNRLRTDAPYLSSVGITAVWTPPAYKGTSQADVGYGPYDLYDLGEFNQKGTVRTKYGTKGELKSAVNTLHSNGIQVYGDVVMNHKAGADYTENVTAVEVNPSNRYQETSGEYNIQAWTGFNFPGRGTTYSNWKWQWFHFDGTDWDQSRSLSRIFKFDGKAWDWEVSSENGNYDYLMYADYDYDHPDVVNEMKKWGVWYANEVGLDGYRLDAVKHIKFQFLKDWVDNARDATGKEMFTVGEYWQNDLGALNNYLAKVNYNQSLFDAPLHYNFYAASTGGGYYDMRNILNNTLVASNPTKAVTLVENHDTQPGQSLESTVQPWFKPLAYAFILTRSGGYPSVFYGDMYGTKGTTTREIPALKSKIEPLLKARKDYAYGTQRDYIDNPDVIGWTREGDSTKAKSGLATVITDGPGGSKRMYVGTSNAGEIWYDLTGNRTDKITIGSDGYATFPVNGGSVSVWVQQ

SEQ ID NO: 37445 - protein, 480 aa, Cytophaga sp.
NGTMMQYFEWYVPNDGQQWNRLRTDAPYLSSVGITAVWTPPAYKGTSQADVGYGPYDLYDLGEFNQKGTVRTKYGTKGELKSAVNTLHSNGIQVYGDVVMNHKAGADYTENVTAVEVNPSNRYQETSGEYNIQAWTGFNFPGRGTTYSNWKWQWFHFDGTDWDQSRSLSRIFKFDGKAWDWEVSSENGNYDYLMYADYDYDHPDVVNEMKKWGVWYANEVGLDGYRLDAVKHIKFQFLKDWVDNARAATGKEMFTVGEYWQNDLGALNNYLAKVNYNQSLFDAPLHYNFYAASTGGGYYDMRNILNNTLVASNPTKAVTLVENHDTQPGQSLESTVQPWFKPLAYAFILTRSGGYPSVFYGDMYGTKGTTTQEIPALKSKIEPLLKARKDYAYGTQRDYIDNPDVIGWTREGDSTKAKSGLATVITDGPGGSKRMYVGTSNAGEIWYDLTGNRTDKITIGSDGYATFPVNGGSVSVWVQQ

SEQ ID NO: 37446 - protein, 480 aa, Cytophaga sp.
NGTMMQYFEWYVPNDGQQWNRLRTDAPYLSSVGITAVWTPPAYKGTSQADVGYGPYDLYDLGEFNQKGTVRTKYGTKGELKSAVNTLHSNGIQVYGDVVMNHKAGADYTENVTAVEVNPSNRYQETSGEYNIQAWTGFNFPGRGTTYSNWKWQWFHFDGTDWDQSRSLSRIFKFDGKAWDWEVSSENGNYDYLMYADYDYDHPDVVNEMKKWGVWYANEVGLDGYRLDAVKHIKFQFLKDWVDNARAATGKEMFTVGEYWQNDLGALNNYLAKVNYNQSLFDAPLHYNFYAASTGGGYYDMRNILNNTLVASNPGKAVTLVENHDTQPGQSLESTVQPWFKPLAYAFILTRSGGYPSVFYGDMYGTKGTTTREIPALKSKIEPLLKARKDYAYGTQRDYIDNPDVIGWTREGDSTKAKSGLATVITDGPGGSKRMYVGTSNAGEIWYDLTGNRTDKITIGSDGYATFPVNGGSVSVWVQQ

SEQ ID NO: 37447 - protein, 480 aa, Cytophaga sp.
NGTMMQYFEWYVPNDGQQWNRLTTDAPYLSSVGITAVWTPPAYKGTSQADVGYGPYDLYDLGEFNQKGTVRTKYGTKGELKSAVNTLHSNGIQVYGDVVMNHKAGADYTENVTAVEVNPSNRYQETSGEYNIQAWTGFNFPGRGTTYSNWKWQWFHFDGTDWDQSRSLSRIFKFDGKAWDWEVSSENGNYDYLMYADYDYDHPDVVNEMKKWGVWYANEVGLDGYRLDAVKHIKFQFLKDWVDNARAATGKEMFTVGEYWQNDLGALNNYLAKVNYNQSLFDAPLHYNFYAASTGGGYYDMRNILNNTLVASNPTKAVTLVENHDTQPGQSLESTVQPWFKPLAYAFILTRSGGYPSVFYGDMYGTKGTTTREIPALKSKIEPLLKARKDYAYGTQRDYIDNPDVIGWTREGDSTKAKSGLATVITDGPGGSKRMYVGTSNAGEIWYDLTGNRTDKITIGSDGYATFPVNGGSVSVWVQQ

SEQ ID NO: 37448 - protein, 480 aa, Cytophaga sp.
NGTMMQYFEWYVPNDGQQWNRLRTDAPYLSSVGITAVWTPPAYKGTSQADVGYGPYDLYDLGEFNQKGTVRTKYGTKGELKSAVNTLHSNGIQVYGDVVMNHKAGADYTENVTAVEVNPSNRYQETSGEYNIQAWTGFWFPGRGTTYSNWKWQWFHFDGTDWDQSRSLSRIFKFDGKAWDWEVSSENGNYDYLMYADYDYDHPDVVNEMKKWGVWYANEVGLDGYRLDAVKHIKFQFLKDWVDNARAATGKEMFTVGEYWQNDLGALNNYLAKVNYNQSLFDAPLHYNFYAASTGGGYYDMRNILNNTLVASNPTKAVTLVENHDTQPGQSLESTVQPWFKPLAYAFILTRSGGYPSVFYGDMYGTKGTTTREIPALKSKIEPLLKARKDYAYGTQRDYIDNPDVIGWTREGDSTKAKSGLATVITDGPGGSKRMYVGTSNAGEIWYDLTGNRTDKITIGSDGYATFPVNGGSVSVWVQQ

SEQ ID NO: 37449 - protein, 480 aa, Cytophaga sp.
NGTMMQYFEWYVPNDGQQWNRLRTDAPYLSSVGITAVWTPPAYKGTSQADVGYGPYDLYDLGEFNQKGTVRTKYGTKGELKSAVNLLHSNGIQVYGDVVMNHKAGADYTENVTAVEVNPSNRYQETSGEYNIQAWTGFNFPGRGTTYSNWKWQWFHFDGTDWDQSRSLSRIFKFDGKAWDWEVSSENGNYDYLMYADYDYDHPDVVNEMKKWGVWYANEVGLDGYRLDAVKHIKFQFLKDWVDNARAATGKEMFTVGEYWQNDLGALNNYLAKVNYNQSLFDAPLHYNFYAASTGGGYYDMRNILNNTLVASNPTKAVTLVENHDTQPGQSLESTVQPWFKPLAYAFILTRSGGYPSVFYGDMYGTKGTTTREIPALKSKIEPLLKARKDYAYGTQRDYIDNPDVIGWTREGDSTKAKSGLATVITDGPGGSKRMYVGTSNAGEIWYDLTGNRTDKITIGSDGYATFPVNGGSVSVWVQQ

SEQ ID NO: 37450 - protein, 480 aa, Cytophaga sp.
NGTMMQYFEWYVPNDGQQWNRLRTDAPYLSSVGITAVWTPPAYKGTSQADVGYGPYDLYDLGEFNQKGTVRTKYGTKGELKSAVNTLHSNGIQVYGDVVMNHKAGADYTENVTAVEVNPSNRYQETSGEYNIQAWTGFNFPGRGTTYSNWKWQWFHFDGTDWDQSRSLSRIFKFDGKAWDWEVSSENGNYDYLMYADYDYDHPDVVNEMKKWGVWYANEVGLDGYRLDAVKHIKFQFLKDWVDNARAATGKEMFTVGEYWQNDLGALNNYLAKVNYNQSLFDAPLHYNFYAASTGGGYYDMRNILKNTLVASNPTKAVTLVENHDTQPGQSLESTVQPWFKPLAYAFILTRSGGYPSVFYGDMYGTKGTTTREIPALKSKIEPLLKARKDYAYGTQRDYIDNPDVIGWTREGDSTKAKSGLATVITDGPGGSKRMYVGTSNAGEIWYDLTGNRTDKITIGSDGYATFPVNGGSVSVWVQQ

SEQ ID NO: 37451 - protein, 480 aa, Cytophaga sp.
NGTMMQYFEWYVPNDGQQWNRLRTDAPYLSSVGITAVWTPPAYKGTSQADVGYGPYDLYDLGEFNQKGTVRTKYGTKGELKSAVNTLHSNGIQVYGDVVMNHKAGADYTENVTAVEVNPSNRYQETSGEYNIQAWTGFNFPGRGTTYSNWKWQWFHFDGTDWDQSRSLSRIFKFDGKAWDWEVSSENGNYDYLMYADYDYDHPDVVNEMKKWGVWYANEVGLDGYRLDAVKHIKFQFLKDWVDNARAATGKEMFTVGEYWQNDLGALNNYLAKVNYNQSLFDAPLHYNFYAASTGGGYYDMRNILNNTLVASNPTKAVTLVENHDTQPGQSLESTVQPWFKPLAYAFILTRSGGYPSVFYGDMYGTKGTTTREIPALKSKIEPLLKARKDYAYGTQRDYIDNPDVIGWTREGDSTKAKSGLATVITDGPGGSKRMYVGTSNAGEIWYDLTGNRTDKITIGSDGYATFPVNGGSVSNWVQQ

SEQ ID NO: 37452 - protein, 480 aa, Cytophaga sp.
NGTMMQYFEWYVPNDGQQWNRLRTDAPYLSSVGITAVWTPPAYKGTSQADVGYGPYDLYDLGEFNQKGTVRTKYGTKGELKSAVNTLHSNGIQVYGDVVMNHKAGADYTENVTAVEVNPSNRYQETSGEYNIQAWTGFNFPGRGTTYSNWKWIWFHFDGTDWDQSRSLSRIFKFDGKAWDWEVSSENGNYDYLMYADYDYDHPDVVNEMKKWGVWYANEVGLDGYRLDAVKHIKFQFLKDWVDNARAATGKEMFTVGEYWQNDLGALNNYLAKVNYNQSLFDAPLHYNFYAASTGGGYYDMRNILNNTLVASNPTKAVTLVENHDTQPGQSLESTVQPWFKPLAYAFILTRSGGYPSVFYGDMYGTKGTTTREIPALKSKIEPLLKARKDYAYGTQRDYIDNPDVIGWTREGDSTKAKSGLATVITDGPGGSKRMYVGTSNAGEIWYDLTGNRTDKITIGSDGYATFPVNGGSVSVWVQQ

SEQ ID NO: 37453 - protein, 480 aa, Cytophaga sp.
NGTMMQYFEWYVPNDGQQWNRLRTDAPYLSSVGITAVWTPPAYKGTSQADVGYGPYDLYDLGEFNQKGTVRTKYGTKGELKSAVNTLHSNGIQVYGDVVMNHKAGADYTENVTAVEVNPSNRYQETSGEYNIQAWTGFNFPGRGTTYSNWKWQWFHFDGTDWDQSRSLSRIFKFDGKAWDWEVSSENGNYDYLMYADYDYDHPDVVNEMKKWGVWYANEVGLDGYRLDAVKHIKFQFLKDWVDNARAATGKEMFTVGEYWQNDLGALNNYLAKVNYNQSLFDAPLHYNFYAASTGGGYYDMRNILNNTLVASNPTKAVTLVENHDTQPGQSLESTVQPWFKPLAYAFILTRSGGYPSVFYGDMYGTKGTTTREIPALKSKIEPLLKARKDYAYGKQRDYIDNPDVIGWTREGDSTKAKSGLATVITDGPGGSKRMYVGTSNAGEIWYDLTGNRTDKITIGSDGYATFPVNGGSVSVWVQQ

SEQ ID NO: 37454 - protein, 480 aa, Cytophaga sp.
NGTMMQYFEWYVPNDGQQWNRLRTDAPYLSSVGITAVWTPPAYKGTSQADVGYGPYDLYDLGEFNQKGTVRTKYGTKGELKSAVNTLHSNGIQVYGDVVMNHKAGADYTENVTAVEVNPSNRYQETSGEYNIQAWTGFNFPGRGTTYSNWKWQWFHFDGTDWDQSRSLSRIFKFDGKAWDWEVSSENGNYDYLMYADYDYDHPDVVNEMKKWGVWYANEVGLDGYRLDAVKHIKFLFLKDWVDNARAATGKEMFTVGEYWQNDLGALNNYLAKVNYNQSLFDAPLHYNFYAASTGGGYYDMRNILNNTLVASNPTKAVTLVENHDTQPGQSLESTVQPWFKPLAYAFILTRSGGYPSVFYGDMYGTKGTTTREIPALKSKIEPLLKARKDYAYGTQRDYIDNPDVIGWTREGDSTKAKSGLATVITDGPGGSKRMYVGTSNAGEIWYDLTGNRTDKITIGSDGYATFPVNGGSVSVWVQQ

SEQ ID NO: 37455 - protein, 480 aa, Cytophaga sp.
NGTMMQYFEWYVPNDGQQWNRLRTDAPYLSSVGITAVWTPPAYKGTSQADVGYGPYDLYDLGEFNQKGTVRTKYGTKGELKYAVNTLHSNGIQVYGDVVMNHKAGADYTENVTAVEVNPSNRYQETSGEYNIQAWTGFNFPGRGTTYSNWKWQWFHFDGTDWDQSRSLSRIFKFDGKAWDWEVSSENGNYDYLMYADYDYDHPDVVNEMKKWGVWYANEVGLDGYRLDAVKHIKFQFLKDWVDNARAATGKEMFTVGEYWQNDLGALNNYLAKVNYNQSLFDAPLHYNFYAASTGGGYYDMRNILNNTLVASNPTKAVTLVENHDTQPGQSLESTVQPWFKPLAYAFILTRSGGYPSVFYGDMYGTKGTTTREIPALKSKIEPLLKARKDYAYGTQRDYIDNPDVIGWTREGDSTKAKSGLATVITDGPGGSKRMYVGTSNAGEIWYDLTGNRTDKITIGSDGYATFPVNGGSVSVWVQQ

SEQ ID NO: 37456 - protein, 480 aa, Cytophaga sp.
NGTMMQYFEWYVPNDGQQWNRLRTDAPYLSSVGITAVWTPPAYKGTSQADVGYGPYDLYDLGEFNQKGTVRTKYGTKGELKSAVNTLHSNGIQVYGDVVMNHKAGADYTENVTAVEVNPSNRYQETSGEYNIQAWTGFNFPGRGTTYSNWKWQWFHFDGTDWDQSRSLSRIFKFDGKAWDWEVSSENGNYDYLMYADYDYDHPDVVNEMKKWGVWYANEVGLDGYRLDAVKHIKFQFLKDWVDNARAATGKEMFTVGEYWQNDLGALNNYLAKVNYNQSLFDAPLHYNFYAASTGGGYYDMRNILNNTLVASNPTKAVTLVENHDTQPGQSLESTVQPWFKPLAYAFILTRSGGYPSVFYGDMYGTKGTTTREIPALKSKIEPLLKARKDYAYGTQRDYIDNPDVIGWTREGDSTKAKSGLATVITDGPGGSKRMYVGTSNAGEIWYDLTGNRTDKITIGSDGYAWFPVNGGSVSVWVQQ

SEQ ID NO: 37457 - protein, 480 aa, Cytophaga sp.
NGTMMQYFEWYVPNDGQQWNRLRTDAPYLSSVGITAVWTPPAYKGTSQADVGYGPYDLYDLGEFNQKGTVRTKYGTKGELKSAVNTLHSNGIQVYGDVVMNHKAGADYTENVTAVEVNPSNRYQETSGEYNIQAWTGFNFPGRGTTYSNWKWQWFHFDGTDWDQSRSLSRIFKFDGKAWDWEVSSENGNYDYLMYADYDYDHPDVVNEMKKWGVWYANEAGLDGYRLDAVKHIKFQFLKDWVDNARAATGKEMFTVGEYWQNDLGALNNYLAKVNYNQSLFDAPLHYNFYAASTGGGYYDMRNILNNTLVASNPTKAVTLVENHDTQPGQSLESTVQPWFKPLAYAFILTRSGGYPSVFYGDMYGTKGTTTREIPALKSKIEPLLKARKDYAYGTQRDYIDNPDVIGWTREGDSTKAKSGLATVITDGPGGSKRMYVGTSNAGEIWYDLTGNRTDKITIGSDGYATFPVNGGSVSVWVQQ

SEQ ID NO: 37458 - protein, 480 aa, Cytophaga sp.
NGTMMQYFEWYVPNDGQQWNRLRMDAPYLSSVGITAVWTPPAYKGTSQADVGYGPYDLYDLGEFNQKGTVRTKYGTKGELKSAVNTLHSNGIQVYGDVVMNHKAGADYTENVTAVEVNPSNRYQETSGEYNIQAWTGFNFPGRGTTYSNWKWQWFHFDGTDWDQSRSLSRIFKFDGKAWDWEVSSENGNYDYLMYADYDYDHPDVVNEMKKWGVWYANEVGLDGYRLDAVKHIKFQFLKDWVDNARAATGKEMFTVGEYWQNDLGALNNYLAKVNYNQSLFDAPLHYNFYAASTGGGYYDMRNILNNTLVASNPTKAVTLVENHDTQPGQSLESTVQPWFKPLAYAFILTRSGGYPSVFYGDMYGTKGTTTREIPALKSKIEPLLKARKDYAYGTQRDYIDNPDVIGWTREGDSTKAKSGLATVITDGPGGSKRMYVGTSNAGEIWYDLTGNRTDKITIGSDGYATFPVNGGSVSVWVQQ

SEQ ID NO: 37459 - protein, 480 aa, Cytophaga sp.
NGTMMQYFEWYVPNDGQQWNRLRTDAPYLSSVGITAVWTPPAYKGTSQADVGYGPYDLYDLGEFNQKGTVRTKYGTKGELKSAVNTLHSNGIQVYGDVVMNHKAGADYTENVTAVEVNPSNRYQETSGEYNIQAWTGFNFPGRGITYSNWKWQWFHFDGTDWDQSRSLSRIFKFDGKAWDWEVSSENGNYDYLMYADYDYDHPDVVNEMKKWGVWYANEVGLDGYRLDAVKHIKFQFLKDWVDNARAATGKEMFTVGEYWQNDLGALNNYLAKVNYNQSLFDAPLHYNFYAASTGGGYYDMRNILNNTLVASNPTKAVTLVENHDTQPGQSLESTVQPWFKPLAYAFILTRSGGYPSVFYGDMYGTKGTTTREIPALKSKIEPLLKARKDYAYGTQRDYIDNPDVIGWTREGDSTKAKSGLATVITDGPGGSKRMYVGTSNAGEIWYDLTGNRTDKITIGSDGYATFPVNGGSVSVWVQQ

SEQ ID NO: 37460 - protein, 480 aa, Cytophaga sp.
NGTMMQYFEWYVPNDGQQWNRLRTDAPYLSSVGITAVWTPPAYKGTSQADVGYGPYDLYDLGEFFQKGTVRTKYGTKGELKSAVNTLHSNGIQVYGDVVMNHKAGADYTENVTAVEVNPSNRYQETSGEYNIQAWTGFNFPGRGTTYSNWKWQWFHFDGTDWDQSRSLSRIFKFDGKAWDWEVSSENGNYDYLMYADYDYDHPDVVNEMKKWGVWYANEVGLDGYRLDAVKHIKFQFLKDWVDNARAATGKEMFTVGEYWQNDLGALNNYLAKVNYNQSLFDAPLHYNFYAASTGGGYYDMRNILNNTLVASNPTKAVTLVENHDTQPGQSLESTVQPWFKPLAYAFILTRSGGYPSVFYGDMYGTKGTTTREIPALKSKIEPLLKARKDYAYGTQRDYIDNPDVIGWTREGDSTKAKSGLATVITDGPGGSKRMYVGTSNAGEIWYDLTGNRTDKITIGSDGYATFPVNGGSVSVWVQQ

SEQ ID NO: 37461 - protein, 480 aa, Cytophaga sp.
NGTMMQYFEWYVPNDGQQWNRLRTDAPYLSSVGITAVWTPPAYKGTSQADVGYGPYDLYDLGEFNQKGTVRTKYGTKGELKSAVNTLHSNGIQVYGDVVMNHKAGADYTENVTAVEVNPSNRYQETSGEYNIQAWTGFNFPGRGTTYSNWKWQWFHFDGTDWDQSRSLSRIFKFDGKAWDWEVSSENGNYDYLMYADYDYDHPDVVNEMKKWGVWYANEVGLDGYRLDAVKHIKFQFLKDWVDNARAATGKEMFTVGEYWQNDLGALNNYLAKVNYNQSLFDAPLHYNFYAASLGGGYYDMRNILNNTLVASNPTKAVTLVENHDTQPGQSLESTVQPWFKPLAYAFILTRSGGYPSVFYGDMYGTKGTTTREIPALKSKIEPLLKARKDYAYGTQRDYIDNPDVIGWTREGDSTKAKSGLATVITDGPGGSKRMYVGTSNAGEIWYDLTGNRTDKITIGSDGYATFPVNGGSVSVWVQQ

SEQ ID NO: 37462 - protein, 480 aa, Cytophaga sp.
NGTMMQYFEWYVPNDGQQWNRLRTDAPYLSSVGITAVWTPPAYKGTSQADVGYGPYDLYDLGEFNQKGTVRTKYGTKGELKSAVNTLHSNGIQVYGDVVMNHKAGADYTENVTAVEVNPSNRYQETSGEYNIQAWTGFNFPGRGTTYSNWKWQWFHFDGTDWDQSRSLSRIFKFDGKAWDWEVSSENGNYDYLMYADYDYDHPDVVNEMKKWGVWYANEVGLDGYRLDAVKHIKFQFLKDWVDNARAATGKEMFTVGEYWQNDLGALNNYLAKVNYNQSAFDAPLHYNFYAASTGGGYYDMRNILNNTLVASNPTKAVTLVENHDTQPGQSLESTVQPWFKPLAYAFILTRSGGYPSVFYGDMYGTKGTTTREIPALKSKIEPLLKARKDYAYGTQRDYIDNPDVIGWTREGDSTKAKSGLATVITDGPGGSKRMYVGTSNAGEIWYDLTGNRTDKITIGSDGYATFPVNGGSVSVWVQQ

SEQ ID NO: 37463 - protein, 480 aa, Cytophaga sp.
NGTMMQYFEWYVPNDGQQWNRLRTDAPYLSSVGITAVWTPPAYKGTSQADVGYGPYDLYDLGEFEQKGTVRTKYGTKGELKSAVNTLHSNGIQVYGDVVMNHKAGADYTENVTAVEVNPSNRYQETSGEYNIQAWTGFNFPGRGTTYSNWKWQWFHFDGTDWDQSRSLSRIFKFDGKAWDWEVSSENGNYDYLMYADYDYDHPDVVNEMKKWGVWYANEVGLDGYRLDAVKHIKFQFLKDWVDNARAATGKEMFTVGEYWQNDLGALNNYLAKVNYNQSLFDAPLHYNFYAASTGGGYYDMRNILNNTLVASNPTKAVTLVENHDTQPGQSLESTVQPWFKPLAYAFILTRSGGYPSVFYGDMYGTKGTTTREIPALKSKIEPLLKARKDYAYGTQRDYIDNPDVIGWTREGDSTKAKSGLATVITDGPGGSKRMYVGTSNAGEIWYDLTGNRTDKITIGSDGYATFPVNGGSVSVWVQQ

SEQ ID NO: 37464 - protein, 480 aa, Cytophaga sp.
NGTMMQYFEWYVPNDGQQWNRLRTDAPYLSSVGITAVWTPPAYKGTSQADVGYGPYDLYDLGEFNQKGTVRTKYGTKGELKSAVNTLHSNGIQVYGDVVMNHKAGADYTENVTAVEVNPSNRYQETSGEYNIQAWTGFNFPGRGTTYSNWKWQWFHFDGTDWDQSRSLSRIFKFDGKAWDWEVSSENGNYDYLMYADYDYDHPDVVNEMKKWGVWYANEVGLDGYRLDAVKHIKFQFLKDWVDNARIATGKEMFTVGEYWQNDLGALNNYLAKVNYNQSLFDAPLHYNFYAASTGGGYYDMRNILNNTLVASNPTKAVTLVENHDTQPGQSLESTVQPWFKPLAYAFILTRSGGYPSVFYGDMYGTKGTTTREIPALKSKIEPLLKARKDYAYGTQRDYIDNPDVIGWTREGDSTKAKSGLATVITDGPGGSKRMYVGTSNAGEIWYDLTGNRTDKITIGSDGYATFPVNGGSVSVWVQQ

SEQ ID NO: 37465 - protein, 480 aa, Cytophaga sp.
NGTMMQYFEWYVPNDGQQWNRLRTDAPYLSSVGITAVWTPPAYKGTSQADVGYGPYDLYDLGEFNQKGTVRTKYGTKGELKSAVNTLHSNGIQVYGDVVMNHKAGADYTENVTAVEVNPSNRYQETSGEYNIQAWTGFNFPGRGTTYSNWKWQWFHFDGTDWDQSRSLSRIFKFDGKAWDWEVSSENGNYDYLMYADYDYDHPDVVNEMKKWGVWYANEVGLDGYRLDAVKHIKFQFLKDWVDNARAATGKEMFTVGEYWQNDLGALNNYLAKVNYNQSLFDAPLHYNFYAASTGGGYYDMRNILNNTLVASNPTKAVTLVENHDTQPGQSLESTVQPWFKPLAYAFILTRSGGYPSVFYGDMYGTKGTTTREIPALKSKIEPLLKARKDYAYGTQRDYIDNPDVIGWTREGDSTKAKSGLATVITDGPGGSKRMYVGTTNAGEIWYDLTGNRTDKITIGSDGYATFPVNGGSVSVWVQQ

SEQ ID NO: 37466 - protein, 480 aa, Cytophaga sp.
NGTMMQYFEWYVPNDGQWWNRLRTDAPYLSSVGITAVWTPPAYKGTSQADVGYGPYDLYDLGEFNQKGTVRTKYGTKGELKSAVNTLHSNGIQVYGDVVMNHKAGADYTENVTAVEVNPSNRYQETSGEYNIQAWTGFNFPGRGTTYSNWKWQWFHFDGTDWDQSRSLSRIFKFDGKAWDWEVSSENGNYDYLMYADYDYDHPDVVNEMKKWGVWYANEVGLDGYRLDAVKHIKFQFLKDWVDNARAATGKEMFTVGEYWQNDLGALNNYLAKVNYNQSLFDAPLHYNFYAASTGGGYYDMRNILNNTLVASNPTKAVTLVENHDTQPGQSLESTVQPWFKPLAYAFILTRSGGYPSVFYGDMYGTKGTTTREIPALKSKIEPLLKARKDYAYGTQRDYIDNPDVIGWTREGDSTKAKSGLATVITDGPGGSKRMYVGTSNAGEIWYDLTGNRTDKITIGSDGYATFPVNGGSVSVWVQQ

SEQ ID NO: 37467 - protein, 480 aa, Cytophaga sp.
NGTMMQYFEWYVPNDGQQWNRLRTDAPYLSSVGITAVWTPPAYKGTSQADVGYGPYDLYDLGEFNQKGTVRTKYGTKGELKSAVNTLHSNGIQVYGDVVMNHKAGADYTENVTAVEVNPSNRYQETSGEYNIQAWTGFNFPGRGTTYSMWKWQWFHFDGTDWDQSRSLSRIFKFDGKAWDWEVSSENGNYDYLMYADYDYDHPDVVNEMKKWGVWYANEVGLDGYRLDAVKHIKFQFLKDWVDNARAATGKEMFTVGEYWQNDLGALNNYLAKVNYNQSLFDAPLHYNFYAASTGGGYYDMRNILNNTLVASNPTKAVTLVENHDTQPGQSLESTVQPWFKPLAYAFILTRSGGYPSVFYGDMYGTKGTTTREIPALKSKIEPLLKARKDYAYGTQRDYIDNPDVIGWTREGDSTKAKSGLATVITDGPGGSKRMYVGTSNAGEIWYDLTGNRTDKITIGSDGYATFPVNGGSVSVWVQQ

SEQ ID NO: 37468 - protein, 480 aa, Cytophaga sp.
NGTMMQYFEWYVPNDGQQWNRLRTDAPYLSSVGITAVWTPPAYKGTSQADVGYGPYDLYDLGEFNQKGTVRTKYGTKGELKSAVNTLHSNGIQVYGDVVMNHKAGADYTENVTAVEVNPSNRYQETSGEYNIQAWTGFNFPGRGTTYSNWKWQWFHFDGTDWDQSRSLSRIFKFDGKAWDWEVSSENGNYDYLMYADYDYDHPDVVNEMKKWGVWYANEVGLDGYRLDAVKHIKFQFLKDWVDNARAATGKEMFTVGEYWQNDLGALNNYLAKVNYNQSLFDAPLHYNFYAASTGGGYYDMRNILNNTLVASNPTKAVTLVENHDTQPGQSLESTVQPWFKPLAYAFILTRSGGYPSVFYGDMYGTKGTTTREIPALKSKIEPLLKARKDYAYGTQRDYIDRPDVIGWTREGDSTKAKSGLATVITDGPGGSKRMYVGTSNAGEIWYDLTGNRTDKITIGSDGYATFPVNGGSVSVWVQQ

SEQ ID NO: 37469 - protein, 480 aa, Cytophaga sp.
NGTMMQYFEWYVPNDGQQWNRLRTDAPYLSSVGITAVWTPPAYKGTSQADVGYGPYDLYDLGEFNQKGTVRTKYGTKGELKSAVNTLHSSGIQVYGDVVMNHKAGADYTENVTAVEVNPSNRYQETSGEYNIQAWTGFNFPGRGTTYSNWKWQWFHFDGTDWDQSRSLSRIFKFDGKAWDWEVSSENGNYDYLMYADYDYDHPDVVNEMKKWGVWYANEVGLDGYRLDAVKHIKFQFLKDWVDNARAATGKEMFTVGEYWQNDLGALNNYLAKVNYNQSLFDAPLHYNFYAASTGGGYYDMRNILNNTLVASNPTKAVTLVENHDTQPGQSLESTVQPWFKPLAYAFILTRSGGYPSVFYGDMYGTKGTTTREIPALKSKIEPLLKARKDYAYGTQRDYIDNPDVIGWTREGDSTKAKSGLATVITDGPGGSKRMYVGTSNAGEIWYDLTGNRTDKITIGSDGYATFPVNGGSVSVWVQQ

SEQ ID NO: 37470 - protein, 480 aa, Cytophaga sp.
NGTMMQYFEWYVPNDGQQWNRLRTDAPYLSSVGITAVWTPPAYKGTSQADVGYGPYDLYDLGEFNQKGTVRTKYGTKGELKSAVNTLHSNGIQVYGDVVMNHKAGADYTENVTAVEVNPSNRYQETSGEYNIQAWTGFNFPGRGTTYSNWKWQWFHFDGTDWDQSRSLSRIFKFDGKAWDWEVSSENGNYDYLMYADYDYDHPDVVNEMKKWGVWYANEVGLDGYRLDAVKHIKFQFLKDWVDNARAATGKEMFTVGEYWQNDLGALNNYLAKVNYNQSLFDAPLHYNFYAASTGGGYYDMRNILNNTLVASNPTKAVTLVENHDTQPGQSLESTVQPWFKPLAYAFILTRSGGYPSVFYGDMYGTKGTTTREIPALKSKIEPLLKARKDYAYGTQRDYIDNPDVIGWTREGDSTKAKSGLATVITDGPGGSKRMYVGTSNAGEIWYDLTGNRTDKITIGSDGEATFPVNGGSVSVWVQQ

SEQ ID NO: 37471 - protein, 480 aa, Cytophaga sp.
NGTMMQYFEWYVPNDGQQWNRLRTDAPYLSSVGITAVWTPPAYKGTSQADVGYGPYDLYDLGEFNQKGTVRTKYGTKGELKSAVNTLHSNGIQVYGDVVMNHKAGADYTENVTAVEVNPSNRYQETSGEYNIQAWTGFNFPGRGTTYSNWKWQWFHFDGTDWDQSRSLSRIFKFDGKAWDWEVSSENGNYDYLMYADYDYDHPDVVNEMKKWGVWYANEVGLDGYRLDAVKHIKFQFLKDWVDNARAATGKEMFTVGEYWQNDLGALNNYLAKVNYNQSLFDAPLHYNFYAASTGGGYYDMRNILNNTLVASNPTKAVTLVENHDTQPGQSLESTVQPWFKPLAYAFILTRSGGYPSVFYGDMYGTKGTTTWEIPALKSKIEPLLKARKDYAYGTQRDYIDNPDVIGWTREGDSTKAKSGLATVITDGPGGSKRMYVGTSNAGEIWYDLTGNRTDKITIGSDGYATFPVNGGSVSVWVQQ

SEQ ID NO: 37472 - protein, 480 aa, Cytophaga sp.
NGTMMQYFEWYVPNDGQQWNRLRTDAPYLSSVGITAVWTPPAYKGTSQADVGYGPYDLYDLGEFNQKGTVRTKYGTKGELKSAVNTLHSNGIQVYGDVVMNHKAGADYTENVTAVEVNPSNRYQETSGEYNIQAWTGFNFPGRGTTYSNWKWQWFHFDGTDWDQSRSLSRIFKFDGKAWDWEVSSENGNYDYLMYADYDYDHPDVVNEMKKWGVWYANEVGLDGYRLDAVKHIKFQFLKDWVDNARAATGKEMFTVGEYWQNDLGALNNYLAKVNYNQSLFDAPLHYNFYAASTGGGYYDMRNILNNTLVASNPTKAVTCVENHDTQPGQSLESTVQPWFKPLAYAFILTRSGGYPSVFYGDMYGTKGTTTREIPALKSKIEPLLKARKDYAYGTQRDYIDNPDVIGWTREGDSTKAKSGLATVITDGPGGSKRMYVGTSNAGEIWYDLTGNRTDKITIGSDGYATFPVNGGSVSVWVQQ

SEQ ID NO: 37473 - protein, 480 aa, Cytophaga sp.
NGTMMQYFEWYVPNDGQQWNRLRTDAPYLSSVGITAVWTPPAYKGTSQADVGYGPYDLYDLGEFNQKGTVRTKYGTKGELKSAVNTLHSNGIQVYGDVVMNHKAGADYTENVTAVEVNPSNRYQETSGEYNIQAWTGFNFPGRGTTYSNWKWQWFHFDGTDWDQSRSLSRIFKFDGKAWDWEVSSENGNYDYLMYADYDYDHPDVVNEMKKWGVWYANEVGLDGYRLDAVKHIKFQFLKDWVDNARAATGKEMFTVGEYWQNDLGALNNYLAKVNYNQSLFDAPLHYNFYAASTGGGYYDMRNILNNTLVASNPTKAVTLVENHDTQPGQSLESTVQPWFKPLAYAFILTRSGGYPSVFYGDMYGTKGTTTREIPALKSKIEPLLKARKDYAYGTQRDYIDNPDVIGWTREGDSTKAKSGLATVITDGPGGSKRMYVGTSNAGEIWYDLTGNRTDKMTIGSDGYATFPVNGGSVSVWVQQ

SEQ ID NO: 37474 - protein, 480 aa, Cytophaga sp.
NGTMMQYFEWYVPNDGQQWNRLRTDAPYLSSVGITAVWTPPAYKGTSQADVGYGPYDLYDLGEFNQKGTVRTKYGTKGELKSAVNTLHSNGIQVYGDVVMNHKAGADYTENVTAVEVNPSNRYQETSGEYNIQAWTGFNFPGRGTTYSNWKWQWFHFDGTDWDQSRSLSRIFKFHGKAWDWPVSSENGNYDYLMYADYDYDHPDVVNEMKKWGVWYANEVGLDGYRLDAVKHIKFSFLKDWVDNARAATGKEMFTVGEYWQNDLGALNNYLAKVNYNQSLFDAPLHYNFYAASTGGGYYDMRNILNNTLVASNPTKAVTLVENHDTQPGQSLESTVQPWFKPLAYAFILTRSGGYPAVFYGDMYGTKGTTTYEIPALKSKIEPLLKARKDYAYGTQRDYIDNPDVIGWTREGDSTKAKSGLATVITDGPGGSKRMYVGTSNAGEIWYDLTGNRTDKITIGSDGYATFPVNGGSVSVWVQQ

SEQ ID NO: 37475 - protein, 480 aa, Cytophaga sp.
NGTMMQYFEWYVPNDGQQWNRLRTDAPYLSSVGITAVWTPPAYKGTSQADVGYGPYDLYDLGEFNQKGTVRTKYGTKGELKSAVNTLHSQGIQVYGDVVMNHKAGADYTENVTAVEVNPSNRYQETSGEYNIQAWTGFNFPGRGTTYSNWKWQWFHFDGTDWDQSRSLSRIFKFDGKAWDWEVSSENGNYDYLMYADYDYDHPDVVNEMKKWGVWYANEVGLDGYRLDAVKHIKFQFLKDWVDNARAATGKEMFTVGEYWQNDLGALNNYLAKVNYNQSLFDAPLHYNFYAASTGGGYYDMRNILNNTLVASNPTKAVTLVENHDTQPGQSLESTVQPWFKPLAYAFILTRSGGYPSVFYGDMYGTKGTTTREIPALKSKIEPLLKARKDYAYGTQRDYIDNPDVIGWTREGDSTKAKSGLATVITDGPGGSKRMYVGTSNAGEIWYDLTGNRTDKITIGSDGYATFPVNGGSVSVWVQQ

SEQ ID NO: 37476 - protein, 480 aa, Cytophaga sp.
NGTMMQYFEWYVPNDGQQWNRLRTDAPYLSSVGITAVWTPPAYKGTSQADVGYGPYDLYDLGEFNQKGTVRTKYGTKGELKSAVNTLHSNGIQVYGDVVMNHKAGADYTENVTAVEVNPSNRYQETSGEYNIQAWTGFNFPGRGTTYSNWKWQWFHFDGTDWDQSRSLSRIFKFDGKAWDWEVSSENGNYDYLMYADYDYDHPDVVNEMKKWGVWYANEVGLDGYRLDAVKHIKFQFLKDWVDNARAATGKEMFTVGEYWQNDLGALNNYLAKVNYNQSLFDAPLHYNFYAASTGGGYYDMRNILNNTLVASNPTKAVTLVENHDTQPGQSLESTVQPWFKPLAYAFILTRSGGYPSVFYGDMYGTKGTTTREIPALKSKIEPLLKARKDYAYGTQRDYIDNPDVIGWTREGDSTKAKSGLATVITDGPGGSKRMYVGTSNAGEIWYDLTGNRTDKITIGSDGYATFEVNGGSVSVWVQQ

SEQ ID NO: 37477 - protein, 480 aa, Cytophaga sp.
NGTMMQYFEWYVPNDGQQWNRLRTDAPYLSSVGITAVWTPPAYKGTSQADVGYGPYDLYDLGEFNQKGTVRTKYGTKGELKSAVNTLHSNGIQVYGDVVMNHKAGADYTENVTAVEVNPSNRYQETSGEYNIQAWTGFNFPGRGTTYSNWKWQWFHFDGTDWDQSRSLSRIFKFDGKAWDWEVSSENGNYDYLMYADYDYDHPDVVNEMKKWGVWYANEVGLDGYRLDAVKHIKFQFLKDWVDNARAATGKEMFTVGEYWQNDLGALNNYLAKVNYNQSLFDAPLHYNFYAASTGGGYYDMRNILNNTLVASNPTKAVTLVENHDTQPGQSLESTVQPWFKPLAYAFILTRSGGYPSVFYGDMYGTKGTTTREIPALKSKIEPLLKARKDYAYGTQRDYIDNPDVIGWTREGDSTKAKSGLATVITDGPGGSKRMYVGTSNAGEIWYDLTGNRTDKIEIGSDGYATFPVNGGSVSVWVQQ

SEQ ID NO: 37478 - protein, 480 aa, Cytophaga sp.
NGTMMQYFEWYVPNDGQQWNRLRTDAPYLSSVGITAVWTPPAYKGTSQADVGYGPYDLYDLGEFNQKGTVRTKYGTKGELKSAVNTLHSNGIQVYGDVVMNHKAGADYTENVTAVEVNPSNRYQETSGEYNIQAWTGFNFPGRGTTYSNWKWQWFHFDGTDWDQSRSLSRIFKFDGKAWDWEVSSENGNYDYLMYADYDYDHPDVVNEMKKWGVWYANEIGLDGYRLDAVKHIKFQFLKDWVDNARAATGKEMFTVGEYWQNDLGALNNYLAKVNYNQSLFDAPLHYNFYAASTGGGYYDMRNILNNTLVASNPTKAVTLVENHDTQPGQSLESTVQPWFKPLAYAFILTRSGGYPSVFYGDMYGTKGTTTREIPALKSKIEPLLKARKDYAYGTQRDYIDNPDVIGWTREGDSTKAKSGLATVITDGPGGSKRMYVGTSNAGEIWYDLTGNRTDKITIGSDGYATFPVNGGSVSVWVQQ

SEQ ID NO: 37479 - protein, 480 aa, Cytophaga sp.
NGTMMQYFEWYVPNDGQQWNRLRTDAPYLSSVGITAVWTPPAYKGTSQADVGYGPYDLYDLGEFNQKGTVRTKYGTKGELKSAVNTLHSNGIQVYGDVVMNHKAGADYTENVTAVEVNPSNRYQETSYEYNIQAWTGFNFPGRGTTYSNWKWQWFHFDGTDWDQSRSLSRIFKFDGKAWDWEVSSENGNYDYLMYADYDYDHPDVVNEMKKWGVWYANEVGLDGYRLDAVKHIKFQFLKDWVDNARAATGKEMFTVGEYWQNDLGALNNYLAKVNYNQSLFDAPLHYNFYAASTGGGYYDMRNILNNTLVASNPTKAVTLVENHDTQPGQSLESTVQPWFKPLAYAFILTRSGGYPSVFYGDMYGTKGTTTREIPALKSKIEPLLKARKDYAYGTQRDYIDNPDVIGWTREGDSTKAKSGLATVITDGPGGSKRMYVGTSNAGEIWYDLTGNRTDKITIGSDGYATFPVNGGSVSVWVQQ

SEQ ID NO: 37480 - protein, 480 aa, Cytophaga sp.
NGTMMQYFEWYVPNDGQQWNRLRTDAPYLSSVGITAVWTPPAYKGTSQADVGYGPYDLYDLGEFNQKGTVRTKYGTKGELKSAVNTLHSNGIQVYGDVVMNHKAGADYTENVTAVEVNPSNRYQETSGEYNIQAWTGFNFPGRGTTYSNWKWQWFHFDGTDWDQSRSLSRIFKFDGKAWDWEVSSENGNYDYLMYADYDYDHPDVVNEMKKWGVWYANEVGLDGYRLDAVKHIKFQFLKDWVDNARAATGKEMFTVGEYWQNDLGALNNYLAKVNYNQSLFDAPLHYNFYAASTGGGYYDMRNILNNTLVASNPTKAVTLVENHDTQPGQSLESTVQPWFKPLAYAFILTRSGGYPSVFYGDMYGTKGTTTREIPALKSKIEPLLKARKDYAYGTQRDYIDNPDVIGWTREGDSTKAKSGLATVITDGPGGSKRMYTGTSNAGEIWYDLTGNRTDKITIGSDGYATFPVNGGSVSVWVQQ

SEQ ID NO: 37481 - protein, 480 aa, Cytophaga sp.
NGTMMQYFEWYVPNDGQQWNRLRTDAPYLSSVGITAVWTPPAYKGTSQADVGYGPYDLYDLGEFNQKGTVRTKYGTKGELKSAVNTLHSNGIQVYGDVVMNHKAGADYTENVTAVEVNPSNRYQETSGEYNIQAWTGFNFPGRGTTYSNWKWQWFHFDGTDWDQSRSLSRIFKFDGKAWDWEVSSENGNYDYLMYADYDYDHPDVVNEMKKWGVWYANEVGLDGYRLDAVKHIKFQFLKDWVDNARAATGKEMFTVGEYWQNDLGALNNYLAKVNYNQSLFDAPLHYNFYAASTGGGIYDMRNILNNTLVASNPTKAVTLVENHDTQPGQSLESTVQPWFKPLAYAFILTRSGGYPSVFYGDMYGTKGTTTREIPALKSKIEPLLKARKDYAYGTQRDYIDNPDVIGWTREGDSTKAKSGLATVITDGPGGSKRMYVGTSNAGEIWYDLTGNRTDKITIGSDGYATFPVNGGSVSVWVQQ

SEQ ID NO: 37482 - protein, 480 aa, Cytophaga sp.
NGTMMQYFEWYVPNDGQQWNRLRTDAPYLSSVGITAVWTPPAYKGTSQADVGYGPYDLYDLGEFNQKGTVRTKYGTKGELKSAVNTLHSNGIQVYGDVVMNHKAGADYTENVTAVEVNPSNRYQETSGEYNIQAWTGFNFPGRGTTYSNWKWQWFHFDGTDWDQSRSLSRIFKFDGKAWDWEVSSENGNYDYLMYADYDYDHPDVVNEMKKWGVWYANEVGLDGYRLDAVKHIKFQFLKDWVDNARAATGKEMFTVGEYWQNDLGALNNYLAKVNYNQSLFDAPLHYNFYAASGGGGYYDMRNILNNTLVASNPTKAVTLVENHDTQPGQSLESTVQPWFKPLAYAFILTRSGGYPSVFYGDMYGTKGTTTREIPALKSKIEPLLKARKDYAYGTQRDYIDNPDVIGWTREGDSTKAKSGLATVITDGPGGSKRMYVGTSNAGEIWYDLTGNRTDKITIGSDGYATFPVNGGSVSVWVQQ

SEQ ID NO: 37483 - protein, 480 aa, Cytophaga sp.
NGTMMQYFEWYVPNDGQQWNRLRIDAPYLSSVGITAVWTPPAYKGTSQADVGYGPYDLYDLGEFNQKGTVRTKYGTKGELKSAVNTLHSNGIQVYGDVVMNHKAGADYTENVTAVEVNPSNRYQETSGEYNIQAWTGFNFPGRGTTYSNWKWQWFHFDGTDWDQSRSLSRIFKFDGKAWDWEVSSENGNYDYLMYADYDYDHPDVVNEMKKWGVWYANEVGLDGYRLDAVKHIKFQFLKDWVDNARAATGKEMFTVGEYWQNDLGALNNYLAKVNYNQSLFDAPLHYNFYAASTGGGYYDMRNILNNTLVASNPTKAVTLVENHDTQPGQSLESTVQPWFKPLAYAFILTRSGGYPSVFYGDMYGTKGTTTREIPALKSKIEPLLKARKDYAYGTQRDYIDNPDVIGWTREGDSTKAKSGLATVITDGPGGSKRMYVGTSNAGEIWYDLTGNRTDKITIGSDGYATFPVNGGSVSVWVQQ

SEQ ID NO: 37484 - protein, 480 aa, Cytophaga sp.
NGTMMQYFEWYVPNDGQQWNRLRTDAPYLSSVGITAVWTPPAYKGTSQADVGYGPYDLYDLGEFNQKGTVRTKYGTKGELKSAVNTLHSNGIQVYGDVVMNHKAGADYTENVTAVEVNPSNRYQETSGEYNIQAWTGFNFPGRGTTYSNWKWQWFHFDGTDWDQSRSLSRIFKFDGKAWDWEVSSENGNYDYLMYADYDYDHPDVVNEMKKWGVWYANEVGLDGYRLDAVKHIKFQFLKDWVDNARAATGKEMFTVGEYWQNDLGALNNYLAKVNYNQSLFDAPLHYNFYAASTGGGYYDMRNILNNTLVASNPTKAVTLVENHDTQPGQSLESTVQPWFKPLAYAFILTRSGGYPSVFYGDMYGTKGTTTREIPALKSKIEPLLKARKDYAYGTQRDYIDNPDVIGWTREGDSTKAKSGLATVITDGPGGSKRMYVGTCNAGEIWYDLTGNRTDKITIGSDGYATFPVNGGSVSVWVQQ

SEQ ID NO: 37485 - protein, 480 aa, Cytophaga sp.
NGTMMQYFEWYVPNDGQQWNRLRTDAPYLSSVGITAVWTPPAYKGTSQADVGYGPYDLYDLGEFNQKGTVRTKYGTKGELKSAVRTLHSNGIQVYGDVVMNHKAGADYTENVTAVEVNPSNRYQETSGEYNIQAWTGFNFPGRGTTYSNWKWQWFHFDGTDWDQSRSLSRIFKFDGKAWDWEVSSENGNYDYLMYADYDYDHPDVVNEMKKWGVWYANEVGLDGYRLDAVKHIKFQFLKDWVDNARAATGKEMFTVGEYWQNDLGALNNYLAKVNYNQSLFDAPLHYNFYAASTGGGYYDMRNILNNTLVASNPTKAVTLVENHDTQPGQSLESTVQPWFKPLAYAFILTRSGGYPSVFYGDMYGTKGTTTREIPALKSKIEPLLKARKDYAYGTQRDYIDNPDVIGWTREGDSTKAKSGLATVITDGPGGSKRMYVGTSNAGEIWYDLTGNRTDKITIGSDGYATFPVNGGSVSVWVQQ

SEQ ID NO: 37486 - protein, 480 aa, Cytophaga sp.
NGTMMQYFEWYVPNDGQQWNRLRTDAPYLSSVGITAVWTPPAYKGTSQADVGYGPYDLYDLGEFNQKGTVRTKYGTKGELKSAVNTLHSNGIQVYGDVVMNHKAGADYTENVTAVEVNPSNRYQETSGEYNIQAWTGFNFPGRGTTYSNWKWQWFHFDGTDWDQSRSLSRIFKFDGKAWDWEVSSENGNYDYLMYADYDYDHPDVVNEMKKWGVWYANEVGLDGYRLDAVKHIKFQFLKDWVDNARAATGKEMFTVGEYWQNDLGALNNYLAKVNYNQSLFDAPLHYNFYAASTGGGYYDMRNILNNTLVASNPTKAVTLVENHDTQPGQSLESTVQPWFKPLAYAFILTRSGGYPSVFYGDMYGTKGTTTREIPWLKSKIEPLLKARKDYAYGTQRDYIDNPDVIGWTREGDSTKAKSGLATVITDGPGGSKRMYVGTSNAGEIWYDLTGNRTDKITIGSDGYATFPVNGGSVSVWVQQ

SEQ ID NO: 37487 - protein, 480 aa, Cytophaga sp.
NGTMMQYFEWYVPNDGQQWNRLRTDAPYLSSVGITAVWTPPAYKGTSQADVGYGPYDLYDLGEFNQKGTVRTKYGTKGELKSAVNTLHSNGIQVYGDVVMNHKAGADYTENVTAVEVNPSNRYQETSGEYNIQAWTGFNFPGRGTTYSNWKWQWFHFDGTDWDQSRSLSRIFKFDGKAWDWEVSSENGNYDYLMYADYDYDHPDVVNEMKKWGVWYANEVGLDGYRLDAVKHIKFQFLKDWVDNARAATGKEMFTVGEYWQNDLGALNNYLAKVNYNQSLFDAPLHYNFYAASTGGGYYDMRNILNNTLVASLPTKAVTLVENHDTQPGQSLESTVQPWFKPLAYAFILTRSGGYPSVFYGDMYGTKGTTTREIPALKSKIEPLLKARKDYAYGTQRDYIDNPDVIGWTREGDSTKAKSGLATVITDGPGGSKRMYVGTSNAGEIWYDLTGNRTDKITIGSDGYATFPVNGGSVSVWVQQ

SEQ ID NO: 37488 - protein, 480 aa, Cytophaga sp.
NGTMMQYFEWYVPNDGQQWNRLRTDAPYLSSVGITAVWTPPAYKGTSQADVGYGPYDLYDLGEFNQKGTVRTKYGTKGELKSAVNTLHSNGIQVYGDVVMNHKAGADYTENVTAVEVNPSNRYQETSGEYNIQAWTGFNFPGRGTTYSNWKWQWFHFDGTDWDQSRSLSRIFKFDGKAWDWEVSSENGNYDYLMYADYDYDHPDVVNEMKKWGVWYANEVMLDGYRLDAVKHIKFQFLKDWVDNARAATGKEMFTVGEYWQNDLGALNNYLAKVNYNQSLFDAPLHYNFYAASTGGGYYDMRNILNNTLVASNPTKAVTLVENHDTQPGQSLESTVQPWFKPLAYAFILTRSGGYPSVFYGDMYGTKGTTTREIPALKSKIEPLLKARKDYAYGTQRDYIDNPDVIGWTREGDSTKAKSGLATVITDGPGGSKRMYVGTSNAGEIWYDLTGNRTDKITIGSDGYATFPVNGGSVSVWVQQ

SEQ ID NO: 37489 - protein, 480 aa, Cytophaga sp.
NGTMMQYFEWYVPNDGQQWNRLRTDAPYLSSVGITAVWTPPAYKGTSQADVGYGPYDLYDLGEFNQKGTVRTKYGTKGELKSAVNTLHSNGIQVYGDVVMNHKAGADYTENVTAVEVNPSNRYQETSGEYNIQAWTGFNFPGRGTTYSNWKWQWFHFDGTDWDQSRSLSRIFKFDGKAWDWEVSSENGNYDYLMYADYDYDHPDVVNEMKKWGVWYANEVGLDGYRLDAVKHIKFQFLKDWVDNARAATGKEMFTVGEYWQNDLGALNNYLAKVNYNQSLFDAPLHYNFYAASTGGGYYDMRNILNNTLVASNPTKAVTLVENHDTQPGQSLESTVQPWFKPLAYAFILTRQGGYPSVFYGDMYGTKGTTTREIPALKSKIEPLLKARKDYAYGTQRDYIDNPDVIGWTREGDSTKAKSGLATVITDGPGGSKRMYVGTSNAGEIWYDLTGNRTDKITIGSDGYATFPVNGGSVSVWVQQ

SEQ ID NO: 37490 - protein, 480 aa, Cytophaga sp.
NGTMMQYFEWYVPNDGQQWNRLRTDAPYLSSVGITAVWTPPAYKGTSQADVGYGPYDLYDLGEFNQKGTVRTKYGTKGELKSAVNTLHSNGIQVYGDVVMNHKAGADYTENVTAVEVNPSNRYQETSGEYNIMAWTGFNFPGRGTTYSNWKWQWFHFDGTDWDQSRSLSRIFKFDGKAWDWEVSSENGNYDYLMYADYDYDHPDVVNEMKKWGVWYANEVGLDGYRLDAVKHIKFQFLKDWVDNARAATGKEMFTVGEYWQNDLGALNNYLAKVNYNQSLFDAPLHYNFYAASTGGGYYDMRNILNNTLVASNPTKAVTLVENHDTQPGQSLESTVQPWFKPLAYAFILTRSGGYPSVFYGDMYGTKGTTTREIPALKSKIEPLLKARKDYAYGTQRDYIDNPDVIGWTREGDSTKAKSGLATVITDGPGGSKRMYVGTSNAGEIWYDLTGNRTDKITIGSDGYATFPVNGGSVSVWVQQ

SEQ ID NO: 37491 - protein, 480 aa, Cytophaga sp.
NGTMMQYFEWYVPNDGQQWNRLRTDAPYLSSVGITAVWTPPAYKGTSQADVGYGPYDLYDLGEFNQKGTVRTKYGTKGELKSAVNTLHSNGIQVYGDVVMNHKAGADYTENVTAVEVNPGNRYQETSGEYNIQAWTGFNFPGRGTTYSNWKWQWFHFDGTDWDQSRSLSRIFKFDGKAWDWEVSSENGNYDYLMYADYDYDHPDVVNEMKKWGVWYANEVGLDGYRLDAVKHIKFQFLKDWVDNARAATGKEMFTVGEYWQNDLGALNNYLAKVNYNQSLFDAPLHYNFYAASTGGGYYDMRNILNNTLVASNPTKAVTLVENHDTQPGQSLESTVQPWFKPLAYAFILTRSGGYPSVFYGDMYGTKGTTTREIPALKSKIEPLLKARKDYAYGTQRDYIDNPDVIGWTREGDSTKAKSGLATVITDGPGGSKRMYVGTSNAGEIWYDLTGNRTDKITIGSDGYATFPVNGGSVSVWVQQ

SEQ ID NO: 37492 - protein, 480 aa, Cytophaga sp.
NGTMMQYFEWYVPNDGQQWNRLRTDAPYLSSVGITAVWTPPAYKGTSQADVGYGPYDLYDLGEFNQKGTVRTKYGTKGELKSAVNTLHSNGIQVYGDVVMNHKAGADYTENVTAVEVNPSNRTQETSGEYNIQAWTGFNFPGRGTTYSNWKWQWFHFDGTDWDQSRSLSRIFKFDGKAWDWEVSSENGNYDYLMYADYDYDHPDVVNEMKKWGVWYANEVGLDGYRLDAVKHIKFQFLKDWVDNARAATGKEMFTVGEYWQNDLGALNNYLAKVNYNQSLFDAPLHYNFYAASTGGGYYDMRNILNNTLVASNPTKAVTLVENHDTQPGQSLESTVQPWFKPLAYAFILTRSGGYPSVFYGDMYGTKGTTTREIPALKSKIEPLLKARKDYAYGTQRDYIDNPDVIGWTREGDSTKAKSGLATVITDGPGGSKRMYVGTSNAGEIWYDLTGNRTDKITIGSDGYATFPVNGGSVSVWVQQ

SEQ ID NO: 37493 - protein, 480 aa, Cytophaga sp.
NGTMMQYFEWYVPNDGQQWNRLRQDAPYLSSVGITAVWTPPAYKGTSQADVGYGPYDLYDLGEFNQKGTVRTKYGTKGELKSAVNTLHSNGIQVYGDVVMNHKAGADYTENVTAVEVNPSNRYQETSGEYNIQAWTGFNFPGRGTTYSNWKWQWFHFDGTDWDQSRSLSRIFKFDGKAWDWEVSSENGNYDYLMYADYDYDHPDVVNEMKKWGVWYANEVGLDGYRLDAVKHIKFQFLKDWVDNARAATGKEMFTVGEYWQNDLGALNNYLAKVNYNQSLFDAPLHYNFYAASTGGGYYDMRNILNNTLVASNPTKAVTLVENHDTQPGQSLESTVQPWFKPLAYAFILTRSGGYPSVFYGDMYGTKGTTTREIPALKSKIEPLLKARKDYAYGTQRDYIDNPDVIGWTREGDSTKAKSGLATVITDGPGGSKRMYVGTSNAGEIWYDLTGNRTDKITIGSDGYATFPVNGGSVSVWVQQ

SEQ ID NO: 37494 - protein, 480 aa, Cytophaga sp.
NGTMMQYFEWYVPNDGQQWNRLRTDAPYLSSVGITAVWTPPAYKGTSQADVGYGPYDLYDLGEFNQKGTVRTKYGTKGELKSAVNTLHSNGIQVYGDVVMNHKAGADYTENVTAVEVNPSNRYQETSGEYNIQAWTGFNFPGRGTTYSNWKWQWFHFDGTDWDQSRSLSRIFKFDGKAWDWEVSSENGNYDYLMYADYDYDHPDVVNEMKKWGVWYANEVGLDGYRLDAVKHIKFQFLKDWVDNARAATGKEMFTVGEYWQNDLGALNNYLAKVNYNQSLFDAPLHYNFYAASTGGGMYDMRNILNNTLVASNPTKAVTLVENHDTQPGQSLESTVQPWFKPLAYAFILTRSGGYPSVFYGDMYGTKGTTTREIPALKSKIEPLLKARKDYAYGTQRDYIDNPDVIGWTREGDSTKAKSGLATVITDGPGGSKRMYVGTSNAGEIWYDLTGNRTDKITIGSDGYATFPVNGGSVSVWVQQ

SEQ ID NO: 37495 - protein, 480 aa, Cytophaga sp.
NGTMMQYFEWYVPNDGQQWNRLRTDAPYLSSVGITAVWTPPAYKGTSQADVGYGPYDLYDLGEFNQKGTVRTKYGTKGELKSAVNTLHSNGIQVYGDVVMNHKAGADYTENVTAVEVNPSNRYQETSGEYNIQAWTGFNFPGRGTTYSNWKWQWFHFDGTDWDQSRSLSRIFKFDGKAWDWEVSSENGNYDYLMYADYDYDHPDVVNEMKKWGVWYANEVGLDGYRLDAVKHIKFQFLKDWVDNARAATGKEMFTVGEYWQNDLGALNNYLAKVNYNQSLFDAPLHYNFYAASTGGGYYDMRNILNNTLVASNPTKAVTLVENHDTQPGQSLESTVQPWFKPLAYAFILTRSGGYPSVFYGDMYGTKGTTTREIPALKSKIEPLLKARKDYAYGTQRDYIDNPDVIGWTREGDSTKAKSGLATVITDGPGGSKRMYVGTSNAGEIWYDLTGNRTDKITIGSDGYATFLVNGGSVSVWVQQ

SEQ ID NO: 37496 - protein, 480 aa, Cytophaga sp.
NGTMMQYFEWYVPNDGQQWNRLRTDAPYLSSVGITAVWTPPAYKGTSQADVGYGPYDLYDLGEFNQKGTVRTKYGTKGELKSAVNTLHSNGIQVYGDVVMNHKAGADYTENVTAVEVNPSNRYQETSGEYNIQAWTGFNFPGRGTTYSNWKWQWFHFDGTDWDQSRSLSRIFKFDGKAWDWEVSSENGNYDYLMYADYDYDHPDVVNEMKKWGVWYANEVGLDGYRLDAVKHIKFQFLKDWVDNARAATGKEMFTVGEYWQNDLGALNNYLAKVNYNQSLFDAPLHYNFYAASTGGGYYDMRNILNNTLVASNPTKAVTLVENHDTQPGQSLESTVQPWFKPLAYAFILTRSGGYPSVFYGDMYGTKGTTTREIPALKSKIEPLLKARKDYAYGTQRDYIDNPDVIGWTREGDSTKAKSGLATVITDGPGGSKRMYVGTSNAGEIWYDLTGNRTDKIPIGSDGYATFPVNGGSVSVWVQQ

SEQ ID NO: 37497 - protein, 480 aa, Cytophaga sp.
NGTMMQYFEWYVPNDGQQWQRLRTDAPYLSSVGITAVWTPPAYKGTSQADVGYGPYDLYDLGEFNQKGTVRTKYGTKGELKSAVNTLHSNGIQVYGDVVMNHKAGADYTENVTAVEVNPSNRYQETSGEYNIQAWTGFNFPGRGTTYSNWKWQWFHFDGTDWDQSRSLSRIFKFDGKAWDWEVSSENGNYDYLMYADYDYDHPDVVNEMKKWGVWYANEVGLDGYRLDAVKHIKFQFLKDWVDNARAATGKEMFTVGEYWQNDLGALNNYLAKVNYNQSLFDAPLHYNFYAASTGGGYYDMRNILNNTLVASNPTKAVTLVENHDTQPGQSLESTVQPWFKPLAYAFILTRSGGYPSVFYGDMYGTKGTTTREIPALKSKIEPLLKARKDYAYGTQRDYIDNPDVIGWTREGDSTKAKSGLATVITDGPGGSKRMYVGTSNAGEIWYDLTGNRTDKITIGSDGYATFPVNGGSVSVWVQQ

SEQ ID NO: 37498 - protein, 480 aa, Cytophaga sp.
NGTMMQYFEWYVPNDGQQWNRLRTDAPYLSSVGITAVWTPPAYKGTSQADVGYGPYDLYDLGEFNQKGTVRTKYGTKGELKSAVNTLHSNGIQVYGDVVMNHKAGADYTENVTAVEVNPSNRYQETSGEYNIQAWTGFNFPGRGTTYSNWKWQWFHFDGTDWDQSRSLSRIFKFDGKAWDWEVSSENGNYDYLMYADYDYDHPDVVNEMKKWGVWYANEVGLDGYRLDAVKHIKFQFLKDWVDNARAATGKEMFTVGEYWQNDLGALNNYLAKVNYNQSLFDAPLHYNFYAASTGGGYYDMRNILNNTLVASNPTKAVTLVENHDTQPGQSLESTVQPWFKPLAYAFILTRNGGYPSVFYGDMYGTKGTTTREIPALKSKIEPLLKARKDYAYGTQRDYIDNPDVIGWTREGDSTKAKSGLATVITDGPGGSKRMYVGTSNAGEIWYDLTGNRTDKITIGSDGYATFPVNGGSVSVWVQQ

SEQ ID NO: 37499 - protein, 480 aa, Cytophaga sp.
NGTMMQYFEWYVPNDGQQWNRLRTDAPYLSSVGITAVWTPPAYKGTSQADVGYGPYDLYDLGEFNQKGTVRTKYGTKGELKSAVNTLHSNGIQVYGDVVMNHKAGADYTENVTAVEVNPSNRYQETSGEYNIQAWTGFNFPGRGTTYSNWKWQWFHFDGTDWDQSRSLSRIFKFLGKAWDWEVSSENGNYDYLMYADYDYDHPDVVNEMKKWGVWYANEVGLDGYRLDAVKHIKFQFLKDWVDNARAATGKEMFTVGEYWQNDLGALNNYLAKVNYNQSLFDAPLHYNFYAASTGGGYYDMRNILNNTLVASNPTKAVTLVENHDTQPGQSLESTVQPWFKPLAYAFILTRSGGYPSVFYGDMYGTKGTTTREIPALKSKIEPLLKARKDYAYGTQRDYIDNPDVIGWTREGDSTKAKSGLATVITDGPGGSKRMYVGTSNAGEIWYDLTGNRTDKITIGSDGYATFPVNGGSVSVWVQQ

SEQ ID NO: 37500 - protein, 480 aa, Cytophaga sp.
NGTMMQYFEWYVPNDGQQWNRLRTDAPYLSSVGITAVWTPPAYKGTSQADVGYGPYDLYDLGEFNQKGTVRTKYGTKGELKSAVNTLHSNGIQVYGDVVMNHKAGADYTENVTAVEVNPSNRYQETSGEYNIQAWTGFNFPGRGTTYSNWKWQWFHFDGTDWDQSRSLSRIFKFDGKAWDWEVSSENGNYDYLMYADYDYDHPDVVNEMKKWGVWYANEVGLDGYRLDAVKHIKFQFLKDWVDNARAATGKEMFTVGEYWQNGLGALNNYLAKVNYNQSLFDAPLHYNFYAASTGGGYYDMRNILNNTLVASNPTKAVTLVENHDTQPGQSLESTVQPWFKPLAYAFILTRSGGYPSVFYGDMYGTKGTTTREIPALKSKIEPLLKARKDYAYGTQRDYIDNPDVIGWTREGDSTKAKSGLATVITDGPGGSKRMYVGTSNAGEIWYDLTGNRTDKITIGSDGYATFPVNGGSVSVWVQQ

SEQ ID NO: 37501 - protein, 480 aa, Cytophaga sp.
NGTMMQYFEWYVPNDGQQWNRLRTDAPYLSSVGITAVWTPPAYKGTSQADVGYGPYDLYDLGEFNQKGTVRTKYGTKGELKSAVNTLHSNGIQVYGDVVMNHKAGADYTENVTAVEVNPSNRYQETSGEYNIQAWTGFNFPGRGTTYSNWKWQWFHFDGTDWDQSRSLSRIFKFDGKAWDWEVSSENGNYDYLMYADYDYDHPDVVNEMKKWGVWYANEVGLDGYRLDAVKHIKFQFLKDWVDNARAATGKEMFTVGEYWQNDLGALNNYLAKVNYNQSLFDAPLHYNFYAASTGGGYYDMRNILNNTLVASMPTKAVTLVENHDTQPGQSLESTVQPWFKPLAYAFILTRSGGYPSVFYGDMYGTKGTTTREIPALKSKIEPLLKARKDYAYGTQRDYIDNPDVIGWTREGDSTKAKSGLATVITDGPGGSKRMYVGTSNAGEIWYDLTGNRTDKITIGSDGYATFPVNGGSVSVWVQQ

SEQ ID NO: 37502 - protein, 480 aa, Cytophaga sp.
NGTMMQYFEWYVPNDGQQWNRLRTDAPYLSSVGITAVWTPPAYKGTSQADVGYGPYDLYDLGEFNQKGTVRTKYGTKGELKSAVNTLHSNGIQVYGDVVMNHKAGADYTENVTAVEVNPSNRYQETSGEYNIQAWTGFNFPGRGTTYSNWKWQWFHFDGTDWDQSRSLSRIFKFDGKAWDWEVSSENGNYDYLMYADYDYDHPDVVNEMKKWGVWYANEVGLDGYRLDAVKHIKFQFLKDWVDNARAATGKEMFTVGEYWQNDLGALNNYLAKVNYNQSLFDAPLHYNFYAASTEGGYYDMRNILNNTLVASNPTKAVTLVENHDTQPGQSLESTVQPWFKPLAYAFILTRSGGYPSVFYGDMYGTKGTTTREIPALKSKIEPLLKARKDYAYGTQRDYIDNPDVIGWTREGDSTKAKSGLATVITDGPGGSKRMYVGTSNAGEIWYDLTGNRTDKITIGSDGYATFPVNGGSVSVWVQQ

SEQ ID NO: 37503 - protein, 480 aa, Cytophaga sp.
NGTMMQYFEWYVPNDGQQWNRLRTDAPYLSSVGITAVWTPPAYKGTSQADVGYGPYDLYDLGEFNQKGTVRTKYGTKGELKSAVNTLHSNGIQVYGDVVMNHKAGADYTENVTAVEVNPSNRYQETSGEYNIQAWTGFNFPGRGTTYSNWKWQWFHFDGTDWDQSRSLSRIFKFDGKAWDWEVSSENGNYDYLMYADYDYDHPDVVNEMKKWGVWYANEVGLDGYRLDAVKHIKFQFLKDWVDNARAATGKEMFTVGEYWQNDLGALNNYLAKVNYNQSLFDAPLHYNFYAASTGGGYYDMRNILNNTLVASNPPKAVTLVENHDTQPGQSLESTVQPWFKPLAYAFILTRSGGYPSVFYGDMYGTKGTTTREIPALKSKIEPLLKARKDYAYGTQRDYIDNPDVIGWTREGDSTKAKSGLATVITDGPGGSKRMYVGTSNAGEIWYDLTGNRTDKITIGSDGYATFPVNGGSVSVWVQQ

SEQ ID NO: 37504 - protein, 480 aa, Cytophaga sp.
NGTMMQYFEWYVPNDGQQWNRLRTDAPYLSSVGITAVWTPPAYKGTSQADVGYGPYDLYDLGEFNQKGTVRTKYGTKGELKSAVNTLHSNGIQVYGDVVMNHKAGADYTENVTAVEVNPSNRYQETSGEYNIQAWTGFNFPGRGTTYSNWKWQWFHFDGTDWDQSRSLSRIFKFDGKAWDWEVSSENGNYDYLMYADYDYDHPDVVNEMKKWGVWYANEVGLDGYRLDAVKHIKFQFLKDWVDNARAATGKEMFTVGEYWQNDLGALNNYLAKVNYNQSLFDAPLHYNFYAASTGGGYYDMRNILNNTLVALNPTKAVTLVENHDTQPGQSLESTVQPWFKPLAYAFILTRSGGYPSVFYGDMYGTKGTTTREIPALKSKIEPLLKARKDYAYGTQRDYIDNPDVIGWTREGDSTKAKSGLATVITDGPGGSKRMYVGTSNAGEIWYDLTGNRTDKITIGSDGYATFPVNGGSVSVWVQQ

SEQ ID NO: 37505 - protein, 480 aa, Cytophaga sp.
NGTMMQYFEWYVPNDGQQWNRLRTDAPYLSSVGITAVWTPPAYKGTSQADVGYGPYDLYDLGEFNQKGTVRTKYGTKGELKSAVNTLHSNGIQVYGDVVMNHKAGADYTENVTAVEVNPSNRYQETSGEYNIQAWTGFNFPGRGTTYSNWKWQWFHFDGTDWDQSRSLSRIFKFDGKAWDWEVSSENGNYDYLMYADYDYDHPDVVNEMKKWGVWYANEVGLDGYRLDAVKHIKFQFLKDWVDNARAATGKEMFTVGEYWQNDLGALNNYLAKVNYNQSLFDAPLHYNFYAASTGGGYYDMRNILNFTLVASNPTKAVTLVENHDTQPGQSLESTVQPWFKPLAYAFILTRSGGYPSVFYGDMYGTKGTTTREIPALKSKIEPLLKARKDYAYGTQRDYIDNPDVIGWTREGDSTKAKSGLATVITDGPGGSKRMYVGTSNAGEIWYDLTGNRTDKITIGSDGYATFPVNGGSVSVWVQQ

SEQ ID NO: 37506 - protein, 480 aa, Cytophaga sp.
NGTMMQYFEWYVPNDGQQWNRLRTDAPYLSSVGITAVWTPPAYKGTSQADVGYGPYDLYDLGEFNQKGTVRTKYGTKGELKSAVNTLHSNGIQVYGDVVMNHKAGADYTENVTAVEVNPSNRYQETSGEYNIQAWTGFNFPGRGTTYSNWKWQWFHFDGTDWDQSRSLSRIFKFDGKAWDWEVSSENGNYDYLMYADYDYDHPDVVNEMKKWGVWYANEVGLDGYRLDAVKHIKFQFLKDWVDNARAATGKEMFTVGEYWQNDYGALNNYLAKVNYNQSLFDAPLHYNFYAASTGGGYYDMRNILNNTLVASNPTKAVTLVENHDTQPGQSLESTVQPWFKPLAYAFILTRSGGYPSVFYGDMYGTKGTTTREIPALKSKIEPLLKARKDYAYGTQRDYIDNPDVIGWTREGDSTKAKSGLATVITDGPGGSKRMYVGTSNAGEIWYDLTGNRTDKITIGSDGYATFPVNGGSVSVWVQQ

SEQ ID NO: 37507 - protein, 480 aa, Cytophaga sp.
NGTMMQYFEWYVPNDGQQWNRLRTDAPYLSSVGITAVWTPPAYKGTSQADVGYGPYDLYDLGEFNQKGTVRTKYGTKGELKSAVNTLHSNGIQVYGDVVMNHKAGADYTENVTAVEVNPSNRYQETSGEYNIQAWTGFNFPGRGTTYSNWKWQWFHFDGTDWDQSRSLSRIFKFDGKAWDWEVSSENGNYDYLMYADYDYDHPDVVNEMKKWGVWYANEVGLDGYRLDAVKHIKFQFLKDWVDNARAATGKEMFTVGEYWQNDLGALNNYLAKVNYNQSLFDAPLHYNFYAASTGGGYYDMRGILNNTLVASNPTKAVTLVENHDTQPGQSLESTVQPWFKPLAYAFILTRSGGYPSVFYGDMYGTKGTTTREIPALKSKIEPLLKARKDYAYGTQRDYIDNPDVIGWTREGDSTKAKSGLATVITDGPGGSKRMYVGTSNAGEIWYDLTGNRTDKITIGSDGYATFPVNGGSVSVWVQQ

SEQ ID NO: 37508 - protein, 480 aa, Cytophaga sp.
NGTMMQYFEWYVPNDGQQWNRLRTDAPYLSSVGITAVWTPPAYKGTSQADVGYGPYDLYDLGEFNQKGTVRTKYGTKGELKSAVNKLHSNGIQVYGDVVMNHKAGADYTENVTAVEVNPSNRYQETSGEYNIQAWTGFNFPGRGTTYSNWKWQWFHFDGTDWDQSRSLSRIFKFDGKAWDWEVSSENGNYDYLMYADYDYDHPDVVNEMKKWGVWYANEVGLDGYRLDAVKHIKFQFLKDWVDNARAATGKEMFTVGEYWQNDLGALNNYLAKVNYNQSLFDAPLHYNFYAASTGGGYYDMRNILNNTLVASNPTKAVTLVENHDTQPGQSLESTVQPWFKPLAYAFILTRSGGYPSVFYGDMYGTKGTTTREIPALKSKIEPLLKARKDYAYGTQRDYIDNPDVIGWTREGDSTKAKSGLATVITDGPGGSKRMYVGTSNAGEIWYDLTGNRTDKITIGSDGYATFPVNGGSVSVWVQQ

SEQ ID NO: 37509 - protein, 480 aa, Cytophaga sp.
NGTMMQYFEWYVPNDGQQWNRLRTDAPYLSSVGITAVWTPPAYKGTSQEDVGYGPYDLYDLGEFNQKGTVRTKYGTKGELKSAVNTLHSNGIQVYGDVVMNHKAGADYTENVTAVEVNPSNRYQETSGEYNIQAWTGFNFPGRGTTYSNWKWQWFHFDGTDWDQSRSLSRIFKFDGKAWDWEVSSENGNYDYLMYADYDYDHPDVVNEMKKWGVWYANEVGLDGYRLDAVKHIKFQFLKDWVDNARAATGKEMFTVGEYWQNDLGALNNYLAKVNYNQSLFDAPLHYNFYAASTGGGYYDMRNILNNTLVASNPTKAVTLVENHDTQPGQSLESTVQPWFKPLAYAFILTRSGGYPSVFYGDMYGTKGTTTREIPALKSKIEPLLKARKDYAYGTQRDYIDNPDVIGWTREGDSTKAKSGLATVITDGPGGSKRMYVGTSNAGEIWYDLTGNRTDKITIGSDGYATFPVNGGSVSVWVQQ

SEQ ID NO: 37510 - protein, 480 aa, Cytophaga sp.
NGTMMQYFEWYVPNDGQQWHRLRTDAPYLSSVGITAVWTPPAYKGTSQADVGYGPYDLYDLGEFNQKGTVRTKYGTKGELKSAVNTLHSNGIQVYGDVVMNHKAGADYTENVTAVEVNPSNRYQETSGEYNIQAWTGFNFPGRGTTYSNWKWQWFHFDGTDWDQSRSLSRIFKFDGKAWDWEVSSENGNYDYLMYADYDYDHPDVVNEMKKWGVWYANEVGLDGYRLDAVKHIKFQFLKDWVDNARAATGKEMFTVGEYWQNDLGALNNYLAKVNYNQSLFDAPLHYNFYAASTGGGYYDMRNILNNTLVASNPTKAVTLVENHDTQPGQSLESTVQPWFKPLAYAFILTRSGGYPSVFYGDMYGTKGTTTREIPALKSKIEPLLKARKDYAYGTQRDYIDNPDVIGWTREGDSTKAKSGLATVITDGPGGSKRMYVGTSNAGEIWYDLTGNRTDKITIGSDGYATFPVNGGSVSVWVQQ

SEQ ID NO: 37511 - protein, 480 aa, Cytophaga sp.
NGTMMQYFEWYVPNDGQQWNRLRTDAPYLSSVGITAVWTPPAYKGTSQADVGYGPYDLYDLGEFNQKGTVRTKYGTKGELKSAVNTLHSNGIQVYGDVVMNHKAGADYTENVTAVEVNPSNRKQETSGEYNIQAWTGFNFPGRGTTYSNWKWQWFHFDGTDWDQSRSLSRIFKFDGKAWDWEVSSENGNYDYLMYADYDYDHPDVVNEMKKWGVWYANEVGLDGYRLDAVKHIKFQFLKDWVDNARAATGKEMFTVGEYWQNDLGALNNYLAKVNYNQSLFDAPLHYNFYAASTGGGYYDMRNILNNTLVASNPTKAVTLVENHDTQPGQSLESTVQPWFKPLAYAFILTRSGGYPSVFYGDMYGTKGTTTREIPALKSKIEPLLKARKDYAYGTQRDYIDNPDVIGWTREGDSTKAKSGLATVITDGPGGSKRMYVGTSNAGEIWYDLTGNRTDKITIGSDGYATFPVNGGSVSVWVQQ

SEQ ID NO: 37512 - protein, 480 aa, Cytophaga sp.
NGTMMQYFEWYVPNDGQQWNRLRTDAPYLSSVGITAVWTPPAYKGTSQADVGYGPYDLYDLGEFNQKGTVRTKYGTKGELKSAVNTLHSNGIQVYGDVVMNHKAGADVTENVTAVEVNPSNRYQETSGEYNIQAWTGFNFPGRGTTYSNWKWQWFHFDGTDWDQSRSLSRIFKFDGKAWDWEVSSENGNYDYLMYADYDYDHPDVVNEMKKWGVWYANEVGLDGYRLDAVKHIKFQFLKDWVDNARAATGKEMFTVGEYWQNDLGALNNYLAKVNYNQSLFDAPLHYNFYAASTGGGYYDMRNILNNTLVASNPTKAVTLVENHDTQPGQSLESTVQPWFKPLAYAFILTRSGGYPSVFYGDMYGTKGTTTREIPALKSKIEPLLKARKDYAYGTQRDYIDNPDVIGWTREGDSTKAKSGLATVITDGPGGSKRMYVGTSNAGEIWYDLTGNRTDKITIGSDGYATFPVNGGSVSVWVQQ

SEQ ID NO: 37513 - protein, 480 aa, Cytophaga sp.
NGTMMQYFEWYVPNDGQQWNRLRTDAPYLSSVGITAVWTPPAYKGTSQADVGYGPYDLYDLGEFNQKGTVRTKYGTKGELKSAVNTLHSNGIQVYGDVVMNHKAGADYTENVTAVEVNPSNRYQETSGEYNIQAWTGFNFPGRGTTYSSWKWQWFHFDGTDWDQSRSLSRIFKFDGKAWDWEVSSENGNYDYLMYADYDYDHPDVVNEMKKWGVWYANEVGLDGYRLDAVKHIKFQFLKDWVDNARAATGKEMFTVGEYWQNDLGALNNYLAKVNYNQSLFDAPLHYNFYAASTGGGYYDMRNILNNTLVASNPTKAVTLVENHDTQPGQSLESTVQPWFKPLAYAFILTRSGGYPSVFYGDMYGTKGTTTREIPALKSKIEPLLKARKDYAYGTQRDYIDNPDVIGWTREGDSTKAKSGLATVITDGPGGSKRMYVGTSNAGEIWYDLTGNRTDKITIGSDGYATFPVNGGSVSVWVQQ

SEQ ID NO: 37514 - protein, 480 aa, Cytophaga sp.
NGTMMQYFEWYVPNDGQQWNRLRTDAPYLSSVGITAVWTPPAYKGTSQADVGYGPYDLYDLGEFNQKGTVRTKYGTKGELKSAVNTLHSNGIQVYGDVVMNHKAGADYTENVTAVEVNPSNRYQETSGEYNIQAWTGFNFPGRGTTYSNWKWQWFHFDGTDWDQSRSLSRIFKFDGKAWDWEVSSENGNYDYLMYADYDYDHPDVVNEMKKWGVWYANEVGLDGYRLDAVKHIKFQFLKDWVDNARAATGKEMFTVGEYWQNDLGALNNYLAKVNYNQSLFDAPLHYNFYAASTGGGYYDMRNILNNTLVASNPTKAVTLVENHDTQPGQSLESTVQPWFKPLAYAFILTRSGGYPSVFYGDMYGTKGTTTREIPALKSKIEPLLKARKDYAYGTQRDYIDNPDVIGWTREGDSTKAKSGLATVITDGPGGSKRMYVGTSNAGEIWYDLTGNRTDKITIGSDGYATFPVNHGSVSVWVQQ

SEQ ID NO: 37515 - protein, 480 aa, Cytophaga sp.
NGTMMQYFEWYVPNDGQQWNRLRTDAPYLSSVGITAVWTPPAYKGTSQADVGYGPYDLYDLGEFNQKGTVRTKYGTKGELKSAVNTLHSNGIQVYGDVVMNHKAGADYTECVTAVEVNPSNRYQETSGEYNIQAWTGFNFPGRGTTYSNWKWQWFHFDGTDWDQSRSLSRIFKFDGKAWDWEVSSENGNYDYLMYADYDYDHPDVVNEMKKWGVWYANEVGLDGYRLDAVKHIKFQFLKDWVDNARAATGKEMFTVGEYWQNDLGALNNYLAKVNYNQSLFDAPLHYNFYAASTGGGYYDMRNILNNTLVASNPTKAVTLVENHDTQPGQSLESTVQPWFKPLAYAFILTRSGGYPSVFYGDMYGTKGTTTREIPALKSKIEPLLKARKDYAYGTQRDYIDNPDVIGWTREGDSTKAKSGLATVITDGPGGSKRMYVGTSNAGEIWYDLTGNRTDKITIGSDGYATFPVNGGSVSVWVQQ

SEQ ID NO: 37516 - protein, 480 aa, Cytophaga sp.
NGTMMQYFEWYVPNDGQQWNRLRTDAPYLSSVGITAVWTPPAYKGTSQADVGYGPYDLYDLGEFNQKGTVRTKYGTKGELKSAVNTLHSNGIQVYGDVVMNHKAGADYTENVTAVEVNPSNRDQETSGEYNIQAWTGFNFPGRGTTYSNWKWQWFHFDGTDWDQSRSLSRIFKFDGKAWDWEVSSENGNYDYLMYADYDYDHPDVVNEMKKWGVWYANEVGLDGYRLDAVKHIKFQFLKDWVDNARAATGKEMFTVGEYWQNDLGALNNYLAKVNYNQSLFDAPLHYNFYAASTGGGYYDMRNILNNTLVASNPTKAVTLVENHDTQPGQSLESTVQPWFKPLAYAFILTRSGGYPSVFYGDMYGTKGTTTREIPALKSKIEPLLKARKDYAYGTQRDYIDNPDVIGWTREGDSTKAKSGLATVITDGPGGSKRMYVGTSNAGEIWYDLTGNRTDKITIGSDGYATFPVNGGSVSVWVQQ

SEQ ID NO: 37517 - protein, 480 aa, Cytophaga sp.
NGTMMQYFEWYVPNDGQQWNRLRTDAPYLSSVGITAVWTPPAYKGTSQADVGYGPYDLYDLGEFNQKGTVRTKYGTKGELKSAVNTLHSNGIQVYGDVVMNHKAGADYTENVTAVEVNPSNRYQETSGEYNIQAWTGFNFPGRGTTYSNWKWQWFHFDGTDWDQSRSLSRIFKFDGKAWDWEVSSENGNYDYLMYADYDYDHPDVVNEMKKWGVWYANEVGLDGYRLDAVKHIKFQFLKDWVDNARAATGKEMFTVGEYWQNDLGALNNYLAKVNYNQSLFDAPLHYNFYAASTGGGYYDMRNILNHTLVASNPTKAVTLVENHDTQPGQSLESTVQPWFKPLAYAFILTRSGGYPSVFYGDMYGTKGTTTREIPALKSKIEPLLKARKDYAYGTQRDYIDNPDVIGWTREGDSTKAKSGLATVITDGPGGSKRMYVGTSNAGEIWYDLTGNRTDKITIGSDGYATFPVNGGSVSVWVQQ

SEQ ID NO: 37518 - protein, 480 aa, Cytophaga sp.
NGTMMQYFEWYVPNDGQQWNRLRTDAPYLSSVGITAVWTPPAYKGTSQADVGYGPYDLYDLGEFNQKGTVRTKYGTKGELKSAVNTLHSEGIQVYGDVVMNHKAGADYTENVTAVEVNPSNRYQETSGEYNIQAWTGFNFPGRGTTYSNWKWQWFHFDGTDWDQSRSLSRIFKFDGKAWDWEVSSENGNYDYLMYADYDYDHPDVVNEMKKWGVWYANEVGLDGYRLDAVKHIKFQFLKDWVDNARAATGKEMFTVGEYWQNDLGALNNYLAKVNYNQSLFDAPLHYNFYAASTGGGYYDMRNILNNTLVASNPTKAVTLVENHDTQPGQSLESTVQPWFKPLAYAFILTRSGGYPSVFYGDMYGTKGTTTREIPALKSKIEPLLKARKDYAYGTQRDYIDNPDVIGWTREGDSTKAKSGLATVITDGPGGSKRMYVGTSNAGEIWYDLTGNRTDKITIGSDGYATFPVNGGSVSVWVQQ

SEQ ID NO: 37519 - protein, 480 aa, Cytophaga sp.
NGTMMQYFEWYVPNDGQQWNRLRTDAPYLSSVGITAVWTPPAYKGTSQADVGYGPYDLYDLGEFNQKGTVRTKYGTKGELKSAVNTLHSNGIQVYGDVVMNHKAGADYTENVTAVEVNPSNRYQETSGEYNIQAWTGFNFPGRGSTYSNWKWQWFHFDGTDWDQSRSLSRIFKFDGKAWDWEVSSENGNYDYLMYADYDYDHPDVVNEMKKWGVWYANEVGLDGYRLDAVKHIKFQFLKDWVDNARAATGKEMFTVGEYWQNDLGALNNYLAKVNYNQSLFDAPLHYNFYAASTGGGYYDMRNILNNTLVASNPTKAVTLVENHDTQPGQSLESTVQPWFKPLAYAFILTRSGGYPSVFYGDMYGTKGTTTREIPALKSKIEPLLKARKDYAYGTQRDYIDNPDVIGWTREGDSTKAKSGLATVITDGPGGSKRMYVGTSNAGEIWYDLTGNRTDKITIGSDGYATFPVNGGSVSVWVQQ

SEQ ID NO: 37520 - protein, 480 aa, Cytophaga sp.
NGTMMQYFEWYVPNDGQQWNRLRTDAPYLSSVGITAVWTPPAYKGTSQADVGYGPYDLYDLGEFNQKGTVRTKYGTKGELKSAVNTLHSNGIQVYGDVVMNHKAGADYTENVTAVEVNPSNRYQETSGEYNIQAWTGFNFPGRGTTYSNWKWQWFHFDGTDWDQSRSLSRIFKFDGKAWDWEVSSENGNYDYLMYADYDYDHPDVVNEMKKWGVWYANEVGLDGYRLDAVKHIKFQFLKDWVDNARAATGKEMFTVGEYWQNDLGALNNYLAKVNYNQSLFDAPLHYNFYAASTGGGYYDMRNILNNTLVASNPTKAVTLVENHDTQPGQSLESTVQPWFKPLAYAFILTRSGGYPSVFYGDMYGTKGTTTREIPALKSKIEPLLKARKDYAYGTQRDYIDNPDVIGWTREGDSTKAKSGLATVITDGPGGSKRMYVGTHNAGEIWYDLTGNRTDKITIGSDGYATFPVNGGSVSVWVQQ

SEQ ID NO: 37521 - protein, 480 aa, Cytophaga sp.
NGTMMQYFEWYVPNDGQQWNRLRTDAPYLSSVGITAVWTPPAYKGTSQADVGYGPYDLYDLGEFNQKGTVRTKYGTKGELKSAVNTLHSNGIQVYGDVVMNHKAGADYTEIVTAVEVNPSNRYQETSGEYNIQAWTGFNFPGRGTTYSNWKWQWFHFDGTDWDQSRSLSRIFKFDGKAWDWEVSSENGNYDYLMYADYDYDHPDVVNEMKKWGVWYANEVGLDGYRLDAVKHIKFQFLKDWVDNARAATGKEMFTVGEYWQNDLGALNNYLAKVNYNQSLFDAPLHYNFYAASTGGGYYDMRNILNNTLVASNPTKAVTLVENHDTQPGQSLESTVQPWFKPLAYAFILTRSGGYPSVFYGDMYGTKGTTTREIPALKSKIEPLLKARKDYAYGTQRDYIDNPDVIGWTREGDSTKAKSGLATVITDGPGGSKRMYVGTSNAGEIWYDLTGNRTDKITIGSDGYATFPVNGGSVSVWVQQ

SEQ ID NO: 37522 - protein, 480 aa, Cytophaga sp.
NGTMMQYFEWYVPNDGQQWNRLRTDAPYLSSVGITAVWTPPAYKGTSQADVGYGPYDLYDLGEFNQKGTVRTKYGTKGELKSAVNTLHSNGIQVYGDVVMNHKAGADYTENVTAVEVNPSNRYQETSGEYNIQAWTGFNFPGRGTTYSNWKWQWFHFDGTDWDQSRSLSRIFKFDGKAWDWEVSSENGNYDYLMYADYDYDHPDVVNEMKKWGVWYANEVGLDGYRLDAVKHIKFQFLKDWVDNARAATGKEMFTVGEYWQNDLGALNNYLDKVNYNQSLFDAPLHYNFYAASTGGGYYDMRNILNNTLVASNPTKAVTLVENHDTQPGQSLESTVQPWFKPLAYAFILTRSGGYPSVFYGDMYGTKGTTTREIPALKSKIEPLLKARKDYAYGTQRDYIDNPDVIGWTREGDSTKAKSGLATVITDGPGGSKRMYVGTSNAGEIWYDLTGNRTDKITIGSDGYATFPVNGGSVSVWVQQ

SEQ ID NO: 37523 - protein, 480 aa, Cytophaga sp.
NGTMMQYFEWYVPNDGQQWNRLETDAPYLSSVGITAVWTPPAYKGTSQADVGYGPYDLYDLGEFNQKGTVRTKYGTKGELKSAVNTLHSNGIQVYGDVVMNHKAGADYTENVTAVEVNPSNRYQETSGEYNIQAWTGFNFPGRGTTYSNWKWQWFHFDGTDWDQSRSLSRIFKFDGKAWDWEVSSENGNYDYLMYADYDYDHPDVVNEMKKWGVWYANEVGLDGYRLDAVKHIKFQFLKDWVDNARAATGKEMFTVGEYWQNDLGALNNYLAKVNYNQSLFDAPLHYNFYAASTGGGYYDMRNILNNTLVASNPTKAVTLVENHDTQPGQSLESTVQPWFKPLAYAFILTRSGGYPSVFYGDMYGTKGTTTREIPALKSKIEPLLKARKDYAYGTQRDYIDNPDVIGWTREGDSTKAKSGLATVITDGPGGSKRMYVGTSNAGEIWYDLTGNRTDKITIGSDGYATFPVNGGSVSVWVQQ

SEQ ID NO: 37524 - protein, 480 aa, Cytophaga sp.
NGTMMQYFEWYVPNDGQQWNRLRTDAPYLSSVGITAVWTPPAYKGTSQADVGYGPYDLYDLGEFNQKGTVRTKYGTKGELKSAVNTLHSNGIQVYGDVVMNHKAGADYTENVTAVEVNPSNRYQETSGEYNIQAWTGFNFPGRGTTYSNWKWQWFHFDGTDWDQSRSLSRIFKFDGKAWDWEVSSENGNYDYLMYADYDYDHPDVVNEMKKWGVWYANEVGLDGYRLDAVKHIKFQFLKDWVDNARAATGKEMFTVGEYWQNDLGALNNYLAKVNYNQSLFDAPLHYNFYAASTGGGVYDMRNILNNTLVASNPTKAVTLVENHDTQPGQSLESTVQPWFKPLAYAFILTRSGGYPSVFYGDMYGTKGTTTREIPALKSKIEPLLKARKDYAYGTQRDYIDNPDVIGWTREGDSTKAKSGLATVITDGPGGSKRMYVGTSNAGEIWYDLTGNRTDKITIGSDGYATFPVNGGSVSVWVQQ

SEQ ID NO: 37525 - protein, 480 aa, Cytophaga sp.
NGTMMQYFEWYVPNDGQQWNRLRTDAPYLSSVGITAVWTPPAYKGTSQADVGYGPYDLYDLGEFNQKGTVRTKYGTKGELKSAVNTLHSNGIQVYGDVVMNHKAGADYTENVTAVEVNPSNRYQETSGEYNIQAWTGFNFPGRGTTYSNWKWQWFHFDGTDWDQSRSLSRIFKFDGKAWDWEVSSENGNYDYLMYADYDYDHPDVVNEMKKWGVWYANEVGLDGYRLDAVKHIKFQFLKDWVDNARAATGKEMFTVGEYWQNDLGALNNYLAKVNYNQSLFDAPLHYNFYAASTGGGYYDMRNILNNTLVASNPTKAVTLVENHDTQPGQSLESTVQPWFKPLAYAFILTRSGGYPSVFYGDMYGTKGTTTREIPALKSTIEPLLKARKDYAYGTQRDYIDNPDVIGWTREGDSTKAKSGLATVITDGPGGSKRMYVGTSNAGEIWYDLTGNRTDKITIGSDGYATFPVNGGSVSVWVQQ

SEQ ID NO: 37526 - protein, 480 aa, Cytophaga sp.
NGTMMQYFEWYVPNDGQQWNRLRTDAPYLSSVGITAVWTPPAYKGTSQADVGYGPYDLYDLGEFNQKGTVRTKYGTKGELKSAVNTLHSNGIQVYGDVVMNHKAGADYTENVTAVEVNPSNRYQETSGEYNIQAWTGFNFPGRGTTYSNWKWQWFHFDGTDWDQSRSLSRIFKFDGKAWDWEVSSENGNYDYLMYADYDYDHPDVVNEMKKWGVWYANEVGLDGYRLDAVKHIKFQFLKDWVDNARAATGKEMFTVGEYWQNDLGALNNYLAKVNYNQSLFDAPLHYNFYAASEGGGYYDMRNILNNTLVASNPTKAVTLVENHDTQPGQSLESTVQPWFKPLAYAFILTRSGGYPSVFYGDMYGTKGTTTREIPALKSKIEPLLKARKDYAYGTQRDYIDNPDVIGWTREGDSTKAKSGLATVITDGPGGSKRMYVGTSNAGEIWYDLTGNRTDKITIGSDGYATFPVNGGSVSVWVQQ

SEQ ID NO: 37527 - protein, 480 aa, Cytophaga sp.
NGTMMQYFEWYVPNDGQQWNRLRTDAPYLSSVGITAVWTPPAYKGTSQADVGYGPYDLYDLGEFNQKGTVRTKYGTKGELKSAVNTLHSNGIQVYGDVVMNHKAGADYTENVTAVEVNPSNRYQETSGEYNIQAWTGFNFPGRGTTYSNWKWQWFHFDGTDWDQSRSLSRIFKFDGKAWDWEVSSENGNYDYLMYADYDYDHPDVVNEMKKWGVWYANEVGLDGYRLDAVKHIKFQFLKDWVDNARAATGKEMFTVGEYWQNDLGALNNYLIKVNYNQSLFDAPLHYNFYAASTGGGYYDMRNILNNTLVASNPTKAVTLVENHDTQPGQSLESTVQPWFKPLAYAFILTRSGGYPSVFYGDMYGTKGTTTREIPALKSKIEPLLKARKDYAYGTQRDYIDNPDVIGWTREGDSTKAKSGLATVITDGPGGSKRMYVGTSNAGEIWYDLTGNRTDKITIGSDGYATFPVNGGSVSVWVQQ

SEQ ID NO: 37528 - protein, 480 aa, Cytophaga sp.
NGTMMQYFEWYVPNDGQQWNRLRTDAPYLSSVGITAVWTPPAYKGTSQADVGYGPYDLYDLGEFNQKGTVRTKYGTKGELKSAVNTLHSNGIQVYGDVVMNHKAGADYTENVTAVEVNPSNRYQETSGEYNIQAWTGFNFPGRGTTYSNWKWQWFHFDGTDWDQSRSLSRIFKFDGKAWDWEVSSENGNYDYLMYADYDYDHPDVVNEMKKWGVWYANEVGLDGYRLDAVKHIKFQFLKDWVDNARAATGKEMFTVGEYWQNDLGALNNYLAKVNYNQSLFDAPLHYNFYAASTGGGYYDMRNILNNTLVHSNPTKAVTLVENHDTQPGQSLESTVQPWFKPLAYAFILTRSGGYPSVFYGDMYGTKGTTTREIPALKSKIEPLLKARKDYAYGTQRDYIDNPDVIGWTREGDSTKAKSGLATVITDGPGGSKRMYVGTSNAGEIWYDLTGNRTDKITIGSDGYATFPVNGGSVSVWVQQ

SEQ ID NO: 37529 - protein, 480 aa, Cytophaga sp.
NGTMMQYFEWYVPNDGQQWNRLRTDAPYLSSVGITAVWTPPAYKGTSQADVGYGPYDLYDLGEFNQKGTVRTKYGTKGELKSAVNTLHSNGIQVYGDVVMNHKAGADYTENVTAVEVNPSNRYQETSGEYSIQAWTGFNFPGRGTTYSNWKWQWFHFDGTDWDQSRSLSRIFKFDGKAWDWEVSSENGNYDYLMYADYDYDHPDVVNEMKKWGVWYANEVGLDGYRLDAVKHIKFQFLKDWVDNARAATGKEMFTVGEYWQNDLGALNNYLAKVNYNQSLFDAPLHYNFYAASTGGGYYDMRNILNNTLVASNPTKAVTLVENHDTQPGQSLESTVQPWFKPLAYAFILTRSGGYPSVFYGDMYGTKGTTTREIPALKSKIEPLLKARKDYAYGTQRDYIDNPDVIGWTREGDSTKAKSGLATVITDGPGGSKRMYVGTSNAGEIWYDLTGNRTDKITIGSDGYATFPVNGGSVSVWVQQ

SEQ ID NO: 37530 - protein, 480 aa, Cytophaga sp.
NGTMMQYFEWYVPNDGQQWNRLRTDAPYLSSVGITAVWTPPAYKGTSQADVGYGPYDLYDLGEFNQKGTVRTKYGTKGELKSAVNTLHSNGIQVYGDVVMNHKAGADYTENVTAVEVNPSNRYQETSGEYNIQAWTGFNFPGRGTTYSNWKWQWFHFDGTDWDQSRSLSRIFKFDGKAWDWEVSSENGNYDYLMYADYDYDHPDVVNEMKKWGVWYANEVGLDGYRLDAVKHIKFQFLKDWVDNARAATGKEMFTVGEYWQNDLGALNNYLAKVNYNQSLFDAPLHYNFYAASTGGGYYDMRNILNNTLVASNPTKAVTLVENHDTQPGQSLESTVQPWFKPLAYAFILTRSGGYPSVFYGDMYGTKGTTTREIPALKSKIEPLLKARKDYAYGTQRDYIDNPDVIGWTREGDSTTAKSGLATVITDGPGGSKRMYVGTSNAGEIWYDLTGNRTDKITIGSDGYATFPVNGGSVSVWVQQ

SEQ ID NO: 37531 - protein, 480 aa, Cytophaga sp.
NGTMMQYFEWYVPNDGQQWNRLRTDAPYLSSVGITAVWTPPAYKGTSQADVGYGPYDLYDLGEFNQKGTVRTKYGTKGELKSAVNTLHSNGIQVYGDVVMNHKAGADYTENVTAVEVNPSNRYQETSGEYNILAWTGFNFPGRGTTYSNWKWQWFHFDGTDWDQSRSLSRIFKFDGKAWDWEVSSENGNYDYLMYADYDYDHPDVVNEMKKWGVWYANEVGLDGYRLDAVKHIKFQFLKDWVDNARAATGKEMFTVGEYWQNDLGALNNYLAKVNYNQSLFDAPLHYNFYAASTGGGYYDMRNILNNTLVASNPTKAVTLVENHDTQPGQSLESTVQPWFKPLAYAFILTRSGGYPSVFYGDMYGTKGTTTREIPALKSKIEPLLKARKDYAYGTQRDYIDNPDVIGWTREGDSTKAKSGLATVITDGPGGSKRMYVGTSNAGEIWYDLTGNRTDKITIGSDGYATFPVNGGSVSVWVQQ

SEQ ID NO: 37532 - protein, 480 aa, Cytophaga sp.
NGTMMQYFEWYVPNDGQQWNRLRTDAPYLSSVGITAVWTPPAYKGTSQADVGYGPYDLYDLGEFNQKGTVRTKYGTKGELKSAVNTLHSNGIQVYGDVVMNHKAGADYTENVTAVEVNPSNRYQETSGEYNIQAWTGFNFPGRGTTYSNWKWQWFHFDGTDWDQSRSLSRIFKFDGKAWDWEVSSENGNYDYLMYADYDYDHPDVVNEMKKWGVWYANEVGLDGYRLDAVKHIKFQFLKDWVDNARAATGKEMFTVGEYWQNDLGALNNYLAKVNYNQSLFDAPLHYNFYAASTGGGYYDMRNILNNTLVKSNPTKAVTLVENHDTQPGQSLESTVQPWFKPLAYAFILTRSGGYPSVFYGDMYGTKGTTTREIPALKSKIEPLLKARKDYAYGTQRDYIDNPDVIGWTREGDSTKAKSGLATVITDGPGGSKRMYVGTSNAGEIWYDLTGNRTDKITIGSDGYATFPVNGGSVSVWVQQ

SEQ ID NO: 37533 - protein, 480 aa, Cytophaga sp.
NGTMMQYFEWYVPNDGQQWNRLRTDAPYLSSVGITAVWTPPAYKGTSQADVGYGPYDLYDLGEFNQKGTVRTKYGTKGELKSAVNTLHSNGIQVYGDVVMNHKAGADYTENVTAVEVNPSNRYQETSGEYNIQAWTGFNFPGRGTTYSNWKWQWFHFDGTDWDQSRMLSRIFKFDGKAWDWEVSSENGNYDYLMYADYDYDHPDVVNEMKKWGVWYANEVGLDGYRLDAVKHIKFQFLKDWVDNARAATGKEMFTVGEYWQNDLGALNNYLAKVNYNQSLFDAPLHYNFYAASTGGGYYDMRNILNNTLVASNPTKAVTLVENHDTQPGQSLESTVQPWFKPLAYAFILTRSGGYPSVFYGDMYGTKGTTTREIPALKSKIEPLLKARKDYAYGTQRDYIDNPDVIGWTREGDSTKAKSGLATVITDGPGGSKRMYVGTSNAGEIWYDLTGNRTDKITIGSDGYATFPVNGGSVSVWVQQ

SEQ ID NO: 37534 - protein, 480 aa, Cytophaga sp.
NGTMMQYFEWYVPNDGQQWNRLRTDAPYLSSVGITAVWTPPAYKGTSQADVGYGPYDLYDLGEFNQKGTVRTKYGTKGELKSAVNTLHSNGIQVYGDVVMNHKAGADYTENVTAVEVNPSNRYQETSGEYNIQAWTGFNFPGRGLTYSNWKWQWFHFDGTDWDQSRSLSRIFKFDGKAWDWEVSSENGNYDYLMYADYDYDHPDVVNEMKKWGVWYANEVGLDGYRLDAVKHIKFQFLKDWVDNARAATGKEMFTVGEYWQNDLGALNNYLAKVNYNQSLFDAPLHYNFYAASTGGGYYDMRNILNNTLVASNPTKAVTLVENHDTQPGQSLESTVQPWFKPLAYAFILTRSGGYPSVFYGDMYGTKGTTTREIPALKSKIEPLLKARKDYAYGTQRDYIDNPDVIGWTREGDSTKAKSGLATVITDGPGGSKRMYVGTSNAGEIWYDLTGNRTDKITIGSDGYATFPVNGGSVSVWVQQ

SEQ ID NO: 37535 - protein, 480 aa, Cytophaga sp.
NGTMMQYFEWYVPNDGQQWNRLRDDAPYLSSVGITAVWTPPAYKGTSQADVGYGPYDLYDLGEFNQKGTVRTKYGTKGELKSAVNTLHSNGIQVYGDVVMNHKAGADYTENVTAVEVNPSNRYQETSGEYNIQAWTGFNFPGRGTTYSNWKWQWFHFDGTDWDQSRSLSRIFKFDGKAWDWEVSSENGNYDYLMYADYDYDHPDVVNEMKKWGVWYANEVGLDGYRLDAVKHIKFQFLKDWVDNARAATGKEMFTVGEYWQNDLGALNNYLAKVNYNQSLFDAPLHYNFYAASTGGGYYDMRNILNNTLVASNPTKAVTLVENHDTQPGQSLESTVQPWFKPLAYAFILTRSGGYPSVFYGDMYGTKGTTTREIPALKSKIEPLLKARKDYAYGTQRDYIDNPDVIGWTREGDSTKAKSGLATVITDGPGGSKRMYVGTSNAGEIWYDLTGNRTDKITIGSDGYATFPVNGGSVSVWVQQ

SEQ ID NO: 37536 - protein, 480 aa, Cytophaga sp.
NGTMMQYFEWYVPNDGQQWNRLRTDAPYLSSVGITAVWTPPAYKGTSQADVGYGPYDLYDLGEFNQKGTVRTKYGTKGELKSAVNTLHSNGIQVYGDVVMNHKAGADYTENVTAVEVNPSNRYQETSGEYNIQAWTGFNFPGRGTTYSNWKWQWFHFDGTDWDQSRSLSRIFKFDGKAWDWEVSSENGNYDYLMYADYDYDHPDVVNEMKKWGVWYANEVGLDGYRLDAVKHIKFQFLKDWVDNARAATGKEMFTVGEYWQNDLGALNNYLAKVNYNQSLFDAPLHYNFYAASTGGGYYDMRNILNNTLVASNPTKAVTLVENHDTQPGQSLESTVQPWFKPLAYAFILTRSGGYPSVFYGDMYGTKGTTTREIPCLKSKIEPLLKARKDYAYGTQRDYIDNPDVIGWTREGDSTKAKSGLATVITDGPGGSKRMYVGTSNAGEIWYDLTGNRTDKITIGSDGYATFPVNGGSVSVWVQQ

SEQ ID NO: 37537 - protein, 480 aa, Cytophaga sp.
NGTMMQYFEWYVPNDGQQWNRLRTDAPYLSSVGITAVWTPPAYKGTSQADVGYGPYDLYDLGEFNQKGTVRTKYGTKGELKSAVNTLHSNGIQVYGDVVMNHKAGADYTENVTAVEVNPSNRYQETSGEYNIQAWTGFNFPGRGTTYSNWKWQWFHFDGTDWDQSRCLSRIFKFDGKAWDWEVSSENGNYDYLMYADYDYDHPDVVNEMKKWGVWYANEVGLDGYRLDAVKHIKFQFLKDWVDNARAATGKEMFTVGEYWQNDLGALNNYLAKVNYNQSLFDAPLHYNFYAASTGGGYYDMRNILNNTLVASNPTKAVTLVENHDTQPGQSLESTVQPWFKPLAYAFILTRSGGYPSVFYGDMYGTKGTTTREIPALKSKIEPLLKARKDYAYGTQRDYIDNPDVIGWTREGDSTKAKSGLATVITDGPGGSKRMYVGTSNAGEIWYDLTGNRTDKITIGSDGYATFPVNGGSVSVWVQQ

SEQ ID NO: 37538 - protein, 480 aa, Cytophaga sp.
NGTMMQYFEWYVPNDGQQWNRLRTDAPYLSSVGITAVWTPPAYKGTSQADVGYGPYDLYDLGEFNQKGTVRTKYGTKGELKSAVNTLHSNGIQVYGDVVMNHKAGADYTENVTAVEVNPSNRYQETSGEYNIQAWTGFNFPGRGTTYSNWKWQWFHFDGTDWDQSRSLSRIFKFDGKAWDWEVSSENGNYDYLMYADYDYDHPDVVNEMKKWGVWYANEVGLDGYRLDAVKHIKFQFLKDWVDNARAATGKEMFTVGEYWQNDLGALNNYLAKVNYNQSLFDAPLHYNFYAASTGGGYYDMRNILNNTLVASNPIKAVTLVENHDTQPGQSLESTVQPWFKPLAYAFILTRSGGYPSVFYGDMYGTKGTTTREIPALKSKIEPLLKARKDYAYGTQRDYIDNPDVIGWTREGDSTKAKSGLATVITDGPGGSKRMYVGTSNAGEIWYDLTGNRTDKITIGSDGYATFPVNGGSVSVWVQQ

SEQ ID NO: 37539 - protein, 480 aa, Cytophaga sp.
NGTMMQYFEWYVPNDGQQWNRLRTDAPYLSSVGITAVWTPPAYKGTSQADVGYGPYDLYDLGEFNQKGTVRTKYGTKGELKSAVNTLHSNGIQVYGDVVMNHKAGADYTENVTAVEVNPSNRYQETSGEYNIQAWTGFNFPGRGTTYSNWKWQWFHFDGTDWDQSRSLSRIFKFDGKAWDWEVSSENGNYDYLMYADYDYDHPDVVNEMKKWGVWYANEVGLDGYRLDAVKHIKFQFLKDWVDNARMATGKEMFTVGEYWQNDLGALNNYLAKVNYNQSLFDAPLHYNFYAASTGGGYYDMRNILNNTLVASNPTKAVTLVENHDTQPGQSLESTVQPWFKPLAYAFILTRSGGYPSVFYGDMYGTKGTTTREIPALKSKIEPLLKARKDYAYGTQRDYIDNPDVIGWTREGDSTKAKSGLATVITDGPGGSKRMYVGTSNAGEIWYDLTGNRTDKITIGSDGYATFPVNGGSVSVWVQQ

SEQ ID NO: 37540 - protein, 480 aa, Cytophaga sp.
NGTMMQYFEWYVPNDGQQWNRLRTDAPYLSSVGITAVWTPPAYKGTSQADVGYGPYDLYDLGEFNQKGTVRTKYGTKGELKSAVNTLHSNGIQVYGDVVMNHKAGADYTENVTAVEVNPSNRYQETSGEYNIQAWTGFNFPGRGTTYSNWKWQWFHFDGTDWDQSRSLSRIFKFDGKAWDWEVSSENGNYDYLMYADYDYDHPDVVNEMKKWGVWYANEVGLDGYRLDAVKHIKFQFLKDWVDNARAATGKEMFTVGEYWQNDLGALNNYLAKVNYNQSLFDAPLHYNFYAASTGGGYYDMRNILNNTLVASNPYKAVTLVENHDTQPGQSLESTVQPWFKPLAYAFILTRSGGYPSVFYGDMYGTKGTTTREIPALKSKIEPLLKARKDYAYGTQRDYIDNPDVIGWTREGDSTKAKSGLATVITDGPGGSKRMYVGTSNAGEIWYDLTGNRTDKITIGSDGYATFPVNGGSVSVWVQQ

SEQ ID NO: 37541 - protein, 480 aa, Cytophaga sp.
NGTMMQYFEWYVPNDGQQWNRLRTDAPYLSSVGITAVWTPPAYKGTSQADVGYGPYDLYDLGEFNQKGTVRTKYGTKGELKSAVNTLHSNGIQVYGDVVMNHKAGADYTENVTAVEVNPSNRYQETSGEYNIQAWTGFNFPGRGTTYSNWKWQWFHFDGTDWDQSRSLSRIFKFDGKAWDWEVSSENGNYDYLMYADYDYDHPDVVNEIKKWGVWYANEVGLDGYRLDAVKHIKFQFLKDWVDNARAATGKEMFTVGEYWQNDLGALNNYLAKVNYNQSLFDAPLHYNFYAASTGGGYYDMRNILNNTLVASNPTKAVTLVENHDTQPGQSLESTVQPWFKPLAYAFILTRSGGYPSVFYGDMYGTKGTTTREIPALKSKIEPLLKARKDYAYGTQRDYIDNPDVIGWTREGDSTKAKSGLATVITDGPGGSKRMYVGTSNAGEIWYDLTGNRTDKITIGSDGYATFPVNGGSVSVWVQQ

SEQ ID NO: 37542 - protein, 480 aa, Cytophaga sp.
NGTMMQYFEWYVPNDGQQWNRLRTDAPYLSSVGITAVWTPPAYKGTSQADVGYGPYDLYDLGEFNQKGTVRTKYGTKGELKSAVNTLHSNGIQVYGDVVMNHKAGADYTENVTAVEVNPSNRYQETSGEYNIQAWTGFNFPGRGTTYSNWKWQWFHFDGTDWDQSRSLSRIFKFDGKAWDWEVSSENGNYDYLMYADYDYDHPDVVNEMKKWGVWYANEVGLDGYRLDAVKHIKFQFLKDWVDNARAATGKEMFTVGEYWQNDLGALNNYLAKVNYNQSLFDAPLHYNFYAASTGGGYYDMRNILNNTLVASNPTKAVTQVENHDTQPGQSLESTVQPWFKPLAYAFILTRSGGYPSVFYGDMYGTKGTTTREIPALKSKIEPLLKARKDYAYGTQRDYIDNPDVIGWTREGDSTKAKSGLATVITDGPGGSKRMYVGTSNAGEIWYDLTGNRTDKITIGSDGYATFPVNGGSVSVWVQQ

SEQ ID NO: 37543 - protein, 480 aa, Cytophaga sp.
NGTMMQYFEWYVPNDGQQWNRLRTDAPYLSSVGITAVWTPPAYKGTSQADVGYGPYDLYDLGEFNQKGTVRTKYGTKGELKSAVNTLHSNGIQVYGDVVMNHKAGADYTENVTAVEVNPSNRYQETSGEYNIQAWTGFNFPGRGTTYSNWKWQWFHFDGTDWDQSRSLSRIFKFDGKAWDWEVSSENGNYDYLMYADYDYDHPDVVNEMKKWGVWYANEVGLDGYRLDAVKHIKFQFLKDWVDNARAATGKEMFTVGEYWQNDLGALNNYLAKVNYNQSLFDAPLHYNFYAASTGGGYYDMRNILNNTLVASNPTKAVTLVENHDTQPGQSLESTVQPWFKPLAYAFILTRSGGYPSVFYGDMYGTKGTTTREIPALKSKIEPLLKARKAYAYGTQRDYIDNPDVIGWTREGDSTKAKSGLATVITDGPGGSKRMYVGTSNAGEIWYDLTGNRTDKITIGSDGYATFPVNGGSVSVWVQQ

SEQ ID NO: 37544 - protein, 480 aa, Cytophaga sp.
NGTMMQYFEWYVPNDGQQWNRLRTDAPYLSSVGITAVWTPPAYKGTSQADVGYGPYDLYDLGEFNQKGTVRTKYGTKGELKSAVNTLHSNGIQVYGDVVMNHKAGADYTENVTAVEVNPSNRYQETSGEYNIQAWTGFNFPGRGTTYSNWKWQWFHFDGTDWDQSRSLSRIFKFDGKAWDWEVSSENGNYDYLMYADYDYDHPDVVNEMKKWGVWYANEVGLDGYRLDAVKHIKFQFLKDWVDNARAATGKEMFTVGEYWQNDLGALNNYLAKVNYNQSLFDAPLHYNFYAASTGGGYYDMRNILNNTLVASNPTKAVTVVENHDTQPGQSLESTVQPWFKPLAYAFILTRSGGYPSVFYGDMYGTKGTTTREIPALKSKIEPLLKARKDYAYGTQRDYIDNPDVIGWTREGDSTKAKSGLATVITDGPGGSKRMYVGTSNAGEIWYDLTGNRTDKITIGSDGYATFPVNGGSVSVWVQQ

SEQ ID NO: 37545 - protein, 480 aa, Cytophaga sp.
NGTMMQYFEWYVPNDGQQWNRLRTDAPYLSSVGITAVWTPPAYKGTSQADVGYGPYDLYDLGEFNQKGTVRTKYGTKGELKSAVNTLHSNGIQVYGDVVMNHKAGADYTENVTAVEVNPSNRYQETSGEYNIQAWTGFNFPGRGTTYSNWKWQWFHFDGTDWDQSRSLSRIFKFDGKAWDWEVSSENGNYDYLMYADYDYDHPDVVNEMKKWGVWYANEVGLDGYRLDAVKHIKFQFLKDWVDNARAATGKEMFTVGEYWQNDLGALNNYLAKVNYNQSLFDAPLHYNFYAASTGGGYYDMRNILNNTLVASNPTKAVTLVENHDTQPGQSLESTVQPWFKPLAYAFILTRSGGYPSVFYGDMYGTKGTTTREIPALKSKIEPLLKARKDYAYGTQRDYIDMPDVIGWTREGDSTKAKSGLATVITDGPGGSKRMYVGTSNAGEIWYDLTGNRTDKITIGSDGYATFPVNGGSVSVWVQQ

SEQ ID NO: 37546 - protein, 480 aa, Cytophaga sp.
NGTMMQYFEWYVPNDGQQWNRLRTDAPYLSSVGITAVWTPPAYKGTSQADVGYGPYDLYDLGEFNQKGTVRTKYGTKGELRSAVNTLHSNGIQVYGDVVMNHKAGADYTENVTAVEVNPSNRYQETSGEYNIQAWTGFNFPGRGTTYSNWKWQWFHFDGTDWDQSRSLSRIFKFDGKAWDWEVSSENGNYDYLMYADYDYDHPDVVNEMKKWGVWYANEVGLDGYRLDAVKHIKFQFLKDWVDNARAATGKEMFTVGEYWQNDLGALNNYLAKVNYNQSLFDAPLHYNFYAASTGGGYYDMRNILNNTLVASNPTKAVTLVENHDTQPGQSLESTVQPWFKPLAYAFILTRSGGYPSVFYGDMYGTKGTTTREIPALKSKIEPLLKARKDYAYGTQRDYIDNPDVIGWTREGDSTKAKSGLATVITDGPGGSKRMYVGTSNAGEIWYDLTGNRTDKITIGSDGYATFPVNGGSVSVWVQQ

SEQ ID NO: 37547 - protein, 480 aa, Cytophaga sp.
NGTMMQYFEWYVPNDGQQWNRLRTDAPYLSSVGITAVWTPPAYKGTSQADVGYGPYDLYDLGEFNQKGTVRTKYGTKGELKSAVNTLHSNGIQVYGDVVMNHKAGADYTENVTAVEVNPSNRLQETSGEYNIQAWTGFNFPGRGTTYSNWKWQWFHFDGTDWDQSRSLSRIFKFDGKAWDWEVSSENGNYDYLMYADYDYDHPDVVNEMKKWGVWYANEVGLDGYRLDAVKHIKFQFLKDWVDNARAATGKEMFTVGEYWQNDLGALNNYLAKVNYNQSLFDAPLHYNFYAASTGGGYYDMRNILNNTLVASNPTKAVTLVENHDTQPGQSLESTVQPWFKPLAYAFILTRSGGYPSVFYGDMYGTKGTTTREIPALKSKIEPLLKARKDYAYGTQRDYIDNPDVIGWTREGDSTKAKSGLATVITDGPGGSKRMYVGTSNAGEIWYDLTGNRTDKITIGSDGYATFPVNGGSVSVWVQQ

SEQ ID NO: 37548 - protein, 480 aa, Cytophaga sp.
NGTMMQYFEWYVPNDGQQWNRLRTDAPYLSSVGITAVWTPPAYKGTSQADVGYGPYDLYDLGEFNQKGTVRTKYGTKGELKSAVNTLHSNGIQVYGDVVMNHKAGADYTENVTAVEVNPSNRYQETSGEYNIQAWTGFNFPGRGTTYSNWKWQWFHFDGTDWDQSRSLSRIFKFDGKAWDWEVSSENGNYDYLMYADYDYDHPDVVNEMKKWGVWYANEVRLDGYRLDAVKHIKFQFLKDWVDNARAATGKEMFTVGEYWQNDLGALNNYLAKVNYNQSLFDAPLHYNFYAASTGGGYYDMRNILNNTLVASNPTKAVTLVENHDTQPGQSLESTVQPWFKPLAYAFILTRSGGYPSVFYGDMYGTKGTTTREIPALKSKIEPLLKARKDYAYGTQRDYIDNPDVIGWTREGDSTKAKSGLATVITDGPGGSKRMYVGTSNAGEIWYDLTGNRTDKITIGSDGYATFPVNGGSVSVWVQQ

SEQ ID NO: 37549 - protein, 480 aa, Cytophaga sp.
NGTMMQYFEWYVPNDGQQWNRLRTDAPYLSSVGITAVWTPPAYKGTSQADVGYGPYDLYDLGEFNQKGTVRTKYGTKGELKSAVNTLHSNGIQVYGDVVMNHKAGADYTENVTAVEVNPSNRYQETSGEYNIQAWTGFNFPGRGTTYSNWKWQWFHFDGTDWDQSRSLSRIFKFDGKAWDWEVSSENGNYDYLMYADYDYDHPDVVNEMKKWGVWYANEVGLDGYRLDAVKHIKFQFLKDWVDNARAATGKEMFTVGEYWQNDLGALNNYLAKVNYNQSLFDAPLHYNFYAASTGGGYYDMRNILNNTLVASNPTKAVTLVENHDTQPGQSLESTVQPWFKPLAYAFILTRSGGYPSVFYGDMYGTKGTTTREIPALKSKIEPLLKARKDYAYGTQRDYIDNPDVIGWTREGDSTKAKSGLATVITDGPGGSKRMYVGTSNAGEIWYDLTGNRTDKITIGSDGYATFPVNCGSVSVWVQQ

SEQ ID NO: 37550 - protein, 480 aa, Cytophaga sp.
NGTMMQYFEWYVPNDGQQWNRLRTDAPYLSSVGITAVWTPPAYKGTSQADVGYGPYDLYDLGEFNQKGTVRTKYGTKGELKSAVNTLHSNGIQVYGDVVMNHKAGADYTENVTAVEVNPSNRYQETSGEYNIQAWTGFNFPGRGTTYSNWKWQWFHFDGTDWDQSRSLSRIFKFHGKAWDWPVSSENGNYDYLMYADYDYDHPDVVNEMKKWGVWYANEVGLDGYRLDAVKHIKFSFLKDWVDNARAATGKEMFTVGEYWQNDLGALNNYLAKVNYNQSLFDAPLHYNFYAASTGGGYYDMRNILNNTLVASNPTKAVTLVENHDTQPGQSLESTVQPWFKPLAYAFILTRSGGYPSVFYGDMYGTKGTTTYEIPALKSKIEPLLKARKDYAYGTQRDYIDNPDVIGWTREGDSTKAKSGLATVITDGPGGSKRMYVGTSNAGEIWYDLTGNRTDKITIGSDGYATFPVNGGSVSVWVQQ

SEQ ID NO: 37551 - protein, 480 aa, Cytophaga sp.
NGTMMQYFEWYVPNDGQQWNRLRTDAPYLSSVGITAVWTPPAYKGTSQADVGYGPYDLYDLGEFNQKGTVRTKYGTKGELKSAVNTLHSNGIQVYGDVVMNHKAGADYTENVTAVEVNPSNRYQETSGEYNIQAWTGFNFPGRGTTYSNFKWQWFHFDGTDWDQSRSLSRIFKFDGKAWDWPVSSENGNYDYLMYADYDYDHPDVVNEMKKWGVWYANEVGLDGYRLDAVKHIKFSFLKDWVDNARAATGKEMFTVGEYWQNDLGALNNYLAKVNYNQSLFDAPLHYNFYAASTGGGYYDMRNILNNTLVASNPTKAVTLVENHDTQPGQSLESTVQPWFKPLAYAFILTRSGGYPSVFYGDMYGTKGTTTREIPALKSKIEPLLKARKDYAYGTQRDYIDNPDVIGWTREGDSTKAKSGLATVITDGPGGSKRMYVGTSNAGEIWYDLTGNRTDKITIGSDGYATFPVNKESVSVWVQQ

SEQ ID NO: 37552 - protein, 480 aa, Cytophaga sp.
NGTMMQYFEWYVPNDGQQWNRLRTDAPYLSSVGITAVWTPPAYKGTSQADVGYGPYDLYDLGEFNQKGTVRTKYGTKGELKSAVNTLHSNGIQVYGDVVMNHKAGADYTENVTAVEVNPSNRNQETSGEYNIQAWTGFNFPGRGTTYSNFKWQWFHFDGTDWDQSRSLSRIFKFTGKAWDWPVSSENGNYDYLMYADIDYDHPDVVNEMKKWGVWYANEVGLDGYRLDAVKHIKFYFLKDWVDNARAATGKEMFTVGEYWQNDLGALNNYLAIVNYNQSLFDAPLHYNFYAASTGGGYYDMRNILNNTLVASNPTKAVTLVENHDTQPGQSLESTVQPWFKPLAYAFILTRSGGYPSVFYGDMYGTKGTTTREIPALKSKIEPLLKARKDYAYGTQRDYIDNPDVIGWTREGDSTKAKSGLATVITDGPGGSKRMYVGTSNAGEIWYDLTGNRTDKITIGSDGYATFPVNGGSVSVWVQQ

SEQ ID NO: 37553 - protein, 480 aa, Cytophaga sp.
NGTMMQYFEWYVPNDGQQWNRLRTDAPYLSSVGITAVWTPPAYKGTSQADVGYGPYDLYDLGEFNQKGTVRTKYGTKGELKSAVNTLHSNGIQVYGDVVMNHKAGADYTENVTAVEVNPSNRYQETSGEYNIQAWTGFNFPGRGTTYSNWKWQWFHFDGTDWDQSRSLSRIFKFDGKAWDWEVSSENGNYDYLMYADYDYDHPDVVNEMKKWGVWYANEVGLDGYRLDAVKHIKFTFLKDWVDNARAATGKEMFTVGEYWQNDLGALNNYLAKVNYNQSLFDAPLHYNFYAASTGGGYYDMRNILNNTLVASNPTKAVTLVENHDTQPGQSLESTVQPWFKPLAYAFILTRSGGYPSVFYGDMYGTKGTTTREIPALKSKIEPLLKARKDYAYGTQRDYIDNPDVIGWTREGDSTKAKSGLATVITDGPGGSKRMYVGTSNAGEIWYDLTGNRTDKITIGSDGYATFPVNGGSVSVWVQQ

SEQ ID NO: 37554 - protein, 480 aa, Cytophaga sp.
NGTMMQYFEWYVPNDGQQWNRLRTDAPYLSSVGITAVWTPPAYKGTSQADVGYGPYDLYDLGEFNQKGTVRTKYGTKGELKSAVNTLHSNGIQVYGDVVMNHKAGADYTENVTAVEVNPSNRYQETSGEYNIQAWTGFNFPGRGTTYSNWKWQWFHFDGTDWDQSRSLSRIFKFDGKAWDWEVSSENGNYDYLMYADYDYDHPDVVNEMKKWGVWYANEVGLDGYRLDAVKHIKFRFLKDWVDNARAATGKEMFTVGEYWQNDLGALNNYLAKVNYNQSLFDAPLHYNFYAASTGGGYYDMRNILNNTLVASNPTKAVTLVENHDTQPGQSLESTVQPWFKPLAYAFILTRSGGYPSVFYGDMYGTKGTTTREIPALKSKIEPLLKARKDYAYGTQRDYIDNPDVIGWTREGDSTKAKSGLATVITDGPGGSKRMYVGTSNAGEIWYDLTGNRTDKITIGSDGYATFPVNGGSVSVWVQQ

SEQ ID NO: 37555 - protein, 480 aa, Cytophaga sp.
NGTMMQYFEWYVPNDGQQWNRLRTDAPYLSSVGITAVWTPPAYKGTSQADVGYGPYDLYDLGEFNQKGTVRTKYGTKGELKSAVNTLHSNGIQVYGDVVMNHKAGADYTENVTAVEVNPSNRYQETSGEYNIQAWTGFNFPGRGTTYSGWKWQWFHFDGTDWDQSRSLSRIFKFDGKAWDWEVSSENGNYDYLMYADYDYDHPDVVNEMKKWGVWYANEVGLDGYRLDAVKHIKFQFLKDWVDNARAATGKEMFTVGEYWQNDLGALNNYLAKVNYNQSLFDAPLHYNFYAASTGGGYYDMRNILNNTLVASNPTKAVTLVENHDTQPGQSLESTVQPWFKPLAYAFILTRSGGYPSVFYGDMYGTKGTTTREIPALKSKIEPLLKARKDYAYGTQRDYIDNPDVIGWTREGDSTKAKSGLATVITDGPGGSKRMYVGTSNAGEIWYDLTGNRTDKITIGSDGYATFPVNGGSVSVWVQQ

SEQ ID NO: 37556 - protein, 480 aa, Cytophaga sp.
NGTMMQYFEWYVPNDGQQWNRLRTDAPYLSSVGITAVWTPPAYKGTSQADVGYGPYDLYDLGEFNQKGTVRTKYGTKGELKSAVNTLHSNGIQVYGDVVMNHKAGADYTENVTAVEVNPSNRYQETSGEYNIQAWTGFNFPGRGTTYSNWKWQWFHFDGTDWDQSRSLSRIFKFDGKAWDWEVSSENGNYDYLMYADYDYDHPDVVNEMKKWGVWYANEVGLDGYRLDAVKHIKFQFLKDWVDNARAATGKEMFTVGEYWQNDLGALINYLAKVNYNQSLFDAPLHYNFYAASTGGGYYDMRNILNNTLVASNPTKAVTLVENHDTQPGQSLESTVQPWFKPLAYAFILTRSGGYPSVFYGDMYGTKGTTTREIPALKSKIEPLLKARKDYAYGTQRDYIDNPDVIGWTREGDSTKAKSGLATVITDGPGGSKRMYVGTSNAGEIWYDLTGNRTDKITIGSDGYATFPVNGGSVSVWVQQ

SEQ ID NO: 37557 - protein, 480 aa, Cytophaga sp.
NGTMMQYFEWYVPNDGQQWDRLRTDAPYLSSVGITAVWTPPAYKGTSQADVGYGPYDLYDLGEFNQKGTVRTKYGTKGELKSAVNTLHSNGIQVYGDVVMNHKAGADYTENVTAVEVNPSNRYQETSGEYNIQAWTGFNFPGRGTTYSNWKWQWFHFDGTDWDQSRSLSRIFKFDGKAWDWEVSSENGNYDYLMYADYDYDHPDVVNEMKKWGVWYANEVGLDGYRLDAVKHIKFQFLKDWVDNARAATGKEMFTVGEYWQNDLGALNNYLAKVNYNQSLFDAPLHYNFYAASTGGGYYDMRNILNNTLVASNPTKAVTLVENHDTQPGQSLESTVQPWFKPLAYAFILTRSGGYPSVFYGDMYGTKGTTTREIPALKSKIEPLLKARKDYAYGTQRDYIDNPDVIGWTREGDSTKAKSGLATVITDGPGGSKRMYVGTSNAGEIWYDLTGNRTDKITIGSDGYATFPVNGGSVSVWVQQ

SEQ ID NO: 37558 - protein, 480 aa, Cytophaga sp.
NGTMMQYFEWYVPNDGQQWNRLRTDAPYLSSVGITAVWTPPAYKGTSQADVGYGPYDLYDLGEFNQKGTVRTKYGTKGELKSAVNTLHSNGIQVYGDVVMNHKAGADYTENVTAVEVNPSNRYQETSGEYNIQAWTGFNFPGRGTTYSNWKWQWFHFDGTDWDQSRSLSRIFKFDGKAWDWEVSSENGNYDYLMYADYDYDHPDVVNEMKKWGVWYANEVGLDGYRLDAVKHIKFQFLKDWVDNARAATGKEMFTVGEYWQNDLGELNNYLAKVNYNQSLFDAPLHYNFYAASTGGGYYDMRNILNNTLVASNPTKAVTLVENHDTQPGQSLESTVQPWFKPLAYAFILTRSGGYPSVFYGDMYGTKGTTTREIPALKSKIEPLLKARKDYAYGTQRDYIDNPDVIGWTREGDSTKAKSGLATVITDGPGGSKRMYVGTSNAGEIWYDLTGNRTDKITIGSDGYATFPVNGGSVSVWVQQ

SEQ ID NO: 37559 - protein, 480 aa, Cytophaga sp.
NGTMMQYFEWYVPNDGQQWNRLRTDAPYLSSVGITAVWTPPAYKGTSQADVGYGPYDLYDLGEFNQKGTVRTKYGTKGELKSAVNTLHSNGIQVYGDVVMNHKAGADYTENVTAVEVNPSNRRQETSGEYNIQAWTGFNFPGRGTTYSNWKWQWFHFDGTDWDQSRSLSRIFKFDGKAWDWEVSSENGNYDYLMYADYDYDHPDVVNEMKKWGVWYANEVGLDGYRLDAVKHIKFQFLKDWVDNARAATGKEMFTVGEYWQNDLGALNNYLAKVNYNQSLFDAPLHYNFYAASTGGGYYDMRNILNNTLVASNPTKAVTLVENHDTQPGQSLESTVQPWFKPLAYAFILTRSGGYPSVFYGDMYGTKGTTTREIPALKSKIEPLLKARKDYAYGTQRDYIDNPDVIGWTREGDSTKAKSGLATVITDGPGGSKRMYVGTSNAGEIWYDLTGNRTDKITIGSDGYATFPVNGGSVSVWVQQ

SEQ ID NO: 37560 - protein, 480 aa, Cytophaga sp.
NGTMMQYFEWYVPNDGQQWNRLRTDAPYLSSVGITAVWTPPAYKGTSQADVGYGPYDLYDLGEFNQKGTVRTKYGTKGELKSAVNTLHSNGIQVYGDVVMNHKAGADYTENVTAVEVNPSNRYQETSGEYNIQAWTGFNFPGRGTTYSNWKWQWFHFDGTDWDQSRSLSRIFKFDGKAWDWEVSSENGNYDYLMYADYDYDHPDVVNEMKKWGVWYANEVGLDGYRLDAVKHIKFQFLKDWVDNARAATGKEMFTVGEYWQNDLGALNNYLAKVNYNQSLFDAPLHYNFYAASAGGGYYDMRNILNNTLVASNPTKAVTLVENHDTQPGQSLESTVQPWFKPLAYAFILTRSGGYPSVFYGDMYGTKGTTTREIPALKSKIEPLLKARKDYAYGTQRDYIDNPDVIGWTREGDSTKAKSGLATVITDGPGGSKRMYVGTSNAGEIWYDLTGNRTDKITIGSDGYATFPVNGGSVSVWVQQ

SEQ ID NO: 37561 - protein, 480 aa, Cytophaga sp.
NGTMMQYFEWYVPNDGQQWNRLRTDAPYLSSVGITAVWTPPAYKGTSQADVGYGPYDLYDLGEFNQKGTVRTKYGTKGELKSAVNTLHSNGIQVYGDVVMNHKAGADYTENVTAVEVNPSNRYQETSGEYNIQAWTGFNFPGRGTTYSNWKWQWFHFDGTDWDQSRSLSRIFKFDGKAWDWEVSSENGNYDYLMYADYDYDHPDVVNEMKKWGVWYANEVGLDGYRLDAVKHIKFQFLKDWVDNARAATGKEMFTVGEYWQNDLGALNNYLAKVNYNQSLFDAPLHYNFYAASTGGGYYDMRNILNNTLVASNPTKAVTLVENHDTQPGQSLESTVQPWFKPLAYAFILTRTGGYPSVFYGDMYGTKGTTTREIPALKSKIEPLLKARKDYAYGTQRDYIDNPDVIGWTREGDSTKAKSGLATVITDGPGGSKRMYVGTSNAGEIWYDLTGNRTDKITIGSDGYATFPVNGGSVSVWVQQ

SEQ ID NO: 37562 - protein, 480 aa, Cytophaga sp.
NGTMMQYFEWYVPNDGQQWNRLRTDAPYLSSVGITAVWTPPAYKGTSQADVGYGPYDLYDLGEFNQKGTVRTKYGTKGELKSAVNTLHSNGIQVYGDVVMNHKAGADYTENVTAVEVNPSNRYQETSGEYNIQAWTGFNFPGRGTTYSAWKWQWFHFDGTDWDQSRSLSRIFKFDGKAWDWEVSSENGNYDYLMYADYDYDHPDVVNEMKKWGVWYANEVGLDGYRLDAVKHIKFQFLKDWVDNARAATGKEMFTVGEYWQNDLGALNNYLAKVNYNQSLFDAPLHYNFYAASTGGGYYDMRNILNNTLVASNPTKAVTLVENHDTQPGQSLESTVQPWFKPLAYAFILTRSGGYPSVFYGDMYGTKGTTTREIPALKSKIEPLLKARKDYAYGTQRDYIDNPDVIGWTREGDSTKAKSGLATVITDGPGGSKRMYVGTSNAGEIWYDLTGNRTDKITIGSDGYATFPVNGGSVSVWVQQ

SEQ ID NO: 37563 - protein, 480 aa, Cytophaga sp.
NGTMMQYFEWYVPNDGQQWNRLRTDAPYLSSVGITAVWTPPAYKGTSQADVGYGPYDLYDLGEFNQKGTVRTKYGTKGELKSAVNTLHSNGIQVYGDVVMNHKAGADYTENVTAVEVNPSNRYQETSGEYNIQAWTGFNFPGRGTTYSNWKWQWFHFDGTDWDQSRSLSRIFKFDGKAWDWEVSSENGNYDYLMYADYDYDHPDVVNEMKKWGVWYANEVGLDGYRLDAVKHIKFQFLKDWVDNSRAATGKEMFTVGEYWQNDLGALNNYLAKVNYNQSLFDAPLHYNFYAASTGGGYYDMRNILNNTLVASNPTKAVTLVENHDTQPGQSLESTVQPWFKPLAYAFILTRSGGYPSVFYGDMYGTKGTTTREIPALKSKIEPLLKARKDYAYGTQRDYIDNPDVIGWTREGDSTKAKSGLATVITDGPGGSKRMYVGTSNAGEIWYDLTGNRTDKITIGSDGYATFPVNGGSVSVWVQQ

SEQ ID NO: 37564 - protein, 480 aa, Cytophaga sp.
NGTMMQYFEWYVPNDGQQWNRLRTDAPYLSSVGITAVWTPPAYKGTSQADVGYGPYDLYDLGEFNQKGTVRTKYGTKGELKSAVNTLHSNGIQVYGDVVMNHKAGADYTENVTAVEVNPSNRYQETSGEYNIQAWTGFNFPGRGTTYSNWKWQWFHFDGTDWDQSRSLSRIFKFDGKAWDWEVSSENGNYDYLMYADYDYDHPDVVNEMKKWGVWYANEVGLDGYRLDAVKHIKFQFLKDWVDNARAATGKEMFTVGEYWQNDLGALNNYLAKVNYNQSLFDAPLHYNFYAASTGGGYYDMRNILNNTLVASNPTKAVTLVENHDTQPGQSLESTVQPWFKPLAYAFILTRSGGYPSVFYGDMYGTKGTTTREIPALKSKIEPLLKARKDYAYGTQRDYIDNPDVIGWTREGDSTKAKSGLATVITDGPGGSKRMYVGTLNAGEIWYDLTGNRTDKITIGSDGYATFPVNGGSVSVWVQQ

SEQ ID NO: 37565 - protein, 480 aa, Cytophaga sp.
NGTMMQYFEWYVPNDGQQWNRLRTDAPYLSSVGITAVWTPPAYKGTSQADVGYGPYDLYDLGEFNQKGTVRTKYGTKGELKSAVNTLHSNGIQVYGDVVMNHKAGADYTENVTAVEVNPSNRYQETSGEYNIQAWTGFNFPGRGTTYSNWKWQWFHFDGTDWDQSRSLSRIFKFDGKAWDWEVSSENGNYDYLMYADYDYDHPDVVNEMKKWGVWYANEVGLDGYRLDAVKHIKFQFLKDWVDNARAATGKEMFTVGEYWQNDSGALNNYLAKVNYNQSLFDAPLHYNFYAASTGGGYYDMRNILNNTLVASNPTKAVTLVENHDTQPGQSLESTVQPWFKPLAYAFILTRSGGYPSVFYGDMYGTKGTTTREIPALKSKIEPLLKARKDYAYGTQRDYIDNPDVIGWTREGDSTKAKSGLATVITDGPGGSKRMYVGTSNAGEIWYDLTGNRTDKITIGSDGYATFPVNGGSVSVWVQQ

SEQ ID NO: 37566 - protein, 480 aa, Cytophaga sp.
NGTMMQYFEWYVPNDGQQWNRLRTDAPYLSSVGITAVWTPPAYKGTSQADVGYGPYDLYDLGEFNQKGTVRTKYGTKGELKSAVNTLHSNGIQVYGDVVMNHKAGADYTENVTAVEVNPSNRYQETSGEYNIQAWTGFNFPGRGTTYSNWKWQWFHFDGTDWDQSRSLSRIFKFDGKAWDWEVSSENGNYDYLMYADYDYDHPDVVNEMKKWGVWYANEVGLDGYRLDAVKHIKFQFLKDWVDNAREATGKEMFTVGEYWQNDLGALNNYLAKVNYNQSLFDAPLHYNFYAASTGGGYYDMRNILNNTLVASNPTKAVTLVENHDTQPGQSLESTVQPWFKPLAYAFILTRSGGYPSVFYGDMYGTKGTTTREIPALKSKIEPLLKARKDYAYGTQRDYIDNPDVIGWTREGDSTKAKSGLATVITDGPGGSKRMYVGTSNAGEIWYDLTGNRTDKITIGSDGYATFPVNGGSVSVWVQQ

SEQ ID NO: 37567 - protein, 480 aa, Cytophaga sp.
NGTMMQYFEWYVPNDGQQWNRLRTDAPYLSSVGITAVWTPPAYKGTSQADVGYGPYDLYDLGEFNQKGTVRTKYGTKGELKSAVNTLHSNGIQVYGDVVMNHKAGADYTENVTAVEVNPSNRYQETSGEYNIQAWTGFNFPGRGTTYSNWKWQWFHFDGTDWDQSRSLSRIFKFDGKAWDWEVSSENGNYDYLMYADYDYDHPDVVNEMKKWGVWYANEVGLDGYRLDAVKHIKFQFLKDWVDNARAATGKEMFTVGEYWQNDLGALNNYLAKVNYNQSLFDAPLHYNFYAASTGGGYYDMRNILNNTLVASNPTKAVTLVENHDTQPGQSLESTVQPWFKPLAYAFILTRSGGYPSVFYGDMYGTKGTTTREIPALKSKIEPLLKARKDYAYGAQRDYIDNPDVIGWTREGDSTKAKSGLATVITDGPGGSKRMYVGTSNAGEIWYDLTGNRTDKITIGSDGYATFPVNGGSVSVWVQQ

SEQ ID NO: 37568 - protein, 480 aa, Cytophaga sp.
NGTMMQYFEWYVPNDGQQWNRLRTDAPYLSSVGITAVWTPPAYKGTSQADVGYGPYDLYDLGEFNQKGTVRTKYGTKGELKSAVNTLHSNGIQVYGDVVMNHKAGADYTENVTAVEVNPSNRYQETSGEYNIQAWTGFNFPGRGTTYSNWKWQWFHFDGTDWDQSRSLSRIFKFDGKAWDWEVSSENGNYDYLMYADYDYDHPDVVNEMKKWGVWYANEVGLDGYRLDAVKHIKFQFLKDWVDNARAATGKEMFTVGEYWQNDLGALCNYLAKVNYNQSLFDAPLHYNFYAASTGGGYYDMRNILNNTLVASNPTKAVTLVENHDTQPGQSLESTVQPWFKPLAYAFILTRSGGYPSVFYGDMYGTKGTTTREIPALKSKIEPLLKARKDYAYGTQRDYIDNPDVIGWTREGDSTKAKSGLATVITDGPGGSKRMYVGTSNAGEIWYDLTGNRTDKITIGSDGYATFPVNGGSVSVWVQQ

SEQ ID NO: 37569 - protein, 480 aa, Cytophaga sp.
NGTMMQYFEWYVPNDGQQWNRLRTDAPYLSSVGITAVWTPPAYKGTSQADVGYGPYDLYDLGEFNQKGTVRTKYGTKGELKSAVNTLHSNGIQVYGDVVMNHKAGADYTENVTAVEVNPSNRYQETSGEYNIQAWTGFNFPGRGTTYSNWKWQWFHFDGTDWDQSRSLSRIFKFDGKAWDWEVSSENGNYDYLMYADYDYDHPDVVNEMKKWGVWYANEVGLDGYRLDAVKHIKFQFLKDWVDNARAATGKEMFTVGEYWQNDLGALNNYLAKVNYNQSLFDAPLHYNFYAASTGGGYYDMRNILNNTLVASNPTKAVTLVENHDTQPGQSLESTVQPWFKPLAYAFILTRSGGYPSVFYGDMYGTKGTTTREIPALKSEIEPLLKARKDYAYGTQRDYIDNPDVIGWTREGDSTKAKSGLATVITDGPGGSKRMYVGTSNAGEIWYDLTGNRTDKITIGSDGYATFPVNGGSVSVWVQQ

SEQ ID NO: 37570 - protein, 480 aa, Cytophaga sp.
NGTMMQYFEWYVPNDGQQWNRLRTDAPYLSSVGITAVWTPPAYKGTSQADVGYGPYDLYDLGEFNQKGTVRTKYGTKGELKSAVNTLHSNGIQVYGDVVMNHKAGADYTENVTAVEVNPSNRYQETSGEYNIQAWTGFNFPGRGTTYSNWKWQWFHFDGTDWDQSRSLSRIFKFDGKAWDWEVSSENGNYDYLMYADYDYDHPDVVNEMKKWGVWYANEVGLDGYRLDAVKHIKFQFLKDWVDNARAATGKEMFTVGEYWQNDLGALNNYLAKVNYNQSLFDAPLHYNFYAASTGGGYYDMRNILNNTLVASNPVKAVTLVENHDTQPGQSLESTVQPWFKPLAYAFILTRSGGYPSVFYGDMYGTKGTTTREIPALKSKIEPLLKARKDYAYGTQRDYIDNPDVIGWTREGDSTKAKSGLATVITDGPGGSKRMYVGTSNAGEIWYDLTGNRTDKITIGSDGYATFPVNGGSVSVWVQQ

SEQ ID NO: 37571 - protein, 480 aa, Cytophaga sp.
NGTMMQYFEWYVPNDGQQWNRLRTDAPYLSSVGITAVWTPPAYKGTSQADVGYGPYDLYDLGEFNQKGTVRTKYGTKGELKSAVNTLHSNGIQVYGDVVMNHKAGADYTENVTAVEVNPSNRYQETSGEYNIQAWTGFNFPGRGTTYSNWKWQWFHFDGTDWDQSRSLSRIFKFDGKAWDWEVSSENGNYDYLMYADYDYDHPDVVNEMKKWGVWYANEVGLDGYRLDAVKHIKFQFLKDWVDNARAATGKEMFTVGEYWQNDLGALNNYLAKVNYNQSLFDAPLHYNFYAASTCGGYYDMRNILNNTLVASNPTKAVTLVENHDTQPGQSLESTVQPWFKPLAYAFILTRSGGYPSVFYGDMYGTKGTTTREIPALKSKIEPLLKARKDYAYGTQRDYIDNPDVIGWTREGDSTKAKSGLATVITDGPGGSKRMYVGTSNAGEIWYDLTGNRTDKITIGSDGYATFPVNGGSVSVWVQQ

SEQ ID NO: 37572 - protein, 480 aa, Cytophaga sp.
NGTMMQYFEWYVPNDGQQWNRLRTDAPYLSSVGITAVWTPPAYKGTSQADVGYGPYDLYDLGEFNQKGTVRTKYGTKGELKSAVNTLHSNGIQVYGDVVMNHKAGADYTENVTAVEVNPSNRYQETSGEYNIQAWTGFNFPGRGTTYSNWKWQWFHFDGTDWDQSRSLSRIFKFDGKAWDWEVSSENGNYDYLMYADYDYDHPDVVNEMKKWGVWYANEVGLDGYRLDAVKHIKFVFLKDWVDNARAATGKEMFTVGEYWQNDLGALNNYLAKVNYNQSLFDAPLHYNFYAASTGGGYYDMRNILNNTLVASNPTKAVTLVENHDTQPGQSLESTVQPWFKPLAYAFILTRSGGYPSVFYGDMYGTKGTTTREIPALKSKIEPLLKARKDYAYGTQRDYIDNPDVIGWTREGDSTKAKSGLATVITDGPGGSKRMYVGTSNAGEIWYDLTGNRTDKITIGSDGYATFPVNGGSVSVWVQQ

SEQ ID NO: 37573 - protein, 480 aa, Cytophaga sp.
NGTMMQYFEWYVPNDGQQWNRLRTDAPYLSSVGITAVWTPPAYKGTSQADVGYGPYDLYDLGEFNQKGTVRTKYGTKGELKSAVNTLHSNGIQVYGDVVMNHKAGADYTENVTAVEVNPSNRYQETSGEYNIQAWTGFNFPGRGTTYSNWKWQWFHFDGTDWDQSRSLSRIFKFDGKAWDWEVSSENGNYDYLMYADYDYDHPDVVNEMKKWGVWYANEVGLDGYRLDAVKHIKFQFLKDWVDNARAATGKEMFTVGEYWQNDLGALNNYLAKVNYNQSLFDAPLHYNFYAASTGGGYYDMRNILNNTLVASNPTKAVTLVENHDTQPGQSLESTVQPWFKPLAYAFILTRSGGYPSVFYGDMYGTKGTTTREIPALKSKIEPLLKARKDYAYGTQRDYIDNPDVIGWTREGDSTKAKSGLATVITDGPGGSKRMYVGNSNAGEIWYDLTGNRTDKITIGSDGYATFPVNGGSVSVWVQQ

SEQ ID NO: 37574 - protein, 480 aa, Cytophaga sp.
NGTMMQYFEWYVPNDGQQWNRLRTDAPYLSSVGITAVWTPPAYKGTSQADVGYGPYDLYDLGEFNQKGTVRTKYGTKGELKSAVETLHSNGIQVYGDVVMNHKAGADYTENVTAVEVNPSNRYQETSGEYNIQAWTGFNFPGRGTTYSNWKWQWFHFDGTDWDQSRSLSRIFKFDGKAWDWEVSSENGNYDYLMYADYDYDHPDVVNEMKKWGVWYANEVGLDGYRLDAVKHIKFQFLKDWVDNARAATGKEMFTVGEYWQNDLGALNNYLAKVNYNQSLFDAPLHYNFYAASTGGGYYDMRNILNNTLVASNPTKAVTLVENHDTQPGQSLESTVQPWFKPLAYAFILTRSGGYPSVFYGDMYGTKGTTTREIPALKSKIEPLLKARKDYAYGTQRDYIDNPDVIGWTREGDSTKAKSGLATVITDGPGGSKRMYVGTSNAGEIWYDLTGNRTDKITIGSDGYATFPVNGGSVSVWVQQ

SEQ ID NO: 37575 - protein, 480 aa, Cytophaga sp.
NGTMMQYFEWYVPNDGQQWNRLRTDAPYLSSVGITAVWTPPAYKGTSQADVGYGPYDLYDLGEFNQKGTVRTKYGTKGELKSAVNTLHSNGIQVYGDVVMNHKAGADYTENVTAVEVNPSNRYQETSGEYNIQAWTGFNFPGRGTTYSNWKWQWFHFDGTDWDQSRSLSRIFKFDGKAWDWEVSSENGNYDYLMYADYDYDHPDVVNEMKKWGVWYANEVGLDGYRLDAVKHIKFQFLKDWVDNARAATGKEMFTVGEYWQNDLGALNNYLFKVNYNQSLFDAPLHYNFYAASTGGGYYDMRNILNNTLVASNPTKAVTLVENHDTQPGQSLESTVQPWFKPLAYAFILTRSGGYPSVFYGDMYGTKGTTTREIPALKSKIEPLLKARKDYAYGTQRDYIDNPDVIGWTREGDSTKAKSGLATVITDGPGGSKRMYVGTSNAGEIWYDLTGNRTDKITIGSDGYATFPVNGGSVSVWVQQ

SEQ ID NO: 37576 - protein, 480 aa, Cytophaga sp.
NGTMMQYFEWYVPNDGQQWNRLRTDAPYLSSVGITAVWTPPAYKGTSQYDVGYGPYDLYDLGEFNQKGTVRTKYGTKGELKSAVNTLHSNGIQVYGDVVMNHKAGADYTENVTAVEVNPSNRYQETSGEYNIQAWTGFNFPGRGTTYSNWKWQWFHFDGTDWDQSRSLSRIFKFDGKAWDWEVSSENGNYDYLMYADYDYDHPDVVNEMKKWGVWYANEVGLDGYRLDAVKHIKFQFLKDWVDNARAATGKEMFTVGEYWQNDLGALNNYLAKVNYNQSLFDAPLHYNFYAASTGGGYYDMRNILNNTLVASNPTKAVTLVENHDTQPGQSLESTVQPWFKPLAYAFILTRSGGYPSVFYGDMYGTKGTTTREIPALKSKIEPLLKARKDYAYGTQRDYIDNPDVIGWTREGDSTKAKSGLATVITDGPGGSKRMYVGTSNAGEIWYDLTGNRTDKITIGSDGYATFPVNGGSVSVWVQQ

SEQ ID NO: 37577 - protein, 480 aa, Cytophaga sp.
NGTMMQYFEWYVPNDGQQWNRLRTDAPYLSSVGITAVWTPPAYKGTSQADVGYGPYDLYDLGEFNQKGTVRTKYGTKGELKSAVNTLHSNGIQVYGDVVMNHKAGADYTENVTAVEVNPSNRYQETSGEYNIQAWTGFNFPGRGTTYSNWKWQWFHFDGTDWDQSRSLSRIFKFDGKAWDWEVSSENGNYDYLMYADYDYDHPDVVNEMKKWGVWYANEVGLDGYRLDAVKHIKFQFLKDWVDNARAATGKEMFTVGEYWQNDLGALNNYLAKVNYNQSLFDAPLHYNFYAASTGGGDYDMRNILNNTLVASNPTKAVTLVENHDTQPGQSLESTVQPWFKPLAYAFILTRSGGYPSVFYGDMYGTKGTTTREIPALKSKIEPLLKARKDYAYGTQRDYIDNPDVIGWTREGDSTKAKSGLATVITDGPGGSKRMYVGTSNAGEIWYDLTGNRTDKITIGSDGYATFPVNGGSVSVWVQQ

SEQ ID NO: 37578 - protein, 480 aa, Cytophaga sp.
NGTMMQYFEWYVPNDGQQWNRLRTDAPYLSSVGITAVWTPPAYKGTSQADVGYGPYDLYDLGEFNQKGTVRTKYGTKGELKSAVNTLHSNGIQVYGDVVMNHKAGADYTENVTAVEVNPSNRYQETSGEYNIQAWTGFNFPGRGTTYSNWKWQWFHFDGTDWDQSRSLSRIFKFDGKAWDWEVSSENGNYDYLMYADYDYDHPDVVNEMKKWGVWYANEVGLDGYRLDAVKHIKFQFLKDWVDNARAATGKEMFTVGEYWQNDLGALNNYLAKVAYNQSLFDAPLHYNFYAASTGGGYYDMRNILNNTLVASNPTKAVTLVENHDTQPGQSLESTVQPWFKPLAYAFILTRSGGYPSVFYGDMYGTKGTTTREIPALKSKIEPLLKARKDYAYGTQRDYIDNPDVIGWTREGDSTKAKSGLATVITDGPGGSKRMYVGTSNAGEIWYDLTGNRTDKITIGSDGYATFPVNGGSVSVWVQQ

SEQ ID NO: 37579 - protein, 480 aa, Cytophaga sp.
NGTMMQYFEWYVPNDGQQWNRLRTDAPYLSSVGITAVWTPPAYKGTSQADVGYGPYDLYDLGEFNQKGTVRTKYGTKGELKSAVNTLHSNGIQVYGDVVMNHKAGADYTENVTAVEVNPSNRYQETSGEYNIQAWTGFNFPGRGTTYSNWKWQWFHFDGTDWDQSRSLSRIFKFDGKAWDWEVSSENGNYDYLMYADYDYDHPDVVNEMKKWGVWYANEVGLDGYRLDAVKHIKFQFLKDWVDNARAATGKEMFTVGEYWQNDLGALNNYLAKVNYNQSLFDAPLHYNFYAASTGGGYYDMRNILNNTLVASNPTKAVTLVENHDTQPGQSLESTVQPWFKPLAYAFILTRSGGYPSVFYGDMYGTKGTTTREIPALKSKIEPLLKARKDYAYGTQFDYIDNPDVIGWTREGDSTKAKSGLATVITDGPGGSKRMYVGTSNAGEIWYDLTGNRTDKITIGSDGYATFPVNGGSVSVWVQQ

SEQ ID NO: 37580 - protein, 480 aa, Cytophaga sp.
NGTMMQYFEWYVPNDGQQWNRLRTDAPYLSSVGITAVWTPPAYKGTSQADVGYGPYDLYDLGEFNQKGTVRTKYGTKGELKSAVNTLHSNGIQVYGDVVMNHKAGADYTENVTAVEVNPSNRYQETSGEYNIQAWTGFNFPGRGTTYSNWKWQWFHFDGTDWDQSRSLSRIFKFDGKAWDWEVSSENGNYDYLMYADYDYDHPDVVNEMKKWGVWYANEVGLDGYRLDAVKHIKFQFLKDWVDNARKATGKEMFTVGEYWQNDLGALNNYLAKVNYNQSLFDAPLHYNFYAASTGGGYYDMRNILNNTLVASNPTKAVTLVENHDTQPGQSLESTVQPWFKPLAYAFILTRSGGYPSVFYGDMYGTKGTTTREIPALKSKIEPLLKARKDYAYGTQRDYIDNPDVIGWTREGDSTKAKSGLATVITDGPGGSKRMYVGTSNAGEIWYDLTGNRTDKITIGSDGYATFPVNGGSVSVWVQQ

SEQ ID NO: 37581 - protein, 480 aa, Cytophaga sp.
NGTMMQYFEWYVPNDGQQWNRLRTDAPYLSSVGITAVWTPPAYKGTSQADVGYGPYDLYDLGEFNQKGTVRTKYGTKGELKSAVNTLHSNGIQVYGDVVMNHKAGADYTENVTAVEVNPSNRYQETSGEYNIQAWTGFNFPGRGDTYSNWKWQWFHFDGTDWDQSRSLSRIFKFDGKAWDWEVSSENGNYDYLMYADYDYDHPDVVNEMKKWGVWYANEVGLDGYRLDAVKHIKFQFLKDWVDNARAATGKEMFTVGEYWQNDLGALNNYLAKVNYNQSLFDAPLHYNFYAASTGGGYYDMRNILNNTLVASNPTKAVTLVENHDTQPGQSLESTVQPWFKPLAYAFILTRSGGYPSVFYGDMYGTKGTTTREIPALKSKIEPLLKARKDYAYGTQRDYIDNPDVIGWTREGDSTKAKSGLATVITDGPGGSKRMYVGTSNAGEIWYDLTGNRTDKITIGSDGYATFPVNGGSVSVWVQQ

SEQ ID NO: 37582 - protein, 480 aa, Cytophaga sp.
NGTMMQYFEWYVPNDGQQWNRLRTDAPYLSSVGITAVWTPPAYKGTSQADVGYGPYDLYDLGEFNQKGTVRTKYGTKGELKSAVNTLHSNGIQVYGDVVMNHKAGADYTENVTAVEVNPSNRYQETSGEYNIQAWTGFNFPGRGTTYSNWKWQWFHFDGTDWDQSRSLSRIFKFDGKAWDWEVSSENGNYDYLMYADYDYDHPDVVNEMKKWGVWYANEVGLDGYRLDAVKHIKFQFLKDWVDNARAATGKEMFTVGEYWQNDLGALNNYLAKVNYNQSLFDAPLHYNFYAASTGGGYYDMRNILNNTLVASNPTKAVTLVENHDTQPGQSLESTVQPWFKPLAYAFILTRSGGYPSVFYGDMYGTKGTTTREIPALKSKIEPLLKARKDYAYGTQRDYIDNPDVIGWTREGDSTKAKSGLATVITDGPGGSKRMYVGFSNAGEIWYDLTGNRTDKITIGSDGYATFPVNGGSVSVWVQQ

SEQ ID NO: 37583 - protein, 480 aa, Cytophaga sp.
NGTMMQYFEWYVPNDGQQWNRLRTDAPYLSSVGITAVWTPPAYKGTSQADVGYGPYDLYDLGEFNQKGTVRTKYGTKGELKSAVNTLHSNGIQVYGDVVMNHKAGADYTENVTAVEVNPSNRYQETSGEYNIQAWTGFNFPGRGTTYSNWKWQWFHFDGTDWDQSRSLSRIFKFDGKAWDWEVSSENGNYDYLMYADYDYDHPDVVNEMKKWGVWYANEVGLDGYRLDAVKHIKFQFLKDWVDNARAATGKEMFTVGEYWQNDLGALNNYLAKVNYNQSLFDAPLHYNFYAASTGGGYYDMRNILNNTLVASNPTKAVTLVENHDTQPGQSLESTVQPWFKPLAYAFILTRSGGYPSVFYGDMYGTKGTTTREIPALKSKIEPLLKARKDYAYGTQRDYIDNPDVIGWTREGDSTKAKSGLATVITDGPGGSKRMYVGTSNAGEIWYDLTGNRTDKITIGSDGYAHFPVNGGSVSVWVQQ

SEQ ID NO: 37584 - protein, 480 aa, Cytophaga sp.
NGTMMQYFEWYVPNDGQQWNRLRTDAPYLSSVGITAVWTPPAYKGTSQADVGYGPYDLYDLGEFNQKGTVRTKYGTKGELKSAVNTLHSNGIQVYGDVVMNHKAGADYTENVTAVEVNPSNRYQETSGEYNIQAWTGFNFPGRGTTYSNWKWQWFHFDGTDWDQSRSLSRIFKFDGKAWDWEVSSENGNYDYLMYADYDYDHPDVVNEMKKWGVWYANEVGLDGYRLDAVKHIKFQFLKDWVDNARAATGKEMFTVGEYWQNDLGALNNYLSKVNYNQSLFDAPLHYNFYAASTGGGYYDMRNILNNTLVASNPTKAVTLVENHDTQPGQSLESTVQPWFKPLAYAFILTRSGGYPSVFYGDMYGTKGTTTREIPALKSKIEPLLKARKDYAYGTQRDYIDNPDVIGWTREGDSTKAKSGLATVITDGPGGSKRMYVGTSNAGEIWYDLTGNRTDKITIGSDGYATFPVNGGSVSVWVQQ

SEQ ID NO: 37585 - protein, 480 aa, Cytophaga sp.
NGTMMQYFEWYVPNDGQQWNRLRTDAPYLSSVGITAVWTPPAYKGTSQADVGYGPYDLYDLGEFNQKGTVRTKYGTKGELKSAVNTLHSNGIQVYGDVVMNHKAGADYTENVTAVEVNPSNRYQETSGEYNIQAWTGFNFPGRGTTYSNWKWQWFHFDGTDWDQSRSLSRIFKFDGKAWDWEVSSENGNYDYLMYADYDYDHPDVVNEMKKWGVWYANEVGLDGYRLDAVKHIKFQFLKDWVDNARAATGKEMFTVGEYWQNDLGALNNYLAKVNYNQSLFDAPLHYNFYAASTGGGYYDMRDILNNTLVASNPTKAVTLVENHDTQPGQSLESTVQPWFKPLAYAFILTRSGGYPSVFYGDMYGTKGTTTREIPALKSKIEPLLKARKDYAYGTQRDYIDNPDVIGWTREGDSTKAKSGLATVITDGPGGSKRMYVGTSNAGEIWYDLTGNRTDKITIGSDGYATFPVNGGSVSVWVQQ

SEQ ID NO: 37586 - protein, 480 aa, Cytophaga sp.
NGTMMQYFEWYVPNDGQQWNRLRTDAPYLSSVGITAVWTPPAYKGTSQADVGYGPYDLYDLGEFNQKGTVRTKYGTKGELKSAVNTLHSNGIQVYGDVVMNHKAGADYTENVTAVEVNPSNRYQETSGEYNIDAWTGFNFPGRGTTYSNWKWQWFHFDGTDWDQSRSLSRIFKFDGKAWDWEVSSENGNYDYLMYADYDYDHPDVVNEMKKWGVWYANEVGLDGYRLDAVKHIKFQFLKDWVDNARAATGKEMFTVGEYWQNDLGALNNYLAKVNYNQSLFDAPLHYNFYAASTGGGYYDMRNILNNTLVASNPTKAVTLVENHDTQPGQSLESTVQPWFKPLAYAFILTRSGGYPSVFYGDMYGTKGTTTREIPALKSKIEPLLKARKDYAYGTQRDYIDNPDVIGWTREGDSTKAKSGLATVITDGPGGSKRMYVGTSNAGEIWYDLTGNRTDKITIGSDGYATFPVNGGSVSVWVQQ

SEQ ID NO: 37587 - protein, 480 aa, Cytophaga sp.
NGTMMQYFEWYVPNDGQQWNRLRTDAPYLSSVGITAVWTPPAYKGTSQADVGYGPYDLYDLGEFNQKGTVRTKYGTKGELKSAVNELHSNGIQVYGDVVMNHKAGADYTENVTAVEVNPSNRYQETSGEYNIQAWTGFNFPGRGTTYSNWKWQWFHFDGTDWDQSRSLSRIFKFHGKAWDWPVSSENGNYDYLMYADYDYDHPDVVNEMKKWGVWYANEVGLDGYRLDAVKHIKFSFLKDWVDNARAATGKEMFTVGEYWQNDLGALNNYLAKVNYNQSLFDAPLHYNFYAASTGGGYYDMRNILNNTLVASNPTKAVTLVENHDTQPGQSLESTVQPWFKPLAYAFILTRSGGYPAVFYGDMYGTKGTTTYEIPALKSKIEPLLKARKDYAYGTQRDYIDNPDVIGWTREGDSTKAKSGLATVITDGPGGSKRMYVGTSNAGEIWYDLTGNRTDKITIGSDGYATFPVNGGSVSVWVQQ

SEQ ID NO: 37588 - protein, 480 aa, Cytophaga sp.
NGTMMQYFEWYVPNDGQQWNRLRTDAPYLSSVGITAVWTPPAYKGTSQADVGYGPYDLYDLGEFNQKGTVRTKYGTKGELKSAVNTLHSNGIQVYGDVVMNHKAGADYTENVTAVEVNPSNRYQETSGEYNIQAWTGFNFPGRGTTYSNWKWQWFHFDGTDWDQSRSLSRIFKFDGKAWDWEVSSENGNYDYLMYADYDYDHPDVVNEMKKWGVWYANEVGLDGYRLDAVKHIKFQFLKDWVDNARAATGKEMFTVGEYWQNDLGALNNYLAKVNYNQSLFDAPLHYNFYAASTGGGYYDMRNILNNTLVASNPTKAVTLVENHDTQPGQSLESTVQPWFKPLAYAFILTRSGGYPSVFYGDMYGTKGTTTREIPALKSKIEPLLKARKDYAYGTQRDYIDNPDVIGWTREGDSTKAKSGLATVITDGPGGSKRMYVGTSNAGEIWYDLTGNRTDKITIGSDGAATFPVNGGSVSVWVQQ

SEQ ID NO: 37589 - protein, 480 aa, Cytophaga sp.
NGTMMQYFEWYVPNDGQQWNRLRTDAPYLSSVGITAVWTPPAYKGTSQADVGYGPYDLYDLGEFNQKGTVRTKYGTKGELKNAVNTLHSNGIQVYGDVVMNHKAGADYTENVTAVEVNPSNRYQETSGEYNIQAWTGFNFPGRGTTYSNWKWQWFHFDGTDWDQSRSLSRIFKFDGKAWDWEVSSENGNYDYLMYADYDYDHPDVVNEMKKWGVWYANEVGLDGYRLDAVKHIKFQFLKDWVDNARAATGKEMFTVGEYWQNDLGALNNYLAKVNYNQSLFDAPLHYNFYAASTGGGYYDMRNILNNTLVASNPTKAVTLVENHDTQPGQSLESTVQPWFKPLAYAFILTRSGGYPSVFYGDMYGTKGTTTREIPALKSKIEPLLKARKDYAYGTQRDYIDNPDVIGWTREGDSTKAKSGLATVITDGPGGSKRMYVGTSNAGEIWYDLTGNRTDKITIGSDGYATFPVNGGSVSVWVQQ

SEQ ID NO: 37590 - protein, 480 aa, Cytophaga sp.
NGTMMQYFEWYVPNDGQQWNRLRTDAPYLSSVGITAVWTPPAYKGTSQADVGYGPYDLYDLGEFNQKGTVRTKYGTKGELKSAVNTLHSNGIQVYGDVVMNHKAGADYTENVTAVEVNPSNRYQETSGEYNIQAWTGFNFPGRGTTYSNWKWQWFHFDGTDWDQSRSLSRIFKFDGKAWDWEVSSENGNYDYLMYADYDYDHPDVVNEMKKWGVWYANEVGLDGYRLDAVKHIKFQFLKDWVDNARAATGKEMFTVGEYWQNDLGALNNYLAKVNYNQSLFDAPLHYNFYAASTGGGYYDMRNILNNTLVAKNPTKAVTLVENHDTQPGQSLESTVQPWFKPLAYAFILTRSGGYPSVFYGDMYGTKGTTTREIPALKSKIEPLLKARKDYAYGTQRDYIDNPDVIGWTREGDSTKAKSGLATVITDGPGGSKRMYVGTSNAGEIWYDLTGNRTDKITIGSDGYATFPVNGGSVSVWVQQ

SEQ ID NO: 37591 - protein, 480 aa, Cytophaga sp.
NGTMMQYFEWYVPNDGQQWNRLRTDAPYLSSVGITAVWTPPAYKGTSQKDVGYGPYDLYDLGEFNQKGTVRTKYGTKGELKSAVNTLHSNGIQVYGDVVMNHKAGADYTENVTAVEVNPSNRYQETSGEYNIQAWTGFNFPGRGTTYSNWKWQWFHFDGTDWDQSRSLSRIFKFDGKAWDWEVSSENGNYDYLMYADYDYDHPDVVNEMKKWGVWYANEVGLDGYRLDAVKHIKFQFLKDWVDNARAATGKEMFTVGEYWQNDLGALNNYLAKVNYNQSLFDAPLHYNFYAASTGGGYYDMRNILNNTLVASNPTKAVTLVENHDTQPGQSLESTVQPWFKPLAYAFILTRSGGYPSVFYGDMYGTKGTTTREIPALKSKIEPLLKARKDYAYGTQRDYIDNPDVIGWTREGDSTKAKSGLATVITDGPGGSKRMYVGTSNAGEIWYDLTGNRTDKITIGSDGYATFPVNGGSVSVWVQQ

SEQ ID NO: 37592 - protein, 480 aa, Cytophaga sp.
NGTMMQYFEWYVPNDGQQWNRLRTDAPYLSSVGITAVWTPPAYKGTSQADVGYGPYDLYDLGEFNQKGTVRTKYGTKGELKSAVNTLHSNGIQVYGDVVMNHKAGADYTENVTAVEVNPSNRYQETSGEYNIQAWTGFNFPGRGTTYSNWKWQWFHFDGTDWDQSRSLSRIFKFDGKAWDWEVSSENGNYDYLMYADYDYDHPDVVNEMKKWGVWYANEVGLDGYRLDAVKHIKFQFLKDWVDNARAATGKEMFTVGEYWQNDLGALNNYLAKVNYNQSLFDAPLHYNFYAASTGGGYYDMRNILNNTLVASNPTKAVTLVENHDTQPGQSLESTVQPWFKPLAYAFILTRSGGYPSVFYGDMYGTKGTTTREIPALKSKIEPLLKARKDYAYGTQRDYIDNPDVIGWTREGDSTKAKSGLATVITDGPGGSKRMYVGTSNAGEIWYDLTGNRTDKATIGSDGYATFPVNGGSVSVWVQQ

SEQ ID NO: 37593 - protein, 480 aa, Cytophaga sp.
NGTMMQYFEWYVPNDGQQWNRLRTDAPYLSSVGITAVWTPPAYKGTSQTDVGYGPYDLYDLGEFNQKGTVRTKYGTKGELKSAVNTLHSNGIQVYGDVVMNHKAGADYTENVTAVEVNPSNRYQETSGEYNIQAWTGFNFPGRGTTYSNWKWQWFHFDGTDWDQSRSLSRIFKFDGKAWDWEVSSENGNYDYLMYADYDYDHPDVVNEMKKWGVWYANEVGLDGYRLDAVKHIKFQFLKDWVDNARAATGKEMFTVGEYWQNDLGALNNYLAKVNYNQSLFDAPLHYNFYAASTGGGYYDMRNILNNTLVASNPTKAVTLVENHDTQPGQSLESTVQPWFKPLAYAFILTRSGGYPSVFYGDMYGTKGTTTREIPALKSKIEPLLKARKDYAYGTQRDYIDNPDVIGWTREGDSTKAKSGLATVITDGPGGSKRMYVGTSNAGEIWYDLTGNRTDKITIGSDGYATFPVNGGSVSVWVQQ

SEQ ID NO: 37594 - protein, 480 aa, Cytophaga sp.
NGTMMQYFEWYVPNDGQQWNRLRTDAPYLSSVGITAVWTPPAYKGTSQADVGYGPYDLYDLGEFNQKGTVRTKYGTKGELKSAVNTLHSNGIQVYGDVVMNHKAGADYTENVTAVEVNPSNRYQETSGEYNIQAWTGFNFPGRGTTYSNWKWMWFHFDGTDWDQSRSLSRIFKFDGKAWDWEVSSENGNYDYLMYADYDYDHPDVVNEMKKWGVWYANEVGLDGYRLDAVKHIKFQFLKDWVDNARAATGKEMFTVGEYWQNDLGALNNYLAKVNYNQSLFDAPLHYNFYAASTGGGYYDMRNILNNTLVASNPTKAVTLVENHDTQPGQSLESTVQPWFKPLAYAFILTRSGGYPSVFYGDMYGTKGTTTREIPALKSKIEPLLKARKDYAYGTQRDYIDNPDVIGWTREGDSTKAKSGLATVITDGPGGSKRMYVGTSNAGEIWYDLTGNRTDKITIGSDGYATFPVNGGSVSVWVQQ

SEQ ID NO: 37595 - protein, 480 aa, Cytophaga sp.
NGTMMQYFEWYVPNDGQQWNRLRTDAPYLSSVGITAVWTPPAYKGTSQADVGYGPYDLYDLGEFNQKGTVRTKYGTKGELKSAVNTLHSNGIQVYGDVVMNHKAGADYTENVTAVEVNPSNRYQETSGEYNIQAWTGFNFPGRGTTYSNFKWQWFHFDGTDWDQSRSLSRIFKFDGKAWDWPVSSENGNYDYLMYADYDYDHPDVVNEMKKWGVWYANEVGLDGYRLDAVKHIKFSFLKDWVDNARAATGKEMFTVGEYWQNDLGALNNYLAKVNYNQSLFDAPLHYNFYAASTGGGDYDMRNILNNTLVASNPTKAVTLVENHDTQPGQSLESTVQPWFKPLAYAFILTRSGGYPSVFYGDMYGTKGTTTREIPALKSKIEPLLKARKDYAYGTQRDYIDNPDVIGWTREGDSTKAKSGLATVITDGPGGSKRMYVGTSNAGEIWYDLTGNRTDKITIGSDGYATFPVNKESVSVWVQQ

SEQ ID NO: 37596 - protein, 480 aa, Cytophaga sp.
NGTMMQYFEWYVPNDGQQWNRLRTDAPYLSSVGITAVWTPPAYKGTSQADVGYGPYDLYDLGEFNQKGTVRTKYGTKGELKSAVNTLHSNGIQVYGDVVMNHKAGADYTENVTAVEVNPSNRYQETSGEYNIQAWTGFNFPGRGTTYSNWKWQWFHFDGTDWDQSRSLSRIFKFDGKAWDWEVSSENGNYDYLMYADYDYDHPDVVNEMKKWGVWYANEVGLDGYRLDAVKHIKFQFLKDWVDNARAATGKEMFTVGEYWQNDLGALNNYLAKVNYNQSLFDAPLHYNFYAASTGGGYYDMRNILNNTLVASNPTKAVTLVENHDTQPGQSLESTVQPWFKPLAYAFILTRSGGYPSVFYGDMYGTKGTTTLEIPALKSKIEPLLKARKDYAYGTQRDYIDNPDVIGWTREGDSTKAKSGLATVITDGPGGSKRMYVGTSNAGEIWYDLTGNRTDKITIGSDGYATFPVNGGSVSVWVQQ

SEQ ID NO: 37597 - protein, 480 aa, Cytophaga sp.
NGTMMQYFEWYVPNDGQQWNRLRTDAPYLSSVGITAVWTPPAYKGTSQADVGYGPYDLYDLGEFNQKGTVRTKYGTKGELKSAVNTLHSNGIQVYGDVVMNHKAGADYTENVTAVEVNPSNRSQETSGEYNIQAWTGFNFPGRGTTYSNWKWQWFHFDGTDWDQSRSLSRIFKFDGKAWDWEVSSENGNYDYLMYADYDYDHPDVVNEMKKWGVWYANEVGLDGYRLDAVKHIKFQFLKDWVDNARAATGKEMFTVGEYWQNDLGALNNYLAKVNYNQSLFDAPLHYNFYAASTGGGYYDMRNILNNTLVASNPTKAVTLVENHDTQPGQSLESTVQPWFKPLAYAFILTRSGGYPSVFYGDMYGTKGTTTREIPALKSKIEPLLKARKDYAYGTQRDYIDNPDVIGWTREGDSTKAKSGLATVITDGPGGSKRMYVGTSNAGEIWYDLTGNRTDKITIGSDGYATFPVNGGSVSVWVQQ

SEQ ID NO: 37598 - protein, 480 aa, Cytophaga sp.
NGTMMQYFEWYVPNDGQQWNRLRTDAPYLSSVGITAVWTPPAYKGTSQADVGYGPYDLYDLGEFNQKGTVRTKYGTKGELKSAVNTLHSNGIQVYGDVVMNHKAGADYTENVTAVEVNPSNRYQETSGEYNIQAWTGFNFPGRGTTYSNWKWQWFHFDGTDWDQSRSLSRIFKFDGKAWDWEVSSENGNYDYLMYADYDYDHPDVVNEMKKWGVWYANEVGLDGYRLDAVKHIKFQFLKDWVDNARAATGKEMFTVGEYWQNDLGALNNYLAKVNYNQSLFDAPLHYNFYAASTGGGYYDMRCILNNTLVASNPTKAVTLVENHDTQPGQSLESTVQPWFKPLAYAFILTRSGGYPSVFYGDMYGTKGTTTREIPALKSKIEPLLKARKDYAYGTQRDYIDNPDVIGWTREGDSTKAKSGLATVITDGPGGSKRMYVGTSNAGEIWYDLTGNRTDKITIGSDGYATFPVNGGSVSVWVQQ

SEQ ID NO: 37599 - protein, 480 aa, Cytophaga sp.
NGTMMQYFEWYVPNDGQQWNRLRTDAPYLSSVGITAVWTPPAYKGTSQADVGYGPYDLYDLGEFNQKGTVRTKYGTKGELKSAVNTLHSNGIQVYGDVVMNHKAGADYTENVTAVEVNPSNRYQETSGEYNIQAWTGFNFPGRGTTYSNWKWQWFHFDGTDWDQSRSLSRIFKFDGKAWDWEVSSENGNYDYLMYADYDYDHPDVVNEMKKWGVWYANEVGLDGYRLDAVKHIKFQFLKDWVDNARAATGKEMFTVGEYWQNDLGALNNYLAKVNYNQSLFDAPLHYNFYAASTGGGYYDMRNILNNTLVASVPTKAVTLVENHDTQPGQSLESTVQPWFKPLAYAFILTRSGGYPSVFYGDMYGTKGTTTREIPALKSKIEPLLKARKDYAYGTQRDYIDNPDVIGWTREGDSTKAKSGLATVITDGPGGSKRMYVGTSNAGEIWYDLTGNRTDKITIGSDGYATFPVNGGSVSVWVQQ

SEQ ID NO: 37600 - protein, 480 aa, Cytophaga sp.
NGTMMQYFEWYVPNDGQQWNRLRTDAPYLSSVGITAVWTPPAYKGTSQADVGYGPYDLYDLGEFNQKGTVRTKYGTKGELKSAVNTLHSNGIQVYGDVVMNHKAGADYTENVTAVEVNPSNRYQETSGEYNIQAWTGFNFPGRGTTYSNWKWQWFHFDGTDWDQSRSLSRIFKFDGKAWDWEVSSENGNYDYLMYADYDYDHPDVVNEMKKWGVWYANEVGLDGYRLDAVKHIKFQFLKDWVDNARAATGKEMFTVGEYWQNDLGALNNYLAKVNYNQSLFDAPLHYNFYAASTGGGYYDMRNILYNTLVASNPTKAVTLVENHDTQPGQSLESTVQPWFKPLAYAFILTRSGGYPSVFYGDMYGTKGTTTREIPALKSKIEPLLKARKDYAYGTQRDYIDNPDVIGWTREGDSTKAKSGLATVITDGPGGSKRMYVGTSNAGEIWYDLTGNRTDKITIGSDGYATFPVNGGSVSVWVQQ

SEQ ID NO: 37601 - protein, 480 aa, Cytophaga sp.
NGTMMQYFEWYVPNDGQQWNRLRTDAPYLSSVGITAVWTPPAYKGTSQADVGYGPYDLYDLGEFNQKGTVRTKYGTKGELKSAVNTLHSNGIQVYGDVVMNHKAGADYTENVTAVEVNPSNRYQETSGEYNIQAWTGFNFPGRGTTYSNWKWQWFHFDGTDWDQSRSLSRIFKFDGKAWDWEVSSENGNYDYLMYADYDYDHPDVVNEMKKWGVWYANEVGLDGYRLDAVKHIKFQFLKDWVDNARAATGKEMFTVGEYWQNDLGALNNYLAKVNYNQSLFDAPLHYNFYAASTGGGHYDMRNILNNTLVASNPTKAVTLVENHDTQPGQSLESTVQPWFKPLAYAFILTRSGGYPSVFYGDMYGTKGTTTREIPALKSKIEPLLKARKDYAYGTQRDYIDNPDVIGWTREGDSTKAKSGLATVITDGPGGSKRMYVGTSNAGEIWYDLTGNRTDKITIGSDGYATFPVNGGSVSVWVQQ

SEQ ID NO: 37602 - protein, 480 aa, Cytophaga sp.
NGTMMQYFEWYVPNDGQQWNRLRTDAPYLSSVGITAVWTPPAYKGTSQADVGYGPYDLYDLGEFNQKGTVRTKYGTKGELKSAVNTLHSNGIQVYGDVVMNHKAGADYTENVTAVEVNPSNRYQETSGEYNIQAWTGFNFPGRGTTYSNWKWQWFHFDGTDWDQSRSLSRIFKFDGKAWDWEVSSENGNYDYLMYADYDYDHPDVVNEMKKWGVWYANEVGLDGYRLDAVKHIKFQFLKDWVDNARAATGKEMFTVGEYWQNDLGALNNYLAKVNYNQSLFDAPLHYNFYAASTGGGYYDMRTILNNTLVASNPTKAVTLVENHDTQPGQSLESTVQPWFKPLAYAFILTRSGGYPSVFYGDMYGTKGTTTREIPALKSKIEPLLKARKDYAYGTQRDYIDNPDVIGWTREGDSTKAKSGLATVITDGPGGSKRMYVGTSNAGEIWYDLTGNRTDKITIGSDGYATFPVNGGSVSVWVQQ

SEQ ID NO: 37603 - protein, 480 aa, Cytophaga sp.
NGTMMQYFEWYVPNDGQQWNRLRTDAPYLSSVGITAVWTPPAYKGTSQADVGYGPYDLYDLGEFNQKGTVRTKYGTKGELKSAVNTLHSNGIQVYGDVVMNHKAGADYTENVTAVEVNPSNRYQETSGEYNIQAWTGFNFPGRGTTYSNWKWQWFHFDGTDWDSSRSLSRIFKFDGKAWDWEVSSENGNYDYLMYADYDYDHPDVVNEMKKWGVWYANEVGLDGYRLDAVKHIKFQFLKDWVDNARAATGKEMFTVGEYWQNDLGALNNYLAKVNYNQSLFDAPLHYNFYAASTGGGYYDMRNILNNTLVASNPTKAVTLVENHDTQPGQSLESTVQPWFKPLAYAFILTRSGGYPSVFYGDMYGTKGTTTREIPALKSKIEPLLKARKDYAYGTQRDYIDNPDVIGWTREGDSTKAKSGLATVITDGPGGSKRMYVGTSNAGEIWYDLTGNRTDKITIGSDGYATFPVNGGSVSVWVQQ

SEQ ID NO: 37604 - protein, 480 aa, Cytophaga sp.
NGTMMQYFEWYVPNDGQQWNRLRTDAPYLSSVGITAVWTPPAYKGTSQADVGYGPYDLYDLGEFNQKGTVRTKYGTKGELKSAVNTLHSNGIQVYGDVVMNHKAGADYTENVTAVEVNPSNRYQETSGEYNIQAWTGFNFPGRGTTYSNWKWQWFHFDGTDWDQSRSLSRIFKFDGKAWDWEVSSENGNYDYLMYADYDYDHPDVVNEMKKWGVWYANEVGLDGYRLDAVKHIKFQFLKDWVDNARAATGKEMFTVGEYWQNDLGALNNYLAKVNYNQSLFDAPLHYNFYAASTGGGNYDMRNILNNTLVASNPTKAVTLVENHDTQPGQSLESTVQPWFKPLAYAFILTRSGGYPSVFYGDMYGTKGTTTREIPALKSKIEPLLKARKDYAYGTQRDYIDNPDVIGWTREGDSTKAKSGLATVITDGPGGSKRMYVGTSNAGEIWYDLTGNRTDKITIGSDGYATFPVNGGSVSVWVQQ

SEQ ID NO: 37605 - protein, 480 aa, Cytophaga sp.
NGTMMQYFEWYVPNDGQQWNRLRTDAPYLSSVGITAVWTPPAYKGTSQADVGYGPYDLYDLGEFNQKGTVRTKYGTKGELKSAVNTLHSNGIQVYGDVVMNHKAGADYTENVTAVEVNPSNRYQETSGEYNIQAWTGFNFPGRGTTYSNWKWQWFHFDGTDWDQSRSLSRIFKFDGKAWDWEVSSENGNYDYLMYADYDYDHPDVVNEMKKWGVWYANEVGLDGYRLDAVKHIKFQFLKDWVDNARAATGKEMFTVGEYWQNDLGALNNYLAKVNYNQSLFDAPLHYNFYAASTGGGYYDMRNILNNTLVASIPTKAVTLVENHDTQPGQSLESTVQPWFKPLAYAFILTRSGGYPSVFYGDMYGTKGTTTREIPALKSKIEPLLKARKDYAYGTQRDYIDNPDVIGWTREGDSTKAKSGLATVITDGPGGSKRMYVGTSNAGEIWYDLTGNRTDKITIGSDGYATFPVNGGSVSVWVQQ

SEQ ID NO: 37606 - protein, 480 aa, Cytophaga sp.
NGTMMQYFEWYVPNDGQQWNRLRTDAPYLSSVGITAVWTPPAYKGTSQADVGYGPYDLYDLGEFNQKGTVRTKYGTKGELKSAVNTLHSNGIQVYGDVVMNHKAGADYTENVTAVEVNPSNRYQETSGEYNIQAWTGFNFPGRGTTYSNWKWQWFHFDGTDWDQSRSLSRIFKFDGKAWDWEVSSENGNYDYLMYADYDYDHPDVVNEMKKWGVWYANEVGLDGYRLDAVKHIKFQFLKDWVDNARAATGKEMFTVGEYWQNDLGALNNYLAKVNYNQSLFDAPLHYNFYAASTGGGYYDMRNILNNTLVASNPTKAVTLVENHDTQPGQSLESTVQPWFKPLAYAFILTRSGGYPSVFYGDMYGTKGTTTREIPQLKSKIEPLLKARKDYAYGTQRDYIDNPDVIGWTREGDSTKAKSGLATVITDGPGGSKRMYVGTSNAGEIWYDLTGNRTDKITIGSDGYATFPVNGGSVSVWVQQ

SEQ ID NO: 37607 - protein, 480 aa, Cytophaga sp.
NGTMMQYFEWYVPNDGQQWNRLRTDAPYLSSVGITAVWTPPAYKGTSQADVGYGPYDLYDLGEFNQKGTVRTKYGTKGELKAAVNTLHSNGIQVYGDVVMNHKAGADYTENVTAVEVNPSNRYQETSGEYNIQAWTGFNFPGRGTTYSNWKWQWFHFDGTDWDQSRSLSRIFKFDGKAWDWEVSSENGNYDYLMYADYDYDHPDVVNEMKKWGVWYANEVGLDGYRLDAVKHIKFQFLKDWVDNARAATGKEMFTVGEYWQNDLGALNNYLAKVNYNQSLFDAPLHYNFYAASTGGGYYDMRNILNNTLVASNPTKAVTLVENHDTQPGQSLESTVQPWFKPLAYAFILTRSGGYPSVFYGDMYGTKGTTTREIPALKSKIEPLLKARKDYAYGTQRDYIDNPDVIGWTREGDSTKAKSGLATVITDGPGGSKRMYVGTSNAGEIWYDLTGNRTDKITIGSDGYATFPVNGGSVSVWVQQ

SEQ ID NO: 37608 - protein, 480 aa, Cytophaga sp.
NGTMMQYFEWYVPNDGQQWNRLRTDAPYLSSVGITAVWTPPAYKGTSQADVGYGPYDLYDLGEFNQKGTVRTKYGTKGELKSAVNTLHSNGIQVYGDVVMNHKAGADYTENVTAVEVNPSNRYQETSGEYNIQAWTGFNFPGRGTTYSNWKWQWFHFDGTDWDQSRSLSRIFKFDGKAWDWEVSSENGNYDYLMYADYDYDHPDVVNEMKKWGVWYANEVGLDGYRLDAVKHIKFQFLKDWVDNARAATGKEMFTVGEYWQNDLGALNNYLAKVNYNQSLFDAPLHYNFYAASTGGGYYDMRNILNNTLVASNPTKAVTLVENHDTQPGQSLESTVQPWFKPLAYAFILTRSGGYPSVFYGDMYGTKGTTTREIPALKSKIEPLLKARKDYAYGTQRDYIDNPDVIGWTREGDSTKAKSGLATVITDGPGGSKRMYVGTSNAGEIWYDLTGNRTDLITIGSDGYATFPVNGGSVSVWVQQ

SEQ ID NO: 37609 - protein, 480 aa, Cytophaga sp.
NGTMMQYFEWYVPNDGQQWNRLRTDAPYLSSVGITAVWTPPAYKGTSQADVGYGPYDLYDLGEFNQKGTVRTKYGTKGELKSAVNTLHSNGIQVYGDVVMNHKAGADYTENVTAVEVNPSNRYQETSGEYNIQAWTGFNFPGRGTTYSNWKWQWFHFDGTDWDQSRSLSRIFKFDGKAWDWEVSSENGNYDYLMYADYDYDHPDVVNEMKKWGVWYANEVGLDGYRLDAVKHIKFQFLKDWVDNARAATGKEMFTVGEYWQNDLGALNNYLAKVNYNQSLFDAPLHYNFYAASTGGGYYDMRNILNNTLVASNPTKAVTLVENHDTQPGQSLESTVQPWFKPLAYAFILTRSGGYPSVFYGDMYGTKGTTTDEIPALKSKIEPLLKARKDYAYGTQRDYIDNPDVIGWTREGDSTKAKSGLATVITDGPGGSKRMYVGTSNAGEIWYDLTGNRTDKITIGSDGYATFPVNGGSVSVWVQQ

SEQ ID NO: 37610 - protein, 480 aa, Cytophaga sp.
NGTMMQYFEWYVPNDGQQWNRLRTDAPYLSSVGITAVWTPPAYKGTSQADVGYGPYDLYDLGEFNQKGTVRTKYGTKGELKSAVNTLHSNGIQVYGDVVMNHKAGADYTENVTAVEVNPSNRYQETSIEYNIQAWTGFNFPGRGTTYSNWKWQWFHFDGTDWDQSRSLSRIFKFDGKAWDWEVSSENGNYDYLMYADYDYDHPDVVNEMKKWGVWYANEVGLDGYRLDAVKHIKFQFLKDWVDNARAATGKEMFTVGEYWQNDLGALNNYLAKVNYNQSLFDAPLHYNFYAASTGGGYYDMRNILNNTLVASNPTKAVTLVENHDTQPGQSLESTVQPWFKPLAYAFILTRSGGYPSVFYGDMYGTKGTTTREIPALKSKIEPLLKARKDYAYGTQRDYIDNPDVIGWTREGDSTKAKSGLATVITDGPGGSKRMYVGTSNAGEIWYDLTGNRTDKITIGSDGYATFPVNGGSVSVWVQQ

SEQ ID NO: 37611 - protein, 480 aa, Cytophaga sp.
NGTMMQYFEWYVPNDGQQWNRLRTDAPYLSSVGITAVWTPPAYKGTSQADVGYGPYDLYDLGEFNQKGTVRTKYGTKGELKIAVNTLHSNGIQVYGDVVMNHKAGADYTENVTAVEVNPSNRYQETSGEYNIQAWTGFNFPGRGTTYSNWKWQWFHFDGTDWDQSRSLSRIFKFDGKAWDWEVSSENGNYDYLMYADYDYDHPDVVNEMKKWGVWYANEVGLDGYRLDAVKHIKFQFLKDWVDNARAATGKEMFTVGEYWQNDLGALNNYLAKVNYNQSLFDAPLHYNFYAASTGGGYYDMRNILNNTLVASNPTKAVTLVENHDTQPGQSLESTVQPWFKPLAYAFILTRSGGYPSVFYGDMYGTKGTTTREIPALKSKIEPLLKARKDYAYGTQRDYIDNPDVIGWTREGDSTKAKSGLATVITDGPGGSKRMYVGTSNAGEIWYDLTGNRTDKITIGSDGYATFPVNGGSVSVWVQQ

SEQ ID NO: 37612 - protein, 480 aa, Cytophaga sp.
NGTMMQYFEWYVPNDGQQWNRLRTDAPYLSSVGITAVWTPPAYKGTSQADVGYGPYDLYDLGEFNQKGTVRTKYGTKGELKSAVNTLHSNGIQVYGDVVMNHKAGADYTENVTAVEVNPSNRYQETSGEYNIQAWTGFNFPGRGTTYSNWKWQWFHFDGTDWDQSRSLSRIFKFDGKAWDWEVSSENGNYDYLMYADYDYDHPDVVNEMKKWGVWYANEVGLDGYRLDAVKHIKFQFLKDWVDNARAATGKEMFTVGEYWQNDLGALNNYLAKVNYNQSLFDAPLHYNFYAASTGGGYYDMRNILNNTLVASNPTKAVTLVENHDTQPGQSLESTVQPWFKPLAYAFILTRSGGYPSVFYGDMYGTKGTTTREIPALKSKIEPLLKARKDYAYGTQRDYIDNPDVIGWTREGDSVKAKSGLATVITDGPGGSKRMYVGTSNAGEIWYDLTGNRTDKITIGSDGYATFPVNGGSVSVWVQQ

SEQ ID NO: 37613 - protein, 480 aa, Cytophaga sp.
NGTMMQYFEWYVPNDGQQWNRLRTDAPYLSSVGITAVWTPPAYKGTSQADVGYGPYDLYDLGEFNQKGTVRTKYGTKGELKSAVNTLHSNGIQVYGDVVMNHKAGADYTENVTAVEVNPSNRYQETSGEYNIQAWTGFNFPGRGTTYSNWKWQWFHFDGTDWDQSRSLSRIFKFDGKAWDWEVSSENGNYDYLMYADYDYDHPDVVNEMKKWGVWYANEVGLDGYRLDAVKHIKFQFLKDWVDNARAATGKEMFTVGEYWQNDLGALNNYLAKVNYNQSLFDAPLHYNFYAASTGGGYYDMRNILNNTLVASNPTKAVTLVENHDTQPGQSLESTVQPWFKPLAYAFILTRSGGYPSVFYGDMYGTKGTTTREIPALKSKIEPLLKARKDYAYGTQLDYIDNPDVIGWTREGDSTKAKSGLATVITDGPGGSKRMYVGTSNAGEIWYDLTGNRTDKITIGSDGYATFPVNGGSVSVWVQQ

SEQ ID NO: 37614 - protein, 480 aa, Cytophaga sp.
NGTMMQYFEWYVPNDGQQWNRLRTDAPYLSSVGITAVWTPPAYKGTSQADVGYGPYDLYDLGEFNQKGTVRTKYGTKGELKSAVNTLHSNGIQVYGDVVMNHKAGADYTENVTAVEVNPSNRYQETSGEYNIQAWTGFNFPGRGTTYSNWKWQWFHFDGTDWDQSRSLSRIFKFDGKAWDWEVSSENGNYDYLMYADYDYDHPDVVNEMKKWGVWYANEVGLDGYRLDAVKHIKFQFLKDWVDNARAATGKEMFTVGEYWQNDLGALNNYLAKVNYNQSLFDAPLHYNFYAASTGGGYYDMRNILNNTLVASNPTKAVTLVENHDTQPGQSLESTVQPWFKPLAYAFILTRSGGYPSVFYGDMYGTKGTTTREIPALKSKIEPLLKARKDYAYGTQRDYIDNPDVIGWTREGDSTKAKSGLATVITDGPGGSKRMYVGTSNAGEIWYDLTGNRTDKITIGSDGYSTFPVNGGSVSVWVQQ

SEQ ID NO: 37615 - protein, 480 aa, Cytophaga sp.
NGTMMQYFEWYVPNDGQQWNRLRTDAPYLSSVGITAVWTPPAYKGTSQADVGYGPYDLYDLGEFNQKGTVRTKYGTKGELKSAVNILHSNGIQVYGDVVMNHKAGADYTENVTAVEVNPSNRYQETSGEYNIQAWTGFNFPGRGTTYSNWKWQWFHFDGTDWDQSRSLSRIFKFDGKAWDWEVSSENGNYDYLMYADYDYDHPDVVNEMKKWGVWYANEVGLDGYRLDAVKHIKFQFLKDWVDNARAATGKEMFTVGEYWQNDLGALNNYLAKVNYNQSLFDAPLHYNFYAASTGGGYYDMRNILNNTLVASNPTKAVTLVENHDTQPGQSLESTVQPWFKPLAYAFILTRSGGYPSVFYGDMYGTKGTTTREIPALKSKIEPLLKARKDYAYGTQRDYIDNPDVIGWTREGDSTKAKSGLATVITDGPGGSKRMYVGTSNAGEIWYDLTGNRTDKITIGSDGYATFPVNGGSVSVWVQQ

SEQ ID NO: 37616 - protein, 480 aa, Cytophaga sp.
NGTMMQYFEWYVPNDGQQWNRLRTDAPYLSSVGITAVWTPPAYKGTSQADVGYGPYDLYDLGEFNQKGTVRTKYGTKGELKSAVNTLHSNGIQVYGDVVMNHKAGADYTENVTAVEVNPSNRYQETSGEYNIQAWTGFNFPGRGTTYSNWKWQWFHFDGTDWDQSRSLSRIFKFDGKAWDWEVSSENGNYDYLMYADYDYDHPDVVFEMKKWGVWYANEVGLDGYRLDAVKHIKFQFLKDWVDNARAATGKEMFTVGEYWQNDLGALNNYLAKVNYNQSLFDAPLHYNFYAASTGGGYYDMRNILNNTLVASNPTKAVTLVENHDTQPGQSLESTVQPWFKPLAYAFILTRSGGYPSVFYGDMYGTKGTTTREIPALKSKIEPLLKARKDYAYGTQRDYIDNPDVIGWTREGDSTKAKSGLATVITDGPGGSKRMYVGTSNAGEIWYDLTGNRTDKITIGSDGYATFPVNGGSVSVWVQQ

SEQ ID NO: 37617 - protein, 480 aa, Cytophaga sp.
NGTMMQYFEWYVPNDGQQWNRLRTDAPYLSSVGITAVWTPPAYKGTSQADVGYGPYDLYDLGEFNQKGTVRTKYGTKGELKSAVNTLHSNGIQVYGDVVMNHKAGADYTENVTAVEVNPSNRYQETSGEYNIQAWTGFNFPGRGTTYSNWKWQWFHFDGTDWDQSRSLSRIFKFDGKAWDWEVSSENGNYDYLMYADYDYDHPDVVNEMKKWGVWYANEVGLDGYRLDAVKHIKFQFLKDWVDNARAATGKEMFTVGEYWQNDLGALNNYLAKVNYNQSLFDAPLHYNFYAASTGGGYYDMRNILNNTLVASNPNKAVTLVENHDTQPGQSLESTVQPWFKPLAYAFILTRSGGYPSVFYGDMYGTKGTTTREIPALKSKIEPLLKARKDYAYGTQRDYIDNPDVIGWTREGDSTKAKSGLATVITDGPGGSKRMYVGTSNAGEIWYDLTGNRTDKITIGSDGYATFPVNGGSVSVWVQQ

SEQ ID NO: 37618 - protein, 480 aa, Cytophaga sp.
NGTMMQYFEWYVPNDGQQWNRLRTDAPYLSSVGITAVWTPPAYKGTSQADVGYGPYDLYDLGEFNQKGTVRTKYGTKRELKSAVNTLHSNGIQVYGDVVMNHKAGADYTENVTAVEVNPSNRYQETSGEYNIQAWTGFNFPGRGTTYSNWKWQWFHFDGTDWDQSRSLSRIFKFDGKAWDWEVSSENGNYDYLMYADYDYDHPDVVNEMKKWGVWYANEVGLDGYRLDAVKHIKFQFLKDWVDNARAATGKEMFTVGEYWQNDLGALNNYLAKVNYNQSLFDAPLHYNFYAASTGGGYYDMRNILNNTLVASNPTKAVTLVENHDTQPGQSLESTVQPWFKPLAYAFILTRSGGYPSVFYGDMYGTKGTTTREIPALKSKIEPLLKARKDYAYGTQRDYIDNPDVIGWTREGDSTKAKSGLATVITDGPGGSKRMYVGTSNAGEIWYDLTGNRTDKITIGSDGYATFPVNGGSVSVWVQQ

SEQ ID NO: 37619 - protein, 480 aa, Cytophaga sp.
NGTMMQYFEWYVPNDGQQWNRLRTDAPYLSSVGITAVWTPPAYKGTSQADVGYGPYDLYDLGEFNQKGTVRTKYGTKGELKSAVNTLHSNGIQVYGDVVMNHKAGADYTENVTAVEVNPSNRYQETSGEYNIQAWTGFNFPGRGTTYSNWKWQWFHFDGTDWDQSRSLSRIFKFDGKAWDWEVSSENGNYDYLMYADYDYDHPDVVNEMKKWGVWYANEVGLDGYRLDAVKHIKFQFLKDWVDNARAATGKEMFTVGEYWQNDLGALNNYLAKVNYNQSLFDAPLHYNFYAASTGGGYYDMRNILNNTLVASNPTKAVTLVENHDTQPGQSLESTVQPWFKPLAYAFILTRSGGYPSVFYGDMYGTKGTTTREIPALKSKIEPLLKARKDYAYGTQRDYIDNPDVIGWTREGDSTKAKSGLATVITDGPGGSKRMYVGTSNAGEIWYDLTGNRTDKITIGSDGYVTFPVNGGSVSVWVQQ

SEQ ID NO: 37620 - protein, 480 aa, Cytophaga sp.
NGTMMQYFEWYVPNDGQQWNRLRTDAPYLSSVGITAVWTPPAYKGTSQVDVGYGPYDLYDLGEFNQKGTVRTKYGTKGELKSAVNTLHSNGIQVYGDVVMNHKAGADYTENVTAVEVNPSNRYQETSGEYNIQAWTGFNFPGRGTTYSNWKWQWFHFDGTDWDQSRSLSRIFKFDGKAWDWEVSSENGNYDYLMYADYDYDHPDVVNEMKKWGVWYANEVGLDGYRLDAVKHIKFQFLKDWVDNARAATGKEMFTVGEYWQNDLGALNNYLAKVNYNQSLFDAPLHYNFYAASTGGGYYDMRNILNNTLVASNPTKAVTLVENHDTQPGQSLESTVQPWFKPLAYAFILTRSGGYPSVFYGDMYGTKGTTTREIPALKSKIEPLLKARKDYAYGTQRDYIDNPDVIGWTREGDSTKAKSGLATVITDGPGGSKRMYVGTSNAGEIWYDLTGNRTDKITIGSDGYATFPVNGGSVSVWVQQ

SEQ ID NO: 37621 - protein, 480 aa, Cytophaga sp.
NGTMMQYFEWYVPNDGQQWNRLRTDAPYLSSVGITAVWTPPAYKGTSQADVGYGPYDLYDLGEFNQKGTVRTKYGTKGELKSAVNTLHSNGIQVYGDVVMNHKAGADYTENVTAVEVNPSNRYQETSGEYNIQAWTGFNFPGRGTTYSNWKWQWFHFDGTDWDQSRSLSRIFKFTGKAWDWPVSSENGNYDYLMYADYDYDHPDVVNEMKKWGVWYANEVGLDGYRLDAVKHIKFSFLKDWVDNARAATGKEMFTVGEYWQNDLGALNNYLAKVNYNQSLFDAPLHYNFYAASTGGGYYDMRNILNNTLVASNPTKAVTLVENHDTQPGQSLESTVQPWFKPLAYAFILTRSGGYPSVFYGDMYGTKGTTTREIPALKSKIEPLLKARKDYAYGTQRDYIDNPDVIGWTREGDSTKAKSGLATVITDGPGGSKRMYVGTSNAGEIWYDLTGNRTDKITIGSDGYATFPVNGGSVSVWVQQ

SEQ ID NO: 37622 - protein, 480 aa, Cytophaga sp.
NGTMMQYFEWYVPNDGQQWNRLRTDAPYLSSVGITAVWTPPAYKGTSQADVGYGPYDLYDLGEFNQKGTVRTKYGTKGELKSAVNTLHSNGIQVYGDVVMNHKAGADYTENVTAVEVNPSNRYQETSAEYNIQAWTGFNFPGRGTTYSNWKWQWFHFDGTDWDQSRSLSRIFKFDGKAWDWEVSSENGNYDYLMYADYDYDHPDVVNEMKKWGVWYANEVGLDGYRLDAVKHIKFQFLKDWVDNARAATGKEMFTVGEYWQNDLGALNNYLAKVNYNQSLFDAPLHYNFYAASTGGGYYDMRNILNNTLVASNPTKAVTLVENHDTQPGQSLESTVQPWFKPLAYAFILTRSGGYPSVFYGDMYGTKGTTTREIPALKSKIEPLLKARKDYAYGTQRDYIDNPDVIGWTREGDSTKAKSGLATVITDGPGGSKRMYVGTSNAGEIWYDLTGNRTDKITIGSDGYATFPVNGGSVSVWVQQ

SEQ ID NO: 37623 - protein, 480 aa, Cytophaga sp.
NGTMMQYFEWYVPNDGQQWNRLRTDAPYLSSVGITAVWTPPAYKGTSQADVGYGPYDLYDLGEFNQKGTVRTKYGTKGELKSAVNTLHSNGIQVYGDVVMNHKAGADYTENVTAVEVNPSNRYQETSGEYNIQAWTGFNFPGRGTTYSNWKWQWFHFDGTDWDQSRSLSRIFKFHGKAWDWPVSSENGNYDYLMYADYDYDHPDVVNEMKKWGVWYANEVGLDGYRLDAVKHIKFSFLKDWVDNARAATGKEMFTVGEYWQNDLGALNNYLAKVNYNQSLFDAPLHYNFYAASTGGGYYDMRNILNNTLVASNPTKAVTLVENHDTQPGQSLESTVQPWFKPLAYAFILTRSGGYPAVFYGDMYGTKGTTTREIPALKSKIEPLLKARKDYAYGTQRDYIDNPDVIGWTREGDSTKAKSGLATVITDGPGGSKRMYVGTSNAGEIWYDLTGNRTDKITIGSDGYATFPVNGGSVSVWVQQ

SEQ ID NO: 37624 - protein, 480 aa, Cytophaga sp.
NGTMMQYFEWYVPNDGQQWNRLRTDAPYLSSVGITAVWTPPAYKGTSQADVGYGPYDLYDLGEFNQKGTVRTKYGTKGELKTAVNTLHSNGIQVYGDVVMNHKAGADYTENVTAVEVNPSNRYQETSGEYNIQAWTGFNFPGRGTTYSNWKWQWFHFDGTDWDQSRSLSRIFKFDGKAWDWEVSSENGNYDYLMYADYDYDHPDVVNEMKKWGVWYANEVGLDGYRLDAVKHIKFQFLKDWVDNARAATGKEMFTVGEYWQNDLGALNNYLAKVNYNQSLFDAPLHYNFYAASTGGGYYDMRNILNNTLVASNPTKAVTLVENHDTQPGQSLESTVQPWFKPLAYAFILTRSGGYPSVFYGDMYGTKGTTTREIPALKSKIEPLLKARKDYAYGTQRDYIDNPDVIGWTREGDSTKAKSGLATVITDGPGGSKRMYVGTSNAGEIWYDLTGNRTDKITIGSDGYATFPVNGGSVSVWVQQ

SEQ ID NO: 37625 - protein, 480 aa, Cytophaga sp.
NGTMMQYFEWYVPNDGQQWNRLRTDAPYLSSVGITAVWTPPAYKGTSQADVGYGPYDLYDLGEFNQKGTVRTKYGTKGELKSAVNTLHSNGIQVYGDVVMNHKAGADYTENVTAVEVNPSNRYQETSGEYNIQAWTGFNFPGRGTTYSNWKWQWFHFDGTDWDQSRSLSRIFKFDGKAWDWEVSSENGNYDYLMYADYDYDHPDVVNEMKKWGVWYANEVGLDGYRLDAVKHIKFQFLKDWVDNARAATGKEMFTVGEYWQNDLGALNNYLEKVNYNQSLFDAPLHYNFYAASTGGGYYDMRNILNNTLVASNPTKAVTLVENHDTQPGQSLESTVQPWFKPLAYAFILTRSGGYPSVFYGDMYGTKGTTTREIPALKSKIEPLLKARKDYAYGTQRDYIDNPDVIGWTREGDSTKAKSGLATVITDGPGGSKRMYVGTSNAGEIWYDLTGNRTDKITIGSDGYATFPVNGGSVSVWVQQ

SEQ ID NO: 37626 - protein, 480 aa, Cytophaga sp.
NGTMMQYFEWYVPNDGQQWNRLRTDAPYLSSVGITAVWTPPAYKGTSQADVGYGPYDLYDLGEFNQKGTVRTKYGTKGELKSAVNTLHSNGIQVYGDVVMNHKAGADYTENVTAVEVNPSNRYQETSGEYNIQAWTGFNFPGRGTTYSNWKWQWFHFDGTDWDQSRSLSRIFKFDGKAWDWEVSSENGNYDYLMYADYDYDHPDVVNEMKKWGVWYANEVGLDGYRLDAVKHIKFQFLKDWVDNARAATGKEMFTVGEYWQNDLGALNNYLAKVNYNQSLFDAPLHYNFYAASTGGGYYDMRNILNNTLVASNPTKAVTLVENHDTQPGQSLESTVQPWFKPLAYAFILTRSGGYPSVFYGDMYGTKGTTTREIPPLKSKIEPLLKARKDYAYGTQRDYIDNPDVIGWTREGDSTKAKSGLATVITDGPGGSKRMYVGTSNAGEIWYDLTGNRTDKITIGSDGYATFPVNGGSVSVWVQQ

SEQ ID NO: 37627 - protein, 480 aa, Cytophaga sp.
NGTMMQYFEWYVPNDGQQWNRLRTDAPYLSSVGITAVWTPPAYKGTSQHDVGYGPYDLYDLGEFNQKGTVRTKYGTKGELKSAVNTLHSNGIQVYGDVVMNHKAGADYTENVTAVEVNPSNRYQETSGEYNIQAWTGFNFPGRGTTYSNWKWQWFHFDGTDWDQSRSLSRIFKFDGKAWDWEVSSENGNYDYLMYADYDYDHPDVVNEMKKWGVWYANEVGLDGYRLDAVKHIKFQFLKDWVDNARAATGKEMFTVGEYWQNDLGALNNYLAKVNYNQSLFDAPLHYNFYAASTGGGYYDMRNILNNTLVASNPTKAVTLVENHDTQPGQSLESTVQPWFKPLAYAFILTRSGGYPSVFYGDMYGTKGTTTREIPALKSKIEPLLKARKDYAYGTQRDYIDNPDVIGWTREGDSTKAKSGLATVITDGPGGSKRMYVGTSNAGEIWYDLTGNRTDKITIGSDGYATFPVNGGSVSVWVQQ

SEQ ID NO: 37628 - protein, 480 aa, Cytophaga sp.
NGTMMQYFEWYVPNDGQQWNRLRTDAPYLSSVGITAVWTPPAYKGTSQADVGYGPYDLYDLGEFNQKGTVRTKYGTKGELKSAVNTLHSNGIQVYGDVVMNHKAGADYTENVTAVEVNPSNRYQETSGEYNIQAWTGFNFPGRGTTYSNWKWQWDHFDGTDWDQSRSLSRIFKFDGKAWDWEVSSENGNYDYLMYADYDYDHPDVVNEMKKWGVWYANEVGLDGYRLDAVKHIKFQFLKDWVDNARAATGKEMFTVGEYWQNDLGALNNYLAKVNYNQSLFDAPLHYNFYAASTGGGYYDMRNILNNTLVASNPTKAVTLVENHDTQPGQSLESTVQPWFKPLAYAFILTRSGGYPSVFYGDMYGTKGTTTREIPALKSKIEPLLKARKDYAYGTQRDYIDNPDVIGWTREGDSTKAKSGLATVITDGPGGSKRMYVGTSNAGEIWYDLTGNRTDKITIGSDGYATFPVNGGSVSVWVQQ

SEQ ID NO: 37629 - protein, 480 aa, Cytophaga sp.
NGTMMQYFEWYVPNDGQQWNRLRTDAPYLSSVGITAVWTPPAYKGTSQADVGYGPYDLYDLGEFNQKGTVRTKYGTKGELKSAVNQLHSNGIQVYGDVVMNHKAGADYTENVTAVEVNPSNRYQETSGEYNIQAWTGFNFPGRGTTYSNWKWQWFHFDGTDWDQSRSLSRIFKFDGKAWDWEVSSENGNYDYLMYADYDYDHPDVVNEMKKWGVWYANEVGLDGYRLDAVKHIKFQFLKDWVDNARAATGKEMFTVGEYWQNDLGALNNYLAKVNYNQSLFDAPLHYNFYAASTGGGYYDMRNILNNTLVASNPTKAVTLVENHDTQPGQSLESTVQPWFKPLAYAFILTRSGGYPSVFYGDMYGTKGTTTREIPALKSKIEPLLKARKDYAYGTQRDYIDNPDVIGWTREGDSTKAKSGLATVITDGPGGSKRMYVGTSNAGEIWYDLTGNRTDKITIGSDGYATFPVNGGSVSVWVQQ

SEQ ID NO: 37630 - protein, 480 aa, Cytophaga sp.
NGTMMQYFEWYVPNDGQQWNRLRTDAPYLSSVGITAVWTPPAYKGTSQADVGYGPYDLYDLGEFNQKGTVRTKYGTKGELKSAVNTLHSNGIQVYGDVVMNHKAGADYTENVTAVEVNPSNRYQETSKEYNIQAWTGFNFPGRGTTYSNWKWQWFHFDGTDWDQSRSLSRIFKFDGKAWDWEVSSENGNYDYLMYADYDYDHPDVVNEMKKWGVWYANEVGLDGYRLDAVKHIKFQFLKDWVDNARAATGKEMFTVGEYWQNDLGALNNYLAKVNYNQSLFDAPLHYNFYAASTGGGYYDMRNILNNTLVASNPTKAVTLVENHDTQPGQSLESTVQPWFKPLAYAFILTRSGGYPSVFYGDMYGTKGTTTREIPALKSKIEPLLKARKDYAYGTQRDYIDNPDVIGWTREGDSTKAKSGLATVITDGPGGSKRMYVGTSNAGEIWYDLTGNRTDKITIGSDGYATFPVNGGSVSVWVQQ

SEQ ID NO: 37631 - protein, 480 aa, Cytophaga sp.
NGTMMQYFEWYVPNDGQQWNRLRTDAPYLSSVGITAVWTPPAYKGTSQADVGYGPYDLYDLGEFNQKGTVRTKYGTKGELKSAVNTLHSNGIQVYGDVVMNHKAGADYTENVTAVEVNPSNRYQETSGEYNIQAWTGFNFPGRGETYSNWKWQWFHFDGTDWDQSRSLSRIFKFDGKAWDWEVSSENGNYDYLMYADYDYDHPDVVNEMKKWGVWYANEVGLDGYRLDAVKHIKFQFLKDWVDNARAATGKEMFTVGEYWQNDLGALNNYLAKVNYNQSLFDAPLHYNFYAASTGGGYYDMRNILNNTLVASNPTKAVTLVENHDTQPGQSLESTVQPWFKPLAYAFILTRSGGYPSVFYGDMYGTKGTTTREIPALKSKIEPLLKARKDYAYGTQRDYIDNPDVIGWTREGDSTKAKSGLATVITDGPGGSKRMYVGTSNAGEIWYDLTGNRTDKITIGSDGYATFPVNGGSVSVWVQQ

SEQ ID NO: 37632 - protein, 480 aa, Cytophaga sp.
NGTMMQYFEWYVPNDGQQWNRLRTDAPYLSSVGITAVWTPPAYKGTSQADVGYGPYDLYDLGEFNQKGTVRTKYGTKGELKSAVNTLHSNGIQVYGDVVMNHKAGADYTENVTAVEVNPSNRYQETSGEYNISAWTGFNFPGRGTTYSNWKWQWFHFDGTDWDQSRSLSRIFKFDGKAWDWEVSSENGNYDYLMYADYDYDHPDVVNEMKKWGVWYANEVGLDGYRLDAVKHIKFQFLKDWVDNARAATGKEMFTVGEYWQNDLGALNNYLAKVNYNQSLFDAPLHYNFYAASTGGGYYDMRNILNNTLVASNPTKAVTLVENHDTQPGQSLESTVQPWFKPLAYAFILTRSGGYPSVFYGDMYGTKGTTTREIPALKSKIEPLLKARKDYAYGTQRDYIDNPDVIGWTREGDSTKAKSGLATVITDGPGGSKRMYVGTSNAGEIWYDLTGNRTDKITIGSDGYATFPVNGGSVSVWVQQ

SEQ ID NO: 37633 - protein, 480 aa, Cytophaga sp.
NGTMMQYFEWYVPNDGQQWNRLRTDAPYLSSVGITAVWTPPAYKGTSQADVGYGPYDLYDLGEFNQKGTVRTKYGTKGELKSAVNTLHSNGIQVYGDVVMNHKAGADYTENVTAVEVNPSNRYQETSGEYNIQAWTGFNFPGRGTTYSNWKWQWFHFDGTDWDQSRSLSRIFKFDGKAWDWEVSSENGNYDYLMYADYDYDHPDVVNEMKKWGVWYANEVGLDGYRLDAVKHIKFWFLKDWVDNARAATGKEMFTVGEYWQNDLGALNNYLAKVNYNQSLFDAPLHYNFYAASTGGGYYDMRNILNNTLVASNPTKAVTLVENHDTQPGQSLESTVQPWFKPLAYAFILTRSGGYPSVFYGDMYGTKGTTTREIPALKSKIEPLLKARKDYAYGTQRDYIDNPDVIGWTREGDSTKAKSGLATVITDGPGGSKRMYVGTSNAGEIWYDLTGNRTDKITIGSDGYATFPVNGGSVSVWVQQ

SEQ ID NO: 37634 - protein, 480 aa, Cytophaga sp.
NGTMMQYFEWYVPNDGQQWNRLRTDAPYLSSVGITAVWTPPAYKGTSQADVGYGPYDLYDLGEFNQKGTVRTKYGTKGELKSAVNTLHSNGIQVYGDVVMNHKAGADYTENVTAVEVNPSNRYQETSGEYNIHAWTGFNFPGRGTTYSNWKWQWFHFDGTDWDQSRSLSRIFKFDGKAWDWEVSSENGNYDYLMYADYDYDHPDVVNEMKKWGVWYANEVGLDGYRLDAVKHIKFQFLKDWVDNARAATGKEMFTVGEYWQNDLGALNNYLAKVNYNQSLFDAPLHYNFYAASTGGGYYDMRNILNNTLVASNPTKAVTLVENHDTQPGQSLESTVQPWFKPLAYAFILTRSGGYPSVFYGDMYGTKGTTTREIPALKSKIEPLLKARKDYAYGTQRDYIDNPDVIGWTREGDSTKAKSGLATVITDGPGGSKRMYVGTSNAGEIWYDLTGNRTDKITIGSDGYATFPVNGGSVSVWVQQ

SEQ ID NO: 37635 - protein, 480 aa, Cytophaga sp.
NGTMMQYFEWYVPNDGQQWNRLRTDAPYLSSVGITAVWTPPAYKGTSQADVGYGPYDLYDLGEFNQKGTVRTKYGTKGELKSAVHTLHSNGIQVYGDVVMNHKAGADYTENVTAVEVNPSNRYQETSGEYNIQAWTGFNFPGRGTTYSNWKWQWFHFDGTDWDQSRSLSRIFKFDGKAWDWEVSSENGNYDYLMYADYDYDHPDVVNEMKKWGVWYANEVGLDGYRLDAVKHIKFQFLKDWVDNARAATGKEMFTVGEYWQNDLGALNNYLAKVNYNQSLFDAPLHYNFYAASTGGGYYDMRNILNNTLVASNPTKAVTLVENHDTQPGQSLESTVQPWFKPLAYAFILTRSGGYPSVFYGDMYGTKGTTTREIPALKSKIEPLLKARKDYAYGTQRDYIDNPDVIGWTREGDSTKAKSGLATVITDGPGGSKRMYVGTSNAGEIWYDLTGNRTDKITIGSDGYATFPVNGGSVSVWVQQ

SEQ ID NO: 37636 - protein, 480 aa, Cytophaga sp.
NGTMMQYFEWYVPNDGQQWNRLRTDAPYLSSVGITAVWTPPAYKGTSQADVGYGPYDLYDLGEFNQKGTVRTKYGTKGELKSAVNTLHSNGIQVYGDVVMNHKAGADYTENVTAVEVNPSNRYQETSGEYNIQAWTGFNFPGRGTTYSNWKWQWFHFDGTDWDQSRSLSRIFKFDGKAWDWEVSSENGNYDYLMYADYDYDHPDVVNEMKKWGVWYANEVGLDGYRLDAVKHIKFQFLKDWVDNARAATGKEMFTVGEYWQNDLGALNNYLAKVNYNQSLFDAPLHYNFYAASTGGGYYDMRNILNNTLVASNPTKAVTLVENHDTQPGQSLESTVQPWFKPLAYAFILTRSGGYPSVFYGDMYGTKGTTTREIPALKSKIEPLLKARKDYAYGTQRDYIDNPDVIGWTREGDSTKAKSGLATVITDGPGGSKRMYVGTSNAGEIWYDLTGNRTDKITIGSDGYATFPVNSGSVSVWVQQ

SEQ ID NO: 37637 - protein, 480 aa, Cytophaga sp.
NGTMMQYFEWYVPNDGQQWNRLRTDAPYLSSVGITAVWTPPAYKGTSQADVGYGPYDLYDLGEFNQKGTVRTKYGTKGELKSAVNTLHSNGIQVYGDVVMNHKAGADYTENVTAVEVNPSNRYQETSGEYNIQAWTGFNFPGRGTTYSNWKWQWFHFDGTDWDQSRSLSRIFKFDGKAWDWEVSSENGNYDYLMYADYDYDHPDVVNEMKKWGVWYANEVGLDGYRLDAVKHIKFQFLKDWVDNARAATGKEMFTVGEYWQNDLGALNNYLAKVNYNQSLFDAPLHYNFYAASTGGGYYDMRNILNNTLVASNPHKAVTLVENHDTQPGQSLESTVQPWFKPLAYAFILTRSGGYPSVFYGDMYGTKGTTTREIPALKSKIEPLLKARKDYAYGTQRDYIDNPDVIGWTREGDSTKAKSGLATVITDGPGGSKRMYVGTSNAGEIWYDLTGNRTDKITIGSDGYATFPVNGGSVSVWVQQ

SEQ ID NO: 37638 - protein, 480 aa, Cytophaga sp.
NGTMMQYFEWYVPNDGQQWNRLRTDAPYLSSVGITAVWTPPAYKGTSQADVGYGPYDLYDLGEFNQKGTVRTKYGTKGELKSAVNTLHSNGIQVYGDVVMNHKAGADTTENVTAVEVNPSNRYQETSGEYNIQAWTGFNFPGRGTTYSNWKWQWFHFDGTDWDQSRSLSRIFKFDGKAWDWEVSSENGNYDYLMYADYDYDHPDVVNEMKKWGVWYANEVGLDGYRLDAVKHIKFQFLKDWVDNARAATGKEMFTVGEYWQNDLGALNNYLAKVNYNQSLFDAPLHYNFYAASTGGGYYDMRNILNNTLVASNPTKAVTLVENHDTQPGQSLESTVQPWFKPLAYAFILTRSGGYPSVFYGDMYGTKGTTTREIPALKSKIEPLLKARKDYAYGTQRDYIDNPDVIGWTREGDSTKAKSGLATVITDGPGGSKRMYVGTSNAGEIWYDLTGNRTDKITIGSDGYATFPVNGGSVSVWVQQ

SEQ ID NO: 37639 - protein, 480 aa, Cytophaga sp.
NGTMMQYFEWYVPNDGQQWNRLRTDAPYLSSVGITAVWTPPAYKGTSQADVGYGPYDLYDLGEFNQKGTVRTKYGTKGELKSAVNTLHSNGIQVYGDVVMNHKAGADYTENVTAVEVNPSNRYQETSGEYNIQAWTGFNFPGRGTTYSNQKWQWFHFDGTDWDQSRSLSRIFKFDGKAWDWEVSSENGNYDYLMYADYDYDHPDVVNEMKKWGVWYANEVGLDGYRLDAVKHIKFQFLKDWVDNARAATGKEMFTVGEYWQNDLGALNNYLAKVNYNQSLFDAPLHYNFYAASTGGGYYDMRNILNNTLVASNPTKAVTLVENHDTQPGQSLESTVQPWFKPLAYAFILTRSGGYPSVFYGDMYGTKGTTTREIPALKSKIEPLLKARKDYAYGTQRDYIDNPDVIGWTREGDSTKAKSGLATVITDGPGGSKRMYVGTSNAGEIWYDLTGNRTDKITIGSDGYATFPVNGGSVSVWVQQ

SEQ ID NO: 37640 - protein, 480 aa, Cytophaga sp.
NGTMMQYFEWYVPNDGQQWNRLRTDAPYLSSVGITAVWTPPAYKGTSQADVGYGPYDLYDLGEFNQKGTVRTKYGTKGELKSAVNTLHSNGIQVYGDVVMNHKAGADYTENVTAVEVNPSNRYQETSGEYNIQAWTGFNFPGRGTTYSNWKWQWFHFDGTDWDQSRSLSRIFKFDGKAWDWEVSSENGNYDYLMYADYDYDHPDVVNEMKKWGVWYANEVGLDGYRLDAVKHIKFQFLKDWVDNARAATGKEMFTVGEYWQNDLGALNNYLAKVNYNQSLFDAPLHYNFYAASTGGGYYDMRNILNNTLVASNPTKAVTLVENHDTQPGQSLESTVQPWFKPLAYAFILTRSGGYPSVFYGDMYGTKGTTTREIPALKSKIEPLLKARKDYAYGTQRDYIDNPDVIGWTREGDSWKAKSGLATVITDGPGGSKRMYVGTSNAGEIWYDLTGNRTDKITIGSDGYATFPVNGGSVSVWVQQ

SEQ ID NO: 37641 - protein, 488 aa, Bacillus sp.
HXAXXNGTMMQYFEWYLPNDGQHWXRLXNDAXNLSSXGITALWIPPAYKGTSQSDVGYGAYDLYDLGEFNQKGTVRTKYGTKAQLXXAIXALHAXGIQVYGDVVMNHKGGADGTEXVXAVEVNPSDRNQEISGXYXIXAWTKFDFPGRGNTYSXFKWRWYHFDGVDWDESRKLNNRIYKFRGXGKAWDWEVDTENGNYDYLMYADIDMDHPEVVXELKNWGXWYXNTLNLDGFRLDAVKHIKFSFXXDWLSHVRSXTGKXLFTVGEYWXXDIGALENYLXKTNWXMSLFDVPLHYNFYXASKSGGAYDMRXLLXGTLVXXHPXXAVTFVDNHDTQPGQALESWVDXWFKPLAYAFILTREXGYPXVFYGDYYGIPQYNXXEIPSLKSKIDPLLXARRXYAYGTQHDYLDHXDIIGWTREGXTSKPNSGLAALITDGPGGSKWMYVGKQXAGXVWYDLTGNRSDTVTINSDGWGEFXVNGGSVSVWVXR

SEQ ID NO: 37642 - protein, 479 aa, Cytophaga sp.
NGMMQYFEWYVPNDGQQWNRLRTDAPYLSSVGITAVWTPPAYKGTSQADVGYGPYDLYDLGEFNQKGTVRTKYGTKGELKSAVNTLHSNGIQVYGDVVMNHKAGADYTENVTAVEVNPSNRYQETSGEYNIQAWTGFNFPGRGTTYSNWKWQWFHFDGTDWDQSRSLSRIFKFDGKAWDWEVSSENGNYDYLMYADYDYDHPDVVNEMKKWGVWYANEVGLDGYRLDAVKHIKFQFLKDWVDNARAATGKEMFTVGEYWQNDLGALNNYLAKVNYNQSLFDAPLHYNFYAASTGGGYYDMRNILNNTLVASNPTKAVTLVENHDTQPGQSLESTVQPWFKPLAYAFILTRSGGYPSVFYGDMYGTKGTTTREIPALKSKIEPLLKARKDYAYGTQRDYIDNPDVIGWTREGDSTKAKSGLATVITDGPGGSKRMYVGTSNAGEIWYDLTGNRTDKITIGSDGYATFPVNGGSVSVWVQQ

SEQ ID NO: 37643 - protein, 477 aa, Synthetic construct
NGTMMQYFEWYLPNDGNHWNRLNSDASNLKSKGITAVWIPPAWKGTSQADVGYGAYDLYDLGEFNQKGTVRTKYGTRSQLQAAVTSLKNNGINVYGDVVMNHKAGADATEDVQAVEVNPNNRNQVVTGEYLIKAYTHFHFPGRGNTHSDFKWYWYHFDGVDWDQSRRLNRIYKFQGKAWDWPVDTENGNYDYLMYADLDMDHPDVANELKRWGTWYANTLGLDGFRIDAVKHIKYSFTRDWINHVREKTGKNMFAVAEFWKNDLGAIENYLNKTNFNHSVFDVPLHYNLYNASNSGGNYDMRKIFNGTVVQKHPSKAVTFVDNHDTQPEEALESFVEEWFKPLAYALILTRESGYPSVFYGDYYGIPTHGVPAMRSKIDPILEARQKYAYGPQHDYLDHPDIIGWTREGDSSHPKSGLATLITDGPGGSKTMYAGLKNAGETWYDITGNRSDTVKIGSDGNGTFHVNKGSVSIYVQK

SEQ ID NO: 37644 - protein, 478 aa, Bacillus sp.
NGTMMQYFEWYLPNDGNHWNRLNSDASNLKSKGITAVWIPPAWKGASQNDVGYGAYDVYDLGEFNQKGTVRTKYGTRSQLQAAVTSLKNNGIQVYGDVVMNHKGGADATEMVRAVEVNPNNRNQEVTGEYTIEAWTRFDFPGRGNTHSSFKWRWYHFDGVDWDQSRRLNNRIYKFRGKAWDWEVDTENGNYDYLMYADIDYDHPEVVNELRIWGVWYTNTLGLDGFRIDAVKHIKYSFTRDWINHVRSATGKNMFAVAEFWKNDLGAIENYLQKTNWNHSVFDVPLHYNLYNASKSGGNYDMRNIFNGTVVQRHPSHAVTFVDNHDSQPEEALESFVEEWFKPLAYALTLTREQGYPSVFYGDYYGIPTHGVPAMRSKIDPILEARQKYAYGPQHDYLDHPDVIGWTREGDSSHPKSGLATLITDGPGGSKRMYAGLKNAGETWYDITGNRSDTVKIGSDGWGEFHVNDGSVSIYVQK

SEQ ID NO: 37645 - protein, 478 aa, Bacillus sp.
NGTMMQYFEWYLPNDGNHWNRLNSDASNLKSKGITAVWIPPAWKGASQNDVGYGAYDLYDLGEFNQKGTVRTKYGTRSQLQAAVTSLKNNGIQVYGDVVMNHKGGADATEMVRAVEVNPNNRNQEVTGEYTIEAWTRFDFPGRGNTHSSFKWRWYHFDGVDWDQSRRLNNRIYKFRGKAWDWEVDTEFGNYDYLMYADYDMDHPEVVNELRNWGVWYTNTLGLDGFRIDAVKHIKYSFTRDWINHVRSATGKNMFAVAEFWKNDLGAIENYLQKTSWNHSVFDVPLHYNLYNASKSGGNYDMRNIFNGTVVQRHPSHAVTFVDNHDSQPEEALESFVEEWFKPLAYALTLTREQGYPSVFYGDYYGIPTHGVPAMRSKIDPILEARQKYAYGPQHDYLDHPDVIGWTREGDSSHPKSGLATLITDGPGGSKRMYAGLKNAGETWYDITGNRSDTVKIGSDGWGEFHVNDGSVSIYVQK

SEQ ID NO: 37646 - protein, 478 aa, Bacillus sp.
NGTMMQYFEWYLPNDGNHWNRLNSDASNLKSKGITAVWIPPAWKGASQNDVGYGAYDLYDLGEFNQKGTVRTKYGTRSQLQAAVTSLKNNGIQVYGDVVMNHKGGADATEMVRAVEVNPNNRNQEVTGEYTIEAWTRFDFPGRGNTHSSFKWRWYHFDGVDWDQSRRLNNRIYKFRGKAWDWEVDTENGNYDYLMYADIDYDHPEVVNELRNWGVWYTNTLGLDGFRIDAVKHIKYSFTRVWINHVRSATGKNMFAVAEFWKNDLGAIENYLQKTNWNHSVFDVPLHYNLYNASKSGGNYDMRNIFNGTVVQRHPSHAVTFVDNHDSQPEEALESFVEEWFKPLAYALTLTREQGYPSVFYGDYYGIPTHGVPAMRSKIDPILEARQKYAYGPQHDYLDHPDVIGWTREGDSSHPKSGLATLITDGPGGSKRMYAGLKNAGETWYDITGNRSDTVKIGSDGWGEFHVNDGSVSIYVQK

SEQ ID NO: 37647 - protein, 478 aa, Bacillus sp.
NGTMMQYFEWYLPNDGNHWNRLNSDASNLKSKGITAVWIPPAWKGASQNDVGYGAYDLYDLGEFNQKGTVRTKYGTRSQLQAAVTSLKNNGIQVYGDVVMNHKGGADATEMVRAVEVNPNNRNQEVTGEYTIEAWTRFDFPGRGNTHSSFKWRWYHFDGVDWDQSRRLNNRIYKFRGKAWDWEVDTENGNYDYLMYADIDLDHPEVVNELRVWGVWYTNTLGLDGFRIDAVKHIKYSFTRDWINHVRSATGKNMFAVAEFWKNDLGAIENYLQKTNWNHSVFDVPLHYNLYNASKSGGNYDMRNIFNGTVVQRHPSHAVTFVDNHDSQPEEALESFVEEWFKPLAYALTLTREQGYPSVFYGDYYGIPTHGVPAMRSKIDPILEARQKYAYGPQHDYLDHPDVIGWTREGDSSHPKSGLATLITDGPGGSKRMYAGLKNAGETWYDITGNRSDTVKIGSDGWGEFHVNDGSVSIYVQK

SEQ ID NO: 37648 - protein, 478 aa, Bacillus sp.
NGTMMQYFEWYLPNDGNHWNRLNSDASNLKSKGITAVWIPPAWKGASQNDVGYGAYDLYDLGEFNQKGTVRTKYGTRSQLQAAVTSLKNNGIQVYGDVVMNHKGGADATEMVRAVEVNPNNRNQEVTGEYTIEAWTRFDFPGRGNTHSSFKWRWYHFDGVDWDQSRRLNNRIYKFRGKAWDWEVDTEFGNYDYLMYADYDMDHPEVVNELRNWGVWYTNTLGLDGFRIDAVKHIKYSFTRDWINHVRSATGKNMFAVAEFWKNDLGAIENYLQKTNWNHSVFDVPLHYNLYNASKSGGNYDMRNIFNGTVVQRHPEHAVTFVDNHDSQPEEALESFVEEWFKPLAYALTLTREQGYPSVFYGDYYGIPTHGVPAMRSKIDPILEARQKYAYGPQHDYLDHPDVIGWTREGDSSHPKSGLATLITDGPGGSKRMYAGLKNAGETWYDITGNRSDTVKIGSDGWGEFHVNDGSVSIYVQK

SEQ ID NO: 37649 - protein, 478 aa, Synthetic construct
NGTMMQYFEWYLPNDGNHWNRLNSDASNLKSKGITAVWIPPAWKGASQNDVGYGAYDLYDLGEFNQKGTVRTKYGTRSQLQAAVTSLKNNGIQVYGDVVMNHKGGADATEMVRAVEVNPNNRNQEVTGEYTIEAWTLFDFPGRGNTHSSFKWRWYHFDGVDWDQSRRLNNRIYKFRGKAWDWEVDTENGNYDYLMYADIDMDHPEVVNELRNWGVWYTNTLGLDGFRIDAVKHIKYSFTRDWINHVRSATGKNMFAVAEFWKNDLGAIENYLQKTNWNHSVFDVPLHYNLYNASKSGGNYDMRNIFNGTVVQRHPSHAVTFVDNHDSQPEEALESFVEEWFKPLAYALTLTREQGYPSVFYGDYYGIPTHGVPAMRSKIDPILEARQKYAYGPQHDYLDHPDVIGWTREGDSSHPKSGLATLITDGPGGSKRMYAGLKNAGETWYDITGNRSDTVKIGSDGWGEFHVNDGSVSIYVQK

SEQ ID NO: 37650 - protein, 478 aa, Bacillus sp.
NGTMMQYFEWYLPNDGNHWNRLNSDASNLKSKGITAVWIPPAWKGASQNDVGYGAYDVYDLGEFNQKGTVRTKYGTRSQLQAAVTSLKNNGIQVYGDVVMNHKGGADATEMVRAVEVNPNNRNQEVTGEYTIEAWTRFDFPGRGNTHSSFKWRWYHFDGVDWDQSRRLNNRIYKFRGKAWDWEVDTENGNYDYLMYADIDYDHPEVVNELRNWGVWYTNTLGLDGFRIDAVKHIKYSFTRDWINHVRSATGKNMFAVAEFWKNDLGAIENYLQKTNWNHSVFDVPLHYNLYNASKSGGNYDMRNIFNGTVVQRHPSHAVTFVDNHDSQPEEALESFVEEWFKPLAYALTLTREQGYPSVFYGDYYGIPTHGVPAMRSKIDPILEARQKYAYGPQHDYLDHPDVIGWTREGDSSHPKSGLATLITDGPGGSKRMYAGLKNAGETWYDITGNRSDTVKIGSDGWGEFHVNDGSVSIYVQK

SEQ ID NO: 37651 - protein, 478 aa, Bacillus sp.
NGTMMQYFEWYLPNDGNHWNRLNSDASNLKSKGITAVWIPPAWKGASQNDVGYGAYDLYDLGEFNQKGTVRTKYGTRSQLQAAVTSLKNNGIQVYGDVVMNHKGGADATEMVRAVEVNPNNRNQEVTGEYTIEAWTRFDFPGRGNTHSSFKWRWYHFDGVDWDQSRRLNNRIYKFRGKAWDWEVDTEFGNYDYLMYADYDMDHPEVVNELRNWGVWYTNTLGLDGFRIDAVKHIKYSFTRDWINHVRSATGKNMFAVAEFWQNDLGAIENYLQKTNWNHSVFDVPLHYNLYNASKSGGNYDMRNIFNGTVVQRHPSHAVTFVDNHDSQPEEALESFVEEWFKPLAYALTLTREQGYPSVFYGDYYGIPTHGVPAMRSKIDPILEARQKYAYGPQHDYLDHPDVIGWTREGDSSHPKSGLATLITDGPGGSKRMYAGLKNAGETWYDITGNRSDTVKIGSDGWGEFHVNDGSVSIYVQK

SEQ ID NO: 37652 - protein, 478 aa, Synthetic construct
NGTMMQYFEWYLPNDGNHWNRLNSDASNLKSKGITAVWIPPAWKGASQNDVGYGAYDLYDLGEFNQKGTVRTKYGTRSQLQAAVTSLKNNGIQVYGDVVMNHKGGADATEMVRAVEVNPNNRNQEVTGEYTIEAWTRFDFPGRGNTHSSFKWRWYHFDGVDWDQSRRLNNRIYKFRGKAWDWEVDTENGNYDYLMYADIDMDHPEVVNELRNWGVWYTNTLGLDGFRIDAVKHIKYSFTRDWINHVRSATGKNMFAVAEFWKNDLGAIENYLQKTNWNHSVFDVPLHYNLYNASKSGGNYDMRNIFNGTVVQRHPSHAVTFVDNHDSQPEEALESFVEEWFKPLAYALTLTREQGYPSVFYGDYYGIPTHGVPAMRSKIDPILSARQKYAYGPQHDYLDHPDVIGWTREGDSSHPKSGLATLITDGPGGSKRMYAGLKNAGETWYDITGNRSDTVKIGSDGWGEFHVNDGSVSIYVQK

SEQ ID NO: 37653 - protein, 478 aa, Bacillus sp.
NGTMMQYFEWYLPNDGNHWNRLNSDASNLKSKGITAVWIPPAWKGASQNDVGYGAYDLYDLGEFNQKGTVRTKYGTRSQLQAAVTSLKNNGIQVYGDVVMNHKGGADATEMVRAVEVNPNNRNQEVTGEYTIEAWTRFDFPGRGNTHSSFKWRWYHFDGVDWDQSRQITNRIYKFRGKAWDWEVDTEFGNYDYLMYADYDMDHPEVVNELRNWGVWYTNTLGLDGFRIDAVKHIKYSFTRDWINHVRSATGKNMFAVAEFWKNDLGAIENYLQKTNWNHSVFDVPLHYNLYNASKSGGNYDMRNIFNGTVVQRHPSHAVTFVDNHDSQPEEALESFVEEWFKPLAYALTLTREQGYPSVFYGDYYGIPTHGVPAMRSKIDPILEARQKYAYGPQHDYLDHPDVIGWTREGDSSHPKSGLATLITDGPGGSKRMYAGLKNAGETWYDITGNRSDTVKIGSDGWGEFHVNDGSVSIYVQK

SEQ ID NO: 37654 - protein, 478 aa, Bacillus sp.
NGTMMQYFEWYLPNDGNHWNRLNSDASNLKSKGITAVWIPPAWKGASQNDVGYGAYDLYDLGEFNQKGTVRTKYGTRSQLQAAVTSLKNNGIQVYGDVVMNHKGGADATEMVRAVEVNPNNRNQEVTGEYTIEAWTRFDFPGRGNTHSSFKWRWYHFDGVDWDQSRRLNNRIYKFRGKAWDWEVDTEFGNYDYLMYADYDMDHPEVVNELRNWGVWYTNTLGLDGFRIDAVKHIKYSFTRDWINHVRSATGKNMFAVAEFWQNDLGWIENYLQKTNWNHSVFDVPLHYNLYNASKSGGNYDMRNIFNGTVVQRHPSHAVTFVDNHDSQPEEALESFVEEWFKPLAYALTLTREQGYPSVFYGDYYGIPTHGVPAMRSKIDPILEARQKYAYGPQHDYLDHPDVIGWTREGDSSHPKSGLATLITDGPGGSKRMYAGLKNAGETWYDITGNRSDTVKIGSDGWGEFHVNDGSVSIYVQK

SEQ ID NO: 37655 - protein, 478 aa, Bacillus sp.
NGTMMQYFEWYLPNDGNHWNRLNSDASNLKSKGITAVWIPPAWKGASQNDVGYGAYDLYDLGEFNQKGTVRTKYGTRSQLQAAVTSLKNNGIQVYGDVVMNHKGGADATEMVRAVEVNPNNRNQEVTGEYTIEAWTRFDFPGRGNTHSSFKWRWYHFDGVDWDQSRRLNNRIYKFRGKAWDWEVDTENGFYDYLMYADIDYDHPEVVNELRVWGVWYTNTLGLDGFRIDAVKHIKYSFTRDWINHVRSATGKNMFAVAEFWKNDLGAIENYLQKTNWNHSVFDVPLHYNLYNASKSGGNYDMRNIFNGTVVQRHPSHAVTFVDNHDSQPEEALESFVEEWFKPLAYALTLTREQGYPSVFYGDYYGIPTHGVPAMRSKIDPILEARQKYAYGPQHDYLDHPDVIGWTREGDSSHPKSGLATLITDGPGGSKRMYAGLKNAGETWYDITGNRSDTVKIGSDGWGEFHVNDGSVSIYVQK

SEQ ID NO: 37656 - protein, 478 aa, Synthetic construct
NGTMMQYFEWYLPNDGNHWNRLNSDASNLKSKGITAVWIPPAWKGASQNDVGYGAYDLYDLGEFNQKGTVRTKYGTRSQLQAAVTSLKNNGIQVYGDVVMNHKGGADATEMVRAVEVNPNNRNQEVTGEYTIEAWTHFHFPGRGNTHSSFKWRWYHFDGVDWDQSRRLNNRIYKFRGKAWDWEVDTENGNYDYLMYADIDMDHPEVVNELRNWGVWYTNTLGLDGFRIDAVKHIKYSFTRDWINHVRSATGKNMFAVAEFWKNDLGAIENYLQKTNWNHSVFDVPLHYNLYNASKSGGNYDMRNIFNGTVVQRHPSHAVTFVDNHDSQPEEALESFVEEWFKPLAYALTLTREQGYPSVFYGDYYGIPTHGVPAMRSKIDPILEARQKYAYGPQHDYLDHPDVIGWTREGDSSHPKSGLATLITDGPGGSKRMYAGLKNAGETWYDITGNRSDTVKIGSDGWGEFHVNDGSVSIYVQK

SEQ ID NO: 37657 - protein, 478 aa, Synthetic construct
NGTMMQYFEWYLPNDGNHWNRLNSDASNLKSKGITAVWIPPAWKGASQNDVGYGAYDLYDLGEFNQKGTVRTKYGTRSQLQAAVTSLKNNGIQVYGDVVMNHKGGADATEMVRAVEVNPNNRNQEVTGEYTIEAWTRFDFPGRGNTHSSFKWRWYHFDGVDWDQSRRLNNRIYKFRGKAWDWEVDTENGNYDYLMYADIDMDHPEVVNELRNWGVWYTNTLGLDGFRIDAVKHIKYSFTRDWINHVRSATGKNMFAVAEFWKNDLGAIENYLQKTNWNHSVFDVPLHYNLYNASKSGGNYDMRNIFNGTVVQRHPSHAVTFVDNHDSQPEEALESWVEEWFKPLAYALTLTREQGYPSVFYGDYYGIPTHGVPAMRSKIDPILEARQKYAYGPQHDYLDHPDVIGWTREGDSSHPKSGLATLITDGPGGSKRMYAGLKNAGETWYDITGNRSDTVKIGSDGWGEFHVNDGSVSIYVQK

SEQ ID NO: 37658 - protein, 478 aa, Synthetic construct
NGTMMQYFEWYLPNDGNHWNRLNSDASNLKSKGITAVWIPPAWKGASQNDVGYGAYDLYDLGEFNQKGTVRTKYGTRSQLQAAVTSLKNNGIQVYGDVVMNHKGGADATEMVRAVEVNPNNRNQEVTGEYTIEAWTRFDFPGRGNTHSSFKWRWYHFDGVDWDQSRRLNNRIYKFRGKAWDWEVDTENGNYDYLMYADYDMDHPEVVNELRNWGVWYTNTLGLDGFRIDAVKHIKYSFTRDWINHVRSATGKNMFAVAEFWKNDLGAIENYLQKTNWNHSVFDVPLHYNLYNASKSGGNYDMRNIFNGTVVQRHPSHAVTFVDNHDSQPEEALESFVEEWFKPLAYALTLTREQGYPSVFYGDYYGIPTHGVPAMRSKIDPILEARQKYAYGPQHDYLDHPDVIGWTREGDSSHPKSGLATLITDGPGGSKRMYAGLKNAGETWYDITGNRSDTVKIGSDGWGEFHVNDGSVSIYVQK

SEQ ID NO: 37659 - protein, 478 aa, Synthetic construct
NGTMMQYFEWYLPNDGNHWNRLNSDASNLKSKGITAVWIPPAWKGASQNDVGYGAYDLYDLGEFNQKGTVRTKYGTRSQLQAAVTSLKNNGIQVYGDVVMNHKGGADATEMVRAVEVNPNNRNQEVTGEYTIEAWTRFDFPGRGNTHSSFKWRWYHFDGVDWDQSRRLNNRIYKFRGKAWDWEVDTENGNYDYLMYADSDMDHPEVVNELRNWGVWYTNTLGLDGFRIDAVKHIKYSFTRDWINHVRSATGKNMFAVAEFWKNDLGAIENYLQKTNWNHSVFDVPLHYNLYNASKSGGNYDMRNIFNGTVVQRHPSHAVTFVDNHDSQPEEALESFVEEWFKPLAYALTLTREQGYPSVFYGDYYGIPTHGVPAMRSKIDPILEARQKYAYGPQHDYLDHPDVIGWTREGDSSHPKSGLATLITDGPGGSKRMYAGLKNAGETWYDITGNRSDTVKIGSDGWGEFHVNDGSVSIYVQK

SEQ ID NO: 37660 - protein, 478 aa, Bacillus sp.
NGTMMQYFEWYLPNDGNHWNRLNSDASNLKSKGITAVWIPPAWKGASQNDVGYGAYDLYDLGEFNQKGTVRTKYGTRSQLQAAVTSLKNNGIQVYGDVVMNHKGGADATEMVRAVEVNPNNRNQEVTGEYTIEAWTRFDFPGRGNTHSSFKWRWYHFDGVDWDQSRRLNNRIYKFRGKAWDWEVDTENGNYDYLMYADIDYDYPEVVNELRNWGVWYTNTLGLDGFRIDAVKHIKYSFTRDWINHVRSATGKNMFAVAEFWKNDLGAIENYLQKTNWNHSVFDVPLHYNLYNASKSGGNYDMRNIFNGTVVQRHPSHAVTFVDNHDSQPEEALESFVEEWFKPLAYALTLTREQGYPSVFYGDYYGIPTHGVPAMRSKIDPILEARQKYAYGPQHDYLDHPDVIGWTREGDSSHPKSGLATLITDGPGGSKRMYAGLKNAGETWYDITGNRSDTVKIGSDGWGEFHVNDGSVSIYVQK

SEQ ID NO: 37661 - protein, 478 aa, Bacillus sp.
NGTMMQYFEWYLPNDGNHWNRLNSDASNLKSKGITAVWIPPAWKGASQNDVGYGAYDLYDLGEFNQKGTVRTKYGTRSQLQAAVTSLKNNGIQVYGDVVMNHKGGADATEMVRAVEVNPNNRNQEVTGEYTIEAWTRFDFPGRGNTHSSFKWRWYHFDGVDWDQSRRLNNRIYKFRGKAWDWEVDTENGNYDYLMYADIDMDYPEVVAELRQWGVWYTNTLGLDGFRIDAVKHIKYSFTRDWINHVRSATGKNMFAVAEFWKNDLGAIENYLQKTNWNHSVFDVPLHYNLYNASKSGGNYDMRNIFNGTVVQRHPSHAVTFVDNHDSQPEEALESFVEEWFKPLAYALTLTREQGYPSVFYGDYYGIPTHGVPAMRSKIDPILEARQKYAYGPQHDYLDHPDVIGWTREGDSSHPKSGLATLITDGPGGSKRMYAGLKNAGETWYDITGNRSDTVKIGSDGWGEFHVNDGSVSIYVQK

SEQ ID NO: 37662 - protein, 478 aa, Bacillus sp.
NGTMMQYFEWYLPNDGNHWNRLNSDASNLKSKGITAVWIPPAWKGASQNDVGYGAYDLYDLGEFNQKGTVRTKYGTRSQLQAAVTSLKNNGIQVYGDVVMNHKGGADATEMVRAVEVNPNNRNQEVTGEYTIEAWTRFDFPGRGNTHSSFKWRWYHFDGVDWDQSRNINNRIYKFRGKAWDWEVDTEFGNYDYLMYADYDMDHPEVVNELRNWGVWYTNTLGLDGFRIDAVKHIKYSFTRDWINHVRSATGKNMFAVAEFWKNDLGAIENYLQKTNWNHSVFDVPLHYNLYNASKSGGNYDMRNIFNGTVVQRHPSHAVTFVDNHDSQPEEALESFVEEWFKPLAYALTLTREQGYPSVFYGDYYGIPTHGVPAMRSKIDPILEARQKYAYGPQHDYLDHPDVIGWTREGDSSHPKSGLATLITDGPGGSKRMYAGLKNAGETWYDITGNRSDTVKIGSDGWGEFHVNDGSVSIYVQK

SEQ ID NO: 37663 - protein, 478 aa, Synthetic construct
NGTMMQYFEWYLPNDGNHWNRLNSDASNLKSKGITAVWIPPAWKGASQNDVGYGAYDLYDLGEFNQKGTVRTKYGTRSQLQAAVTSLKNNGIQVYGDVVMNHKGGADATEMVRAVEVNPNNRNQEVTGEYTIEAWTRFDFPGRGNTHSSFKWRWYHFDGVDWDQSRRLNNRIYKFRGKAWDWEVDTENGNYDYLMYADFDMDHPEVVNELRNWGVWYTNTLGLDGFRIDAVKHIKYSFVRDWINHVRSATGKNMFAVAEFWKNDLGAIENYLQKTNWNHSVFDVPLHYNLYNASKSGGNYDMRNIFNGTVVQRHPSHAVTFVDNHDSQPEEALESFVEEWFKPLAYALTLTREQGYPSVFYGDYYGIPTHGVPAMRSKIDPILEARQKYAYGPQHDYLDHPDVIGWTREGDSSHPKSGLATLITDGPGGSKRMYAGLKNAGETWYDITGNRSDTVKIGSDGWGEFHVNDGSVSIYVQK

SEQ ID NO: 37664 - protein, 478 aa, Bacillus sp.
NGTMMQYFEWYLPNDGNHWNRLNSDASNLKSKGITAVWIPPAWKGASQNDVGYGAYDLYDLGEFNQKGTVRTKYGTRSQLQAAVTSLKNNGIQVYGDVVMNHKGGADATEMVRAVEVNPNNRNQEVTGEYTIEAWTRFDFPGRGNTHSSFKWRWYHFDGVDWDQSRRLNNRIYKFRGKAWDWEVDTEFGNYDYLMYADYDMDHPEVVNELRNWGVWYTNTLGLDGFRIDAVKHIKYSFTRDWINHVRSATGKNMFAVAEFWKNDLGAIENYLQKTNWNHSVFDVPLHYNLYNASKSGGNYDMRNIFNGTVVQRHPSHAVTFVDNHDSQPEEALESFVEEWFKPLAYALTLTREQGYPSVFYGDYYGIPTHGVPAMRSKIDPILKARQKYAYGPQHDYLDHPDVIGWTREGDSSHPKSGLATLITDGPGGSKRMYAGLKNAGETWYDITGNRSDTVKIGSDGWGEFHVNDGSVSIYVQK

SEQ ID NO: 37665 - protein, 478 aa, Synthetic construct
NGTMMQYFEWYLPNDGNHWNRLNSDASNLKSKGITAVWIPPAWKGASQNDVGYGAYDVYDLGEFNQKGTVRTKYGTRSQLQAAVTSLKNNGIQVYGDVVMNHKGGADATEMVRAVEVNPNNRNQEVTGEYTIEAWTRFDFPGRGNTHSSFKWRWYHFDGVDWDQSRRLNNRIYKFRGKAWDWEVDTENGNYDYLMYADYDMDHPEVVNELRNWGVWYTNTLGLDGFRIDAVKHIKVSFLRDWINHVRSATGKNMFAVAEFWKNDLGAIENYLQKTNWNHSVFDVPLHYNLYNASKSGGNYDMRNIFNGTVVQRHPSHAVTFVDNHDSQPEEALESFVEEWFKPLAYALTLTREQGYPSVFYGDYYGIPTHGVPAMRSKIDPILEARQKYAYGPQHDYLDHPDVIGWTREGDSSHPKSGLATLITDGPGGSKRMYAGLKNAGETWYDITGNRSDTVKIGSDGWGEFHVNDGSVSIYVQK

SEQ ID NO: 37666 - protein, 478 aa, Synthetic construct
NGTMMQYFEWYLPNDGNHWNRLNSDASNLKSKGITAVWIPPAWKGASQNDVGYGAYDLYDLGEFNQKGTVRTKYGTRSQLQAAVTSLKNNGIQVYGDVVMNHKGGADATEMVRAVEVNPNNRNQEVTGEYTIEAWTRFDFPGRGNTHSSFKWRWYHFDGVDWDQSRRLNNRIYKFRGKAWDWEVDTENGNYDYLMYADIDMDHPVVVNELRNWGVWYTNTLGLDGFRIDAVKHIKYSFTRDWINHVRSATGKNMFAVAEFWKNDLGAIENYLQKTNWNHSVFDVPLHYNLYNASKSGGNYDMRNIFNGTVVQRHPSHAVTFVDNHDSQPEEALESFVEEWFKPLAYALTLTREQGYPSVFYGDYYGIPTHGVPAMRSKIDPILEARQKYAYGPQHDYLDHPDVIGWTREGDSSHPKSGLATLITDGPGGSKRMYAGLKNAGETWYDITGNRSDTVKIGSDGWGEFHVNDGSVSIYVQK

SEQ ID NO: 37667 - protein, 478 aa, Bacillus sp.
NGTMMQYFEWYLPNDGNHWNRLNSDASNLKSKGITAVWIPPAWKGVSQNDVGYGAYDLYDLGEFNQKGTVRTKYGTRSQLQAAVTSLKNNGIQVYGDVVMNHKGGADATEMVRAVEVNPNNRNQEVTGEYTIEAWTRFDFPGRGNTHSSFKWRWYHFDGVDWDQSRQFSNRIYKFRGKAWDWEVDTEFGNYDYLMYADYDMDHPEVVNELRNWGVWYTNTLGLDGFRIDAVKHIKYSFTRDWINHVRSATGKNMFAVAEFWKNDLGAIENYLQKTNWNHSVFDVPLHYNLYNASKSGGNYDMRNIFNGTVVQRHPSHAVTFVDNHDSQPEEALESFVEEWFKPLAYALTLTREQGYPSVFYGDYYGIPTHGVPAMRSKIDPILEARQKYAYGPQHDYLDHPDVIGWTREGDSSHPKSGLATLITDGPGGSKRMYAGLKNAGETWYDITGNRSDTVKIGSDGWGEFHVNDGSVSIYVQK

SEQ ID NO: 37668 - protein, 478 aa, Synthetic construct
NGTMMQYFEWYLPNDGNHWNRLNSDASNLKSKGITAVWIPPAWKGASQNDVGYGAYDLYDLGEFNQKGTVRTKYGTRSQLQAAVTSLKNNGIQVYGDVVMNHKGGADATEMVFAVEVNPNNRNQEVTGEYTIEAWTRFDFPGRGNTHSSFKWRWYHFDGVDWDQSRRLNNRIYKFRGKAWDWEVDTENGNYDYLMYADIDMDHPEVVNELRNWGVWYTNTLGLDGFRIDAVKHIKYSFTRDWINHVRSATGKNMFAVAEFWKNDLGAIENYLQKTNWNHSVFDVPLHYNLYNASKSGGNYDMRNIFNGTVVQRHPSHAVTFVDNHDSQPEEALESFVEEWFKPLAYALTLTREQGYPSVFYGDYYGIPTHGVPAMRSKIDPILEARQKYAYGPQHDYLDHPDVIGWTREGDSSHPKSGLATLITDGPGGSKRMYAGLKNAGETWYDITGNRSDTVKIGSDGWGEFHVNDGSVSIYVQK

SEQ ID NO: 37669 - protein, 478 aa, Bacillus sp.
NGTMMQYFEWYLPNDGNHWNRLNSDASNLKSKGITAVWIPPAWKGASQNDVGYGAYDLYDLGEFNQKGTVRTKYGTRSQLQAAVTSLKNNGIQVYGDVVMNHKGGADATEMVRAVEVNPNNRNQEVTGEYTIEAWTRFDFPGRGNTHSSFKWRWYHFDGVDWDQSRRLNNRIYKFRGKAWDWEVDTEFGNYDYLMYADYDMDHPEVVNELRNWGVWYTNTLGLDGFRIDAVKHIKYSFTRDWINHVRSATGKNMFAVAEFWKNDLGAIENYLQKTNWNHSVFDVPLHYNLYNASKSGGNYDMRNIFNGTVVQRHPSHAVTFVDNHDSQPEEALESFVDTWFKPLAYALTLTREQGYPSVFYGDYYGIPTHGVPAMRSKIDPILEARQKYAYGPQHDYLDHPDVIGWTREGDSSHPKSGLATLITDGPGGSKRMYAGLKNAGETWYDITGNRSDTVKIGSDGWGEFHVNDGSVSIYVQK

SEQ ID NO: 37670 - protein, 478 aa, Bacillus sp.
NGTMMQYFEWYLPNDGNHWNRLNSDASNLKSKGITAVWIPPAWKGASQNDVGYGAYDLYDLGEFNQKGTVRTKYGTRSQLQAAVTSLKNNGIQVYGDVVMNHKGGADATEMVRAVEVNPNNRNQEVTGEYTIEAWTRFDFPGRGNTHSSFKWRWYHFDGVDWDQSRRLNNRIYKFRGKAWDWEVDTEFGNYDYLMYADYDMDHPEVVNELRNWGVWYTNTLGLDGFRIDAVKHIKYSFTRDWINHVRSATGKNMFAVAEFWKNDLGAIENYLQKTNWNHSVFDVPLHYNLYNASKSGGNYDMRNIFNGTVVQRHPSHAVTFVDNHDSQPEEALESFVEEWFKPLAYALTLTRESGYPSVFYGDYYGIPTHGVPAMRSKIDPILEARQKYAYGPQHDYLDHPDVIGWTREGDSSHPKSGLATLITDGPGGSKRMYAGLKNAGETWYDITGNRSDTVKIGSDGWGEFHVNDGSVSIYVQK

SEQ ID NO: 37671 - protein, 478 aa, Bacillus sp.
NGTMMQYFEWYLPNDGNHWNRLNSDASNLKSKGITAVWIPPAWKGASQNDVGYGAYDLYDLGEFNQKGTVRTKYGTRSQLQAAVTSLKNNGIQVYGDVVMNHKGGADATEMVRAVEVNPNNRNQEVTGEYTIEAWTRFDFPGRGNTHSSFKWRWYHFDGVDWDQSRRLNNRIYKFRGKAWDWEVDTENGNYDYLMYADIDYDLPEVVSELRNWGVWYTNTLGLDGFRIDAVKHIKYSFTRDWINHVRSATGKNMFAVAEFWKNDLGAIENYLQKTNWNHSVFDVPLHYNLYNASKSGGNYDMRNIFNGTVVQRHPSHAVTFVDNHDSQPEEALESFVEEWFKPLAYALTLTREQGYPSVFYGDYYGIPTHGVPAMRSKIDPILEARQKYAYGPQHDYLDHPDVIGWTREGDSSHPKSGLATLITDGPGGSKRMYAGLKNAGETWYDITGNRSDTVKIGSDGWGEFHVNDGSVSIYVQK

SEQ ID NO: 37672 - protein, 478 aa, Synthetic construct
NGTMMQYFEWYLPNDGNHWNRLNSDASNLKSKGITAVWIPPAWKGASQNDVGYGAYDLYDLGEFNQKGTVRTKYGTRSQLQAAVTSLKNNGIQVYGDVVMNHKGGADATEMVRAVEVNPNNRNQEVTGEYTIEAWTRFDFPGRGNTHSSFKWRWYHFDGVDWDQSRRLNNRIYKFRGKAWDWEVDTENGNYDYLMYADHDMDHPEVVNELRNWGVWYTNTLGLDGFRIDAVKHIKYSFTRDWINHVRSATGKNMFAVAEFWKNDLGAIENYLQKTNWNHSVFDVPLHYNLYNASKSGGNYDMRNIFNGTVVQRHPSHAVTFVDNHDSQPEEALESFVEEWFKPLAYALTLTREQGYPSVFYGDYYGIPTHGVPAMRSKIDPILEARQKYAYGPQHDYLDHPDVIGWTREGDSSHPKSGLATLITDGPGGSKRMYAGLKNAGETWYDITGNRSDTVKIGSDGWGEFHVNDGSVSIYVQK

SEQ ID NO: 37673 - protein, 478 aa, Synthetic construct
NGTMMQYFEWYLPNDGNHWNRLNSDASNLKSKGITAVWIPPAWKGASQNDVGYGAYDLYDLGEFNQKGTVRTKYGTRSQLQAAVTSLKNNGIQVYGDVVMNHKGGADATEMVRAVEVNPNNRNQEVTNEYTIEAWTRFDFPGRGNTHSSFKWRWYHFDGVDWDQSRRLNNRIYKFRGKAWDWEVDTENGNYDYLMYADIDMDHPEVVNELRNWGVWYTNTLGLDGFRIDAVKHIKYSFTRDWINHVRSATGKNMFAVAEFWKNDLGAIENYLQKTNWNHSVFDVPLHYNLYNASKSGGNYDMRNIFNGTVVQRHPSHAVTFVDNHDSQPEEALESFVEEWFKPLAYALTLTREQGYPSVFYGDYYGIPTHGVPAMRSKIDPILEARQKYAYGPQHDYLDHPDVIGWTREGDSSHPKSGLATLITDGPGGSKRMYAGLKNAGETWYDITGNRSDTVKIGSDGWGEFHVNDGSVSIYVQK

SEQ ID NO: 37674 - protein, 478 aa, Synthetic construct
NGTMMQYFEWYLPNDGNHWNRLNSDASNLKSKGITAVWIPPAWKGASQNDVGYGAYDLYDLGEFNQKGTVRTKYGTRSQLQAAVTSLKNNGIQVYGDVVMNHKGGADATEMVRAVEVNPNNRNQEVTGEYTIEAWTRFDFPGRGNTHSSFKWRWYHFDGVDWDQSRRLNNRIYKFRGKAWDWEVDSEFGNYDYLMYADIDMDHPEVVNELRNWGVWYTNTLGLDGFRIDAVKHIKYSFTRDWINHVRSATGKNMFAVAEFWKNDLGAIENYLQKTNWNHSVFDVPLHYNLYNASKSGGNYDMRNIFNGTVVQRHPSHAVTFVDNHDSQPEEALESFVEEWFKPLAYALTLTREQGYPSVFYGDYYGIPTHGVPAMRSKIDPILEARQKYAYGPQHDYLDHPDVIGWTREGDSSHPKSGLATLITDGPGGSKRMYAGLKNAGETWYDITGNRSDTVKIGSDGWGEFHVNDGSVSIYVQK

SEQ ID NO: 37675 - protein, 478 aa, Bacillus sp.
NGTMMQYFEWYLPNDGNHWNRLNSDASNLKSKGITAVWIPPAWKGLSQNDVGYGAYDLYDLGEFNQKGTVRTKYGTRSQLQAAVTSLKNNGIQVYGDVVMNHKGGADATEMVRAVEVNPNNRNQEVTGEYTIEAWTRFDFPGRGNTHSSFKWRWYHFDGVDWDQSRRLQNRIYKFRGKAWDWEVDTEFGNYDYLMYADYDMDHPEVVNELRNWGVWYTNTLGLDGFRIDAVKHIKYSFTRDWINHVRSATGKNMFAVAEFWKNDLGAIENYLQKTNWNHSVFDVPLHYNLYNASKSGGNYDMRNIFNGTVVQRHPSHAVTFVDNHDSQPEEALESFVEEWFKPLAYALTLTREQGYPSVFYGDYYGIPTHGVPAMRSKIDPILEARQKYAYGPQHDYLDHPDVIGWTREGDSSHPKSGLATLITDGPGGSKRMYAGLKNAGETWYDITGNRSDTVKIGSDGWGEFHVNDGSVSIYVQK

SEQ ID NO: 37676 - protein, 478 aa, Synthetic construct
NGTMMQYFEWYLPNDGNHWNRLNSDASNLKSKGITAVWIPPAWKGASQNDVGYGAYDLYDLGEFNQKGTVRTKYGTRSQLQAAVTSLKNNGIQVYGDVVMNHKGGADATEWVRAVEVNPNNRNQEVTGEYTIEAWTRFDFPGRGNTHSSFKWRWYHFDGVDWDQSRRLNNRIYKFRGKAWDWEVDTENGNYDYLMYADIDMDHPEVVNELRNWGVWYTNTLGLDGFRIDAVKHIKYSFTRDWINHVRSATGKNMFAVAEFWKNDLGAIENYLQKTNWNHSVFDVPLHYNLYNASKSGGNYDMRNIFNGTVVQRHPSHAVTFVDNHDSQPEEALESFVEEWFKPLAYALTLTREQGYPSVFYGDYYGIPTHGVPAMRSKIDPILEARQKYAYGPQHDYLDHPDVIGWTREGDSSHPKSGLATLITDGPGGSKRMYAGLKNAGETWYDITGNRSDTVKIGSDGWGEFHVNDGSVSIYVQK

SEQ ID NO: 37677 - protein, 478 aa, Synthetic construct
NGTMMQYFEWYLPNDGNHWNRLNSDASNLKSKGITAVWIPPAWKGASQNDVGYGAYDLYDLGEFNQKGTVRTKYGTRSQLQAAVTSLKNNGIQVYGDVVMNHKGGADATELVRAVEVNPNNRNQEVTGEYTIEAWTRFDFPGRGNTHSSFKWRWYHFDGVDWDQSRRLNNRIYKFRGKAWDWEVDTENGNYDYLMYADIDMDHPEVVNELRNWGVWYTNTLGLDGFRIDAVKHIKYSFTRDWINHVRSATGKNMFAVAEFWKNDLGAIENYLQKTNWNHSVFDVPLHYNLYNASKSGGNYDMRNIFNGTVVQRHPSHAVTFVDNHDSQPEEALESFVEEWFKPLAYALTLTREQGYPSVFYGDYYGIPTHGVPAMRSKIDPILEARQKYAYGPQHDYLDHPDVIGWTREGDSSHPKSGLATLITDGPGGSKRMYAGLKNAGETWYDITGNRSDTVKIGSDGWGEFHVNDGSVSIYVQK

SEQ ID NO: 37678 - protein, 478 aa, Bacillus sp.
NGTMMQYFEWYLPNDGNHWNRLNSDASNLKSKGITAVWIPPAWKGASQNDVGYGAYDLYDLGEFNQKGTVRTKYGTRSQLQAAVTSLKNNGIQVYGDVVMNHKGGADATEMVRAVEVNPNNRNQEVTGEYTIEAWTRFDFPGRGNTHSSFKWRWYHFDGVDWDQSRRLNNRIYKFRGKAWDWEVDTENGNYDYLMYADIDYDYPEVVNELRQWGVWYTNTLGLDGFRIDAVKHIKYSFTRDWINHVRSATGKNMFAVAEFWKNDLGAIENYLQKTNWNHSVFDVPLHYNLYNASKSGGNYDMRNIFNGTVVQRHPSHAVTFVDNHDSQPEEALESFVEEWFKPLAYALTLTREQGYPSVFYGDYYGIPTHGVPAMRSKIDPILEARQKYAYGPQHDYLDHPDVIGWTREGDSSHPKSGLATLITDGPGGSKRMYAGLKNAGETWYDITGNRSDTVKIGSDGWGEFHVNDGSVSIYVQK

SEQ ID NO: 37679 - protein, 478 aa, Synthetic construct
NGTMMQYFEWYLPNDGNHWNRLNSDASNLKSKGITAVWIPPAWKGASQNDVGYGAYDLYDLGEFNQKGTVRTKYGTRSQLQAAVTSLKNNGIQVYGDVVMNHKGGADATEMVRAVEVNPNNRNQEVTGEYTIEAWTRFDFPGRGNTHSSFKWRWYHFDGVDWDQSRRLNNRIYKFRGKAWDWEVDTENGNYDYLMYADIDMDHPEVVNELRNWGVWYTNTLGLDGFRIDAVKHIKYSFQRDWINHVRSATGKNMFAVAEFWKNDLGAIENYLQKTNWNHSVFDVPLHYNLYNASKSGGNYDMRNIFNGTVVQRHPSHAVTFVDNHDSQPEEALESFVEEWFKPLAYALTLTREQGYPSVFYGDYYGIPTHGVPAMRSKIDPILEARQKYAYGPQHDYLDHPDVIGWTREGDSSHPKSGLATLITDGPGGSKRMYAGLKNAGETWYDITGNRSDTVKIGSDGWGEFHVNDGSVSIYVQK

SEQ ID NO: 37680 - protein, 478 aa, Bacillus sp.
NGTMMQYFEWYLPNDGNHWNRLNSDASNLKSKGITAVWIPPAWKGASQNDVGYGAYDLYDLGEFNQKGTVRTKYGTRSQLQAAVTSLKNNGIQVYGDVVMNHKGGADATEMVRAVEVNPNNRNQEVTGEYTIEAWTRFDFPGRGNTHSSFKWRWYHFDGVDWDQSRKFNNRIYKFRGKAWDWEVDTEFGNYDYLMYADYDMDHPEVVNELRNWGVWYTNTLGLDGFRIDAVKHIKYSFTRDWINHVRSATGKNMFAVAEFWKNDLGAIENYLQKTNWNHSVFDVPLHYNLYNASKSGGNYDMRNIFNGTVVQRHPSHAVTFVDNHDSQPEEALESFVEEWFKPLAYALTLTREQGYPSVFYGDYYGIPTHGVPAMRSKIDPILEARQKYAYGPQHDYLDHPDVIGWTREGDSSHPKSGLATLITDGPGGSKRMYAGLKNAGETWYDITGNRSDTVKIGSDGWGEFHVNDGSVSIYVQK

SEQ ID NO: 37681 - protein, 478 aa, Bacillus sp.
NGTMMQYFEWYLPNDGNHWNRLNSDASNLKSKGITAVWIPPAWKGASQNDVGYGAYDLYDLGEFNQKGTVRTKYGTRSQLQAAVTSLKNNGIQVYGDVVMNHKGGADATEMVRAVEVNPNNRNQEVTGEYTIEAWTRFDFPGRGNTHSSFKWRWYHFDGVDWDQSRRLNNRIYKFRGKAWDWEVDTEFGNYDYLMYADYDMDHPEVVNELRNWGVWYTNTLGLDGFRIDAVKHIKYSFTRDWINHVRSATGKNMFAVAEFWQNDLGRIENYLQKTNWNHSVFDVPLHYNLYNASKSGGNYDMRNIFNGTVVQRHPSHAVTFVDNHDSQPEEALESFVEEWFKPLAYALTLTREQGYPSVFYGDYYGIPTHGVPAMRSKIDPILEARQKYAYGPQHDYLDHPDVIGWTREGDSSHPKSGLATLITDGPGGSKRMYAGLKNAGETWYDITGNRSDTVKIGSDGWGEFHVNDGSVSIYVQK

SEQ ID NO: 37682 - protein, 478 aa, Bacillus sp.
NGTMMQYFEWYLPNDGNHWNRLNSDASNLKSKGITAVWIPPAWKGASQNDVGYGAYDLYDLGEFNQKGTVRTKYGTRSQLQAAVTSLKNNGIQVYGDVVMNHKGGADATEMVRAVEVNPNNRNQEVTGEYTIEAWTRFDFPGRGNTHSSFKWRWYHFDGVDWDQSRRIDNRIYKFRGKAWDWEVDTEFGNYDYLMYADYDMDHPEVVNELRNWGVWYTNTLGLDGFRIDAVKHIKYSFTRDWINHVRSATGKNMFAVAEFWKNDLGAIENYLQKTNWNHSVFDVPLHYNLYNASKSGGNYDMRNIFNGTVVQRHPSHAVTFVDNHDSQPEEALESFVEEWFKPLAYALTLTREQGYPSVFYGDYYGIPTHGVPAMRSKIDPILEARQKYAYGPQHDYLDHPDVIGWTREGDSSHPKSGLATLITDGPGGSKRMYAGLKNAGETWYDITGNRSDTVKIGSDGWGEFHVNDGSVSIYVQK

SEQ ID NO: 37683 - protein, 478 aa, Synthetic construct
NGTMMQYFEWYLPNDGNHWNRLNSDASNLKSKGITAVWIPPAWKGASQNDVGYGAYDLYDLGEFNQKGTVRTKYGTRSQLQAAVTSLKNNGIQVYGDVVMNHKGGADATEMVRAVEVNPNNRNQEVTGEYTIEAWTRFDFPGRGNTHSSFKWRWYHFDGVDWDQSRRLNNRIYKFRGKAWDWEVDTENGNYDYLMYADIDMDHPEVVNELRNWGVWYTNTLGLDGFRIDAVKHIKYSFTRDWINHVRSATGKNMFAVAEFWKNDLGAIENYLQKTNWNHSVFDVPLHYNLYNASKSGGNYDMRNIFNGTVVQRHPSHAVTFVDNHDSQPEEALESFVEEWFKPLAYALTLTREQGYPSVFYGDYYGIPTHGVPAMRSKIDPILEARQKYAYGPQHDYLDHPDVIGWTREGDSSHPKSGLATLITDGPGGSKRMYAGLKNAGETWYDITGNRSDTVKIGSDGWGEFHVNDGSVSIYVQK

SEQ ID NO: 37684 - protein, 478 aa, Bacillus sp.
NGTMMQYFEWYLPNDGNHWNRLNSDASNLKSKGITAVWIPPAWKGASQNDVGYGAYDLYDLGEFNQKGTVRTKYGTRSQLQAAVTSLKNNGIQVYGDVVMNHKGGADATEMVRAVEVNPNNRNQEVTGEYTIEAWTRFDFPGRGNTHSSFKWRWYHFDGVDWDQSRRLNNRIYKFRGKAWDWEVDTEFGNYDYLMYADYDMDHPEVVNELRNWGVWYTNTLGLDGFRIDAVKHIKYSFTRDWINHVRSATGKNMFAVAEFWKNDLGAIENYLQKTNWNHSVFDVPLHYNLYNASKSGGNYDMRNIFNGTVVQRHPSHAVTFVDNHDSQPEEALESFVETWFKPLAYALTLTREQGYPSVFYGDYYGIPTHGVPAMRSKIDPILEARQKYAYGPQHDYLDHPDVIGWTREGDSSHPKSGLATLITDGPGGSKRMYAGLKNAGETWYDITGNRSDTVKIGSDGWGEFHVNDGSVSIYVQK

SEQ ID NO: 37685 - protein, 478 aa, Synthetic construct
NGTMMQYFEWYLPNDGNHWNRLNSDASNLKSKGITAVWIPPAWKGASQNDVGYGAYDLYDLGEFNQKGTVRTKYGTRSQLQAAVTSLKNNGIQVYGDVVINHKGGADATEMVRAVEVNPNNRNQEVTGEYTIEAWTRFDFPGRGNTHSSFKWRWYHFDGVDWDQSRRLNNRIYKFRGKAWDWEVDTENGNYDYLMYADYDMDHPEVVNELRNWGVWYTNTLGLDGFRIDAVKHIKYSFIRDWINHVRSATGKNMFAVAEFWKNDLGAIENYLQKTNWNHSVFDVPLHYNLYNASKSGGNYDMRNIFNGTVVQRHPSHAVTFVDNHDSQPEEALESFVEEWFKPLAYALTLTREQGYPSVFYGDYYGIPTHGVPAMRSKIDPILEARQKYAYGPQHDYLDHPDVIGWTREGDSSHPKSGLATLITDGPGGSKRMYAGLKNAGETWYDITGNRSDTVKIGSDGWGEFHVNDGSVSIYVQK

SEQ ID NO: 37686 - protein, 478 aa, Synthetic construct
NGTMMQYFEWYLPNDGNHWNRLNSDASNLKSKGITAVWIPPAWKGASQNDVGYGAYDLYDLGEFNQKGTVRTKYGTRSQLQAAVTSLKNNGIQVYGDVVMNHKGGADATEMVCAVEVNPNNRNQEVTGEYTIEAWTRFDFPGRGNTHSSFKWRWYHFDGVDWDQSRRLNNRIYKFRGKAWDWEVDTENGNYDYLMYADIDMDHPEVVNELRNWGVWYTNTLGLDGFRIDAVKHIKYSFTRDWINHVRSATGKNMFAVAEFWKNDLGAIENYLQKTNWNHSVFDVPLHYNLYNASKSGGNYDMRNIFNGTVVQRHPSHAVTFVDNHDSQPEEALESFVEEWFKPLAYALTLTREQGYPSVFYGDYYGIPTHGVPAMRSKIDPILEARQKYAYGPQHDYLDHPDVIGWTREGDSSHPKSGLATLITDGPGGSKRMYAGLKNAGETWYDITGNRSDTVKIGSDGWGEFHVNDGSVSIYVQK

SEQ ID NO: 37687 - protein, 478 aa, Synthetic construct
NGTMMQYFEWYLPNDGNHWNRLNSDASNLKSKGITAVWIPPAWKGASQNDVGYGAYDLYDLGEFNQKGTVRTKYGTRSQLQAAVTSLKNNGIQVYGDVVMNHKGGADATEMVRAVEVNPNNRNQEVTGEYTIEAWTHFDFPGRGNTHSSFKWRWYHFDGVDWDQSRRLNNRIYKFRGKAWDWEVDTENGNYDYLMYADIDMDHPEVVNELRNWGVWYTNTLGLDGFRIDAVKHIKYSFTRDWINHVRSATGKNMFAVAEFWKNDLGAIENYLQKTNWNHSVFDVPLHYNLYNASKSGGNYDMRNIFNGTVVQRHPSHAVTFVDNHDSQPEEALESFVEEWFKPLAYALTLTREQGYPSVFYGDYYGIPTHGVPAMRSKIDPILEARQKYAYGPQHDYLDHPDVIGWTREGDSSHPKSGLATLITDGPGGSKRMYAGLKNAGETWYDITGNRSDTVKIGSDGWGEFHVNDGSVSIYVQK

SEQ ID NO: 37688 - protein, 478 aa, Synthetic construct
NGTMMQYFEWYLPNDGNHWNRLNSDASNLKSKGITAVWIPPAWKGASQNDVGYGAYDLYDLGEFNQKGTVRTKYGTRSQLQAAVTSLKNNGIQVYGDVVMNHKGGADATEMVRAVEVNPNNRNQEVTGEYTIEAWTRFDFPGRGNTHSSFKWRWYHFDGVDWDQSRRLNNRIYKFRGKAWDWEVDTENGNYDYLMYADFDMDHPEVVNEIRNWGVWYTNTLGLDGFRIDAVKHIKYSFTRDWINHVRSATGKNMFAVAEFWKNDLGAIENYLQKTNWNHSVFDVPLHYNLYNASKSGGNYDMRNIFNGTVVQRHPSHAVTFVDNHDSQPEEALESFVEEWFKPLAYALTLTREQGYPSVFYGDYYGIPTHGVPAMRSKIDPILEARQKYAYGPQHDYLDHPDVIGWTREGDSSHPKSGLATLITDGPGGSKRMYAGLKNAGETWYDITGNRSDTVKIGSDGWGEFHVNDGSVSIYVQK

SEQ ID NO: 37689 - protein, 478 aa, Bacillus sp.
NGTMMQYFEWYLPNDGNHWNRLNSDASNLKSKGITAVWIPPAWKGASQNDVGYGAYDIYDLGEFNQKGTVRTKYGTRSQLQAAVTSLKNNGIQVYGDVVMNHKGGADATEMVRAVEVNPNNRNQEVTGEYTIEAWTRFDFPGRGNTHSSFKWRWYHFDGVDWDQSRRLNNRIYKFRGKAWDWEVDTENGNYDYLMYADIDYDHPEVVNELRNWGVWYTNTLGLDGFRIDAVKHIKYSFTRDWINHVRSATGKNMFAVAEFWKNDLGAIENYLQKTNWNHSVFDVPLHYNLYNASKSGGNYDMRNIFNGTVVQRHPSHAVTFVDNHDSQPEEALESFVEEWFKPLAYALTLTREQGYPSVFYGDYYGIPTHGVPAMRSKIDPILEARQKYAYGPQHDYLDHPDVIGWTREGDSSHPKSGLATLITDGPGGSKRMYAGLKNAGETWYDITGNRSDTVKIGSDGWGEFHVNDGSVSIYVQK

SEQ ID NO: 37690 - protein, 478 aa, Synthetic construct
NGTMMQYFEWYLPNDGNHWNRLNSDASNLKSKGITAVWIPPAWKGASQNDVGYGAYDLYDLGEFNQKGTVRTKYGTRSQLQAAVTSLKNNGIQVYGDVVMNHKGGADATEMVRAVEVNPNNRNQEVTGEYTIEAWTRFDFPGRGNTHSSFKWRWYHFDGVDWDQSRRLNNRIYKFRGKAWDWEVDTENGNYDYLMYADLDMDHPEVVNELRNWGVWYTNTLGLDGFRIDAVKHIKYSFTRDWINHVRSATGKNMFAVAEFWKNDLGAIENYLQKTNWNHSVFDVPLHYNLYNASKSGGNYDMRNIFNGTVVQRHPSHAVTFVDNHDSQPEEALESFVEEWFKPLAYALTLTREQGYPSVFYGDYYGIPTHGVPAMRSKIDPILEARQKYAYGPQHDYLDHPDVIGWTREGDSSHPKSGLATLITDGPGGSKRMYAGLKNAGETWYDITGNRSDTVKIGSDGWGEFHVNDGSVSIYVQK

SEQ ID NO: 37691 - protein, 478 aa, Bacillus sp.
NGTMMQYFEWYLPNDGNHWNRLNSDASNLKSKGITAVWIPPAWKGASQNDVGYGAYDLYDLGEFNQKGTVRTKYGTRSQLQAAVTSLKNNGIQVYGDVVMNHKGGADATEMVRAVEVNPNNRNQEVTGEYTIEAWTRFDFPGRGNTHSSFKWRWYHFDGVDWDQSRRLNNRIYKFRGKAWDWEVDTEFGNYDYLMYADYDMDHPEVVNELRNWGVWYTNTLGLDGFRIDAVKHIKYSFTRDWINHVRSATGKNMFAVAEFWQNDLGYIENYLQKTNWNHSVFDVPLHYNLYNASKSGGNYDMRNIFNGTVVQRHPSHAVTFVDNHDSQPEEALESFVEEWFKPLAYALTLTREQGYPSVFYGDYYGIPTHGVPAMRSKIDPILEARQKYAYGPQHDYLDHPDVIGWTREGDSSHPKSGLATLITDGPGGSKRMYAGLKNAGETWYDITGNRSDTVKIGSDGWGEFHVNDGSVSIYVQK

SEQ ID NO: 37692 - protein, 478 aa, Synthetic construct
NGTMMQYFEWYLPNDGNHWNRLNSDASNLKSKGITAVWIPPAWKGASQNDVGYGAYDLYDLGEFNQKGTVRTKYGTRSQLQAAVTSLKNNGIQVYGDVVMNHKGGADATEMVRAVEVNPNNRNQEVTGEYTIEAWTRFDFPGRGNTHSSFKWRWYHFDGVDWDQSRRLNNRIYKFRGKAWDWEVDTENGNYDYLMYADIDMDHPYVVNELRNWGVWYTNTLGLDGFRIDAVKHIKYSFTRDWINHVRSATGKNMFAVAEFWKNDLGAIENYLQKTNWNHSVFDVPLHYNLYNASKSGGNYDMRNIFNGTVVQRHPSHAVTFVDNHDSQPEEALESFVEEWFKPLAYALTLTREQGYPSVFYGDYYGIPTHGVPAMRSKIDPILEARQKYAYGPQHDYLDHPDVIGWTREGDSSHPKSGLATLITDGPGGSKRMYAGLKNAGETWYDITGNRSDTVKIGSDGWGEFHVNDGSVSIYVQK

SEQ ID NO: 37693 - protein, 478 aa, Bacillus sp.
NGTIMQYFEWYLPNDGNHWNRLNSDASNLKSKGITAVWIPPAWKGASQNDVGYGAYDLYDLGEFNQKGTVRTKYGTRSQLQAAVTSLKNNGIQVYGDVVMNHKGGADATEMVKAVEVNPNNRNQEVTGEYTIEAWTRFDFPGRGNTHSSFKWRWYHFDGVDWDQSRRLNNRIYKFRGKAWDWEVDTEFGNYDYLLYADIDMDHPEVVNELRNWGVWYTNTLGLDGFRIDAVKHIKYSFTRDWINHVRSATGKNMFAVAEFWKNDLGAIENYLQKTNWNHSVFDVPLHYNLYNASKSGGNYDMRNIFNGTVVQKHPTHAVTFVDNHDSQPEEALESFVEEWFKPLAYALTLTREQGYPSVFYGDYYGIPTHGVPAMRSKIDPILEARQKYAYGPQHDYIDHPDVIGWTREGDSSAAKSGLAALITDGPGGSKRMYAGLKNAGETWYDITGNKSDTVKIGSDGWGEFHVNDGSVSIYVQK

SEQ ID NO: 37694 - protein, 478 aa, Synthetic construct
NGTMMQYFEWYLPNDGNHWNRLNSDASNLKSKGITAVWIPPAWKGASQNDVGYGAYDLYDLGEFNQKGTVRTKYGTRSQLQAAVTSLKNNGIQVYGDVVMNHKGGADATEYVRAVEVNPNNRNQEVTGEYTIEAWTRFDFPGRGNTHSSFKWRWYHFDGVDWDQSRRLNNRIYKFRGKAWDWEVDTENGNYDYLMYADIDMDHPEVVNELRNWGVWYTNTLGLDGFRIDAVKHIKYSFTRDWINHVRSATGKNMFAVAEFWKNDLGAIENYLQKTNWNHSVFDVPLHYNLYNASKSGGNYDMRNIFNGTVVQRHPSHAVTFVDNHDSQPEEALESFVEEWFKPLAYALTLTREQGYPSVFYGDYYGIPTHGVPAMRSKIDPILEARQKYAYGPQHDYLDHPDVIGWTREGDSSHPKSGLATLITDGPGGSKRMYAGLKNAGETWYDITGNRSDTVKIGSDGWGEFHVNDGSVSIYVQK

SEQ ID NO: 37695 - protein, 478 aa, Bacillus sp.
NGTMMQYFEWYLPNDGNHWNRLNSDASNLKSKGITAVWIPPAWKGASQNDVGYGAYDLYDLGEFNQKGTVRTKYGTRSQLQAAVTSLKNNGIQVYGDVVMNHKGGADATEMVRAVEVNPNNRNQEVTGEYTIEAWTRFDFPGRGNTHSSFKWRWYHFDGVDWDQSRRLNNRIYKFRGKAWDWEVDTEFGNYDYLMYADYDMDHPEVVNELRNWGVWYTNTLGLDGFRIDAVKHIKYSFTRDWINHVRSATGKNMFAVAEFWQNDLGSIENYLQKTNWNHSVFDVPLHYNLYNASKSGGNYDMRNIFNGTVVQRHPSHAVTFVDNHDSQPEEALESFVEEWFKPLAYALTLTREQGYPSVFYGDYYGIPTHGVPAMRSKIDPILEARQKYAYGPQHDYLDHPDVIGWTREGDSSHPKSGLATLITDGPGGSKRMYAGLKNAGETWYDITGNRSDTVKIGSDGWGEFHVNDGSVSIYVQK

SEQ ID NO: 37696 - protein, 478 aa, Bacillus sp.
NGTMMQYFEWYLPNDGNHWNRLNSDASNLKSKGITAVWIPPAWKGASQNDVGYGAYDLYDLGEFNQKGTVRTKYGTRSQLQAAVTSLKNNGIQVYGDVVMNHKGGADATEMVRAVEVNPNNRNQEVTGEYTIEAWTRFDFPGRGNTHSSFKWRWYHFDGVDWDQSRRLNNRIYKFRGKAWDWEVDTEFGNYDYLMYADYDMDHPEVVNELRNWGVWYTNTLGLDGFRIDAVKHIKYSFTRDWINHVRSATGKNMFAVAEFWQNDLGVIENYLQKTNWNHSVFDVPLHYNLYNASKSGGNYDMRNIFNGTVVQRHPSHAVTFVDNHDSQPEEALESFVEEWFKPLAYALTLTREQGYPSVFYGDYYGIPTHGVPAMRSKIDPILEARQKYAYGPQHDYLDHPDVIGWTREGDSSHPKSGLATLITDGPGGSKRMYAGLKNAGETWYDITGNRSDTVKIGSDGWGEFHVNDGSVSIYVQK

SEQ ID NO: 37697 - protein, 478 aa, Bacillus sp.
NGTMMQYFEWYLPNDGNHWNRLNSDASNLKSKGITAVWIPPAWKGASQNDVGYGAYDLYDLGEFNQKGTVRTKYGTRSQLQAAVTSLKNNGIQVYGDVVMNHKGGADATEMVRAVEVNPNNRNQEVTGEYTIEAWTRFDFPGRGNTHSSFKWRWYHFDGADWDQSRRLNNRIYKFRGKAWDWEVDTEFGNYDYLMYADYDMDHPEVVNELRNWGVWYTNTLGLDGFRIDAVKHIKYSFTRDWINHVRSATGKNMFAVAEFWKNDLGAIENYLQKTNWNHSVFDVPLHYNLYNASKSGGNYDMRNIFNGTVVQRHPSHAVTFVDNHDSQPEEALESFVEEWFKPLAYALTLTREQGYPSVFYGDYYGIPTHGVPAMRSKIDPILEARQKYAYGPQHDYLDHPDVIGWTREGDSSHPKSGLATLITDGPGGSKRMYAGLKNAGETWYDITGNRSDTVKIGSDGWGEFHVNDGSVSIYVQK

SEQ ID NO: 37698 - protein, 478 aa, Synthetic construct
NGTMMQYFEWYLPNDGNHWNRLNSDASNLKSKGITAVWIPPAWKGASQNDVGYGAYDLYDLGEFNQKGTVRTKYGTRSQLQAAVTSLKNNGIQVYGDVVMNHKGGADATEMVRAVEVNPNNRNQEVTGEYTIEAWTRFDFPGRGNTHSSFKWRWYHFDGVDWDQSRRLNNRIYKFRGKAWDWEVDTENGNYDYLMYADYDMDHPEVVNELRNWGVWYTNTLGLDGFRIDAVKHIKYSFVRDWINHVRSATGKNMFAVAEFWKNDLGAIENYLQKTNWNHSVFDVPLHYNLYNASKSGGNYDMRNIFNGTVVQRHPSHAVTFVDNHDSQPEEALESFVEEWFKPLAYALTLTREQGYPSVFYGDYYGIPTHGVPAMRSKIDPILEARQKYAYGPQHDYLDHPDVIGWTREGDSSHPKSGLATLITDGPGGSKRMYAGLKNAGETWYDITGNRSDTVKIGSDGWGEFHVNDGSVSIYVQK

SEQ ID NO: 37699 - protein, 478 aa, Synthetic construct
NGTMMQYFEWYLPNDGNHWNRLNSDASNLKSKGITAVWIPPAWKGASQNDVGYGAYDLYDLGEFNQKGTVRTKYGTRSQLQAAVTSLKNNGIQVYGDVVMNHKGGADATEMVPAVEVNPNNRNQEVTGEYTIEAWTRFDFPGRGNTHSSFKWRWYHFDGVDWDQSRRLNNRIYKFRGKAWDWEVDTENGNYDYLMYADIDMDHPEVVNELRNWGVWYTNTLGLDGFRIDAVKHIKYSFTRDWINHVRSATGKNMFAVAEFWKNDLGAIENYLQKTNWNHSVFDVPLHYNLYNASKSGGNYDMRNIFNGTVVQRHPSHAVTFVDNHDSQPEEALESFVEEWFKPLAYALTLTREQGYPSVFYGDYYGIPTHGVPAMRSKIDPILEARQKYAYGPQHDYLDHPDVIGWTREGDSSHPKSGLATLITDGPGGSKRMYAGLKNAGETWYDITGNRSDTVKIGSDGWGEFHVNDGSVSIYVQK

SEQ ID NO: 37700 - protein, 478 aa, Synthetic construct
NGTMMQYFEWYLPNDGNHWNRLNSDASNLKSKGITAVWIPPAWKGASQNDVGYGAYDLYDLGEFNQKGTVRTKYGTRSQLQAAVTSLKNNGIQVYGDVVMNHKGGADATEMVRAVEVNPNNRNQEVTGEYTIEAWTRFDFPGRGNTHSSFKWRWYHFDGVDWDQSRRLNNRIYKFRGKAWDWEVDTENGNYDYLMYADIDMDHPRVVNELRNWGVWYTNTLGLDGFRIDAVKHIKYSFTRDWINHVRSATGKNMFAVAEFWKNDLGAIENYLQKTNWNHSVFDVPLHYNLYNASKSGGNYDMRNIFNGTVVQRHPSHAVTFVDNHDSQPEEALESFVEEWFKPLAYALTLTREQGYPSVFYGDYYGIPTHGVPAMRSKIDPILEARQKYAYGPQHDYLDHPDVIGWTREGDSSHPKSGLATLITDGPGGSKRMYAGLKNAGETWYDITGNRSDTVKIGSDGWGEFHVNDGSVSIYVQK

SEQ ID NO: 37701 - protein, 478 aa, Bacillus sp.
NGTMMQYFEWYLPNDGNHWNRLNSDASNLKSKGITAVWIPPAWKGASQNDVGYGAYDLYDLGEFNQKGTVRTKYGTRSQLQAAVTSLKNNGIQVYGDVVMNHKGGADATEMVRAVEVNPNNRNQEVTGEYTIEAWTRFDFPGRGNTHSSFKWRWYHFDGVDWDQSRDLSNRIYKFRGKAWDWEVDTEFGNYDYLMYADYDMDHPEVVNELRNWGVWYTNTLGLDGFRIDAVKHIKYSFTRDWINHVRSATGKNMFAVAEFWKNDLGAIENYLQKTNWNHSVFDVPLHYNLYNASKSGGNYDMRNIFNGTVVQRHPSHAVTFVDNHDSQPEEALESFVEEWFKPLAYALTLTREQGYPSVFYGDYYGIPTHGVPAMRSKIDPILEARQKYAYGPQHDYLDHPDVIGWTREGDSSHPKSGLATLITDGPGGSKRMYAGLKNAGETWYDITGNRSDTVKIGSDGWGEFHVNDGSVSIYVQK

SEQ ID NO: 37702 - protein, 478 aa, Bacillus sp.
NGTMMQYFEWYLPNDGNHWNRLNSDASNLKSKGITAVWIPPAWKGASQNDVGYGAYDLYDLGEFNQKGTVRTKYGTRSQLQAAVTSLKNNGIQVYGDVVMNHKGGADATEMVRAVEVNPNNRNQEVTGEYTIEAWTRFDFPGRGNTHSSFKWRWYHFDGVDWDQSRKTNNRIYKFRGKAWDWEVDTEFGNYDYLMYADYDMDHPEVVNELRNWGVWYTNTLGLDGFRIDAVKHIKYSFTRDWINHVRSATGKNMFAVAEFWKNDLGAIENYLQKTNWNHSVFDVPLHYNLYNASKSGGNYDMRNIFNGTVVQRHPSHAVTFVDNHDSQPEEALESFVEEWFKPLAYALTLTREQGYPSVFYGDYYGIPTHGVPAMRSKIDPILEARQKYAYGPQHDYLDHPDVIGWTREGDSSHPKSGLATLITDGPGGSKRMYAGLKNAGETWYDITGNRSDTVKIGSDGWGEFHVNDGSVSIYVQK

SEQ ID NO: 37703 - protein, 478 aa, Bacillus sp.
NGTMMQYFEWYLPNDGNHWNRLNSDASNLKSKGITAVWIPPAWKGVSQNDVGYGAYDLYDLGEFNQKGTVRTKYGTRSQLQAAVTSLKNNGIQVYGDVVMNHKGGADATEMVRAVEVNPNNRNQEVTGEYTIEAWTRFDFPGRGNTHSSFKWRWYHFDGVDWDQSRQLSNRIYKFRGKAWDWEVDTEFGNYDYLMYADYDMDHPEVVNELRNWGVWYTNTLGLDGFRIDAVKHIKYSFTRDWINHVRSATGKNMFAVAEFWKNDLGAIENYLQKTNWNHSVFDVPLHYNLYNASKSGGNYDMRNIFNGTVVQRHPSHAVTFVDNHDSQPEEALESFVEEWFKPLAYALTLTREQGYPSVFYGDYYGIPTHGVPAMRSKIDPILEARQKYAYGPQHDYLDHPDVIGWTREGDSSHPKSGLATLITDGPGGSKRMYAGLKNAGETWYDITGNRSDTVKIGSDGWGEFHVNDGSVSIYVQK

SEQ ID NO: 37704 - protein, 478 aa, Bacillus sp.
NGTMMQYFEWYLPNDGNHWNRLNSDASNLKSKGITAVWIPPAWKGASQNDVGYGAYDLYDLGEFNQKGTVRTKYGTRSQLQAAVTSLKNNGIQVYGDVVMNHKGGADATEMVRAVEVNPNNRNQEVTGEYTIEAWTRFDFPGRGNTHSSFKWRWYHFDGVDWDQSRRLNNRIYKFRGKAWDWEVDTENGNYDYLMYADIDYDYPEVVNELRIWGVWYTNTLGLDGFRIDAVKHIKYSFTRDWINHVRSATGKNMFAVAEFWKNDLGAIENYLQKTNWNHSVFDVPLHYNLYNASKSGGNYDMRNIFNGTVVQRHPSHAVTFVDNHDSQPEEALESFVEEWFKPLAYALTLTREQGYPSVFYGDYYGIPTHGVPAMRSKIDPILEARQKYAYGPQHDYLDHPDVIGWTREGDSSHPKSGLATLITDGPGGSKRMYAGLKNAGETWYDITGNRSDTVKIGSDGWGEFHVNDGSVSIYVQK

SEQ ID NO: 37705 - protein, 478 aa, Bacillus sp.
NGTMMQYFEWYLPNDGNHWNRLNSDASNLKSKGITAVWIPPAWKGASQNDVGYGAYDLYDLGEFNQKGTVRTKYGTRSQLQAAVTSLKNNGIQVYGDVVMNHKGGADATEMVRAVEVNPNNRNQEVTGEYTIEAWTRFDFPGRGNTHSSFKWRWYHFDGVDWDQSRRLNNRIYKFRGKAWDWEVDTENGFYDYLMYADIDYDHPEVVNELRNWGVWYTNTLGLDGFRIDAVKHIKYSFTRDWINHVRSATGKNMFAVAEFWKNDLGAIENYLQKTNWNHSVFDVPLHYNLYNASKSGGNYDMRNIFNGTVVQRHPSHAVTFVDNHDSQPEEALESFVEEWFKPLAYALTLTREQGYPSVFYGDYYGIPTHGVPAMRSKIDPILEARQKYAYGPQHDYLDHPDVIGWTREGDSSHPKSGLATLITDGPGGSKRMYAGLKNAGETWYDITGNRSDTVKIGSDGWGEFHVNDGSVSIYVQK

SEQ ID NO: 37706 - protein, 478 aa, Bacillus sp.
NGTMMQYFEWYLPNDGNHWNRLNSDASNLKSKGITAVWIPPAWKGASQNDVGYGAYDLYDLGEFNQKGTVRTKYGTRSQLQAAVTSLKNNGIQVYGDVVMNHKGGADATEMVRAVEVNPNNRNQEVTGEYTIEAWTRFDFPGRGNTHSSFKWRWYHFDGVDWDQSRELSNRIYKFRGKAWDWEVDTEFGNYDYLMYADYDMDHPEVVNELRNWGVWYTNTLGLDGFRIDAVKHIKYSFTRDWINHVRSATGKNMFAVAEFWKNDLGAIENYLQKTNWNHSVFDVPLHYNLYNASKSGGNYDMRNIFNGTVVQRHPSHAVTFVDNHDSQPEEALESFVEEWFKPLAYALTLTREQGYPSVFYGDYYGIPTHGVPAMRSKIDPILEARQKYAYGPQHDYLDHPDVIGWTREGDSSHPKSGLATLITDGPGGSKRMYAGLKNAGETWYDITGNRSDTVKIGSDGWGEFHVNDGSVSIYVQK

SEQ ID NO: 37707 - protein, 478 aa, Bacillus sp.
NGTMMQYFEWYLPNDGNHWNRLNSDASNLKSKGITAVWIPPAWKGASQNDVGYGAYDLYDLGEFNQKGTVRTKYGTRSQLQAAVTSLKNNGIQVYGDVVMNHKGGADATEMVRAVEVNPNNRNQEVTGEYTIEAWTRFDFPGRGNTHSSFKWRWYHFDGVDWDQSRRLNNRIYKFRGKAWDWEVDTENGNYDYLMYADIDYDHPEVVNELRIWGVWYTNTLGLDGFRIDAVKHIKYSFTRIWINHVRSATGKNMFAVAEFWKNDLGAIENYLQKTNWNHSVFDVPLHYNLYNASKSGGNYDMRNIFNGTVVQRHPSHAVTFVDNHDSQPEEALESFVEEWFKPLAYALTLTREQGYPSVFYGDYYGIPTHGVPAMRSKIDPILEARQKYAYGPQHDYLDHPDVIGWTREGDSSHPKSGLATLITDGPGGSKRMYAGLKNAGETWYDITGNRSDTVKIGSDGWGEFHVNDGSVSIYVQK

SEQ ID NO: 37708 - protein, 478 aa, Bacillus sp.
NGTMMQYFEWYLPNDGNHWNRLNSDASNLKSKGITAVWIPPAWKGASQNDVGYGAYDLYDLGEFNQKGTVRTKYGTRSQLQAAVTSLKNNGIQVYGDVVMNHKGGADATEMVRAVEVNPNNRNQEVTGEYTIEAWTRFDFPGRGNTHSSFKWRWYHFDGVDWDQSRRLNNRIYKFRGKAWDWEVDSEFGNYDYLMYADYDMDHPEVVNELRNWGVWYTNTLGLDGFRIDAVKHIKYSFTRDWINHVRSATGKNMFAVAEFWKNDLGAIENYLQKTNWNHSVFDVPLHYNLYNASKSGGNYDMRNIFNGTVVQRHPSHAVTFVDNHDSQPEEALESFVEEWFKPLAYALTLTREQGYPSVFYGDYYGIPTHGVPAMRSKIDPILEARQKYAYGPQHDYLDHPDVIGWTREGDSSHPKSGLATLITDGPGGSKRMYAGLKNAGETWYDITGNRSDTVKIGSDGWGEFHVNDGSVSIYVQK

SEQ ID NO: 37709 - protein, 478 aa, Bacillus sp.
NGTMMQYFEWYLPNDGNHWNRLNSDASNLKSKGITAVWIPPAWKGASQNDVGYGAYDLYDLGEFNQKGTVRTKYGTRSQLQAAVTSLKNNGIQVYGDVVMNHKGGADATEMVRAVEVNPNNRNQEVTGEYTIEAWTRFDFPGRGNTHSSFKWRWYHFDGVDWDQSRRLNNRIYKFRGKAWDWEVDTEFGNYDYLMYADYDMDHPEVVNELRNWGVWYTNTLGLDGFRIDAVKHIKYSFTRDWINHVRSATGKNMFAVAEFWKNDLGAIENYLQKTNWNHSVFDVPLHYNLYNASKSGGNYDMRNIFNGTVVQRHPSHAVTFVDNHDSQPEEALESFVEEWFKPLAYALTLTREQGYPSVFYGDYYGIPTHGVPAMKSKIDPILEARQKYAYGPQHDYLDHPDVIGWTREGDSSHPKSGLATLITDGPGGSKRMYAGLKNAGETWYDITGNRSDTVKIGSDGWGEFHVNDGSVSIYVQK

SEQ ID NO: 37710 - protein, 478 aa, Bacillus sp.
NGTMMQYFEWYLPNDGNHWNRLNSDASNLKSKGITAVWIPPAWKGASQNDVGYGAYDLYDLGEFNQKGTVRTKYGTRSQLQAAVTSLKNNGIQVYGDVVMNHKGGADATEMVRAVEVNPNNRNQEVTGEYTIEAWTRFDFPGRGNTHSSFKWRWYHFDGVDWDQSRRLNNRIYKFRGKAWDWEVDTENGNYDYLMYADIDYDFPEVVNELRVWGVWYTNTLGLDGFRIDAVKHIKYSFTRDWINHVRSATGKNMFAVAEFWKNDLGAIENYLQKTNWNHSVFDVPLHYNLYNASKSGGNYDMRNIFNGTVVQRHPSHAVTFVDNHDSQPEEALESFVEEWFKPLAYALTLTREQGYPSVFYGDYYGIPTHGVPAMRSKIDPILEARQKYAYGPQHDYLDHPDVIGWTREGDSSHPKSGLATLITDGPGGSKRMYAGLKNAGETWYDITGNRSDTVKIGSDGWGEFHVNDGSVSIYVQK

SEQ ID NO: 37711 - protein, 478 aa, Synthetic construct
NGTMMQYFEWYLPNDGNHWNRLNSDASNLKSKGITAVWIPPAWKGASQNDVGYGAYDLYDLGEFNQKGTVRTKYGTRSQLQAAVTSLKNNGIQVYGDVVMNHKGGADATEMVRAVEVNPNNRNQEVTGEYTIEAWTRFDFPGRGNTHSSFKWRWYHFDGVDWDQSRRLNNRIYKFRGKAWDWEVDTENGNYDYLMYADIDMDHPTVVNELRNWGVWYTNTLGLDGFRIDAVKHIKYSFTRDWINHVRSATGKNMFAVAEFWKNDLGAIENYLQKTNWNHSVFDVPLHYNLYNASKSGGNYDMRNIFNGTVVQRHPSHAVTFVDNHDSQPEEALESFVEEWFKPLAYALTLTREQGYPSVFYGDYYGIPTHGVPAMRSKIDPILEARQKYAYGPQHDYLDHPDVIGWTREGDSSHPKSGLATLITDGPGGSKRMYAGLKNAGETWYDITGNRSDTVKIGSDGWGEFHVNDGSVSIYVQK

SEQ ID NO: 37712 - protein, 478 aa, Bacillus sp.
NGTMMQYFEWYLPNDGNHWNRLNSDASNLKSKGITAVWIPPAWKGASQNDVGYGAYDLYDLGEFNQKGTVRTKYGTRSQLQAAVTSLKNNGIQVYGDVVMNHKGGADATEMVRAVEVNPNNRNQEVTGEYTIEAWTRFDFPGRGNTHSSFKWRWYHFDGVDWDQSRRLNNRIYKFRGKAWDWEVDTENGNYDYLMYADIDYDFPEVVNELRHWGVWYTNTLGLDGFRIDAVKHIKYSFTRDWINHVRSATGKNMFAVAEFWKNDLGAIENYLQKTNWNHSVFDVPLHYNLYNASKSGGNYDMRNIFNGTVVQRHPSHAVTFVDNHDSQPEEALESFVEEWFKPLAYALTLTREQGYPSVFYGDYYGIPTHGVPAMRSKIDPILEARQKYAYGPQHDYLDHPDVIGWTREGDSSHPKSGLATLITDGPGGSKRMYAGLKNAGETWYDITGNRSDTVKIGSDGWGEFHVNDGSVSIYVQK

SEQ ID NO: 37713 - protein, 478 aa, Bacillus sp.
NGTMMQYFEWYLPNDGNHWNRLNSDASNLKSKGITAVWIPPAWKAASQNDVGYGAYDLYDLGEFNQKGTVRTKYGTRSQLQAAVTSLKNNGIQVYGDVVMNHKGGADATEMVRAVEVNPNNRNQEVTGEYTIEAWTRFDFPGRGNTHSSFKWRWYHFDGVDWDQSRTLSNRIYKFRGKAWDWEVDTEFGNYDYLMYADYDMDHPEVVNELRNWGVWYTNTLGLDGFRIDAVKHIKYSFTRDWINHVRSATGKNMFAVAEFWKNDLGAIENYLQKTNWNHSVFDVPLHYNLYNASKSGGNYDMRNIFNGTVVQRHPSHAVTFVDNHDSQPEEALESFVETWFKPLAYALTLTREQGYPSVFYGDYYGIPTHGVPAMRSKIDPILEARQKYAYGPQHDYLDHPDVIGWTREGDSSHPKSGLATLITDGPGGSKRMYAGLKNAGETWYDITGNRSDTVKIGSDGWGEFHVNDGSVSIYVQK

SEQ ID NO: 37714 - protein, 478 aa, Bacillus sp.
NGTMMQYFEWYLPNDGNHWNRLNSDASNLKSKGITAVWIPPAWKGASQNDVGYGAYDLYDLGEFNQKGTVRTKYGTRSQLQAAVTSLKNNGIQVYGDVVMNHKGGADATEMVRAVEVNPNNRNQEVTGEYTIEAWTRFDFPGRGNTHSSFKWRWYHFDGVDWDQSRRVSNRIYKFRGKAWDWEVDTEFGNYDYLMYADYDMDHPEVVNELRNWGVWYTNTLGLDGFRIDAVKHIKYSFTRDWINHVRSATGKNMFAVAEFWKNDLGAIENYLQKTNWNHSVFDVPLHYNLYNASKSGGNYDMRNIFNGTVVQRHPSHAVTFVDNHDSQPEEALESFVEEWFKPLAYALTLTREQGYPSVFYGDYYGIPTHGVPAMRSKIDPILEARQKYAYGPQHDYLDHPDVIGWTREGDSSHPKSGLATLITDGPGGSKRMYAGLKNAGETWYDITGNRSDTVKIGSDGWGEFHVNDGSVSIYVQK

SEQ ID NO: 37715 - protein, 478 aa, Bacillus sp.
NGTMMQYFEWYLPNDGNHWNRLNSDASNLKSKGITAVWIPPAWKGASQNDVGYGAYDLYDLGEFNQKGTVRTKYGTRSQLQAAVTSLKNNGIQVYGDVVMNHKGGADATEMVRAVEVNPNNRNQEVTGEYTIEAWTRFDFPGRGNTHSSFKWRWYHFDGVDWDQSRRLNNRIYKFRGKAWDWEVDTEFGNYDYLMYADYDMDHPEVVAELRNWGVWYTNTLGLDGFRIDAVKHIKYSFTRDWINHVRSATGKNMFAVAEFWKNDLGAIENYLQKTNWNHSVFDVPLHYNLYNASKSGGNYDMRNIFNGTVVQRHPSHAVTFVDNHDSQPEEALESFVEEWFKPLAYALTLTREQGYPSVFYGDYYGIPTHGVPAMRSKIDPILEARQKYAYGPQHDYLDHPDVIGWTREGDSSHPKSGLATLITDGPGGSKRMYAGLKNAGETWYDITGNRSDTVKIGSDGWGEFHVNDGSVSIYVQK

SEQ ID NO: 37716 - protein, 478 aa, Bacillus sp.
NGTMMQYFEWYLPNDGNHWNRLNSDASNLKSKGITAVWIPPAWKGASQNDVGYGAYDLYDLGEFNQKGTVRTKYGTRSQLQAAVTSLKNNGIQVYGDVVMNHKGGADATEMVRAVEVNPNNRNQEVTGEYTIEAWTRFDFPGRGNTHSSFKWRWYHFDGVDWDQSRRLNNRIYKFRGKAWDWEVDTENGFYDYLMYADIDYDHPEVVSELRNWGVWYTNTLGLDGFRIDAVKHIKYSFTRDWINHVRSATGKNMFAVAEFWKNDLGAIENYLQKTNWNHSVFDVPLHYNLYNASKSGGNYDMRNIFNGTVVQRHPSHAVTFVDNHDSQPEEALESFVEEWFKPLAYALTLTREQGYPSVFYGDYYGIPTHGVPAMRSKIDPILEARQKYAYGPQHDYLDHPDVIGWTREGDSSHPKSGLATLITDGPGGSKRMYAGLKNAGETWYDITGNRSDTVKIGSDGWGEFHVNDGSVSIYVQK

SEQ ID NO: 37717 - protein, 478 aa, Synthetic construct
NGTMMQYFEWYLPNDGNHWNRLNSDASNLKSKGITAVWIPPAWKGASQNDVGYGAYDLYDLGEFNQKGTVRTKYGTRSQLQAAVTSLKNNGIQVYGDVVMNHKGGADATEMVRAVEVNPNNRNQEVTGEYTIEAWTRFDFPGRGNTHSSFKWRWYHFDGVDWDQSRRLNNRIYKFRGKAWDWEVDTENGNYDYLMYADFDMDHPEVVNELRNWGVWYTNTLGLDGFRIDAVKHIKYSFTRDWINHVRSATGKNMFAVAEFWKNDLGAIENYLQKTNWNHSVFDVPLHYNLYNASKSGGNYDMRNIFNGTVVQRHPSHAVTFVDNHDSQPEEALESFVEEWFKPLAYALTLTREQGYPSVFYGDYYGIPTHGVPAMRSKIDPILEARQKYAYGPQHDYLDHPDVIGWTREGDSSHPKSGLATLITDGPGGSKRMYAGLKNAGETWYDITGNRSDTVKIGSDGWGEFHVNDGSVSIYVQK

SEQ ID NO: 37718 - protein, 478 aa, Bacillus sp.
NGTMMQYFEWYLPNDGNHWNRLNSDASNLKSKGITAVWIPPAWKGASQNDVGYGAYDLYDLGEFNQKGTVRTKYGTRSQLQAAVTSLKNNGIQVYGDVVMNHKGGADATEMVRAVEVNPNNRNQEVTGEYTIEAWTRFDFPGRGNTHSSFKWRWYHFDGVDWDQSRRLNNRIYKFRGKAWDWEVDTEFGNYDYLMYADYDMDHPEVVNELRNWGVWYTNTLGLDGFRIDAVKHIKYSFTRDWINHVRSATGKNMFAVAEFWQNDLGHIENYLQKTNWNHSVFDVPLHYNLYNASKSGGNYDMRNIFNGTVVQRHPSHAVTFVDNHDSQPEEALESFVEEWFKPLAYALTLTREQGYPSVFYGDYYGIPTHGVPAMRSKIDPILEARQKYAYGPQHDYLDHPDVIGWTREGDSSHPKSGLATLITDGPGGSKRMYAGLKNAGETWYDITGNRSDTVKIGSDGWGEFHVNDGSVSIYVQK

SEQ ID NO: 37719 - protein, 478 aa, Bacillus sp.
NGTMMQYFEWYLPNDGNHWNRLNSDASNLKSKGITAVWIPPAWKGASQNDVGYGAYDLYDLGEFNQKGTVRTKYGTRSQLQAAVTSLKNNGIQVYGDVVMNHKGGADATEMVRAVEVNPNNRNQEVTGEYTIEAWTRFDFPGRGNTHSSFKWRWYHFDGVDWDQSRKLSNRIYKFRGKAWDWEVDTEFGNYDYLMYGDYDMDHPEVVNELRNWGVWYTNTLGLDGFRIDAVKHIKYSFTRDWINHVRSATGKNMFAVAEFWKNDLGAIENYLQKTNWNHSVFDVPLHYNLYNASKSGGNYDMRNIFNGTVVQRHPSHAVTFVDNHDSQPEEALESFVEEWFKPLAYALTLTREQGYPSVFYGDYYGIPTHGVPAMRSKIDPILEARQKYAYGPQHDYLDHPDVIGWTREGDSSHPKSGLATLITDGPGGSKRMYAGLKNAGETWYDITGNRSDTVKIGSDGWGEFHVNDGSVSIYVQK

SEQ ID NO: 37720 - protein, 478 aa, Bacillus sp.
NGTMMQYFEWYLPNDGNHWNRLNSDASNLKSKGITAVWIPPAWKGASQNDVGYGAYDLYDLGEFNQKGTVRTKYGTRSQLQAAVTSLKNNGIQVYGDVVMNHKGGADATEMVRAVEVNPNNRNQEVTGEYTIEAWTRFDFPGRGNTHSSFKWRWYHFDGVDWDQSRRLNNRIYKFRGKAWDWEVDTEFGNYDYLMYADYDMDHPEVVNELRNWGVWYTNTLGLDGFRIDAVKHIKYSFTRDWINHVRSATGKNMFAVAEFWQNDLGGIENYLQKTNWNHSVFDVPLHYNLYNASKSGGNYDMRNIFNGTVVQRHPSHAVTFVDNHDSQPEEALESFVEEWFKPLAYALTLTREQGYPSVFYGDYYGIPTHGVPAMRSKIDPILEARQKYAYGPQHDYLDHPDVIGWTREGDSSHPKSGLATLITDGPGGSKRMYAGLKNAGETWYDITGNRSDTVKIGSDGWGEFHVNDGSVSIYVQK

SEQ ID NO: 37721 - protein, 478 aa, Synthetic construct
NGTMMQYFEWYLPNDGNHWNRLNSDASNLKSKGITAVWIPPAWKGASQNDVGYGAYDLYDLGEFNQKGTVRTKYGTRSQLQAAVTSLKNNGIQVYGDVVMNHKGGADATEMVVAVEVNPNNRNQEVTGEYTIEAWTRFDFPGRGNTHSSFKWRWYHFDGVDWDQSRRLNNRIYKFRGKAWDWEVDTENGNYDYLMYADIDMDHPEVVNELRNWGVWYTNTLGLDGFRIDAVKHIKYSFTRDWINHVRSATGKNMFAVAEFWKNDLGAIENYLQKTNWNHSVFDVPLHYNLYNASKSGGNYDMRNIFNGTVVQRHPSHAVTFVDNHDSQPEEALESFVEEWFKPLAYALTLTREQGYPSVFYGDYYGIPTHGVPAMRSKIDPILEARQKYAYGPQHDYLDHPDVIGWTREGDSSHPKSGLATLITDGPGGSKRMYAGLKNAGETWYDITGNRSDTVKIGSDGWGEFHVNDGSVSIYVQK

SEQ ID NO: 37722 - protein, 478 aa, Bacillus sp.
NGTMMQYFEWYLPNDGNHWNRLNSDASNLKSKGITAVWIPPAWKGASQNDVGYGAYDLYDLGEFNQKGTVRTKYGTRSQLQAAVTSLKNNGIQVYGDVVMNHKGGADATEMVRAVEVNPNNRNQEVTGEYTIEAWTRFDFPGRGNTHSSFKWRWYHFDGVDWDQSRETSNRIYKFRGKAWDWEVDTEFGNYDYLMYADYDMDHPEVVNELRNWGVWYTNTLGLDGFRIDAVKHIKYSFTRDWINHVRSATGKNMFAVAEFWKNDLGAIENYLQKTNWNHSVFDVPLHYNLYNASKSGGNYDMRNIFNGTVVQRHPSHAVTFVDNHDSQPEEALESFVEEWFKPLAYALTLTREQGYPSVFYGDYYGIPTHGVPAMRSKIDPILEARQKYAYGPQHDYLDHPDVIGWTREGDSSHPKSGLATLITDGPGGSKRMYAGLKNAGETWYDITGNRSDTVKIGSDGWGEFHVNDGSVSIYVQK

SEQ ID NO: 37723 - protein, 478 aa, Bacillus sp.
NGTMMQYFEWYLPNDGNHWNRLNSDASNLKSKGITAVWIPPAWKGASQNDVGYGAYDLYDLGEFNQKGTVRTKYGTRSQLQAAVTSLKNNGIQVYGDVVMNHKGGADATEMVRAVEVNPNNRNQEVTGEYTIEAWTRFDFPGRGNTHSSFKWRWYHFDGVDWDQSRRLNNRIYKFRGKAWDWEVDTEFGNYDYLMYADYDMDHPEVVNELRNWGVWYTNTLGLDGFRIDAVKHIKYSFTRDWINHVRSATGKNMFAVAEFWQNDLGCIENYLQKTNWNHSVFDVPLHYNLYNASKSGGNYDMRNIFNGTVVQRHPSHAVTFVDNHDSQPEEALESFVEEWFKPLAYALTLTREQGYPSVFYGDYYGIPTHGVPAMRSKIDPILEARQKYAYGPQHDYLDHPDVIGWTREGDSSHPKSGLATLITDGPGGSKRMYAGLKNAGETWYDITGNRSDTVKIGSDGWGEFHVNDGSVSIYVQK

SEQ ID NO: 37724 - protein, 478 aa, Bacillus sp.
NGTMMQYFEWYLPNDGNHWNRLNSDASNLKSKGITAVWIPPAWKGASQNDVGYGAYDLYDLGEFNQKGTVRTKYGTRSQLQAAVTSLKNNGIQVYGDVVMNHKGGADATEMVRAVEVNPNNRNQEVTGEYTIEAWTRFDFPGRGNTHSSFKWRWYHFDGVDWDQSRNLSNRIYKFRGKAWDWEVDTEFGNYDYLMYADYDMDHPEVVNELRNWGVWYTNTLGLDGFRIDAVKHIKYSFTRDWINHVRSATGKNMFAVAEFWKNDLGAIENYLQKTNWNHSVFDVPLHYNLYNASKSGGNYDMRNIFNGTVVQRHPSHAVTFVDNHDSQPEEALESFVEEWFKPLAYALTLTREQGYPSVFYGDYYGIPTHGVPAMRSKIDPILEARQKYAYGPQHDYLDHPDVIGWTREGDSSHPKSGLATLITDGPGGSKRMYAGLKNAGETWYDITGNRSDTVKIGSDGWGEFHVNDGSVSIYVQK

SEQ ID NO: 37725 - protein, 478 aa, Synthetic construct
NGTMMQYFEWYLPNDGNHWNRLNSDASNLKSKGITAVWIPPAWKGASQNDVGYGAYDLYDLGEFNQKGTVRTKYGTRSQLQAAVTSLKNNGIQVYGDVVMNHKGGADATEMVRAVEVNPNNRNQEVTGEYTIEAWTRFDFPGRGNTHSSFKWRWYHFDGVDWDQSRRLNNRIYKFRGKAWDWEVDTENGNYDYLMYADYDMDHPEVVNEIRNWGVWYTNTLGLDGFRIDAVKHIKYSFIRDWINHVRSATGKNMFAVAEFWKNDLGAIENYLQKTNWNHSVFDVPLHYNLYNASKSGGNYDMRNIFNGTVVQRHPSHAVTFVDNHDSQPEEALESFVEEWFKPLAYALTLTREQGYPSVFYGDYYGIPTHGVPAMRSKIDPILEARQKYAYGPQHDYLDHPDVIGWTREGDSSHPKSGLATLITDGPGGSKRMYAGLKNAGETWYDITGNRSDTVKIGSDGWGEFHVNDGSVSIYVQK

SEQ ID NO: 37726 - protein, 478 aa, Bacillus sp.
NGTMMQYFEWYLPNDGNHWNRLNSDASNLKSKGITAVWIPPAWKGASQNDVGYGAYDLYDLGEFNQKGTVRTKYGTRSQLQAAVTSLKNNGIQVYGDVVMNHKGGADATEMVRAVEVNPNNRNQEVTGEYTIEAWTRFDFPGRGNTHSSFKWRWYHFDGVDWDQSRRLNNRIYKFRGKAWDWEVDTEFGNYDYLMYADYDMDHPEVVNELRNWGVWYTNTLGLDGFRIDAVKHIKYSFTRDWINHVRSATGKNMFAVAEFWQNDLGMIENYLQKTNWNHSVFDVPLHYNLYNASKSGGNYDMRNIFNGTVVQRHPSHAVTFVDNHDSQPEEALESFVEEWFKPLAYALTLTREQGYPSVFYGDYYGIPTHGVPAMRSKIDPILEARQKYAYGPQHDYLDHPDVIGWTREGDSSHPKSGLATLITDGPGGSKRMYAGLKNAGETWYDITGNRSDTVKIGSDGWGEFHVNDGSVSIYVQK

SEQ ID NO: 37727 - protein, 478 aa, Synthetic construct
NGTMMQYFEWYLPNDGNHWNRLNSDASNLKSKGITAVWIPPAWKGASQNDVGYGAYDLYDLGEFNQKGTVRTKYGTRSQLQAAVTSLKNNGIQVYGDVVMNHKGGADATEMVRAVEVNPNNRNQEVTGEYTIEAWTRFDFPGRGNTHSSFKWRWYHFDGVDWDQSRRLNNRIYKFRGKAWDWEVDTENGNYDYLMYADYDMDHPEVVNEIRNWGVWYTNTLGLDGFRIDAVKHIKYSFTRDWINHVRSATGKNMFAVAEFWKNDLGAIENYLQKTNWNHSVFDVPLHYNLYNASKSGGNYDMRNIFNGTVVQRHPSHAVTFVDNHDSQPEEALESFVEEWFKPLAYALTLTREQGYPSVFYGDYYGIPTHGVPAMRSKIDPILEARQKYAYGPQHDYLDHPDVIGWTREGDSSHPKSGLATLITDGPGGSKRMYAGLKNAGETWYDITGNRSDTVKIGSDGWGEFHVNDGSVSIYVQK

SEQ ID NO: 37728 - protein, 478 aa, Synthetic construct
NGTMMQYFEWYLPNDGNHWNRLNSDASNLKSKGITAVWIPPAWKGASQNDVGYGAYDLYDLGEFNQKGTVRTKYGTRSQLQAAVTSLKNNGIQVYGDVVMNHKGGADATEMVRAVEVNPNNRNQEVTGEYTIEAWTRFDFPGRGNTHSSFKWRWYHFDGVDWDQSRMLNNRIYKFRGKAWDWEVDTENGNYDYLMYADIDMDHPEVVNELRNWGVWYTNTLGLDGFRIDAVKHIKYSFTRDWINHVRSATGKNMFAVAEFWKNDLGAIENYLQKTNWNHSVFDVPLHYNLYNASKSGGNYDMRNIFNGTVVQRHPSHAVTFVDNHDSQPEEALESFVEEWFKPLAYALTLTREQGYPSVFYGDYYGIPTHGVPAMRSKIDPILEARQKYAYGPQHDYLDHPDVIGWTREGDSSHPKSGLATLITDGPGGSKRMYAGLKNAGETWYDITGNRSDTVKIGSDGWGEFHVNDGSVSIYVQK

SEQ ID NO: 37729 - protein, 478 aa, Bacillus sp.
NGTMMQYFEWYLPNDGNHWNRLNSDASNLKSKGITAVWIPPAWKGLSQNDVGYGAYDLYDLGEFNQKGTVRTKYGTRSQLQAAVTSLKNNGIQVYGDVVMNHKGGADATEMVRAVEVNPNNRNQEVTGEYTIEAWTRFDFPGRGNTHSSFKWRWYHFDGVDWDQSRDLNNRIYKFRGKAWDWEVDTEFGNYDYLMYADYDMDHPEVVNELRNWGVWYTNTLGLDGFRIDAVKHIKYSFTRDWINHVRSATGKNMFAVAEFWKNDLGAIENYLQKTNWNHSVFDVPLHYNLYNASKSGGNYDMRNIFNGTVVQRHPSHAVTFVDNHDSQPEEALESFVEEWFKPLAYALTLTREQGYPSVFYGDYYGIPTHGVPAMRSKIDPILEARQKYAYGPQHDYLDHPDVIGWTREGDSSHPKSGLATLITDGPGGSKRMYAGLKNAGETWYDITGNRSDTVKIGSDGWGEFHVNDGSVSIYVQK

SEQ ID NO: 37730 - protein, 478 aa, Synthetic construct
NGTMMQYFEWYLPNDGNHWNRLNSDASNLKSKGITAVWIPPAWKGASQNDVGYGAYDLYDLGEFNQKGTVRTKYGTRSQLQAAVTSLKNNGIQVYGDVVMNHKGGADATEFVRAVEVNPNNRNQEVTGEYTIEAWTRFDFPGRGNTHSSFKWRWYHFDGVDWDQSRRLNNRIYKFRGKAWDWEVDTENGNYDYLMYADIDMDHPEVVNELRNWGVWYTNTLGLDGFRIDAVKHIKYSFTRDWINHVRSATGKNMFAVAEFWKNDLGAIENYLQKTNWNHSVFDVPLHYNLYNASKSGGNYDMRNIFNGTVVQRHPSHAVTFVDNHDSQPEEALESFVEEWFKPLAYALTLTREQGYPSVFYGDYYGIPTHGVPAMRSKIDPILEARQKYAYGPQHDYLDHPDVIGWTREGDSSHPKSGLATLITDGPGGSKRMYAGLKNAGETWYDITGNRSDTVKIGSDGWGEFHVNDGSVSIYVQK

SEQ ID NO: 37731 - protein, 478 aa, Synthetic construct
NGTMMQYFEWYLPNDGNHWNRLNSDASNLKSKGITAVWIPPAWKGASQNDVGYGAYDLYDLGEFNQKGTVRTKYGTRSQLQAAVTSLKNNGIQVYGDVVMNHKGGADATEMVRAVEVNPNNRNQEVTGEYTIEAWTVFDFPGRGNTHSSFKWRWYHFDGVDWDQSRRLNNRIYKFRGKAWDWEVDTENGNYDYLMYADIDMDHPEVVNELRNWGVWYTNTLGLDGFRIDAVKHIKYSFTRDWINHVRSATGKNMFAVAEFWKNDLGAIENYLQKTNWNHSVFDVPLHYNLYNASKSGGNYDMRNIFNGTVVQRHPSHAVTFVDNHDSQPEEALESFVEEWFKPLAYALTLTREQGYPSVFYGDYYGIPTHGVPAMRSKIDPILEARQKYAYGPQHDYLDHPDVIGWTREGDSSHPKSGLATLITDGPGGSKRMYAGLKNAGETWYDITGNRSDTVKIGSDGWGEFHVNDGSVSIYVQK

SEQ ID NO: 37732 - protein, 478 aa, Bacillus sp.
NGTMMQYFEWYLPNDGNHWNRLNSDASNLKSKGITAVWIPPAWKGASQNDVGYGAYDLYDLGEFNQKGTVRTKYGTRSQLQAAVTSLKNNGIQVYGDVVMNHKGGADATEMVRAVEVNPNNRNQEVTGEYTIEAWTRFDFPGRGNTHSSFKWRWYHFDGVDWDQSRRLSNRIYKFRGKAWDWEVDTEFGNYDYLMYADYDMDHPEVVNELRNWGVWYTNTLGLDGFRIDAVKHIKYSFTRDWINHVRSATGKNMFAVAEFWKNDLGAIENYLQKTNWNHSVFDVPLHYNLYNASKSGGNYDMRNIFNGTVVQRHPSHAVTFVDNHDSQPEEALESFVEEWFKPLAYALTLTREQGYPSVFYGDYYGIPTHGVPAMRSKIDPILEARQKYAYGPQHDYLDHPDVIGWTREGDSSHPKSGLATLITDGPGGSKRMYAGLKNAGETWYDITGNRSDTVKIGSDGWGEFHVNDGSVSIYVQK

SEQ ID NO: 37733 - protein, 478 aa, Synthetic construct
NGTMMQYFEWYLPNDGNHWNRLNSDASNLKSKGITAVWIPPAWKGASQNDVGYGAYDLYDLGEFNQKGTVRTKYGTRSQLQAAVTSLKNNGIQVYGDVVMNHKGGADATEMVRAVEVNPNNRNQEVTGEYTIEAWTIFDFPGRGNTHSSFKWRWYHFDGVDWDQSRRLNNRIYKFRGKAWDWEVDTENGNYDYLMYADIDMDHPEVVNELRNWGVWYTNTLGLDGFRIDAVKHIKYSFTRDWINHVRSATGKNMFAVAEFWKNDLGAIENYLQKTNWNHSVFDVPLHYNLYNASKSGGNYDMRNIFNGTVVQRHPSHAVTFVDNHDSQPEEALESFVEEWFKPLAYALTLTREQGYPSVFYGDYYGIPTHGVPAMRSKIDPILEARQKYAYGPQHDYLDHPDVIGWTREGDSSHPKSGLATLITDGPGGSKRMYAGLKNAGETWYDITGNRSDTVKIGSDGWGEFHVNDGSVSIYVQK

SEQ ID NO: 37734 - protein, 478 aa, Synthetic construct
NGTMMQYFEWYLPNDGNHWNRLNSDASNLKSKGITAVWIPPAWKGASQNDVGYGAYDLYDLGEFNQKGTVRTKYGTRSQLQAAVTSLKNNGIQVYGDVVMNHKGGADATEMVRAVEVNPNNRNQEVTGEYTIEAWTQFDFPGRGNTHSSFKWRWYHFDGVDWDQSRRLNNRIYKFRGKAWDWEVDTENGNYDYLMYADIDMDHPEVVNELRNWGVWYTNTLGLDGFRIDAVKHIKYSFTRDWINHVRSATGKNMFAVAEFWKNDLGAIENYLQKTNWNHSVFDVPLHYNLYNASKSGGNYDMRNIFNGTVVQRHPSHAVTFVDNHDSQPEEALESFVEEWFKPLAYALTLTREQGYPSVFYGDYYGIPTHGVPAMRSKIDPILEARQKYAYGPQHDYLDHPDVIGWTREGDSSHPKSGLATLITDGPGGSKRMYAGLKNAGETWYDITGNRSDTVKIGSDGWGEFHVNDGSVSIYVQK

SEQ ID NO: 37735 - protein, 478 aa, Bacillus sp.
NGTMMQYFEWYLPNDGNHWNRLNSDASNLKSKGITAVWIPPAWKGASQNDVGYGAYDLYDLGEFNQKGTVRTKYGTRSQLQAAVTSLKNNGIQVYGDVVMNHKGGADATEMVRAVEVNPNNRNQEVTGEYTIEAWTRFDFPGRGNTHSSFKWRWYHFDGVDWDQSRQINNRIYKFRGKAWDWEVDTEFGNYDYLMYADYDMDHPEVVNELRNWGVWYTNTLGLDGFRIDAVKHIKYSFTRDWINHVRSATGKNMFAVAEFWKNDLGAIENYLQKTNWNHSVFDVPLHYNLYNASKSGGNYDMRNIFNGTVVQRHPSHAVTFVDNHDSQPEEALESFVEEWFKPLAYALTLTREQGYPSVFYGDYYGIPTHGVPAMRSKIDPILEARQKYAYGPQHDYLDHPDVIGWTREGDSSHPKSGLATLITDGPGGSKRMYAGLKNAGETWYDITGNRSDTVKIGSDGWGEFHVNDGSVSIYVQK

SEQ ID NO: 37736 - protein, 478 aa, Synthetic construct
NGTMMQYFEWYLPNDGNHWNRLNSDASNLKSKGITAVWIPPAWKGASQNDVGYGAYDLYDLGEFNQKGTVRTKYGTRSQLQAAVTSLKNNGIQVYGDVVMNHKGGADATEMVRAVEVNPNNRNQEVTGEYTIEAWTRFDFPGRGNTHSSFKWRWYHFDGVDWDQSRRLNNRIYKFRGKAWDWEVDTENGNYDYLMYADIDMDHPEVVNELRNWGVWYTNTLGLDGFRIDAVKHIKYSFTRDWINHVRSATGKNMFAVAEFWKNDLGAIENYLQKTNWNHSVFDVPLHYNLYNASKSGGNYDMRYIFNGTVVQRHPSHAVTFVDNHDSQPEEALESFVEEWFKPLAYALTLTREQGYPSVFYGDYYGIPTHGVPAMRSKIDPILEARQKYAYGPQHDYLDHPDVIGWTREGDSSHPKSGLATLITDGPGGSKRMYAGLKNAGETWYDITGNRSDTVKIGSDGWGEFHVNDGSVSIYVQK

SEQ ID NO: 37737 - protein, 478 aa, Synthetic construct
NGTMMQYFEWYLPNDGNHWNRLNSDASNLKSKGITAVWIPPAWKGASQNDVGYGAYDLYDLGEFNQKGTVRTKYGTRSQLQAAVTSLKNNGIQVYGDVVFNHKGGADATEMVRAVEVNPNNRNQEVTGEYTIEAWTRFDFPGRGNTHSSFKWRWYHFDGVDWDQSRRLNNRIYKFRGKAWDWEVDTENGNYDYLMYADYDMDHPEVVNELRNWGVWYTNTLGLDGFRIDAVKHIKYSFTRDWINHVRSATGKNMFAVAEFWKNDLGAIENYLQKTNWNHSVFDVPLHYNLYNASKSGGNYDMRNIFNGTVVQRHPSHAVTFVDNHDSQPEEALESFVEEWFKPLAYALTLTREQGYPSVFYGDYYGIPTHGVPAMRSKIDPILEARQKYAYGPQHDYLDHPDVIGWTREGDSSHPKSGLATLITDGPGGSKRMYAGLKNAGETWYDITGNRSDTVKIGSDGWGEFHVNDGSVSIYVQK

SEQ ID NO: 37738 - protein, 478 aa, Synthetic construct
NGTMMQYFEWYLPNDGNHWNRLNSDASNLKSKGITAVWIPPAWKGASQNDVGYGAYDLYDLGEFNQKGTVRTKYGTRSQLQAAVTSLKNNGIQVYGDVVMNHKGGADATEMVRAVEVNPNNRNQEVTGEYTIEAWTRFDFPGRGNTHSSFKWRWYHFDGVDWDQSRRLNNRIYKFRGKAWDWEVDTENGNYDYLMYADCDMDHPEVVNELRNWGVWYTNTLGLDGFRIDAVKHIKYSFTRDWINHVRSATGKNMFAVAEFWKNDLGAIENYLQKTNWNHSVFDVPLHYNLYNASKSGGNYDMRNIFNGTVVQRHPSHAVTFVDNHDSQPEEALESFVEEWFKPLAYALTLTREQGYPSVFYGDYYGIPTHGVPAMRSKIDPILEARQKYAYGPQHDYLDHPDVIGWTREGDSSHPKSGLATLITDGPGGSKRMYAGLKNAGETWYDITGNRSDTVKIGSDGWGEFHVNDGSVSIYVQK

SEQ ID NO: 37739 - protein, 478 aa, Bacillus sp.
NGTMMQYFEWYLPNDGNHWNRLNSDASNLKSKGITAVWIPPAWKGASQNDVGYGAYDLYDLGEFNQKGTVRTKYGTRSQLQAAVTSLKNNGIQVYGDVVMNHKGGADATEMVRAVEVNPNNRNQEVTGEYTIEAWTRFDFPGRGNTHSSFKWRWYHFDGVDWDQSRQTSNRIYKFRGKAWDWEVDTEFGNYDYLMYADYDMDHPEVVNELRNWGVWYTNTLGLDGFRIDAVKHIKYSFTRDWINHVRSATGKNMFAVAEFWKNDLGAIENYLQKTNWNHSVFDVPLHYNLYNASKSGGNYDMRNIFNGTVVQRHPSHAVTFVDNHDSQPEEALESFVEEWFKPLAYALTLTREQGYPSVFYGDYYGIPTHGVPAMRSKIDPILEARQKYAYGPQHDYLDHPDVIGWTREGDSSHPKSGLATLITDGPGGSKRMYAGLKNAGETWYDITGNRSDTVKIGSDGWGEFHVNDGSVSIYVQK

SEQ ID NO: 37740 - protein, 478 aa, Bacillus sp.
NGTMMQYFEWYLPNDGNHWNRLNSDASNLKSKGITAVWIPPAWKGASQNDVGYGAYDVYDLGEFNQKGTVRTKYGTRSQLQAAVTSLKNNGIQVYGDVVFNHKGGADATEMVRAVEVNPNNRNQEVTGEYTIEAWTRFDFPGRGNTHSSFKWRWYHFDGVDWDQSRRLNNRIYKFRGKAWDWEVDTENGNYDYLMYADIDYDHPEVVNELRNWGVWYTNTLGLDGFRIDAVKHIKYSFTRDWINHVRSATGKNMFAVAEFWKNDLGAIENYLQKTNWNHSVFDVPLHYNLYNASKSGGNYDMRNIFNGTVVQRHPSHAVTFVDNHDSQPEEALESFVEEWFKPLAYALTLTREQGYPSVFYGDYYGIPTHGVPAMRSKIDPILEARQKYAYGPQHDYLDHPDVIGWTREGDSSHPKSGLATLITDGPGGSKRMYAGLKNAGETWYDITGNRSDTVKIGSDGWGEFHVNDGSVSIYVQK

SEQ ID NO: 37741 - protein, 478 aa, Synthetic construct
NGTMMQYFEWYLPNDGNHWNRLNSDASNLKSKGITAVWIPPAWKGASQNDVGYGAYDLYDLGEFNQKGTVRTKYGTRSQLQAAVTSLKNNGIQVYGDVVMNHKGGADATEMVRAVEVNPNNRNQEVTGEYTIEAWTRFDFPGRGNTHSSFKWRWYHFDGVDWDQSRRLNNRIYKFRGKAWDWEVDTENGNYDYLMYADLDMDHPEVVNEVRNWGVWYTNTLGLDGFRIDAVKHIKYSFTRDWINHVRSATGKNMFAVAEFWKNDLGAIENYLQKTNWNHSVFDVPLHYNLYNASKSGGNYDMRNIFNGTVVQRHPSHAVTFVDNHDSQPEEALESFVEEWFKPLAYALTLTREQGYPSVFYGDYYGIPTHGVPAMRSKIDPILEARQKYAYGPQHDYLDHPDVIGWTREGDSSHPKSGLATLITDGPGGSKRMYAGLKNAGETWYDITGNRSDTVKIGSDGWGEFHVNDGSVSIYVQK

SEQ ID NO: 37742 - protein, 478 aa, Bacillus sp.
NGTMMQYFEWYLPNDGNHWNRLNSDASNLKSKGITAVWIPPAWKGASQNDVGYGAYDLYDLGEFNQKGTVRTKYGTRSQLQAAVTSLKNNGIQVYGDVVMNHKGGADATEMVRAVEVNPNNRNQEVTGEYTIEAWTRFDFPGRGNTHSSFKWRWYHFDGVDWDQSRRLNNRIYKFRGKAWDWEVDTEFGNYDYLMYADYDMDHPEVVNELRNWGVWYTNTLGLDGFRIDAVKHIKYSFTRDWINHVRSATGKNMFAVAEFWQNDLGLIENYLQKTNWNHSVFDVPLHYNLYNASKSGGNYDMRNIFNGTVVQRHPSHAVTFVDNHDSQPEEALESFVEEWFKPLAYALTLTREQGYPSVFYGDYYGIPTHGVPAMRSKIDPILEARQKYAYGPQHDYLDHPDVIGWTREGDSSHPKSGLATLITDGPGGSKRMYAGLKNAGETWYDITGNRSDTVKIGSDGWGEFHVNDGSVSIYVQK

SEQ ID NO: 37743 - protein, 478 aa, Synthetic construct
NGTMMQYFEWYLPNDGNHWNRLNSDASNLKSKGITAVWIPPAWKGASQNDVGYGAYDLYDLGEFNQKGTVRTKYGTRSQLQAAVTSLKNNGIQVYGDVVMNHKGGADATEMVRAVEVNPNNRNQEVTGEYTIEAWTRFDFPGRGNTHSSFKWRWYHFDGVDWDQSRRLNNRIYKFRGKAWDWEVDTENGNYDYLMYADIDMDHPEVVNELRNWGVWYTNTLGLDGFRIDAVKHIKYSFTRDWINHVRSATGKNMFAVAEFWKNDLGAIENYLSKTNWNHSVFDVPLHYNLYNASKSGGNYDMRNIFNGTVVQRHPSHAVTFVDNHDSQPEEALESFVEEWFKPLAYALTLTREQGYPSVFYGDYYGIPTHGVPAMRSKIDPILEARQKYAYGPQHDYLDHPDVIGWTREGDSSHPKSGLATLITDGPGGSKRMYAGLKNAGETWYDITGNRSDTVKIGSDGWGEFHVNDGSVSIYVQK

SEQ ID NO: 37744 - protein, 478 aa, Synthetic construct
NGTMMQYFEWYLPNDGNHWNRLNSDASNLKSKGITAVWIPPAWKGASQNDVGYGAYDLYDLGEFNQKGTVRTKYGTRSQLQAAVTSLKNNGIQVYGDVVMNHKGGADATEMVRAVEVNPNNRNQEVTGEYTIEAWTRFDFPGRGNTHSSFKWRWYHFDGVDWDQSRRLNNRIYKFRGKAWDWEVDTENGNYDYLMYADIDMDHPEVVNELRNWGVWYTNTLGLDGFRIDAVKHIKYSFMRDWINHVRSATGKNMFAVAEFWKNDLGAIENYLQKTNWNHSVFDVPLHYNLYNASKSGGNYDMRNIFNGTVVQRHPSHAVTFVDNHDSQPEEALESFVEEWFKPLAYALTLTREQGYPSVFYGDYYGIPTHGVPAMRSKIDPILEARQKYAYGPQHDYLDHPDVIGWTREGDSSHPKSGLATLITDGPGGSKRMYAGLKNAGETWYDITGNRSDTVKIGSDGWGEFHVNDGSVSIYVQK

SEQ ID NO: 37745 - protein, 478 aa, Bacillus sp.
NGTMMQYFEWYLPNDGNHWNRLNSDASNLKDKGITAVWIPPAWKGASQNDVGYGAYDLYDLGEFNQKGTVRTKYGTRSQLQAAVTSLKNNGIQVYGDVVMNHKGGADATEMVRAVEVNPNNRNQEVTGEYTIEAWTRFDFPGRGNTHSSFKWRWYHFDGVDWDQSRRLNNRIYKFRGKAWDWEVDTEFGNYDYLMYADYDMDHPEVVNELRNWGVWYTNTLGLDGFRIDAVKHIKYSFTRDWINHVRSATGKNMFAVAEFWKNDLGAIENYLQKTNWNHSVFDVPLHYNLYNASKSGGNYDMRNIFNGTVVQRHPSHAVTFVDNHDSQPEEALESFVEEWFKPLAYALTLTREQGYPSVFYGDYYGIPTHGVPAMRSKIDPILEARQKYAYGPQHDYLDHPDVIGWTREGDSSHPKSGLATLITDGPGGSKRMYAGLKNAGETWYDITGNRSDTVKIGSDGWGEFHVNDGSVSIYVQK

SEQ ID NO: 37746 - protein, 478 aa, Synthetic construct
NGTMMQYFEWYLPNDGNHWNRLNSDASNLKSKGITAVWIPPAWKGASQNDVGYGAYDLYDLGEFNQKGTVRTKYGTRSQLQAAVTSLKNNGIQVYGDVVMNHKGGADATEMVRAVEVNPNNRNQEVTGEYTIEAWTRFDFPGRGNTHSSFKWRWYHFDGVDWDQSRRFQNRIYKFRGKAWDWEVDTENGNYDYLMYADIDMDHPEVVNELRNWGVWYTNTLGLDGFRIDAVKHIKYSFTRDWINHVRSATGKNMFAVAEFWKNDLGAIENYLQKTNWNHSVFDVPLHYNLYNASKSGGNYDMRNIFNGTVVQRHPSHAVTFVDNHDSQPEEALESFVEEWFKPLAYALTLTREQGYPSVFYGDYYGIPTHGVPAMRSKIDPILEARQKYAYGPQHDYLDHPDVIGWTREGDSSHPKSGLATLITDGPGGSKRMYAGLKNAGETWYDITGNRSDTVKIGSDGWGEFHVNDGSVSIYVQK

SEQ ID NO: 37747 - protein, 478 aa, Bacillus sp.
NGTMMQYFEWYLPNDGNHWNRLNSDASNLKSKGITAVWIPPAWKGASQNDVGYGAYDLYDLGEFNQKGTVRTKYGTRSQLQAAVTSLKNNGIQVYGDVVMNHKGGADATEMVRAVEVNPNNRNQEVTGEYTIEAWTRFDFPGRGNTHSSFKWRWYHFDGVDWDQSRKLNNRIYKFRGKAWDWEVDTEFGNYDYLMYADYDMDHPEVVNELRNWGVWYTNTLGLDGFRIDAVKHIKYSFTRDWINHVRSATGKNMFAVAEFWKNDLGAIENYLQKTNWNHSVFDVPLHYNLYNASKSGGNYDMRNIFNGTVVQRHPSHAVTFVDNHDSQPEEALESFVEEWFKPLAYALTLTREQGYPSVFYGDYYGIPTHGVPAMRSKIDPILEARQKYAYGPQHDYLDHPDVIGWTREGDSSHPKSGLATLITDGPGGSKRMYAGLKNAGETWYDITGNRSDTVKIGSDGWGEFHVNDGSVSIYVQK

SEQ ID NO: 37748 - protein, 478 aa, Synthetic construct
NGTMMQYFEWYLPNDGNHWNRLNSDASNLKSKGITAVWIPPAWKGASQNDVGYGAYDLYDLGEFNQKGTVRTKYGTRSQLQAAVTSLKNNGIQVYGDVVMNHKGGADATEMVRAVEVNPNNRNQEVTGEYTIEAWTRFDFPGRGNTHSSFKWRWYHFDGVDWDQSRRLNNRIYKFRGKAWDWEVDTENGNYDYLMYADIDMDHPGVVNELRNWGVWYTNTLGLDGFRIDAVKHIKYSFTRDWINHVRSATGKNMFAVAEFWKNDLGAIENYLQKTNWNHSVFDVPLHYNLYNASKSGGNYDMRNIFNGTVVQRHPSHAVTFVDNHDSQPEEALESFVEEWFKPLAYALTLTREQGYPSVFYGDYYGIPTHGVPAMRSKIDPILEARQKYAYGPQHDYLDHPDVIGWTREGDSSHPKSGLATLITDGPGGSKRMYAGLKNAGETWYDITGNRSDTVKIGSDGWGEFHVNDGSVSIYVQK

SEQ ID NO: 37749 - protein, 478 aa, Synthetic construct
NGTMMQYFEWYLPNDGNHWNRLNSDASNLKSKGITAVWIPPAWKGASQNDVGYGAYDLYDLGEFNQKGTVRTKYGTRSQLQAAVTSLKNNGIQVYGDVVINHKGGADATEMVRAVEVNPNNRNQEVTGEYTIEAWTRFDFPGRGNTHSSFKWRWYHFDGVDWDQSRRLNNRIYKFRGKAWDWEVDTENGNYDYLMYADYDMDHPEVVNELRNWGVWYTNTLGLDGFRIDAVKHIKYSFTRDWINHVRSATGKNMFAVAEFWKNDLGAIENYLQKTNWNHSVFDVPLHYNLYNASKSGGNYDMRNIFNGTVVQRHPSHAVTFVDNHDSQPEEALESFVEEWFKPLAYALTLTREQGYPSVFYGDYYGIPTHGVPAMRSKIDPILEARQKYAYGPQHDYLDHPDVIGWTREGDSSHPKSGLATLITDGPGGSKRMYAGLKNAGETWYDITGNRSDTVKIGSDGWGEFHVNDGSVSIYVQK

SEQ ID NO: 37750 - protein, 478 aa, Synthetic construct
NGTMMQYFEWYLPNDGNHWNRLNSDASNLKSKGITAVWIPPAWKGTSQADVGYGAYDLYDLGEFNQKGTVRTKYGTRSQLQAAVTSLKNNGIQVYGDVVMNHKAGADATEMVTAVEVNPNNRNQEVTGDYTIEAYTRFDFPGRGNTHSSFKWRWYHFDGVDWDQSRSLNNRIYKFRGKAWDWPVDTENGNYDYLMYADLDMDHPEVVNELRNWGVWYTNTLGLDGFRIDAVKHIKFSFTRDWINHVRSATGKNMFAVAEYWKNDLGAIENYLNFTNWNHSVFDVPLHYNLYAASNSGGNYDMRNIFNGTVVQKHPSHAVTFVDNHDTQPEESLESFVEEWFKPLAYALTLTREQGYPSVFYGDYYGIPTHGVPAMRSKIDPILEARQKYAYGPQHDYLDHPDIIGWTREGDSSHPKSGLATLITDGPGGSKRMYAGLKNAGETWYDITGNRSDTVKIGSDGWGTFHVNKGSVSIYVQK

SEQ ID NO: 37751 - protein, 478 aa, Bacillus sp.
NGTMMQYFEWYLPNDGNHWNRLNSDASNLKSKGITAVWIPPAWKGASQNDVGYGAYDLYDLGEFNQKGTVRTKYGTRSQLQAAVTSLKNNGIQVYGDVVMNHKGGADATEMVRAVEVNPNNRNQEVTGEYTIEAWTRFDFPGRGNTHSSFKWRWYHFDGVDWDQSRRLNNRIYKFRGKAWDWEVDTEFGNYDYLMYADYDMDHPEVVNELRNWGVWYTNTLGLDGFRIDAVKHIKFSFTRDWINHVRSATGKNMFAVAEFWKNDLGAIENYLQKTNWNHSVFDVPLHYNLYNASKSGGNYDMRNIFNGTVVQRHPSHAVTFVDNHDSQPEEALESFVEEWFKPLAYALTLTREQGYPSVFYGDYYGIPTHGVPAMRSKIDPILEARQKYAYGPQHDYLDHPDVIGWTREGDSSHPKSGLATLITDGPGGSKRMYAGLKNAGETWYDITGNRSDTVKIGSDGWGEFHVNDGSVSIYVQK

SEQ ID NO: 37752 - protein, 478 aa, Bacillus sp.
NGTMMQYFEWYLPNDGNHWNRLNSDASNLKSKGITAVWIPPAWKGASQNDVGYGAYDLYDLGEFNQKGTVRTKYGTRSQLQAAVTSLKNNGIQVYGDVVMNHKGGADATEMVRAVEVNPNNRNQEVTGEYTIEAWTRFDFPGRGNTHSSFKWRWYHFDGVDWDQSRRLNNRIYKFRGKAWDWEVDTENGNYDYLMYADIDMDHPEVVAQLRNWGVWYTNTLGLDGFRIDAVKHIKYSFTRDWINHVRSATGKNMFAVAEFWKNDLGAIENYLQKTNWNHSVFDVPLHYNLYNASKSGGNYDMRNIFNGTVVQRHPSHAVTFVDNHDSQPEEALESFVEEWFKPLAYALTLTREQGYPSVFYGDYYGIPTHGVPAMRSKIDPILEARQKYAYGPQHDYLDHPDVIGWTREGDSSHPKSGLATLITDGPGGSKRMYAGLKNAGETWYDITGNRSDTVKIGSDGWGEFHVNDGSVSIYVQK

SEQ ID NO: 37753 - protein, 478 aa, Synthetic construct
NGTMMQYFEWYLPNDGNHWNRLNSDASNLKSKGITAVWIPPAVKGASQNDVGYGVYDLYDLGEFNQKGTVRTKYGTRSQLQAAVTSLKNNGIQVYGDVVMNHKGGADATEMVRAVEVNPNNRNQEVTGEYTIEAWTRFDFPGRGNTHSSFKWRWYHFDGVDWDQSRRLNNRIYKFRGKAWDWEVDTENGNYDYLMYADIDMDHPEVVNELRNWGVWYTNTLGLDGFRIDAVKHIKYSFTRDWINHVRSATGKNMFAVAEFWKNDLGAIENYLQKTNWNHSVFDVPLHYNLYNASKSGGNYDMRNIFNGTVVQRHPSHAVTFVDNHDSQPEEALESFVEEWFKPLAYALTLTREQGYPSVFYGDYYGIPTHGVPAMRSKIDPILEARQKYAYGPQHDYLDHPDVIGWTREGDSSHPKSGLATLITDGPGGSKRMYAGLKNAGETWYDITGNRSDTVKIGSDGWGEFHVNDGSVSIYVQK

SEQ ID NO: 37754 - protein, 478 aa, Synthetic construct
NGTMMQYFEWYLPNDGNHWNRLNSDASNLKSKGITAVWIPPAWKGASQNDVGYGAYDLYDLGEFNQKGTVRTKYGTRSQLQAAVTSLKNNGIQVYGDVVMNHKGGADATEMVRAVEVNPNNRNQEVTGEYTIEAWTRFDFPGRGNTHSSFKWRWYHFDGVDWDQSRRLNNRIYKFRGKAWDWEVDTENGNYDYLMYADIDMDHPLVVNELRNWGVWYTNTLGLDGFRIDAVKHIKYSFTRDWINHVRSATGKNMFAVAEFWKNDLGAIENYLQKTNWNHSVFDVPLHYNLYNASKSGGNYDMRNIFNGTVVQRHPSHAVTFVDNHDSQPEEALESFVEEWFKPLAYALTLTREQGYPSVFYGDYYGIPTHGVPAMRSKIDPILEARQKYAYGPQHDYLDHPDVIGWTREGDSSHPKSGLATLITDGPGGSKRMYAGLKNAGETWYDITGNRSDTVKIGSDGWGEFHVNDGSVSIYVQK

SEQ ID NO: 37755 - protein, 478 aa, Synthetic construct
NGTMMQYFEWYLPNDGNHWNRLNSDASNLKSKGITAVWIPPAWKGASQNDVGYGAYDLYDLGEFNQKGTVRTKYGTRSQLQAAVTSLKNNGIQVYGDVVMNHKGGADATEIVRAVEVNPNNRNQEVTGEYTIEAWTRFDFPGRGNTHSSFKWRWYHFDGVDWDQSRRLNNRIYKFRGKAWDWEVDTENGNYDYLMYADIDMDHPEVVNELRNWGVWYTNTLGLDGFRIDAVKHIKYSFTRDWINHVRSATGKNMFAVAEFWKNDLGAIENYLQKTNWNHSVFDVPLHYNLYNASKSGGNYDMRNIFNGTVVQRHPSHAVTFVDNHDSQPEEALESFVEEWFKPLAYALTLTREQGYPSVFYGDYYGIPTHGVPAMRSKIDPILEARQKYAYGPQHDYLDHPDVIGWTREGDSSHPKSGLATLITDGPGGSKRMYAGLKNAGETWYDITGNRSDTVKIGSDGWGEFHVNDGSVSIYVQK

SEQ ID NO: 37756 - protein, 478 aa, Bacillus sp.
NGTMMQYFEWYLPNDGNHWNRLNSDASNLKSKGITAVWIPPAWKGASQNDVGYGAYDLYDLGEFNQKGTVRTKYGTRSQLQAAVTSLKNNGIQVYGDVVMNHKGGADATEMVRAVEVNPNNRNQEVTGEYTIEAWTRFDFPGRGNTHSSFKWRWYHFDGVDWDQSRRLNNRIYKFRGKAWDWEVDTENGNYDYLMYADIDFDHPEVVNELRIWGVWYTNTLGLDGFRIDAVKHIKYSFTRDWINHVRSATGKNMFAVAEFWKNDLGAIENYLQKTNWNHSVFDVPLHYNLYNASKSGGNYDMRNIFNGTVVQRHPSHAVTFVDNHDSQPEEALESFVEEWFKPLAYALTLTREQGYPSVFYGDYYGIPTHGVPAMRSKIDPILEARQKYAYGPQHDYLDHPDVIGWTREGDSSHPKSGLATLITDGPGGSKRMYAGLKNAGETWYDITGNRSDTVKIGSDGWGEFHVNDGSVSIYVQK

SEQ ID NO: 37757 - protein, 478 aa, Synthetic construct
NGTMMQYFEWYLPNDGNHWNRLNSDASNLKSKGITAVWIPPAWKGASQNDVGYGAYDLYDLGEFNQKGTVRTKYGTRSQLQAAVTSLKNNGIQVYGDVVMNHKGGADATEMVRAVEVNPNNRNQEVTGEYTIEAWTRFDFPGRGNTHSSFKWRWYHFDGVDWDQSRRLNNRIYKFRGKAWDWEVDTENGNYDYLMYADYDMDHPEVVNEVRNWGVWYTNTLGLDGFRIDAVKHIKYSFTRDWINHVRSATGKNMFAVAEFWKNDLGAIENYLQKTNWNHSVFDVPLHYNLYNASKSGGNYDMRNIFNGTVVQRHPSHAVTFVDNHDSQPEEALESFVEEWFKPLAYALTLTREQGYPSVFYGDYYGIPTHGVPAMRSKIDPILEARQKYAYGPQHDYLDHPDVIGWTREGDSSHPKSGLATLITDGPGGSKRMYAGLKNAGETWYDITGNRSDTVKIGSDGWGEFHVNDGSVSIYVQK

SEQ ID NO: 37758 - protein, 478 aa, Synthetic construct
NGTMMQYFEWYLPNDGNHWNRLNSDASNLKSKGITAVWIPPAWKGASQNDVGYGAYDVYDLGEFNQKGTVRTKYGTRSQLQAAVTSLKNNGIQVYGDVVLNHKGGADATEMVRAVEVNPNNRNQEVTGEYTIEAWTRFDFPGRGNTHSSFKWRWYHFDGVDWDQSRRLNNRIYKFRGKAWDWEVDTENGNYDYLMYADYDMDHPEVVNELRNWGVWYTNTLGLDGFRIDAVKHIKYSFTRDWINHVRSATGKNMFAVAEFWKNDLGAIENYLQKTNWNHSVFDVPLHYNLYNASKSGGNYDMRNIFNGTVVQRHPSHAVTFVDNHDSQPEEALESFVEEWFKPLAYALTLTREQGYPSVFYGDYYGIPTHGVPAMRSKIDPILEARQKYAYGPQHDYLDHPDVIGWTREGDSSHPKSGLATLITDGPGGSKRMYAGLKNAGETWYDITGNRSDTVKIGSDGWGEFHVNDGSVSIYVQK

SEQ ID NO: 37759 - protein, 478 aa, Synthetic construct
NGTMMQYFEWYLPNDGNHWNRLNSDASNLKSKGITAVWIPPAWKGASQNDVGYGAYDLYDLGEFNQKGTVRTKYGTRSQLQAAVTSLKNNGIQVYGDVVMNHKGGADATEMVGAVEVNPNNRNQEVTGEYTIEAWTRFDFPGRGNTHSSFKWRWYHFDGVDWDQSRRLNNRIYKFRGKAWDWEVDTENGNYDYLMYADIDMDHPEVVNELRNWGVWYTNTLGLDGFRIDAVKHIKYSFTRDWINHVRSATGKNMFAVAEFWKNDLGAIENYLQKTNWNHSVFDVPLHYNLYNASKSGGNYDMRNIFNGTVVQRHPSHAVTFVDNHDSQPEEALESFVEEWFKPLAYALTLTREQGYPSVFYGDYYGIPTHGVPAMRSKIDPILEARQKYAYGPQHDYLDHPDVIGWTREGDSSHPKSGLATLITDGPGGSKRMYAGLKNAGETWYDITGNRSDTVKIGSDGWGEFHVNDGSVSIYVQK

SEQ ID NO: 37760 - protein, 478 aa, Synthetic construct
NGTMMQYFEWYLPNDGNHWNRLNSDASNLKSKGITAVWIPPAWKGASQNDVGYGAYDLYDLGEFNQKGTVRTKYGTRSQLQAAVTSLKNNGIQVYGDVVMNHKGGADATEMVRAVEVNPNNRNQEVTGEYTIEAWTRFDFPGRGNTHSSFKWRWYHFDGVDWDQSRRLNNRIYKFRGKAWDWEVDTENGNYDYLMYADIDMDHPSVVNELRNWGVWYTNTLGLDGFRIDAVKHIKYSFTRDWINHVRSATGKNMFAVAEFWKNDLGAIENYLQKTNWNHSVFDVPLHYNLYNASKSGGNYDMRNIFNGTVVQRHPSHAVTFVDNHDSQPEEALESFVEEWFKPLAYALTLTREQGYPSVFYGDYYGIPTHGVPAMRSKIDPILEARQKYAYGPQHDYLDHPDVIGWTREGDSSHPKSGLATLITDGPGGSKRMYAGLKNAGETWYDITGNRSDTVKIGSDGWGEFHVNDGSVSIYVQK

SEQ ID NO: 37761 - protein, 478 aa, Bacillus sp.
NGTMMQYFEWYLPNDGNHWNRLNSDASNLKSKGITAVWIPPAWKGASQNDVGYGAYDLYDLGEFNQKGTVRTKYGTRSQLQAAVTSLKNNGIQVYGDVVMNHKGGADATEMVRAVEVNPNNRNQEVTGEYTIEAWTRFDFPGRGNTHSSFKWRWYHFDGVDWDQSRQLSNRIYKFRGKAWDWEVDTEFGNYDYLMYADYDMDHPEVVNELRNWGVWYTNTLGLDGFRIDAVKHIKYSFTRDWINHVRSATGKNMFAVAEFWKNDLGAIENYLQKTNWNHSVFDVPLHYNLYNASKSGGNYDMRNIFNGTVVQRHPSHAVTFVDNHDSQPEEALESFVEEWFKPLAYALTLTREQGYPSVFYGDYYGIPTHGVPAMRSKIDPILEARQKYAYGPQHDYLDHPDVIGWTREGDSSHPKSGLATLITDGPGGSKRMYAGLKNAGETWYDITGNRSDTVKIGSDGWGEFHVNDGSVSIYVQK

SEQ ID NO: 37762 - protein, 478 aa, Synthetic construct
NGTMMQYFEWYLPNDGNHWNRLNSDASNLKSKGITAVWIPPAWKGASQNDVGYGAYDLYDLGEFNQKGTVRTKYGTRSQLQAAVTSLKNNGIQVYGDVVMNHKGGADATEMVRAVEVNPNNRNQEVTGEYTIEAWTRFDFPGRGNTHSSFKWRWYHFDGVDWDQSRRLNNRIYKFRGKAWDWEVDTENGNYDYLMYADYDMDHPEVVNEMRNWGVWYTNTLGLDGFRIDAVKHIKYSFTRDWINHVRSATGKNMFAVAEFWKNDLGAIENYLQKTNWNHSVFDVPLHYNLYNASKSGGNYDMRNIFNGTVVQRHPSHAVTFVDNHDSQPEEALESFVEEWFKPLAYALTLTREQGYPSVFYGDYYGIPTHGVPAMRSKIDPILEARQKYAYGPQHDYLDHPDVIGWTREGDSSHPKSGLATLITDGPGGSKRMYAGLKNAGETWYDITGNRSDTVKIGSDGWGEFHVNDGSVSIYVQK

SEQ ID NO: 37763 - protein, 478 aa, Bacillus sp.
NGTMMQYFEWYLPNDGNHWNRLNSDASNLKSKGITAVWIPPAWKGASQNDVGYGAYDLYDLGEFNQKGTVRTKYGTRSQLQAAVTSLKNNGIQVYGDVVMNHKGGADATEMVRAVEVNPNNRNQEVTGEYTIEAWTRFDFPGRGNTHSSFKWRWYHFDGVDWDQSRKVSNRIYKFRGKAWDWEVDTEFGNYDYLMYTDYDMDHPEVVNELRNWGVWYTNTLGLDGFRIDAVKHIKYSFTRDWINHVRSATGKNMFAVAEFWKNDLGAIENYLQKTNWNHSVFDVPLHYNLYNASKSGGNYDMRNIFNGTVVQRHPSHAVTFVDNHDSQPEEALESFVEEWFKPLAYALTLTREQGYPSVFYGDYYGIPTHGVPAMRSKIDPILEARQKYAYGPQHDYLDHPDVIGWTREGDSSHPKSGLATLITDGPGGSKRMYAGLKNAGETWYDITGNRSDTVKIGSDGWGEFHVNDGSVSIYVQK

SEQ ID NO: 37764 - protein, 478 aa, Bacillus sp.
NGTMMQYFEWYLPNDGNHWNRLNSDASNLKSKGITAVWIPPAWKGLSQNDVGYGAYDLYDLGEFNQKGTVRTKYGTRSQLQAAVTSLKNNGIQVYGDVVMNHKGGADATEMVRAVEVNPNNRNQEVTGEYTIEAWTRFDFPGRGNTHSSFKWRWYHFDGVDWDQSRNLSNRIYKFRGKAWDWEVDTEFGNYDYLMYTDYDMDHPEVVNELRNWGVWYTNTLGLDGFRIDAVKHIKYSFTRDWINHVRSATGKNMFAVAEFWKNDLGAIENYLQKTNWNHSVFDVPLHYNLYNASKSGGNYDMRNIFNGTVVQRHPSHAVTFVDNHDSQPEEALESFVEEWFKPLAYALTLTREQGYPSVFYGDYYGIPTHGVPAMRSKIDPILEARQKYAYGPQHDYLDHPDVIGWTREGDSSHPKSGLATLITDGPGGSKRMYAGLKNAGETWYDITGNRSDTVKIGSDGWGEFHVNDGSVSIYVQK

SEQ ID NO: 37765 - protein, 500 aa, Rasamsonia emersonii
LFLFAAVTGLLAAAANAATPADWRSQSIYFLLTDRFGRTDNSTTAPCDTNARKYCGGSWQGIINHLDYIQGMGFTAIWITPVTKQLSLDTGDGTSYHGYWQQDIYSLNPNYGTAQDLKNLATALHNRGMYLMVDVVANHLGYAGSGTNMDCSVFNPFNNKEYFHPYCAITNYSNQTNVEDCWLGDNIVALADLNTSRTDVQNIWHSWVGNLVSNYSIDGLRIDTVKHVQKDFWPGYNKAAGVYCVGEILDGDPTYTCSYQNYLDGVLNYPTYFQIISAFQSTNGSISNLYNMINQVKSSCKDSTLLGTFVENHDNPRFASYTSDYSLAKNAIAFVILSDGIPIIYAGQEQHYSGGNDPGNREATWLSGYDISAELYKFIASANGIRSHAISKDSGYLTYKATNCHQNYPIYQDTSTIAMRKGTDGEQVITVLSNLGASGSSYTLSLGGTGYSAGEQLTELLSCTRVTVDSSGNVPVPMASGLPRVLYPTSLLTGSKLCQS

SEQ ID NO: 37766 - protein, 482 aa, Cytophaga sp.
NGTMMQYFEWYVPNDGQQWNRLRTDAPYLSSVGITAVWTPPAYKGTSQADVGYGPYDLYDLGEFNQKGTVRTKYGTKGELKSAVNTLHSNGIQVYGDVVMNHKAGADYTENVTAVEVNPSNRYQETSGEYNIQAWTGFNFPGRGTTHSNWKWQWFHFDGTDWDQSRSNSRIFKFRGHGKAWDWPVSSENGNYDYLMYADYDYDHPDVVNEMKKWGVWYANEVGLDGYRLDAVKHIKFSFLKDWVDNARAATGKEMFTVGEYWQNDLGALNNYLAKVNYNQSLFDAPLHYNFYAASTGGGYYDMRNILNNTLVASNPTKAVTLVENHDTQPGQSLESTVQPWFKPLAYAFILTRSGGYPSVFYGDMYGTKGTTTREIPALKSKIEPLLKARKDYAYGTQRDYIDNPDVIGWTREGDSTKAKSGLATVITDGPGGSKRMYVGTSNAGEIWYDLTGNRTDKITIGSDGYATFPVNGGSVSVWVQQ

SEQ ID NO: 37767 - protein, 488 aa, Synthetic construct
NGTMMQYFEWYVPNDGQQWNRLRTDAPYLSSVGITAVWTPPAYKGTSQADVGYGPYDLYDLGEFNQKGTVRTKYGTKGELKSAVNTLHSNGIQVYGDVVMNHKAGADGTEFVDAVEVDPSNRNQETSGTYQIQAWTKFDFPGRGNTYSSFKWRWYHFDGTDWDESRKLNRIYKFRSTGKAWDWEVDTENGNYDYLMFADLDMDHPIDYDHPDVVNEMKKWGVWYANEVGLDGYRLDAVKHIKFSFLKDWVDNARAATGKEMFTVGEYWQNDLGALNNYLAKVNYNQSLFDAPLHYNFYAASTGGGYYDMRNILNNTLVASNPTKAVTLVENHDTQPGQSLESTVQPWFKPLAYAFILTRSGGYPSVFYGDMYGTKGTTTREIPALKSKIEPLLKARKDYAYGTQRDYIDNPDVIGWTREGDSTKAKSGLATVITDGPGGSKRMYVGTSNAGEIWYDLTGNRTDKITIGSDGYATFPVNGGSVSVWVQQ

SEQ ID NO: 37768 - protein, 482 aa, Synthetic construct
NGTMMQYFEWYVPNDGQQWNRLRTDAPYLSSVGITAVWTPPAYKGTSQADVGYGPYDLYDLGEFNQKGTVRTKYGTKGELKSAVNTLHSNGIQVYGDVVMDHKGGADGTEWVDAVEVNPSDRNQEISGTYQIQAWTKFDFPGRGNTYSSFKWRWYHFDGVDWDESRKLSRIYKFRGIGKAWDWEVDTENGNYDYLMYADLDYDHPDVVNEMKKWGVWYANEVGLDGYRLDAVKHIKFSFLKDWVDNARAATGKEMFTVGEYWQNDLGALNNYLAKVNYNQSLFDAPLHYNFYAASTGGGYYDMRNILNNTLVASNPTKAVTLVENHDTQPGQSLESTVQPWFKPLAYAFILTRSGGYPSVFYGDMYGTKGTTTREIPALKSKIEPLLKARKDYAYGTQRDYIDNPDVIGWTREGDSTKAKSGLATVITDGPGGSKRMYVGTSNAGEIWYDLTGNRTDKITIGSDGYATFPVNGGSVSVWVQQ

SEQ ID NO: 37769 - protein, 482 aa, Cytophaga sp.
NGTMMQYFEWYVPNDGQQWNRLRTDAPYLSSVGITAVWTPPAYKGTSQADVGYGPYDLYDLGEFNQKGTVRTKYGTKGELKSAVNTLHSNGIQVYGDVVMNHKAGADYTENVTAVEVNPSNRYQETSGEYNIQAWTGFNFPGRGTTHSNWKWQWFHFDGTDWDQSRSNSRIFKFRGTGKAWDWPVSSENGNYDYLMYADYDYDHPDVVNEMKKWGVWYANEVGLDGYRLDAVKHIKFSFLKDWVDNARAATGKEMFTVGEYWQNDLGALNNYLAKVNYNQSLFDAPLHYNFYAASTGGGYYDMRNILNNTLVASNPTKAVTLVENHDTQPGQSLESTVQPWFKPLAYAFILTRSGGYPSVFYGDMYGTKGTTTREIPALKSKIEPLLKARKDYAYGTQRDYIDNPDVIGWTREGDSTKAKSGLATVITDGPGGSKRMYVGTSNAGEIWYDLTGNRTDKITIGSDGYATFPVNGGSVSVWVQQ

SEQ ID NO: 37770 - protein, 482 aa, Cytophaga sp.
NGTMMQYFEWYVPNDGQQWNRLRTDAPYLSSVGITAVWTPPAYKGTSQADVGYGPYDLYDLGEFNQKGTVRTKYGTKGELKSAVNTLHSNGIQVYGDVVMNHKAGADYTENVTAVEVNPSNRYQETSGEYNIQAWTGFNFPGRGTTYSNFKWQWFHFDGTDWDQSRSLSRIFKFRGDGKAWDWPVSSENGNYDYLMYADYDYDHPDVVNEMKKWGVWYANEVGLDGYRLDAVKHIKFSFLKDWVDNARAATGKEMFTVGEYWQNDLGALNNYLAKVNYNQSLFDAPLHYNFYAASTGGGRYDMRNILNNTLVASNPTKAVTLVENHDTQPGQSLESTVQPWFKPLAYAFILTRSGGYPSVFYGDMYGTKGTTTREIPALKSKIEPLLKARKDYAYGTQRDYIDNPDVIGWTREGDSTKAKSGLATVITDGPGGSKRMYVGTSNAGEIWYDLTGNRTDKITIGSDGYATFPVETRSVSVWVQQ

SEQ ID NO: 37771 - protein, 482 aa, Cytophaga sp.
NGTMMQYFEWYVPNDGQQWNRLRTDAPYLSSVGITAVWTPPAYKGTSQADVGYGPYDLYDLGEFNQKGTVRTKYGTKGELKSAVNTLHSNGIQVYGDVVMNHKAGADYTENVTAVEVNPSNRYQETSGEYNIQAWTGFNFPGRGTTHSNWKWQWFHFDGTDWDQSRSNSRIFKFRGTGKAWDWEVSSENGNYDYLMYADYDYDHPDVVNEMKKWGVWYANEVGLDGYRLDAVKHIKFQFLKDWVDNARAATGKEMFTVGEYWQNDLGALNNYLAKVNYNQSLFDAPLHYNFYAASTGGGYYDMRNILNNTLVASNPTKAVTLVENHDTQPGQSLESTVQPWFKPLAYAFILTRSGGYPSVFYGDMYGTKGTTTREIPALKSKIEPLLKARKDYAYGTQRDYIDNPDVIGWTREGDSTKAKSGLATVITDGPGGSKRMYVGTSNAGEIWYDLTGNRTDKITIGSDGYATFPVNGGSVSVWVQQ

SEQ ID NO: 37772 - protein, 482 aa, Cytophaga sp.
NGTMMQYFEWYVPNDGQQWNRLRTDAPYLSSVGITAVWTPPAYKGTSQADVGYGPYDLYDLGEFNQKGTVRTKYGTKGELKSAVNTLHSNGIQVYGDVVMNHKAGADYTENVTAVEVNPSNRYQETSGHYNIQAWTGFNFPGRGTTYSNFKWQWFHFDGTDWDQSRSLSRIFKFRGDGKAWDWPVSSENGNYDYLMYADYDYDHPDVVNEMKKWGVWYANEVGLDGYRLDAVKHIKFSFLKDWVDNARAATGKEMFTVGEYWQNDLGALNNYLAKVNYNQSLFDAPLHYNFYAASTGGGDYDMRNILNNTLVASNPTKAVTLVENHDTQPGQSLESTVQPWFKPLAYAFILTRSGGYPSVFYGDMYGTKGTTTREIPALKSKIEPLLKARKDYAYGTQRDYIDNPDVIGWTREGDSTKAKSGLATVITDGPGGSKRMYVGTSNAGEIWYDLTGNRTDKITIGSDGYATFPVNTESVSVWVQQ

SEQ ID NO: 37773 - protein, 482 aa, Cytophaga sp.
NGTMMQYFEWYVPNDGQQWNRLRTDAPYLSSVGITAVWTPPAYKGTSQADVGYGPYDLYDLGEFNQKGTVRTKYGTKGELKSAVNTLHSNGIQVYGDVVMNHKAGADYTENVTAVEVNPSNRYQETSGEYNIQAWTGFNFPGRGTTYSNFKWQWFHFDGTDWDQSRSLSRIFKFRGDGKAWDWPVSSENGNYDYLMYADYDYDHPDVVNEMKKWGVWYANEVGLDGYRLDAVKHIKFSFLKDWVDNARAATGKEMFTVGEYWQNDLGALNNYLAKVNYNQSLFDAPLHYNFYAASTGGGDYDMRNILNNTLVASNPTKAVTLVENHDTQPGQSLESTVQPWFKPLAYAFILTRSGGYPSVFYGDMYGTKGTTTREIPALKSKIEPLLKARKDYAYGTQRDYIDNPDVIGWTREGDSTKAKSGLATVITDGPGGSKRMYVGTSNAGEIWYDLTGNRTDKITIGSDGYATFPVEGESVSVWVQQ

SEQ ID NO: 37774 - protein, 482 aa, Cytophaga sp.
NGTMMQYFEWYVPNDGQQWNRLRTDAPYLSSVGITAVWTPPAYKGTSQADVGYGPYDLYDLGEFNQKGTVRTKYGTKGELKSAVNTLHSNGIQVYGDVVMNHKAGADYTENVTAVEVNPSNRYQETSGEYNIQAWTGFNFPGRGTTHSNWKWQWFHFDGTDWDQSRSNSRIFKFRGHGKAWDWEVSSENGNYDYLMYADYDYDHPDVVNEMKKWGVWYANEVGLDGYRLDAVKHIKFQFLKDWVDNARAATGKEMFTVGEYWQNDLGALNNYLAKVNYNQSLFDAPLHYNFYAASTGGGYYDMRNILNNTLVASNPTKAVTLVENHDTQPGQSLESTVQPWFKPLAYAFILTRSGGYPSVFYGDMYGTKGTTTREIPALKSKIEPLLKARKDYAYGTQRDYIDNPDVIGWTREGDSTKAKSGLATVITDGPGGSKRMYVGTSNAGEIWYDLTGNRTDKITIGSDGYATFPVNGGSVSVWVQQ

SEQ ID NO: 37775 - protein, 482 aa, Cytophaga sp.
NGTMMQYFEWYVPNDGQQWNRLRTDAPYLSSVGITAVWTPPAYKGTSQADVGYGPYDLYDLGEFNQKGTVRTKYGTKGELKSAVNTLHSNGIQVYGDVVMNHKAGADYTENVTAVEVNPSNRYQETSGHYNIQAWTGFNFPGRGTTYSNWKWQWFHFDGTDWDQSRSLSRIFKFRGDGKAWDWEVSSENGNYDYLMYADYDYDHPDVVNEMKKWGVWYANEVGLDGYRLDAVKHIKFQFLKDWVDNARAATGKEMFTVGEYWQNDLGALNNYLFKVNYNQSLFDAPLHYNFYAASTGGGYYDMRNILNNTLVASNPTKAVTLVENHDTQPGQSLESTVQPWFKPLAYAFILTRSGGYPSVFYGDMYGTKGTTTREIPALKSKIEPLLKARKDYAYGTQRDYIDNPDVIGWTREGDSTKAKSGLATVITDGPGGSKRMYVGTSNAGEIWYDLTGNRTDKITIGSDGYATFPVNGGSVSVWVQQ

SEQ ID NO: 37776 - protein, 479 aa, Aspergillus brasiliensis
ATPAEWRSQSIYFLLTDRFARTDNSTTASCDLSARQYCGGSWQGIINQLDYIQGMGFTAIWVTPVTAQIPQDTGYGQAYHGYWQQDAYALNSHYGTADDLKALATALHSRGMYLMVDVVANHMGHNGTGSSVEYSVYNPFNAKKYFHNLCWISNYDNQTNVEDCWLGDNTVALPDLDTTRTDVKNMWYDWVKSLVSNYSVDGLRVDTVKNVQKNFWPGYNNASGVYCIGEVFDGDASYTCPYQDDLDGVLNYPMYYPLLRAFKSTTGSISDLYNMINTVKSTCKDSTLLGTFIENHDNPRFANYTSDMSLAKNVATFTILADGIPIIYAGQEQHYSGGNDPYNREATWLSGYKTTSELYTHIAASNKIRTHAIKQDSGYLTYKNYPIYQDTSTLAMRKGYNGTQTITVLSNLGASGSSYTLSLPGTGYTAGQKITEIYTCTNLTVNSNGSVPVPMKSGLPRILYPTDKLVNGSSFCSSS

SEQ ID NO: 37777 - protein, 512 aa, Geobacillus stearothermophilus
NGTMMQYFEWHLPXDGXXWXKLXXDAXNLXSXGITALWIPPAWKGTSXXDVGYGXYDLYDLGEFNQKGTVRTKYGTKAQXXXAIXAXXXXGIQVYADVVXXHKGGADGTEXVXAVEVNXSXRNQEISGXYXIXAWTKFDFPGRGNTHSXFKWRWYHFDGXDWDXSRQXXXKIYKFRGXGKAWDWEVDXENGNYDYLMYADIDMDHPEVIXELKNWGXWYXNTXNIDGFRIDAVKHIKFSFXXDWLSHVRXXTGKPLFXVAEFWXXDIXXIXNYIXKTXXXXSLFDXPLHXXXYXASXSGGXFDMRXILXXSLMXXXPXXAVTFVDNHDSXPGXALXSFVXXWFKPLAYAXILTRXXGYPXVFYGDYYGIPXHXIPSLKSKIDPLLXARXXYAYGTQHDYXDHXDIIGWTREGXSXXPXSGLAXIISDGPGGXKWMYVGKXXAGXVFXDITGNRSXTVTINADGWGXFXVNGGAVSVWVXXKTTVSTIARPITTRPWTGEPVRWTEPRLVAWP

SEQ ID NO: 37778 - protein, 481 aa, Synthetic construct
NGTMMQYFEWYVPNDGQQWNRLRTDAPYLSSVGITAVWTPPAYKGTSQADVGYGPYDLYDLGEFNQKGTVRTKYGTKGELKSAVNTLHSNGIQVYGDVVMNHKAGADGTEFVDAVEVDPSNRNQETSGTYQIQAWTKFDFPGRGNTYSSFKWRWYHFDGTDWDESRKLNRIYKFSTGKAWDWEVDTENGNYDYLMFADLDYDHPDVVNEMKKWGVWYANEVGLDGYRLDAVKHIKFSFLKDWVDNARAATGKEMFTVGEYWQNDLGALNNYLAKVNYNQSLFDAPLHYNFYAASTGGGYYDMRNILNNTLVASNPTKAVTLVENHDTQPGQSLESTVQPWFKPLAYAFILTRSGGYPSVFYGDMYGTKGTTTREIPALKSKIEPLLKARKDYAYGTQRDYIDNPDVIGWTREGDSTKAKSGLATVITDGPGGSKRMYVGTSNAGEIWYDLTGNRTDKITIGSDGYATFPVNGGSVSVWVQQ

SEQ ID NO: 37779 - protein, 478 aa, Bacillus sp.
NGTIMQYFEWNVPNDGQHWNRLHNNAQNLKNAGITAIWIPPAWKGTSQSDTGYGAYDLYDLGEFNQKGTVRTKYGTKAELERAIRSLKANGIQVYGDVVMNHKAGADFTERVQAVEVNPQNRNQEVSGTYQIEAWTGFNFPGRGNQHSSFKWRWYHFDGTDWDQSRQLSNRIYKFRGKAWDWEVDTEFGNYDYLMYADLDMDHPEVINELNRWGVWYANTLNLDGFRLDAVKHIKFSFMRDWLGHVRGQTGKNLFAVAEYWKNDLGALENYLSKTNWTMSAFDVPLHYNLYQASNSSGNYDMRNLLNGTLVQRHPSHAVTFVDNHDTQPGEALESFVQGWFKPLAYATILTREQGYPQVFYGDYYGIPSDGVPSYRQQIDPLLAARQQYAYGPQHDYLDHPDVIGWTREGDSSHPKSGLATLITDGPGGSKRMYAGLKNAGETWYDITGNRSDTVKIGSDGWGEFHVNDASVSIYVQK

SEQ ID NO: 37780 - protein, 478 aa, Bacillus sp.
NGTIMQYFEWNVPNDGQHWNRLHNNAQNLKNAGITAIWIPPAWKGTSQSDTGYGAYDLYDLGEFNQRGTVRTKYGTKAELERAIRSLKANGIQVYGDVVMNHKAGADFTERVQAVEVNPQNRNQEVSGTYQIEAWTGFNFPGRGNQHSSFKWRWYHFDGTDFDQSRQLSNRIYKFRGKAWDWEVDTEFGNYDYLMYADLDMDHPEVINELNRWGVWYANTLNLDGFRLDAVKHIKFSFMRDWLGHVRGQTGKNLFAVAEYWKNDLGALENYLSKTNWTMSAFDVPLHYNLYQASNSSGNYDMRNLLNGTLVQRHPSHAVTFVDNHDTQPGEALESFVQGWFKPLAYATILTREQGYPQVFYGDYYGIPSDGVPSYRQQIDPLLKARQQYAYGPQHDYLDHPDVIGWTREGDSSHPKSGLATLITDGPGGSKRMYAGLKNAGETWYDITGNRSDTVKIGSDGWGEFHVNDGSVSIYVQK

SEQ ID NO: 37781 - protein, 478 aa, Bacillus sp.
NGTIMQYFEWNVPNDGQHWNRLHNNAQNLKNAGITAIWIPPAWKGTSQSDTGYGAYDLYDLGEFNQKGTVRTKYGTKAELERAIRSLKANGIQVYGDVVMNHKAGADQTEHVQAVEVNPQNRNQEVSGTYQIEAWTGFNFPGRGNQHSSFKWRWYHFDGTDFDQSRGLSNRIYKFRGKAWDWEVDTEFGNYDYLMYADLDMDHPEVINELNRWGVWYANTLNLDGFRLDAVKHIKFSFMRDWLGHVRGQTGKNLFAVGEYWKNDLGALENYLSKTNWTMSAFDVPLHYNLYQASNSSGNYDMRNLLNGTLVQRHPSHAVTFVDNHDTQPGEALESFVQGWFKPLAYATILTREQGYPQVFYGDYYGIPSDGVPSYRQQIDPLLKARQQYAYGPQHDYLDHPDVIGWTREGDSSHPKSGLATLITDGPGGSKRMYAGLKNAGETWYDITGNRSDTVKIGSDGWGEFHVNDGSVSIYVQK

SEQ ID NO: 37782 - protein, 478 aa, Bacillus sp.
NGTIMQYFEWNVPNDGQHWNRLHNNAQNLKNAGITAIWIPPAWKGTSQSDTGYGAYDLYDLGEFNQKGTVRTKYGTKAELERAIRSLKANGIQVYGDVVMNHKAGADQTEQVQAVEVNPQNRNQEVSGTYQIEAWTGFNFPGRGNQHSSFKWRWYHFDGTDFDQSRGLSNRIYKFRGKAWDWEVDTEFGNYDYLMYGDLDMDHPEVINELNRWGVWYANTLNLDGFRLDAVKHIKFSFMRDWLGHVRGQTGKNLFAVAEYWKNDLGALENYLSKTNWTMSAFDVPLHYNLYQASNSSGNYDMRNLLNGTLVQRHPSHAVTFVDNHDTQPGEALESFVQGWFKPLAYATILTREQGYPQVFYGDYYGIPSDGVPSYRQQIDPLLKARQQYAYGPQHDYLDHPDVIGWTREGDSSHPKSGLATLITDGPGGSKRMYAGLKNAGETWYDITGNRSDTVKIGSDGWGEFHVNDGSVSIYVQK

SEQ ID NO: 37783 - protein, 478 aa, Bacillus sp.
NGTIMQYFEWNVPNDGQHWNRLHNNAQNLKNAGITAIWIPPAWKGTSQSDTGYGAYDLYDLGEFNQRGTVRTKYGTKAELERAIRSLKANGIQVYGDVVMNHKAGADQTEHVQAVEVNPQNRNQEVSGTYQIEAWTGFNFPGRGNQHSSFKWRWYHFDGTDFDQSRGVSNRIYKFRGKAWDWEVDTEFGNYDYLMYADLDMDHPEVINELNRWGVWYANTLNLDGFRLDAVKHIKFSFMRDWLGHVRGQTGKNLFAVAEYWKNDLGALENYLSKTNWTMSAFDVPLHYNLYQASNSSGNYDMRNLLNGTLVQRHPSHAVTFVDNHDTQPGEALESFVQGWFKPLAYATILTREQGYPQVFYGDYYGIPSDGVPSYRQQIDPLLKARQQYAYGPQHDYLDHPDVIGWTREGDSSHPKSGLATLITDGPGGSKRMYAGLKNAGETWYDITGNRSDTVKIGSDGWGEFHVNDGSVSIYVQK

SEQ ID NO: 37784 - protein, 478 aa, Bacillus sp.
NGTIMQYFEWNVPNDGQHWNRLHNNAQNLKNAGITAIWIPPAWKGTSQSDTGYGAYDLYDLGEFNQKGTVRTKYGTKAELERAIRSLKANGIQVYGDVVMNHKAGADFTERVQAVEVNPQNRNQEVSGTYQIEAWTGFNFPGRGNQHSSFKWRWYHFDGTDWDQSRQLSNRIYKFRGKAWDWEVDTEFGNYDYLMYADLDMDHPEVINELNRWGVWYANTLNLDGFRLDAVKHIKFSFMRDWLGHVRGQTGKNLFAVAEYWKNDLGALENYLSKTNWTMSAFDVPLHYNLYQASNSSGNYDMRNLLNGTLVQRHPSHAVTFVDNHDTQPGEALESFVQGWFKPLAYATILTREQGYPQVFYGDYYGIPSDGVPSYRQQIDPLLAARQQYAYGPQHDYLDHPDVIGWTREGDSSHPKSGLATLITDGPGGSKRMYAGLKNAGETWYDITGNRSDTVKIGSDGWGEFHVNDQSVSIYVQK

SEQ ID NO: 37785 - protein, 478 aa, Bacillus sp.
NGTIMQYFEWNVPNDGQHWNRLHNNAQNLKNAGITAIWIPPAWKGTSQSDTGYGAYDLYDLGEFNQRGTVRTKYGTKAELERAIRSLKANGIQVYGDVVMNHKAGADFTEQVQAVEVNPQNRNQEVSGTYQIEAWTGFNFPGRGNQHSSFKWRWYHFDGTDFDQSRRLSNRIYKFRGKAWDWEVDTEFGNYDYLMYADLDMDHPEVINELNRWGVWYANTLNLDGFRLDAVKHIKFSFMRDWLGHVRGQTGKNLFAVAEYWKNDLGALENYLSKTNWTMSAFDVPLHYNLYQASNSSGNYDMRNLLNGTLVQRHPSHAVTFVDNHDTQPGEALESFVQGWFKPLAYATILTREQGYPQVFYGDYYGIPSDGVPSYRQQIDPLLKARQQYAYGPQHDYLDHPDVIGWTREGDSSHPKSGLATLITDGPGGSKRMYAGLKNAGETWYDITGNRSDTVKIGSDGWGEFHVNDGSVSIYVQK

SEQ ID NO: 37786 - protein, 478 aa, Bacillus sp.
NGTIMQYFEWNVPNDGQHWNRLHNNAQNLKNAGITAIWIPPAWKGTSQSDTGYGAYDLYDLGEFNQRGTVRTKYGTKAELERAIRSLKANGIQVYGDVVMNHKAGADFTERVQAVEVNPQNRNQEVSGEYQIEAWTGFNFPGRGNQHSSFKWRWYHFDGTDWDQSRQLSNRIYKFRGKAWDWEVDTEFRNYDYLMYADLDMDHPEVINELNRWGVWYANTLNLDGFRLDAVKHIKFSFMRDWLGHVRAQTGKNLFAVAEYWKNDLGALENYLSKTNWTMSAFDVPLHYNLYQASNSSGNYDMRNLLNGTLVQRHPSHAVTFVDNHDTQPGEALESFVQGWFKPLAYATILTREQGYPQVFYGDYYGIPSDGVPSYRQQIDPLLKARQQYAYGPQHDYLDHPDVIGWTREGDSSHPKSGLATLITDGPGGSKRMYAGLKNAGETWYDITGNRSDTVKIGSDGWGEFHVSDGSVSIYVQK

SEQ ID NO: 37787 - protein, 478 aa, Bacillus sp.
NGTIMQYFEWNVPNDGQHWNRLHNNAQNLKNAGITAIWIPPAWKGTSQSDTGYGAYDLYDLGEFNQRGTVRTKYGTKAELERAIRSLKANGIQVYGDVVMNHKAGADFTERVQAVEVNPQNRNQEVSGEYQIEAWTGFNFPGRGNQHSSFKWRWYHFDGTDFDQSRNLSNRIYKFRGKAWDWEVDTEFGNYDYLMYADLDMDHPEVINELNRWGVWYANTLNLDGFRLDAVKHIKFSFMRDWLGHVRAQTGKNLFAVGEYWKNDLGALENYLSKTNWTMSAFDVPLHYNLYQASNSSGNYDMRNLLNGTLVQRHPSHAVTFVDNHDTQPGEALESFVQGWFKPLAYATILTREQGYPQVFYGDYYGIPSDGVPSYRQQIDPLLKARQQYAYGPQHDYLDHPDVIGWTREGDSSHPKSGLATLITDGPGGSKRMYAGLKNAGETWYDITGNRSDTVKIGSDGWGEFHVNDGSVSIYVQK

SEQ ID NO: 37788 - protein, 480 aa, Synthetic construct
NGTMMQYFEWYLPNDGNHWNRLNSDASNLKSKGITAVWIPPAWKGASQNDVGYGAYDLYDLGEFNQKGTVRTKYGTRSQLQAAVTSLKNNGIQVYGDVVMNHKGGADATEMVRAVEVNPNNRNQEVTGEYTIEAWTRFDFPGRGNTHSSFKWRWYHFDGVDWDQSRRLNNRIYKFRGHGKAWDWEVDTENGNYDYLMYADIDMDHPEVVNELRNWGVWYTNTLGLDGFRIDAVKHIKYSFTRDWINHVREATGKNMFAVAEFWKNDLGAIENYLQKTNWNHSVFDVPLHYNLYNASKSGGNYDMRNIFNGTVVQRHPSHAVTFVDNHDSQPEEALESFVEEWFKPLAYALTLTREQGYPSVFYGDYYGIPTHGVPAMRSKIDPILEARQKYAYGPQHDYLDHPDVIGWTREGDSSHPKSGLATLITDGPGGSKRMYAGLKNAGETWYDITGNRSDTVKIGSDGWGEFHVNDGSVSIYVQK

SEQ ID NO: 37789 - protein, 480 aa, Synthetic construct
NGTMMQYFEWYLPNDGNHWNRLNSDASNLKSKGITAVWIPPAWKGASQNDVGYGAYDLYDLGEFNQKGTVRTKYGTRSQLQAAVTSLKNNGIQVYGDVVMNHKGGADATEMVRAVEVNPNNRNQEVTGEYTIEAWTRFDFPGRGNTHSSFKWRWYHFDGVDWDQSRRLNNRIYKFRGHGKAWDWEVDTEFGNYDYLMYADYDMDHPEVVAELRNWGVWYTNTLGLDGFRIDAVKHIKYSFTRDWINHVRSATGKNMFAVAEFWKNDLGAIENYLQKTNWNHSVFDVPLHYNLYNASKSGGNYDMRNIFNGTVVQRHPSHAVTFVDNHDSQPEEALESFVEEWFKPLAYALTLTREQGYPSVFYGDYYGIPTHGVPAMRSKIDPILEARQKYAYGPQHDYLDHPDVIGWTREGDSSHPKSGLATLITDGPGGSKRMYAGLKNAGETWYDITGNRSDTVKIGSDGWGEFHVNDGSVSIYVQK

SEQ ID NO: 37790 - protein, 480 aa, Synthetic construct
NGTMMQYFEWYLPNDGNHWNRLNSDASNLKSKGITAVWIPPAWKGASQNDVGYGAYDLYDLGEFNQKGTVRTKYGTRSQLQAAVTSLKNNGIQVYGDVVMNHKGGADATEMVRAVEVNPNNRNQEVTGEYTIEAWTRFDFPGRGNTHSSFKWRWYHFDGVDWDQSRRLNNRIYKFRGHGKAWDWEVDTENGNYDYLMYADLDMDHPEVVNELRNWGVWYTNTLGLDGFRIDAVKHIKYSFTRDWINHVRSATGKNMFAVAEFWKNDLGAIENYLQKTNWNHSVFDVPLHYNLYNASKSGGNYDMRNIFNGTVVQRHPSHAVTFVDNHDSQPEEALESFVEEWFKPLAYALTLTREQGYPSVFYGDYYGIPTHGVPAMRSKIDPILEARQKYAYGPQHDYLDHPDVIGWTREGDSSHPKSGLATLITDGPGGSKRMYAGLKNAGETWYDITGNRSDTVKIGSDGWGEFHVNDGSVSIYVQK

SEQ ID NO: 37791 - protein, 480 aa, Synthetic construct
NGTMMQYFEWYLPNDGNHWNRLNSDASNLKSKGITAVWIPPAWKGASQNDVGYGAYDLYDLGEFNQKGTVRTKYGTRSQLQAAVTSLKNNGIQVYGDVVMNHKGGADATEMVRAVEVNPNNRNQEVTGEYTIEAWTRFDFPGRGNTHSSFKWRWYHFDGVDWDQSRRLNNRIYKFRGHGKAWDWEVDTENGNYDYLMYADIDMDHPEVVNELRNWGVWYTNTLGLDGFRIDAVKHIKYSFTRDWINHVRSATGKNMFAVAEFWKNDLGAIENYLQKTNWNHSVFDVPLHYNLYNASNSGGNYDMRNIFNGTVVQRHPSHAVTFVDNHDSQPEEALESFVEEWFKPLAYALTLTREQGYPSVFYGDYYGIPTHGVPAMRSKIDPILEARQKYAYGPQHDYLDHPDVIGWTREGDSSHPKSGLATLITDGPGGSKRMYAGLKNAGETWYDITGNRSDTVKIGSDGWGEFHVNDGSVSIYVQK

SEQ ID NO: 37792 - protein, 480 aa, Bacillus sp.
NGTMMQYFEWYLPNDGNHWNRLNSDASNLKSKGITAVWIPPAWKGASQNDVGYGAYDLYDLGEFNQKGTVRTKYGTRSQLQAAVTSLKNNGIQVYGDVVMNHKGGADATEMVRAVEVNPNNRNQEVTGEYTIEAWTRFDFPGRGNTHSSFKWRWYHFDGVDWDQSRRLNNRIYKFRGHGKAWDWEVDTEFGNYDYLMYADYDMDHPEVVNELRNWGVWYTNTLGLDGFRIDAVKHIKYSFTRDWINHVRSATGKNMFAVAEFWKNDLGAIENYLQKTNWNHSVFDVPLHYNLYNASKSGGNYDMRNIFNGTVVQRHPSHAVTFVDNHDSQPEEALESFVEEWFKPLAYALTLTREQGYPSVFYGDYYGIPTHGVPAMRSKIDPILKARQKYAYGPQHDYLDHPDVIGWTREGDSSHPKSGLATLITDGPGGSKRMYAGLKNAGETWYDITGNRSDTVKIGSDGWGEFHVNDGSVSIYVQK

SEQ ID NO: 37793 - protein, 480 aa, Bacillus sp.
NGTMMQYFEWYLPNDGNHWNRLNSDASNLKSKGITAVWIPPAWKGASQNDVGYGAYDLYDLGEFNQKGTVRTKYGTRSQLQAAVTSLKNNGIQVYGDVVMNHKGGADATEMVRAVEVNPNNRNQEVTGEYTIEAWTRFDFPGRGNTHSSFKWRWYHFDGVDWDQSRRLNNRIYKFRGHGKAWDWEVDTEFGNYDYLMYADYDMDHPEVVNELRNWGVWYTNTLGLDGFRIDAVKHIKYSFTRDWINHVRSATGKNMFAVAEFWKNDLGAIENYLQKTNWNHSVFDVPLHYNLYNASKSGGNYDMRNIFNGTVVQRHPSHAVTFVDNHDSQPEEALESFVETWFKPLAYALTLTREQGYPSVFYGDYYGIPTHGVPAMRSKIDPILEARQKYAYGPQHDYLDHPDVIGWTREGDSSHPKSGLATLITDGPGGSKRMYAGLKNAGETWYDITGNRSDTVKIGSDGWGEFHVNDGSVSIYVQK

SEQ ID NO: 37794 - protein, 480 aa, Bacillus sp.
NGTMMQYFEWYLPNDGNHWNRLNSDASNLKSKGITAVWIPPAWKGASQNDVGYGAYDLYDLGEFNQKGTVRTKYGTRSQLQAAVTSLKNNGIQVYGDVVMNHKGGADATEMVRAVEVNPNNRNQEVTGEYTIEAWTRFDFPGRGNTHSSFKWRWYHFDGVDWDQSRRLNNRIYKFRGHGKAWDWEVDTEFGNYDYLMYADYDMDHPEVVNELRNWGVWYTNTLGLDGFRIDAVKHIKYSFTRDWINHVRSATGKNMFAVAEFWKNDLGAIENYLQKTNWNHSVFDVPLHYNLYNASKSGGNYDMRNIFNGTVVQRHPEHAVTFVDNHDSQPEEALESFVEEWFKPLAYALTLTREQGYPSVFYGDYYGIPTHGVPAMRSKIDPILEARQKYAYGPQHDYLDHPDVIGWTREGDSSHPKSGLATLITDGPGGSKRMYAGLKNAGETWYDITGNRSDTVKIGSDGWGEFHVNDGSVSIYVQK

SEQ ID NO: 37795 - protein, 480 aa, Synthetic construct
NGTMMQYFEWYLPNDGNHWNRLNSDASNLKSKGITAVWIPPAWKGASQNDVGYGAYDLYDLGEFNQKGTVRTKYGTRSQLQAAVTSLKNNGIQVYGDVVMNHKGGADATEMVRAVEVNPNNRNQEVTGEYTIEAWTRFDFPGRGNTHSSFKWRWYHFDGVDWDQSRRLNNRIYKFRGHGKAWDWEVDTENGNYDYLMYADIDMDHPEVVNELRNWGVWYTNTLGLDGFRIDAVKHIKYSFTRDWINHVRSATGKNMFAVAEFWKNDLGAIENYLQKTNWNHSVFDVPLHYNLYNASKSGGNYDMRNIFNGTVVARHPSHAVTFVDNHDSQPEEALESFVEEWFKPLAYALTLTREQGYPSVFYGDYYGIPTHGVPAMRSKIDPILEARQKYAYGPQHDYLDHPDVIGWTREGDSSHPKSGLATLITDGPGGSKRMYAGLKNAGETWYDITGNRSDTVKIGSDGWGEFHVNDGSVSIYVQK

SEQ ID NO: 37796 - protein, 480 aa, Synthetic construct
NGTMMQYFEWYLPNDGNHWNRLNSDASNLKSKGITAVWIPPAWKGASQNDVGYGAYDLYDLGEFNQKGTVRTKYGTRSQLQAAVTSLKNNGIQVYGDVVMNHKGGADATEMVRAVEVNPNNRNQEVTGEYTIEAWTRFDFPGRGNTHSSFKWRWYHFDGVDWDQSRRLNNRIYKFRGHGKAWDWEVDTENGNYDYLMYADIDYDHPESVNEMRNWGVWYTNTLGLDGFRIDAVKHIKYSFTRDWINHVRSATGKNMFAVAEFWKNDLGAIENYLQKTNWNHSVFDVPLHYNLYNASKSGGNYDMRNIFNGTVVQRHPSHAVTFVDNHDSQPEEALESFVEEWFKPLAYALTLTREQGYPSVFYGDYYGIPTHGVPAMRSKIDPILEARQKYAYGPQHDYLDHPDVIGWTREGDSSHPKSGLATLITDGPGGSKRMYAGLKNAGETWYDITGNRSDTVKIGSDGWGEFHVNDGSVSIYVQK

SEQ ID NO: 37797 - protein, 479 aa, Synthetic construct
NGTMMQYFEWYLPNDGNHWNRLNSDASNLKSKGITAVWIPPAWKGASQNDVGYGAYDLYDLGEFNQKGTVRTKYGTRSQLQAAVTSLKNNGIQVYGDVVMNHKGGADATEMVRAVEVNPNNRNQEVTGEYTIEAWTRFDFPGRGNTHSSFKWRWYHFDGVDWDQSRRLNRIYKFRGHGKAWDWEVDTENGNYDYLMYADIDMDHPEVVNELRNWGVWYTNTLGLDGFRIDAVKHIKYSFTRDWINHVRSATGKNMFAVAEFWKNDLGAIENYLQKTNWNHSVFDVPLHYNLYNASKSGGNYDMRNIFNGTVVQRHPSHAVTFVDNHDSQPEEALESFVEEWFKPLAYALTLTREQGYPSVFYGDYYGIPTHGVPAMRSKIDPILEARQKYAYGPQHDYLDHPDVIGWTREGDSSHPKSGLATLITDGPGGSKRMYAGLKNAGETWYDITGNRSDTVKIGSDGWGEFHVNDGSVSIYVQK

SEQ ID NO: 37798 - protein, 480 aa, Bacillus sp.
NGTMMQYFEWYLPNDGNHWNRLNSDASNLKSKGITAVWIPPAWKGASQNDVGYGAYDLYDLGEFNQKGTVRTKYGTRSQLQAAVTSLKNNGIQVYGDVVMNHKGGADATEMVRAVEVNPNNRNQEVTGEYTIEAWTRFDFPGRGNTHSSFKWRWYHFDGVDWDQSRRLNNRIYKFRGHGKAWDWEVDTEFGNYDYLMYADYDMDHPEVVNELRNWGVWYTNTLGLDGFRIDAVKHIKYSFTRDWINHVRSATGKNMFAVAEFWQNDLGGIENYLQKTNWNHSVFDVPLHYNLYNASKSGGNYDMRNIFNGTVVQRHPSHAVTFVDNHDSQPEEALESFVEEWFKPLAYALTLTREQGYPSVFYGDYYGIPTHGVPAMRSKIDPILEARQKYAYGPQHDYLDHPDVIGWTREGDSSHPKSGLATLITDGPGGSKRMYAGLKNAGETWYDITGNRSDTVKIGSDGWGEFHVNDGSVSIYVQK

SEQ ID NO: 37799 - protein, 480 aa, Synthetic construct
NGTMMQYFEWYLPNDGNHWNRLNSDASNLKSKGITAVWIPPAWKGASQNDVGYGAYDLYDLGEFNQKGTVRTKYGTRSQLQAAVTSLKNNGIQVYGDVVMNHKGGADATEMVRAVEVNPNNRNQEVTGEYTIEAWTRFDFPGRGNTHSSFKWRWYHFDGVDWDQSRRLNNRIYKFRGHGKAWDWEVDTENGNYDYLMYADIDMDHPEVVNELRNWGVWYTNTLGLDGFRIDAVKHIKYSFTRDWINHVRSATGKNMFAVAEFWKNDLGAIENYLQKTNWNHSVFDVPLHYNLYNASKSGGYYDMRNIFNGTVVQRHPSHAVTFVDNHDSQPEEALESFVEEWFKPLAYALTLTREQGYPSVFYGDYYGIPTHGVPAMRSKIDPILEARQKYAYGPQHDYLDHPDVIGWTREGDSSHPKSGLATLITDGPGGSKRMYAGLKNAGETWYDITGNRSDTVKIGSDGWGEFHVNDGSVSIYVQK

SEQ ID NO: 37800 - protein, 480 aa, Synthetic construct
NGTMMQYFEWYLPNDGNHWNRLNSDASNLKDKGITAVWIPPAWKGASQNDVGYGAYDLYDLGEFNQKGTVRTKYGTRSQLQAAVTSLKNNGIQVYGDVVMNHKGGADATEMVRAVEVNPNNRNQEVTGEYTIEAWTRFDFPGRGNTHSSFKWRWYHFDGVDWDQSRRLNNRIYKFRGHGKAWDWEVDTEFGNYDYLMYADYDMDHPEVVNELRNWGVWYTNTLGLDGFRIDAVKHIKYSFTRDWINHVRSATGKNMFAVAEFWKNDLGAIENYLQKTNWNHSVFDVPLHYNLYNASKSGGNYDMRNIFNGTVVQRHPSHAVTFVDNHDSQPEEALESFVEEWFKPLAYALTLTREQGYPSVFYGDYYGIPTHGVPAMRSKIDPILEARQKYAYGPQHDYLDHPDVIGWTREGDSSHPKSGLATLITDGPGGSKRMYAGLKNAGETWYDITGNRSDTVKIGSDGWGEFHVNDGSVSIYVQK

SEQ ID NO: 37801 - protein, 480 aa, Synthetic construct
NGTMMQYFEWYLPNDGNHWNRLNSDASNLKSKGITAVWIPPAWKGASQNDVGYGAYDLYDLGEFNQKGTVRTKYGTRSQLQAAVTSLKNNGIQVYGDVVMNHKGGADATEMVRAVEVNPNNRNQEVTGEYTIEAWTRFDFPGRGNTHSSFKWRWYHFDGVDWDQSRQINNRIYKFRGHGKAWDWEVDTEFGNYDYLMYADYDMDHPEVVNELRNWGVWYTNTLGLDGFRIDAVKHIKYSFTRDWINHVRSATGKNMFAVAEFWKNDLGAIENYLQKTNWNHSVFDVPLHYNLYNASKSGGNYDMRNIFNGTVVQRHPSHAVTFVDNHDSQPEEALESFVEEWFKPLAYALTLTREQGYPSVFYGDYYGIPTHGVPAMRSKIDPILEARQKYAYGPQHDYLDHPDVIGWTREGDSSHPKSGLATLITDGPGGSKRMYAGLKNAGETWYDITGNRSDTVKIGSDGWGEFHVNDGSVSIYVQK

SEQ ID NO: 37802 - protein, 480 aa, Synthetic construct
NGTMMQYFEWYLPNDGNHWNRLNSDASNLKSKGITAVWIPPAWKGASQNDVGYGAYDLYDLGEFNQKGTVRTKYGTRSQLQAAVTSLKNNGIQVYGDVVMNHKGGADATEMVRAVEVNPNNRNQEVTGEYTIEAWTRFDFPGRGNTHSNFKWRWYHFDGVDWDQSRRLNNRIYKFRGHGKAWDWEVDTENGNYDYLMYADIDMDHPEVVNELRNWGVWYTNTLGLDGFRIDAVKHIKYSFTRDWINHVRSATGKNMFAVAEFWKNDLGAIENYLQKTNWNHSVFDVPLHYNLYNASKSGGNYDMRNIFNGTVVQRHPSHAVTFVDNHDSQPEEALESFVEEWFKPLAYALTLTREQGYPSVFYGDYYGIPTHGVPAMRSKIDPILEARQKYAYGPQHDYLDHPDVIGWTREGDSSHPKSGLATLITDGPGGSKRMYAGLKNAGETWYDITGNRSDTVKIGSDGWGEFHVNDGSVSIYVQK

SEQ ID NO: 37803 - protein, 480 aa, Synthetic construct
NGTMMQYFEWYLPNDGNHWNRLNSDASNLKSKGITAVWIPPAWKGASQNDVGYGAYDLYDLGEFNQKGTVRTKYGTRSQLQAAVTSLKNNGIQVYGDVVMNHKGGADATEMVRAVEVNPNNRNQEVTGEYTIEAWTRFDFPGRGNTHSSFKWRWYHFDGVDWDQSRRLNNRIYKFRGHGKAWDWEVDTENGNYDYLMYADYDMDHPEVVNEMRNWGVWYTNTLGLDGFRIDAVKHIKYSFTRDWINHVRSATGKNMFAVAEFWKNDLGAIENYLQKTNWNHSVFDVPLHYNLYNASKSGGNYDMRNIFNGTVVQRHPSHAVTFVDNHDSQPEEALESFVEEWFKPLAYALTLTREQGYPSVFYGDYYGIPTHGVPAMRSKIDPILEARQKYAYGPQHDYLDHPDVIGWTREGDSSHPKSGLATLITDGPGGSKRMYAGLKNAGETWYDITGNRSDTVKIGSDGWGEFHVNDGSVSIYVQK

SEQ ID NO: 37804 - protein, 480 aa, Synthetic construct
NGTMMQYFEWYLPNDGNHWNRLNSDAPNLKSKGITAVWIPPAWKGASQNDVGYGAYDLYDLGEFNQKGTVRTKYGTRSQLQAAVTSLKNNGIQVYGDVVMNHKGGADATEMVRAVEVNPNNRNQEVTGEYTIEAWTRFDFPGRGNTHSSFKWRWYHFDGVDWDQSRRLNNRIYKFRGHGKAWDWEVDTENGNYDYLMYADIDMDHPEVVNELRNWGVWYTNTLGLDGFRIDAVKHIKYSFTRDWINHVRSATGKNMFAVAEFWKNDLGAIENYLQKTNWNHSVFDVPLHYNLYNASKSGGNYDMRNIFNGTVVQRHPSHAVTFVDNHDSQPEEALESFVEEWFKPLAYALTLTREQGYPSVFYGDYYGIPTHGVPAMRSKIDPILEARQKYAYGPQHDYLDHPDVIGWTREGDSSHPKSGLATLITDGPGGSKRMYAGLKNAGETWYDITGNRSDTVKIGSDGWGEFHVNDGSVSIYVQK

SEQ ID NO: 37805 - protein, 480 aa, Synthetic construct
NGTMMQYFEWYLPNDGNHWNRLNSDASNLKSKGITAVWIPPAWKGASQNDVGYGAYDLYDLGEFNQKGTVRTKYGTRSQLQAAVTSLKNNGIQVYGDVVMNHKGGADATEMVRAVEVNPQNRNQEVTGEYTIEAWTRFDFPGRGNTHSSFKWRWYHFDGVDWDQSRRLNNRIYKFRGHGKAWDWEVDTENGNYDYLMYADIDMDHPEVVNELRNWGVWYTNTLGLDGFRIDAVKHIKYSFTRDWINHVRSATGKNMFAVAEFWKNDLGAIENYLQKTNWNHSVFDVPLHYNLYNASKSGGNYDMRNIFNGTVVQRHPSHAVTFVDNHDSQPEEALESFVEEWFKPLAYALTLTREQGYPSVFYGDYYGIPTHGVPAMRSKIDPILEARQKYAYGPQHDYLDHPDVIGWTREGDSSHPKSGLATLITDGPGGSKRMYAGLKNAGETWYDITGNRSDTVKIGSDGWGEFHVNDGSVSIYVQK

SEQ ID NO: 37806 - protein, 480 aa, Synthetic construct
NGTMMQYFEWYLPNDGNHWNRLNSDASNLKSKGITAVWIPPAWKGASQNDVGYGAYDLYDLGEFNQKGTVRTKYGTRSQLQAAVTSLKNNGIQVYGDVVMNHKGGADATEMVRAVEVNPNNRNQEVTGEYNIEAWTRFDFPGRGNTHSSFKWRWYHFDGVDWDQSRRLNNRIYKFRGHGKAWDWEVDTENGNYDYLMYADIDMDHPEVVNELRNWGVWYTNTLGLDGFRIDAVKHIKYSFTRDWINHVRSATGKNMFAVAEFWKNDLGAIENYLQKTNWNHSVFDVPLHYNLYNASKSGGNYDMRNIFNGTVVQRHPSHAVTFVDNHDSQPEEALESFVEEWFKPLAYALTLTREQGYPSVFYGDYYGIPTHGVPAMRSKIDPILEARQKYAYGPQHDYLDHPDVIGWTREGDSSHPKSGLATLITDGPGGSKRMYAGLKNAGETWYDITGNRSDTVKIGSDGWGEFHVNDGSVSIYVQK

SEQ ID NO: 37807 - protein, 480 aa, Synthetic construct
NGTMMQYFEWYLPNDGNHWNRLNSDASNLKSKGITAVWIPPAWKGASQNDVGYGAYDLYDLGEFNQKGTVRTKYGTRSQLQAAVTSLKNNGIQVYGDVVMNHKGGADATEMVRAVEVNPNNRNQEVTGEYTIEAWTRFDFPGRGNTHSSFKWRWYHFDGVDWDQSRKLSNRIYKFRGHGKAWDWEVDTEFGNYDYLMYGDYDMDHPEVVNELRNWGVWYTNTLGLDGFRIDAVKHIKYSFTRDWINHVRSATGKNMFAVAEFWKNDLGAIENYLQKTNWNHSVFDVPLHYNLYNASKSGGNYDMRNIFNGTVVQRHPSHAVTFVDNHDSQPEEALESFVEEWFKPLAYALTLTREQGYPSVFYGDYYGIPTHGVPAMRSKIDPILEARQKYAYGPQHDYLDHPDVIGWTREGDSSHPKSGLATLITDGPGGSKRMYAGLKNAGETWYDITGNRSDTVKIGSDGWGEFHVNDGSVSIYVQK

SEQ ID NO: 37808 - protein, 480 aa, Synthetic construct
NGTMMQYFEWYLPNDGNHWNRLNSDASNLKSKGITAVWIPPAWKGASQNDVGYGAYDLYDLGEFNQKGTVRTKYGTRSQLQAAVTSLKANGIQVYGDVVMNHKGGADATEMVRAVEVNPNNRNQEVTGEYTIEAWTRFDFPGRGNTHSSFKWRWYHFDGVDWDQSRRLNNRIYKFRGHGKAWDWEVDTENGNYDYLMYADIDMDHPEVVNELRNWGVWYTNTLGLDGFRIDAVKHIKYSFTRDWINHVRSATGKNMFAVAEFWKNDLGAIENYLQKTNWNHSVFDVPLHYNLYNASKSGGNYDMRNIFNGTVVQRHPSHAVTFVDNHDSQPEEALESFVEEWFKPLAYALTLTREQGYPSVFYGDYYGIPTHGVPAMRSKIDPILEARQKYAYGPQHDYLDHPDVIGWTREGDSSHPKSGLATLITDGPGGSKRMYAGLKNAGETWYDITGNRSDTVKIGSDGWGEFHVNDGSVSIYVQK

SEQ ID NO: 37809 - protein, 480 aa, Synthetic construct
NGTMMQYFEWYLPNDGNHWNRLNSDASNLKSKGITAVWIPPAWKGASQNDVGYGAYDLYDLGEFNQKGTVRTKYGTRSQLQAAVTSLKNNGIQVYGDVVMNHKGGADATEMVRAVEVNPNNRNQEVTGEYTIEAWTRFDFPGRGNTHSSFKWRWYHFDGVDWDQSRRLNNRIYKFRGHGKAWDWEVDTENGNYDYLMYADIDMDHPEVVNELRNWGVWYTNTLGLDGFRIDAVKHIKYSFTRDWINHVRSATGKNMFAVAEFWKNDLGAIENYLQKTNWNHSVFDVPLHYNLYNASKSGGNYDMRNIFNGTVVQRHPSHAVTFVDNHDSQPEEALESFVEEWFKPLAYALTLTREQGYPSVFYGDYYGIPTHGVPAMRSKIDPILEARQDYAYGPQHDYLDHPDVIGWTREGDSSHPKSGLATLITDGPGGSKRMYAGLKNAGETWYDITGNRSDTVKIGSDGWGEFHVNDGSVSIYVQK

SEQ ID NO: 37810 - protein, 480 aa, Synthetic construct
NGTMMQYFEWYLPNDGNHWNRLNSDASNLKSKGITAVWIPPAWKGASQNDVGYGAYDLYDLGEFNQKGTVRTKYGTRSDLQAAVTSLKNNGIQVYGDVVMNHKGGADATEMVRAVEVNPNNRNQEVTGEYTIEAWTRFDFPGRGNTHSSFKWRWYHFDGVDWDQSRRLNNRIYKFRGHGKAWDWEVDTENGNYDYLMYADIDMDHPEVVNELRNWGVWYTNTLGLDGFRIDAVKHIKYSFTRDWINHVRSATGKNMFAVAEFWKNDLGAIENYLQKTNWNHSVFDVPLHYNLYNASKSGGNYDMRNIFNGTVVQRHPSHAVTFVDNHDSQPEEALESFVEEWFKPLAYALTLTREQGYPSVFYGDYYGIPTHGVPAMRSKIDPILEARQKYAYGPQHDYLDHPDVIGWTREGDSSHPKSGLATLITDGPGGSKRMYAGLKNAGETWYDITGNRSDTVKIGSDGWGEFHVNDGSVSIYVQK

SEQ ID NO: 37811 - protein, 480 aa, Bacillus sp.
NGTMMQYFEWYLPNDGNHWNRLNSDASNLKSKGITAVWIPPAWKGASQNDVGYGAYDLYDLGEFNQKGTVRTKYGTRSQLQAAVTSLKNNGIQVYGDVVMNHKGGADATEMVRAVEVNPNNRNQEVTGEYTIEAWTRFDFPGRGNTHSSFKWRWYHFDGVDWDQSRDLSNRIYKFRGHGKAWDWEVDTEFGNYDYLMYADYDMDHPEVVNELRNWGVWYTNTLGLDGFRIDAVKHIKYSFTRDWINHVRSATGKNMFAVAEFWKNDLGAIENYLQKTNWNHSVFDVPLHYNLYNASKSGGNYDMRNIFNGTVVQRHPSHAVTFVDNHDSQPEEALESFVEEWFKPLAYALTLTREQGYPSVFYGDYYGIPTHGVPAMRSKIDPILEARQKYAYGPQHDYLDHPDVIGWTREGDSSHPKSGLATLITDGPGGSKRMYAGLKNAGETWYDITGNRSDTVKIGSDGWGEFHVNDGSVSIYVQK

SEQ ID NO: 37812 - protein, 480 aa, Bacillus sp.
NGTMMQYFEWYLPNDGNHWNRLNSDASNLKSKGITAVWIPPAWKGASQNDVGYGAYDLYDLGEFNQKGTVRTKYGTRSQLQAAVTSLKNNGIQVYGDVVMNHKGGADATEMVRAVEVNPNNRNQEVTGEYTIEAWTRFDFPGRGNTHSSFKWRWYHFDGVDWDQSRRLNNRIYKFRGHGKAWDWEVDTEFGNYDYLMYADYDMDHPEVVNELRNWGVWYTNTLGLDGFRIDAVKHIKYSFTRDWINHVRSATGKNMFAVAEFWQNDLGAIENYLQKTNWNHSVFDVPLHYNLYNASKSGGNYDMRNIFNGTVVQRHPSHAVTFVDNHDSQPEEALESFVEEWFKPLAYALTLTREQGYPSVFYGDYYGIPTHGVPAMRSKIDPILEARQKYAYGPQHDYLDHPDVIGWTREGDSSHPKSGLATLITDGPGGSKRMYAGLKNAGETWYDITGNRSDTVKIGSDGWGEFHVNDGSVSIYVQK

SEQ ID NO: 37813 - protein, 480 aa, Bacillus sp.
NGTMMQYFEWYLPNDGNHWNRLNSDASNLKSKGITAVWIPPAWKGASQNDVGYGAYDLYDLGEFNQKGTVRTKYGTRSQLQDAVTSLKNNGIQVYGDVVMNHKGGADATEMVRAVEVNPNNRNQEVTGEYTIEAWTRFDFPGRGNTHSSFKWRWYHFDGVDWDQSRRLNNRIYKFRGHGKAWDWEVDTEFGNYDYLMYADYDMDHPEVVNELRNWGVWYTNTLGLDGFRIDAVKHIKYSFTRDWINHVRSATGKNMFAVAEFWKNDLGAIENYLQKTNWNHSVFDVPLHYNLYNASKSGGNYDMRNIFNGTVVQRHPSHAVTFVDNHDSQPEEALESFVEEWFKPLAYALTLTREQGYPSVFYGDYYGIPTHGVPAMRSKIDPILEARQKYAYGPQHDYLDHPDVIGWTREGDSSHPKSGLATLITDGPGGSKRMYAGLKNAGETWYDITGNRSDTVKIGSDGWGEFHVNDGSVSIYVQK

SEQ ID NO: 37814 - protein, 480 aa, Synthetic construct
NGTMMQYFEWYLPNDGNHWNRLNSDASNLKSKGITAVWIPPAWKGASQNDVGYGAYDLYDLGEFNQKGTVRTKYGTRSQLQAAVTSLKNNGIQVYGDVVMNHKGGADATEMVRAVEVNPNNRNQEVTGEYTIEAWTRFDFPGRGNTHSSFKWRWYHFDGVDWDQSRRLNNRIYKFRGHGKAWDWEVDTENGNYDYLMYADLDFDHPEVVNELRNWGVWYTNTLGLDGFRIDAVKHIKYSFTRDWINHVRSATGKNMFAVAEFWKNDLGAIENYLQKTNWNHSVFDVPLHYNLYNASKSGGNYDMRNIFNGTVVQRHPSHAVTFVDNHDSQPEEALESFVEEWFKPLAYALTLTREQGYPSVFYGDYYGIPTHGVPAMRSKIDPILEARQKYAYGPQHDYLDHPDVIGWTREGDSSHPKSGLATLITDGPGGSKRMYAGLKNAGETWYDITGNRSDTVKIGSDGWGEFHVNDGSVSIYVQK

SEQ ID NO: 37815 - protein, 480 aa, Synthetic construct
NGTMMQYFEWYLPNDGNHWNRLNSDASNLKSKGITAVWIPPAWKGASQNDVGYGAYDLYDLGEFNQKGTVRTKYGTRSQLQAAVTSLKNNGIQVYGDVVMNHKGGADATEMVRAVEVNPNNRNQEVTGEYTIEAWTRFDFPGRGNTHSSFKWRWYHFDGVDWDQSRRLNNRIYKFRGHGKAWDWEVDTENGNYDYLMYADYDFDHPEVVNEHRNWGVWYTNTLGLDGFRIDAVKHIKYSFTRDWINHVRSATGKNMFAVAEFWKNDLGAIENYLQKTNWNHSVFDVPLHYNLYNASKSGGNYDMRNIFNGTVVQRHPSHAVTFVDNHDSQPEEALESFVEEWFKPLAYALTLTREQGYPSVFYGDYYGIPTHGVPAMRSKIDPILEARQKYAYGPQHDYLDHPDVIGWTREGDSSHPKSGLATLITDGPGGSKRMYAGLKNAGETWYDITGNRSDTVKIGSDGWGEFHVNDGSVSIYVQK

SEQ ID NO: 37816 - protein, 480 aa, Synthetic construct
NGTMMQYFEWYLPNDGNHWNRLNSDASNLKSKGITAVWIPPAWKGASQNDVGYGAYDLYDLGEFNQKGTVRTKYGTRSQLQAAVTSLKNNGIQVYGDVVMNHKGGADATEMVRAVEVNPNNRNQEVTGEYTIEAWTRFDFPGRGNTHSSFKWRWYHFDGVDWDQSRRLNNRIYKFRGHGKAWDWEVDTENGNYDYLMYADIDMDHPEVVNELRNWGVWYTNTLGLDGFRIDAVKHIKYSFTRDWINHVRSATGKNMFAVAEFWKNDLGAIENYLQKTNWNMSVFDVPLHYNLYNASKSGGNYDMRNIFNGTVVQRHPSHAVTFVDNHDSQPEEALESFVEEWFKPLAYALTLTREQGYPSVFYGDYYGIPTHGVPAMRSKIDPILEARQKYAYGPQHDYLDHPDVIGWTREGDSSHPKSGLATLITDGPGGSKRMYAGLKNAGETWYDITGNRSDTVKIGSDGWGEFHVNDGSVSIYVQK

SEQ ID NO: 37817 - protein, 480 aa, Synthetic construct
NGTMMQYFEWYLPNDGNHWNRLNSDASNLKSKGITAVWIPPAWKGASQNDVGYGAYDLYDLGEFNQKGTVRTKYGTRSQLQAAVTSLKNNGIQVYGDVVMNHKGGADATEMVRAVEVNPNNRNQEVTGEYTIEAWTRFDFPGRGNTHSSFKWRWYHFDGVDWDQSRRLNNRIYKFRGHGKAWDWEVDTENGNYDYLMYADYDFDHPEVVNEVRNWGVWYTNTLGLDGFRIDAVKHIKYSFTRDWINHVRSATGKNMFAVAEFWKNDLGAIENYLQKTNWNHSVFDVPLHYNLYNASKSGGNYDMRNIFNGTVVQRHPSHAVTFVDNHDSQPEEALESFVEEWFKPLAYALTLTREQGYPSVFYGDYYGIPTHGVPAMRSKIDPILEARQKYAYGPQHDYLDHPDVIGWTREGDSSHPKSGLATLITDGPGGSKRMYAGLKNAGETWYDITGNRSDTVKIGSDGWGEFHVNDGSVSIYVQK

SEQ ID NO: 37818 - protein, 480 aa, Synthetic construct
NGTMMQYFEWYLPNDGNHWNRLNSDASNLKSKGITAVWIPPAWKGASQNDVGYGAYDLYDLGEFNQKGTVRTKYGTRSQLQAAVTSLKNNGIQVYGDVVMNHKGGADATEMVRAVEVNPNNRNQEVTGEYTIEAWTRFDFPGRGNTHSSFKWYWYHFDGVDWDQSRRLNNRIYKFRGHGKAWDWEVDTENGNYDYLMYADIDMDHPEVVNELRNWGVWYTNTLGLDGFRIDAVKHIKYSFTRDWINHVRSATGKNMFAVAEFWKNDLGAIENYLQKTNWNHSVFDVPLHYNLYNASKSGGNYDMRNIFNGTVVQRHPSHAVTFVDNHDSQPEEALESFVEEWFKPLAYALTLTREQGYPSVFYGDYYGIPTHGVPAMRSKIDPILEARQKYAYGPQHDYLDHPDVIGWTREGDSSHPKSGLATLITDGPGGSKRMYAGLKNAGETWYDITGNRSDTVKIGSDGWGEFHVNDGSVSIYVQK

SEQ ID NO: 37819 - protein, 480 aa, Bacillus sp.
NGTMMQYFEWYLPNDGNHWNRLNSDASNLKSKGITAVWIPPAWKAASQNDVGYGAYDLYDLGEFNQKGTVRTKYGTRSQLQAAVTSLKNNGIQVYGDVVMNHKGGADATEMVRAVEVNPNNRNQEVTGEYTIEAWTRFDFPGRGNTHSSFKWRWYHFDGVDWDQSRTLSNRIYKFRGHGKAWDWEVDTEFGNYDYLMYADYDMDHPEVVNELRNWGVWYTNTLGLDGFRIDAVKHIKYSFTRDWINHVRSATGKNMFAVAEFWKNDLGAIENYLQKTNWNHSVFDVPLHYNLYNASKSGGNYDMRNIFNGTVVQRHPSHAVTFVDNHDSQPEEALESFVETWFKPLAYALTLTREQGYPSVFYGDYYGIPTHGVPAMRSKIDPILEARQKYAYGPQHDYLDHPDVIGWTREGDSSHPKSGLATLITDGPGGSKRMYAGLKNAGETWYDITGNRSDTVKIGSDGWGEFHVNDGSVSIYVQK

SEQ ID NO: 37820 - protein, 480 aa, Synthetic construct
NGTMMQYFEWYLPNDGNHWNRLNSDASNLKSKGITAVWIPPAWKGASQNDVGYGAYDLYDLGEFNQKGTVRTKYGTRSQLQAAVTSLKNNGIQVYGDVVMNHKGGADATEMVRAVEVNPNNRNQEVTGEYTIEAWTRFDFPGRGNTHSSFKWRWYHFDGVDWDQSRRLNNRIYKFRGHGKAWDWEVDTENGNYDYLMYADIDMDHPEVVNELNNWGVWYTNTLGLDGFRIDAVKHIKYSFTRDWINHVRSATGKNMFAVAEFWKNDLGAIENYLQKTNWNHSVFDVPLHYNLYNASKSGGNYDMRNIFNGTVVQRHPSHAVTFVDNHDSQPEEALESFVEEWFKPLAYALTLTREQGYPSVFYGDYYGIPTHGVPAMRSKIDPILEARQKYAYGPQHDYLDHPDVIGWTREGDSSHPKSGLATLITDGPGGSKRMYAGLKNAGETWYDITGNRSDTVKIGSDGWGEFHVNDGSVSIYVQK

SEQ ID NO: 37821 - protein, 480 aa, Bacillus sp.
NGTMMQYFEWYLPNDGNHWNRLNSDASNLKSKGITAVWIPPAWKGASQNDVGYGAYDLYDLGEFNQKGTVRTKYGTRSQLQAAVTSLKNNGIQVYGDVVMNHKGGADATEMVRAVEVNPNNRNQEVTGEYTIEAWTRFDFPGRGNTHSSFKWRWYHFDGVDWDQSRRLNNRIYKFRGHGKAWDWEVDTEFGNYDYLMYADYDMDHPEVVNELRNWGVWYTNTLGLDGFRIDAVKHIKYSFTRDWINHVRSATGKNMFAVAEFWQNDLGWIENYLQKTNWNHSVFDVPLHYNLYNASKSGGNYDMRNIFNGTVVQRHPSHAVTFVDNHDSQPEEALESFVEEWFKPLAYALTLTREQGYPSVFYGDYYGIPTHGVPAMRSKIDPILEARQKYAYGPQHDYLDHPDVIGWTREGDSSHPKSGLATLITDGPGGSKRMYAGLKNAGETWYDITGNRSDTVKIGSDGWGEFHVNDGSVSIYVQK

SEQ ID NO: 37822 - protein, 480 aa, Synthetic construct
NGTMMQYFEWYLPNDGNHWNRLNSDASNLKSKGITAVWIPPAWKGASQNDVGYGAYDLYDLGEFNQKGTVRTKYGTRSQLQAAVTSLKNNGIQVYGDVVMNHKGGADATEMVRAVEVNPNNRNQEVTGEYTIEAWTRFDFPGRGNTHSSFKWRWYHFDGVDWDQSRRLNNRIYKFRGHGKAWDWEVDTENGNYDYLMYADIDMDHPEVVNELRNWGVWYTNTLGLDGFRIDAVKHIKYSFTRDWINHVRSATGKNMFAVAEFWKNDLGAIENYLQKTNWNHSVFDVPLHYNLYNASKSGGNYDMRNIFNGTVVQRHPSHAVTFVDNHDSQPEEALESFVEEWFKPLAYALTLTREQGYPSVFYGDYYGIPTRGVPAMRSKIDPILEARQKYAYGPQHDYLDHPDVIGWTREGDSSHPKSGLATLITDGPGGSKRMYAGLKNAGETWYDITGNRSDTVKIGSDGWGEFHVNDGSVSIYVQK

SEQ ID NO: 37823 - protein, 480 aa, Synthetic construct
NGTMMQYFEWYLPNDGNHWNRLNSDASNLKSKGITAVWIPPAWKGASQNDVGYGAYDLYDLGEFNQKGTVRTKYGTRSQLQAAVTSLKNNGIQVYGDVVMNHKGGADATEMVRAVEVNPNNRNQEVTGEYTIEAWTRFDFPGRGNTHSSFKWRWYHFDGVDWDQSRRLNNRIYKFRGHGKAWDWEVDTENGNYDYLMYADIDMDHPEVVNELRNWGVWYTNTLGLDGFRIDAVKHIKYSFTRDWINHVRSATGKNMFAVAEFWKNDLGAIENYLQKTNWNHSVFDVPLHYNLYNASKSGGNYDMRNIFNGTVVQRHPSHAVTFVDNHDSQPEEALESFVEEWFKPLAYALTLTREQGYPSVFYGDYYGIPTHGVPAMRHKIDPILEARQKYAYGPQHDYLDHPDVIGWTREGDSSHPKSGLATLITDGPGGSKRMYAGLKNAGETWYDITGNRSDTVKIGSDGWGEFHVNDGSVSIYVQK

SEQ ID NO: 37824 - protein, 480 aa, Synthetic construct
NGTMMQYFEWYLPNDGNHWNRLNSDASNLKSKGITAVWIPPAWKGASQNDVGYGAYDLYDLGEFNQKGTVRTKYGTRSQLQAAVTSLKNNGIQVYGDVVMNHKGGADATEMVRAVEVNPNNRNQEVTGEYTIEAWTRFDFPGRGNTHSSFKWRWYHFDGVDWDQSRRLNNRIYKFRGHGKAWDWEVDTENGNYDYLMYADIDMDHPEVVNELRNWGVWYTNTLGLDGFRIDAVKHIKYSFTRDWINHVRSATGKNMFAVAEFWKNDLGAIENYLQKTNWNHSVFDVPLHYNLYNASKSGGNYDMRNIFNGTVVQRHPMHAVTFVDNHDSQPEEALESFVEEWFKPLAYALTLTREQGYPSVFYGDYYGIPTHGVPAMRSKIDPILEARQKYAYGPQHDYLDHPDVIGWTREGDSSHPKSGLATLITDGPGGSKRMYAGLKNAGETWYDITGNRSDTVKIGSDGWGEFHVNDGSVSIYVQK

SEQ ID NO: 37825 - protein, 480 aa, Synthetic construct
NGTMMQYFEWYLPNDGNHWNRLNSDASNLKSKGITAVWIPPAWKGASQNDVGYGAYDLYDLGEFNQKGTVRTKYGTRSQLQAAVTSLKNNGIQVYGDVVMNHKGGADATEMVRAVEVNPNNRNQEVTGEYLIEAWTRFDFPGRGNTHSSFKWRWYHFDGVDWDQSRRLNNRIYKFRGHGKAWDWEVDTENGNYDYLMYADIDMDHPEVVNELRNWGVWYTNTLGLDGFRIDAVKHIKYSFTRDWINHVRSATGKNMFAVAEFWKNDLGAIENYLQKTNWNHSVFDVPLHYNLYNASKSGGNYDMRNIFNGTVVQRHPSHAVTFVDNHDSQPEEALESFVEEWFKPLAYALTLTREQGYPSVFYGDYYGIPTHGVPAMRSKIDPILEARQKYAYGPQHDYLDHPDVIGWTREGDSSHPKSGLATLITDGPGGSKRMYAGLKNAGETWYDITGNRSDTVKIGSDGWGEFHVNDGSVSIYVQK

SEQ ID NO: 37826 - protein, 480 aa, Synthetic construct
NGTMMQYFEWYLPNDGNHWNRLNSDASNLKSKGITAVWIPPAWKGASQNDVGYGAYDLYDLGEFNQKGTVRTKYGTRSQLQAAVTSLKNNGIQVYGDVVMNHKGGADATEMVRAVEVNPNNRNQEVTGEYTIEAWTRFHFPGRGNTHSSFKWRWYHFDGVDWDQSRRLNNRIYKFRGHGKAWDWEVDTENGNYDYLMYADIDMDHPEVVNELRNWGVWYTNTLGLDGFRIDAVKHIKYSFTRDWINHVRSATGKNMFAVAEFWKNDLGAIENYLQKTNWNHSVFDVPLHYNLYNASKSGGNYDMRNIFNGTVVQRHPSHAVTFVDNHDSQPEEALESFVEEWFKPLAYALTLTREQGYPSVFYGDYYGIPTHGVPAMRSKIDPILEARQKYAYGPQHDYLDHPDVIGWTREGDSSHPKSGLATLITDGPGGSKRMYAGLKNAGETWYDITGNRSDTVKIGSDGWGEFHVNDGSVSIYVQK

SEQ ID NO: 37827 - protein, 480 aa, Synthetic construct
NGTMMQYFEWYLPNDGNHWNRLNSDASNLKSKGITAVWIPPAWKGASQNDTGYGAYDLYDLGEFNQKGTVRTKYGTRSQLQAAVTSLKNNGIQVYGDVVMNHKGGADATEMVRAVEVNPNNRNQEVTGEYTIEAWTRFDFPGRGNTHSSFKWRWYHFDGVDWDQSRRLNNRIYKFRGHGKAWDWEVDTENGNYDYLMYADIDMDHPEVVNELRNWGVWYTNTLGLDGFRIDAVKHIKYSFTRDWINHVRSATGKNMFAVAEFWKNDLGAIENYLQKTNWNHSVFDVPLHYNLYNASKSGGNYDMRNIFNGTVVQRHPSHAVTFVDNHDSQPEEALESFVEEWFKPLAYALTLTREQGYPSVFYGDYYGIPTHGVPAMRSKIDPILEARQKYAYGPQHDYLDHPDVIGWTREGDSSHPKSGLATLITDGPGGSKRMYAGLKNAGETWYDITGNRSDTVKIGSDGWGEFHVNDGSVSIYVQK

SEQ ID NO: 37828 - protein, 480 aa, Synthetic construct
NGTMMQYFEWYLPNDGNHWNRLNSDASNLKSKGITAVWIPPAWKGASQNDVGYGAYDLYDLGEFNQKGTVRTKYGTRSQLQAAVTSLKNNGIQVYGDVVMNHKGGADATEMVRAVEVNPNNRNQEITGEYTIEAWTRFDFPGRGNTHSSFKWRWYHFDGVDWDQSRRLNNRIYKFRGHGKAWDWEVDTENGNYDYLMYADIDMDHPEVVNELRNWGVWYTNTLGLDGFRIDAVKHIKYSFTRDWINHVRSATGKNMFAVAEFWKNDLGAIENYLQKTNWNHSVFDVPLHYNLYNASKSGGNYDMRNIFNGTVVQRHPSHAVTFVDNHDSQPEEALESFVEEWFKPLAYALTLTREQGYPSVFYGDYYGIPTHGVPAMRSKIDPILEARQKYAYGPQHDYLDHPDVIGWTREGDSSHPKSGLATLITDGPGGSKRMYAGLKNAGETWYDITGNRSDTVKIGSDGWGEFHVNDGSVSIYVQK

SEQ ID NO: 37829 - protein, 480 aa, Synthetic construct
NGTMMQYFEWYLPNDGNHWNRLNSDASNLKSKGITAVWIPPAWKGASQNDVGYGAYDLYDLGEFNQKGTVRTKYGTRSQLQAAVTSLKNNGIQVYGDVVMNHKGGADATEMVRAVEVNPNNRNQEVTGEYTIEAWTRFDFPGRGNTHSSFKWRWYHFDGVDWDQSRRLNNRIYKFRGHGKAWDWEVDSEFGNYDYLMYADIDMDHPEVVNELRNWGVWYTNTLGLDGFRIDAVKHIKYSFTRDWINHVRSATGKNMFAVAEFWKNDLGAIENYLQKTNWNHSVFDVPLHYNLYNASKSGGNYDMRNIFNGTVVQRHPSHAVTFVDNHDSQPEEALESFVEEWFKPLAYALTLTREQGYPSVFYGDYYGIPTHGVPAMRSKIDPILEARQKYAYGPQHDYLDHPDVIGWTREGDSSHPKSGLATLITDGPGGSKRMYAGLKNAGETWYDITGNRSDTVKIGSDGWGEFHVNDGSVSIYVQK

SEQ ID NO: 37830 - protein, 480 aa, Bacillus sp.
NGTMMQYFEWYLPNDGNHWNRLNSDASNLKSKGITAVWIPPAWKGASQNDVGYGAYDLYDLGEFNQKGTVRTKYGTRSQLQAAVTSLKNNGIQVYGDVVMNHKGGADATEMVRAVEVNPNNRNQEVTGEYTIEAWTRFDFPGRGNTHSSFKWRWYHFDGVDWDQSRRLNNRIYKFRGHGKAWDWEVDTEFGNYDYLMYADYDMDHPEVVNELRKWGVWYTNTLGLDGFRIDAVKHIKYSFTRDWINHVRSATGKNMFAVAEFWKNDLGAIENYLQKTNWNHSVFDVPLHYNLYNASKSGGNYDMRNIFNGTVVQRHPSHAVTFVDNHDSQPEEALESFVEEWFKPLAYALTLTREQGYPSVFYGDYYGIPTHGVPAMRSKIDPILEARQKYAYGPQHDYLDHPDVIGWTREGDSSHPKSGLATLITDGPGGSKRMYAGLKNAGETWYDITGNRSDTVKIGSDGWGEFHVNDGSVSIYVQK

SEQ ID NO: 37831 - protein, 480 aa, Synthetic construct
NGTMMQYFEWYLPNDGNHWNRLRSDASNLKSKGITAVWIPPAWKGASQNDVGYGAYDLYDLGEFNQKGTVRTKYGTRSQLQAAVTSLKNNGIQVYGDVVMNHKGGADATEMVRAVEVNPNNRNQEVTGEYTIEAWTRFDFPGRGNTHSSFKWRWYHFDGVDWDQSRRLNNRIYKFRGHGKAWDWEVDTENGNYDYLMYADIDMDHPEVVNELRNWGVWYTNTLGLDGFRIDAVKHIKYSFTRDWINHVRSATGKNMFAVAEFWKNDLGAIENYLQKTNWNHSVFDVPLHYNLYNASKSGGNYDMRNIFNGTVVQRHPSHAVTFVDNHDSQPEEALESFVEEWFKPLAYALTLTREQGYPSVFYGDYYGIPTHGVPAMRSKIDPILEARQKYAYGPQHDYLDHPDVIGWTREGDSSHPKSGLATLITDGPGGSKRMYAGLKNAGETWYDITGNRSDTVKIGSDGWGEFHVNDGSVSIYVQK

SEQ ID NO: 37832 - protein, 480 aa, Synthetic construct
NGTMMQYFEWYLPNDGNHWNRLNSDASNLKSKGITAVWIPPAVKGASQNDVGYGVYDLYDLGEFNQKGTVRTKYGTRSQLQAAVTSLKNNGIQVYGDVVMNHKGGADATEMVRAVEVNPNNRNQEVTGEYTIEAWTRFDFPGRGNTHSSFKWRWYHFDGVDWDQSRRLNNRIYKFRGHGKAWDWEVDTENGNYDYLMYADIDMDHPEVVNELRNWGVWYTNTLGLDGFRIDAVKHIKYSFTRDWINHVRSATGKNMFAVAEFWKNDLGAIENYLQKTNWNHSVFDVPLHYNLYNASKSGGNYDMRNIFNGTVVQRHPSHAVTFVDNHDSQPEEALESFVEEWFKPLAYALTLTREQGYPSVFYGDYYGIPTHGVPAMRSKIDPILEARQKYAYGPQHDYLDHPDVIGWTREGDSSHPKSGLATLITDGPGGSKRMYAGLKNAGETWYDITGNRSDTVKIGSDGWGEFHVNDGSVSIYVQK

SEQ ID NO: 37833 - protein, 480 aa, Synthetic construct
NGTMMQYFEWYLPNDGNHWNRLNSDASNLKSKGITAVWIPPAWKGASQNDVGYGAYDLYDLGEFNQKGTVRTKYGTRSQLQAAVTSLKNNGIQVYGDVVMNHKGGADATEMVRAVEVNPNNRNQEVTGEYTIEAWTRFDFPGRGNTHSSFKWRWYHFDGVDWDQSRRLNNRIYKFRGHGKAWDWEVDTENGNYDYLMYADIDMDHPEVVNELRNWGVWYTNTLGLDGFRIDAVKHIKYSFTRDWINHVRSATGKGMFAVAEFWKNDLGAIENYLQKTNWNHSVFDVPLHYNLYNASKSGGNYDMRNIFNGTVVQRHPSHAVTFVDNHDSQPEEALESFVEEWFKPLAYALTLTREQGYPSVFYGDYYGIPTHGVPAMRSKIDPILEARQKYAYGPQHDYLDHPDVIGWTREGDSSHPKSGLATLITDGPGGSKRMYAGLKNAGETWYDITGNRSDTVKIGSDGWGEFHVNDGSVSIYVQK

SEQ ID NO: 37834 - protein, 480 aa, Bacillus sp.
NGTMMQYFEWYLPNDGNHWNRLNSDASNLKSKGITAVWIPPAWKGASQNDVGYGAYDLYDLGEFNQKGTVRTKYGTRSQLQAAVTSLKNNGIQVYGDVVMNHKGGADATEMVRAVEVNPNNRNQEVTGEYTIEAWTRFDFPGRGNTHSSFKWRWYHFDGVDWDQSRRLNNRIYKFRGHGKAWDWEVDTEFGNYDYLMYADYDMDHPEVVNELRNWGVWYTNTLGLDGFRIDAVKHIKYSFTRDWINHVRSATGKNMFAVAEFWQNDLGHIENYLQKTNWNHSVFDVPLHYNLYNASKSGGNYDMRNIFNGTVVQRHPSHAVTFVDNHDSQPEEALESFVEEWFKPLAYALTLTREQGYPSVFYGDYYGIPTHGVPAMRSKIDPILEARQKYAYGPQHDYLDHPDVIGWTREGDSSHPKSGLATLITDGPGGSKRMYAGLKNAGETWYDITGNRSDTVKIGSDGWGEFHVNDGSVSIYVQK

SEQ ID NO: 37835 - protein, 480 aa, Synthetic construct
NGTMMQYFEWYLPNDGNHWNRLNSDASNLKSKGITAVWIPPAWKGASQNDVGYGAYDLYDLGEFNQKGTVRTKYGTRSQLQAAVTSLKNNGIQVYGDVVMNHKGGADATEMVRAVEVNPNNRNQEVTGEYTIEAWTRFDFPGRGNTHSSFKWRWYHFDGVDWDQSRRLNNRIYKFRGHGKAWDWEVDTEFGNYDYLMYADYDYDHPEVVNELRNWGVWYTNTLGLDGFRIDAVKHIKYSFTRDWINHVRSATGKNMFAVAEFWKNDLGAIENYLQKTNWNHSVFDVPLHYNLYNASKSGGNYDMRNIFNGTVVQRHPSHAVTFVDNHDSQPEEALESFVEEWFKPLAYALTLTREQGYPSVFYGDYYGIPTHGVPAMRSKIDPILEARQKYAYGPQHDYLDHPDVIGWTREGDSSHPKSGLATLITDGPGGSKRMYAGLKNAGETWYDITGNRSDTVKIGSDGWGEFHVNDGSVSIYVQK

SEQ ID NO: 37836 - protein, 480 aa, Synthetic construct
NGTMMQYFEWYLPNDGNHWNRLNSDASNLKSKGITAVWIPPAWKGASQNDVGYGAYDLYDLGEFNQKGTVRTKYGTRSQLQAAVTSLKNNGIQVYGDVVMNHKGGADATEMVRAVEVNPNNRNQEVTGEYTIEAWTRFDFPGRGNTHSSFKWRWYHFDGVDWDQSRRFQNRIYKFRGHGKAWDWEVDTENGNYDYLMYADIDMDHPEVVNELRNWGVWYTNTLGLDGFRIDAVKHIKYSFTRDWINHVRSATGKNMFAVAEFWKNDLGAIENYLQKTNWNHSVFDVPLHYNLYNASKSGGNYDMRNIFNGTVVQRHPSHAVTFVDNHDSQPEEALESFVEEWFKPLAYALTLTREQGYPSVFYGDYYGIPTHGVPAMRSKIDPILEARQKYAYGPQHDYLDHPDVIGWTREGDSSHPKSGLATLITDGPGGSKRMYAGLKNAGETWYDITGNRSDTVKIGSDGWGEFHVNDGSVSIYVQK

SEQ ID NO: 37837 - protein, 480 aa, Synthetic construct
NGTMMQYFEWYLPNDGNHWNRLNSDASYLKSKGITAVWIPPAWKGASQNDVGYGAYDLYDLGEFNQKGTVRTKYGTRSQLQAAVTSLKNNGIQVYGDVVMNHKGGADATEMVRAVEVNPNNRNQEVTGEYTIEAWTRFDFPGRGNTHSSFKWRWYHFDGVDWDQSRRLNNRIYKFRGHGKAWDWEVDTENGNYDYLMYADIDMDHPEVVNELRNWGVWYTNTLGLDGFRIDAVKHIKYSFTRDWINHVRSATGKNMFAVAEFWKNDLGAIENYLQKTNWNHSVFDVPLHYNLYNASKSGGNYDMRNIFNGTVVQRHPSHAVTFVDNHDSQPEEALESFVEEWFKPLAYALTLTREQGYPSVFYGDYYGIPTHGVPAMRSKIDPILEARQKYAYGPQHDYLDHPDVIGWTREGDSSHPKSGLATLITDGPGGSKRMYAGLKNAGETWYDITGNRSDTVKIGSDGWGEFHVNDGSVSIYVQK

SEQ ID NO: 37838 - protein, 480 aa, Synthetic construct
NGTMMQYFEWYLPNDGNHWNRLNSDASNLKSKGITAVWIPPAWKGASQNDVGYGAYDLYDLGEFNQKGTVRTKYGTRSQLQAAVTSLKNNGIQVYGDVVINHKGGADATEMVRAVEVNPNNRNQEVTGEYTIEAWTRFDFPGRGNTHSSFKWRWYHFDGVDWDQSRRLNNRIYKFRGHGKAWDWEVDTENGNYDYLMYADYDMDHPEVVNELRNWGVWYTNTLGLDGFRIDAVKHIKYSFIRDWINHVRSATGKNMFAVAEFWKNDLGAIENYLQKTNWNHSVFDVPLHYNLYNASKSGGNYDMRNIFNGTVVQRHPSHAVTFVDNHDSQPEEALESFVEEWFKPLAYALTLTREQGYPSVFYGDYYGIPTHGVPAMRSKIDPILEARQKYAYGPQHDYLDHPDVIGWTREGDSSHPKSGLATLITDGPGGSKRMYAGLKNAGETWYDITGNRSDTVKIGSDGWGEFHVNDGSVSIYVQK

SEQ ID NO: 37839 - protein, 480 aa, Synthetic construct
NGTMMQYFEWYLPNDGNHWNRLNSDASNLKSKGITAVWIPPAWKGASQNDVGYGAYDLYDLGEFNQKGTVRTKYGTRSQLQAAVTSLKNNGIQVYGDVVMNHKGGADATEMVRAVEVNPNNRNQEVTGEYTIEAWTRFDFPGRGNTHSSFKWRWYHFDGTDWDQSRRLNNRIYKFRGHGKAWDWEVDTENGNYDYLMYADIDMDHPEVVNELRNWGVWYTNTLGLDGFRIDAVKHIKYSFTRDWINHVRSATGKNMFAVAEFWKNDLGAIENYLQKTNWNHSVFDVPLHYNLYNASKSGGNYDMRNIFNGTVVQRHPSHAVTFVDNHDSQPEEALESFVEEWFKPLAYALTLTREQGYPSVFYGDYYGIPTHGVPAMRSKIDPILEARQKYAYGPQHDYLDHPDVIGWTREGDSSHPKSGLATLITDGPGGSKRMYAGLKNAGETWYDITGNRSDTVKIGSDGWGEFHVNDGSVSIYVQK

SEQ ID NO: 37840 - protein, 480 aa, Bacillus sp.
NGTMMQYFEWYLPNDGNHWNRLNSDASNLKSKGITAVWIPPAWKGASQNDVGYGAYDLYDLGEFNQKGTVRTKYGTRSQLQAAVTSLKNNGIQVYGDVVMNHKGGADATEMVRAVEVNPNNRNQEVTGEYTIEAWTRFDFPGRGNTHSSFKWRWYHFDGVDWDQSRQITNRIYKFRGHGKAWDWEVDTEFGNYDYLMYADYDMDHPEVVNELRNWGVWYTNTLGLDGFRIDAVKHIKYSFTRDWINHVRSATGKNMFAVAEFWKNDLGAIENYLQKTNWNHSVFDVPLHYNLYNASKSGGNYDMRNIFNGTVVQRHPSHAVTFVDNHDSQPEEALESFVEEWFKPLAYALTLTREQGYPSVFYGDYYGIPTHGVPAMRSKIDPILEARQKYAYGPQHDYLDHPDVIGWTREGDSSHPKSGLATLITDGPGGSKRMYAGLKNAGETWYDITGNRSDTVKIGSDGWGEFHVNDGSVSIYVQK

SEQ ID NO: 37841 - protein, 480 aa, Bacillus sp.
NGTMMQYFEWYLPNDGNHWNRLNSDASNLKSKGITAVWIPPAWKGLSQNDVGYGAYDLYDLGEFNQKGTVRTKYGTRSQLQAAVTSLKNNGIQVYGDVVMNHKGGADATEMVRAVEVNPNNRNQEVTGEYTIEAWTRFDFPGRGNTHSSFKWRWYHFDGVDWDQSRRLQNRIYKFRGHGKAWDWEVDTEFGNYDYLMYADYDMDHPEVVNELRNWGVWYTNTLGLDGFRIDAVKHIKYSFTRDWINHVRSATGKNMFAVAEFWKNDLGAIENYLQKTNWNHSVFDVPLHYNLYNASKSGGNYDMRNIFNGTVVQRHPSHAVTFVDNHDSQPEEALESFVEEWFKPLAYALTLTREQGYPSVFYGDYYGIPTHGVPAMRSKIDPILEARQKYAYGPQHDYLDHPDVIGWTREGDSSHPKSGLATLITDGPGGSKRMYAGLKNAGETWYDITGNRSDTVKIGSDGWGEFHVNDGSVSIYVQK

SEQ ID NO: 37842 - protein, 480 aa, Bacillus sp.
NGTMMQYFEWYLPNDGNHWNRLNSDASNLKSKGITAVWIPPAWKGASQNDVGYGAYDLYDLGEFNQKGTVRTKYGTRSQLQAAVTSLKNNGIQVYGDVVMNHKGGADATEMVRAVEVNPNNRNQEVTGEYTIEAWTRFDFPGRGNTHSSFKWRWYHFDGVDWDQSRRLNNRIYKFRGHGKAWDWEVDTEFGNYDYLMYADYDMDHPEVVNELRNWGVWYTNTLGLDGFRIDAVKHIKYSFTRDWINHVRSATGKNMFAVAEFWQNDLGLIENYLQKTNWNHSVFDVPLHYNLYNASKSGGNYDMRNIFNGTVVQRHPSHAVTFVDNHDSQPEEALESFVEEWFKPLAYALTLTREQGYPSVFYGDYYGIPTHGVPAMRSKIDPILEARQKYAYGPQHDYLDHPDVIGWTREGDSSHPKSGLATLITDGPGGSKRMYAGLKNAGETWYDITGNRSDTVKIGSDGWGEFHVNDGSVSIYVQK

SEQ ID NO: 37843 - protein, 480 aa, Synthetic construct
NGTMMQYFEWYLPNDGNHWNRLNSDASNLKSKGITAVWIPPAWKGASQNDVGYGAYDLYDLGEFNQKGTVRTKYGTRSQLQAAVTSLKNNGIQVYGDVVMNHKGGADATEMVRAVEVNPNNRNQEVTGEYTIEAWTRFDFPGRGNTHSSFKWRWYHFDGVDWDQSRRLNNRIYKFRGHGKAWDWEVDTEFGNYDYLMYADYDMDHPEVVNELRNWGVWYTNTLGLDGFRIDAVKHIKYSFTRDWINHVRSATGKNMFAVAEFWQNDLGSIENYLQKTNWNHSVFDVPLHYNLYNASKSGGNYDMRNIFNGTVVQRHPSHAVTFVDNHDSQPEEALESFVEEWFKPLAYALTLTREQGYPSVFYGDYYGIPTHGVPAMRSKIDPILEARQKYAYGPQHDYLDHPDVIGWTREGDSSHPKSGLATLITDGPGGSKRMYAGLKNAGETWYDITGNRSDTVKIGSDGWGEFHVNDGSVSIYVQK

SEQ ID NO: 37844 - protein, 480 aa, Synthetic construct
NGTMMQYFEWYLPNDGNHWNRLNSDASNLKSKGITAVWIPPAWKGASQNDVGYGAYDLYDLGEFNQKGTVRTKYGTRSQLQAAVTSLKNNGIQVYGDVVINHKGGADATEMVRAVEVNPNNRNQEVTGEYTIEAWTRFDFPGRGNTHSSFKWRWYHFDGVDWDQSRRLNNRIYKFRGHGKAWDWEVDTENGNYDYLMYADIDMDHPEVVNELRNWGVWYTNTLGLDGFRIDAVKHIKYSFTRDWINHVRSATGKNMFAVAEFWKNDLGAIENYLQKTNWNHSVFDVPLHYNLYNASKSGGNYDMRNIFNGTVVQRHPSHAVTFVDNHDSQPEEALESFVEEWFKPLAYALTLTREQGYPSVFYGDYYGIPTHGVPAMRSKIDPILEARQKYAYGPQHDYLDHPDVIGWTREGDSSHPKSGLATLITDGPGGSKRMYAGLKNAGETWYDITGNRSDTVKIGSDGWGEFHVNDGSVSIYVQK

SEQ ID NO: 37845 - protein, 480 aa, Synthetic construct
NGTMMQYFEWYLPNDGNHWNRLNSDASNLKSKGITAVWIPPAWKGASQNDVGYGAYDLYDLGEFNQKGTVRTKYGTRSQLQAAVTSLKNNGIQVYGDVVMNHKGGADATEMVRAVEVNPNNRNQEVTGEYTIEAWTRFDFPGRGNTHSSFKWRWYHFDGVDWDQSRQTSNRIYKFRGHGKAWDWEVDTEFGNYDYLMYADYDMDHPEVVNELRNWGVWYTNTLGLDGFRIDAVKHIKYSFTRDWINHVRSATGKNMFAVAEFWKNDLGAIENYLQKTNWNHSVFDVPLHYNLYNASKSGGNYDMRNIFNGTVVQRHPSHAVTFVDNHDSQPEEALESFVEEWFKPLAYALTLTREQGYPSVFYGDYYGIPTHGVPAMRSKIDPILEARQKYAYGPQHDYLDHPDVIGWTREGDSSHPKSGLATLITDGPGGSKRMYAGLKNAGETWYDITGNRSDTVKIGSDGWGEFHVNDGSVSIYVQK

SEQ ID NO: 37846 - protein, 480 aa, Synthetic construct
NGTMMQYFEWYLPNDGNHWNRLNSDASNLKSKGITAVWIPPAWKGASQNDVGYGAYDLYDLGEFNQKGTVRTKYGTRSQLQAAVTSLKNNGIQVYGDVVMNHKGGADATEMVRAVEVNPNNRNQEVTGEYTIEAWTRFDFPGRGNTHSSFKWRWYHFDGVDWDQSRRLNNRIYKFRGHGKAWDWEVDTENGNYDYLMYADLDFDHPEVVNEIRNWGVWYTNTLGLDGFRIDAVKHIKYSFTRDWINHVRSATGKNMFAVAEFWKNDLGAIENYLQKTNWNHSVFDVPLHYNLYNASKSGGNYDMRNIFNGTVVQRHPSHAVTFVDNHDSQPEEALESFVEEWFKPLAYALTLTREQGYPSVFYGDYYGIPTHGVPAMRSKIDPILEARQKYAYGPQHDYLDHPDVIGWTREGDSSHPKSGLATLITDGPGGSKRMYAGLKNAGETWYDITGNRSDTVKIGSDGWGEFHVNDGSVSIYVQK

SEQ ID NO: 37847 - protein, 480 aa, Synthetic construct
NGTMMQYFEWYLPNDGNHWNRLNSDASNLKSKGITAVWIPPAWKGASQNDVGYGAYDLYDLGEFNQKGTVRTKYGTRSQLQAAVTSLKNNGIQVYGDVVMNHKGGADATEMVRAVEVNPNNRNQEVTGEYTIEAWTRFDFPGRGNTHSSFKWRWYHFDGVDWDQSRRLNNRIYKFRGHGKAWDWEVDTEFGNYDYLMYADYDMDHPEVVNELRNWGVWYTNTLGLDGFRIDAVKHIKYSFTRDWINHVRSATGKNMFAVAEFWKNDLGAIENYLQKTNWNHSVFDVPLHYNLYNASKSGGNYDMRNIFNGTVVQRHPSHAVTFVDNHDSQPEEALESFVEEWFKPLAYALTLTREQGYPSVFYGDYYGIPTHGVPAMKSKIDPILEARQKYAYGPQHDYLDHPDVIGWTREGDSSHPKSGLATLITDGPGGSKRMYAGLKNAGETWYDITGNRSDTVKIGSDGWGEFHVNDGSVSIYVQK

SEQ ID NO: 37848 - protein, 480 aa, Bacillus sp.
NGTMMQYFEWYLPNDGNHWNRLNSDASNLKSKGITAVWIPPAWKGASQNDVGYGAYDLYDLGEFNQKGTVRTKYGTRSQLQAAVTSLKNNGIQVYGDVVMNHKGGADATEMVRAVEVNPNNRNQEVTGEYTIEAWTRFDFPGRGNTHSSFKWRWYHFDGVDWDQSRRLNNRIYKFRGHGKAWDWEVDTEFGNYDYLMYADYDMDHPEVVNELRNWGVWYTNTLGLDGFRIDAVKHIKYSFTRDWINHVRSATGKNMFAVAEFWQNDLGYIENYLQKTNWNHSVFDVPLHYNLYNASKSGGNYDMRNIFNGTVVQRHPSHAVTFVDNHDSQPEEALESFVEEWFKPLAYALTLTREQGYPSVFYGDYYGIPTHGVPAMRSKIDPILEARQKYAYGPQHDYLDHPDVIGWTREGDSSHPKSGLATLITDGPGGSKRMYAGLKNAGETWYDITGNRSDTVKIGSDGWGEFHVNDGSVSIYVQK

SEQ ID NO: 37849 - protein, 480 aa, Synthetic construct
NGTMMQYFEWYLPNDGNHWNRLNSDASNLKSKGITAVWIPPAWKGASQNDVGYGAYDLYDLGEFNQKGTVRTKYGTRSQLQAAVTSLKNNGIQVYGDVVMNHKGGADATEMVRAVEVNPNNRNQEVTGEYTIEAWTRFDFPGRGNTHSSFKWRWYHFDGVDWDQSRRLNNRIYKFRGHGKAWDWEVDTENGNYDYLMYADIDMDHPEVVNEMRNWGVWYTNTLGLDGFRIDAVKHIKYSFTRDWINHVRSATGKNMFAVAEFWKNDLGAIENYLQKTNWNHSVFDVPLHYNLYNASKSGGNYDMRNIFNGTVVQRHPSHAVTFVDNHDSQPEEALESFVEEWFKPLAYALTLTREQGYPSVFYGDYYGIPTHGVPAMRSKIDPILEARQKYAYGPQHDYLDHPDVIGWTREGDSSHPKSGLATLITDGPGGSKRMYAGLKNAGETWYDITGNRSDTVKIGSDGWGEFHVNDGSVSIYVQK

SEQ ID NO: 37850 - protein, 480 aa, Synthetic construct
NGTMMQYFEWYLPNDGNHWNRLNSDASNLKSKGITAVWIPPAWKGASQNDVGYGAYDLYDLGEFNQKGTVRTKYGTRSQLQAAVTSLKNNGIQVYGDVVMNHKGGADATEMVQAVEVNPNNRNQEVTGEYTIEAWTRFDFPGRGNTHSSFKWRWYHFDGVDWDQSRRLNNRIYKFRGHGKAWDWEVDTENGNYDYLMYADIDMDHPEVVNELRNWGVWYTNTLGLDGFRIDAVKHIKYSFTRDWINHVRSATGKNMFAVAEFWKNDLGAIENYLQKTNWNHSVFDVPLHYNLYNASKSGGNYDMRNIFNGTVVQRHPSHAVTFVDNHDSQPEEALESFVEEWFKPLAYALTLTREQGYPSVFYGDYYGIPTHGVPAMRSKIDPILEARQKYAYGPQHDYLDHPDVIGWTREGDSSHPKSGLATLITDGPGGSKRMYAGLKNAGETWYDITGNRSDTVKIGSDGWGEFHVNDGSVSIYVQK

SEQ ID NO: 37851 - protein, 480 aa, Bacillus sp.
NGTMMQYFEWYLPNDGNHWNRLNSDASNLKSKGITAVWIPPAWKGLSQNDVGYGAYDLYDLGEFNQKGTVRTKYGTRSQLQAAVTSLKNNGIQVYGDVVMNHKGGADATEMVRAVEVNPNNRNQEVTGEYTIEAWTRFDFPGRGNTHSSFKWRWYHFDGVDWDQSRRLNNRIYKFRGHGKAWDWEVDTEFGNYDYLMYADYDMDHPEVVNELRNWGVWYTNTLGLDGFRIDAVKHIKYSFTRDWINHVRSATGKNMFAVAEFWKNDLGAIENYLQKTNWNHSVFDVPLHYNLYNASKSGGNYDMRNIFNGTVVQRHPSHAVTFVDNHDSQPEEALESFVEEWFKPLAYALTLTREQGYPSVFYGDYYGIPTHGVPAMRSKIDPILEARQKYAYGPQHDYLDHPDVIGWTREGDSSHPKSGLATLITDGPGGSKRMYAGLKNAGETWYDITGNRSDTVKIGSDGWGEFHVNDGSVSIYVQK

SEQ ID NO: 37852 - protein, 480 aa, Synthetic construct
NGTMMQYFEWYLPNDGNHWNRLNSDASNLKSKGITAVWIPPAWKGASQNDVGYGAYDLYDLGEFNQKGTVRTKYGTRSQLQAAVTSLKNNGIQVYGDVVMNHKGGADATEMVRAVEVNPNNRNQEVTGEYTIEAWTRFDFPGRGNTHSSFKWRWYHFDGVDWDQSRRIDNRIYKFRGHGKAWDWEVDTEFGNYDYLMYADYDMDHPEVVNELRNWGVWYTNTLGLDGFRIDAVKHIKYSFTRDWINHVRSATGKNMFAVAEFWKNDLGAIENYLQKTNWNHSVFDVPLHYNLYNASKSGGNYDMRNIFNGTVVQRHPSHAVTFVDNHDSQPEEALESFVEEWFKPLAYALTLTREQGYPSVFYGDYYGIPTHGVPAMRSKIDPILEARQKYAYGPQHDYLDHPDVIGWTREGDSSHPKSGLATLITDGPGGSKRMYAGLKNAGETWYDITGNRSDTVKIGSDGWGEFHVNDGSVSIYVQK

SEQ ID NO: 37853 - protein, 480 aa, Synthetic construct
NGTMMQYFEWYLPNDGNHWNRLNSDASNLKSKGITAVWIPPAWKGASQNDVGYGAYDLYDLGEFNQKGTVRTKYGTRSQLQAAVTSLKNNGIQVYGDVVMNHKGGADATEMVRAVEVNPNNRNQEVTGEYTIEAWTRFNFPGRGNTHSSFKWRWYHFDGVDWDQSRRLNNRIYKFRGHGKAWDWEVDTENGNYDYLMYADIDMDHPEVVNELRNWGVWYTNTLGLDGFRIDAVKHIKYSFTRDWINHVRSATGKNMFAVAEFWKNDLGAIENYLQKTNWNHSVFDVPLHYNLYNASKSGGNYDMRNIFNGTVVQRHPSHAVTFVDNHDSQPEEALESFVEEWFKPLAYALTLTREQGYPSVFYGDYYGIPTHGVPAMRSKIDPILEARQKYAYGPQHDYLDHPDVIGWTREGDSSHPKSGLATLITDGPGGSKRMYAGLKNAGETWYDITGNRSDTVKIGSDGWGEFHVNDGSVSIYVQK

SEQ ID NO: 37854 - protein, 480 aa, Bacillus sp.
NGTMMQYFEWYLPNDGNHWNRLNSDASNLKSKGITAVWIPPAWKGASQNDVGYGAYDLYDLGEFNQKGTVRTKYGTRSQLQAAVTSLKNNGIQVYGDVVMNHKGGADATEMVRAVEVNPNNRNQEVTGEYTIEAWTRFDFPGRGNTHSSFKWRWYHFDGVDWDQSRETSNRIYKFRGHGKAWDWEVDTEFGNYDYLMYADYDMDHPEVVNELRNWGVWYTNTLGLDGFRIDAVKHIKYSFTRDWINHVRSATGKNMFAVAEFWKNDLGAIENYLQKTNWNHSVFDVPLHYNLYNASKSGGNYDMRNIFNGTVVQRHPSHAVTFVDNHDSQPEEALESFVEEWFKPLAYALTLTREQGYPSVFYGDYYGIPTHGVPAMRSKIDPILEARQKYAYGPQHDYLDHPDVIGWTREGDSSHPKSGLATLITDGPGGSKRMYAGLKNAGETWYDITGNRSDTVKIGSDGWGEFHVNDGSVSIYVQK

SEQ ID NO: 37855 - protein, 480 aa, Bacillus sp.
NGTMMQYFEWYLPNDGNHWNRLNSDASNLKSKGITAVWIPPAWKGASQNDVGYGAYDLYDLGEFNQKGTVRTKYGTRSQLQAAVTSLKNNGIQVYGDVVMNHKGGADATEMVRAVEVNPNNRNQEVTGEYTIEAWTRFDFPGRGNTHSSFKWRWYHFDGADWDQSRRLNNRIYKFRGHGKAWDWEVDTEFGNYDYLMYADYDMDHPEVVNELRNWGVWYTNTLGLDGFRIDAVKHIKYSFTRDWINHVRSATGKNMFAVAEFWKNDLGAIENYLQKTNWNHSVFDVPLHYNLYNASKSGGNYDMRNIFNGTVVQRHPSHAVTFVDNHDSQPEEALESFVEEWFKPLAYALTLTREQGYPSVFYGDYYGIPTHGVPAMRSKIDPILEARQKYAYGPQHDYLDHPDVIGWTREGDSSHPKSGLATLITDGPGGSKRMYAGLKNAGETWYDITGNRSDTVKIGSDGWGEFHVNDGSVSIYVQK

SEQ ID NO: 37856 - protein, 480 aa, Bacillus sp.
NGTMMQYFEWYLPNDGNHWNRLNSDASNLKSKGITAVWIPPAWKGASQNDVGYGAYDLYDLGEFNQKGTVRTKYGTRSQLQAAVTSLKNNGIQVYGDVVMNHKGGADATEMVRAVEVNPNNRNQEVTGEYTIEAWTRFDFPGRGNTHSSFKWRWYHFDGVDWDQSRRLNNRIYKFRGHGKAWDWEVDTEFGNYDYLMYADYDMDHPEVVNELRNWGVWYTNTLGLDGFRIDAVKHIKYSFTRDWINHVRSATGKNMFAVAEFWKNDLGAIENYLQKTNWNHSVFDVPLHYNLYNASKSGGNYDMRNIFNGTVVQRHPSHAVTFVDNHDSQPEEALESFVEEWFKPLAYALTLTRESGYPSVFYGDYYGIPTHGVPAMRSKIDPILEARQKYAYGPQHDYLDHPDVIGWTREGDSSHPKSGLATLITDGPGGSKRMYAGLKNAGETWYDITGNRSDTVKIGSDGWGEFHVNDGSVSIYVQK

SEQ ID NO: 37857 - protein, 480 aa, Synthetic construct
NGTMMQYFEWYLPNDGNHWNRLNSDASNLKSKGITAVWIPPAWKGASQNDVGYGAYDLYDLGEFNQKGTVRTKYGTRSQLQAAVTSLKNNGIQVYGDVVMNHKGGADATEMVRAVEVNPNNRNQEVTGEYTIEAWTRFDFPGRGNTHSSFKWRWYHFDGVDWDQSRRLNNRIYKFRGHGKAWDWEVDTENGNYDYLMYADFDFDHPEVVNEIRNWGVWYTNTLGLDGFRIDAVKHIKYSFTRDWINHVRSATGKNMFAVAEFWKNDLGAIENYLQKTNWNHSVFDVPLHYNLYNASKSGGNYDMRNIFNGTVVQRHPSHAVTFVDNHDSQPEEALESFVEEWFKPLAYALTLTREQGYPSVFYGDYYGIPTHGVPAMRSKIDPILEARQKYAYGPQHDYLDHPDVIGWTREGDSSHPKSGLATLITDGPGGSKRMYAGLKNAGETWYDITGNRSDTVKIGSDGWGEFHVNDGSVSIYVQK

SEQ ID NO: 37858 - protein, 480 aa, Bacillus sp.
NGTMMQYFEWYLPNDGNHWNRLNSDASNLKSKGITAVWIPPAWKGASQNDVGYGAYDLYDLGEFNQKGTVRTKYGTRSQLQAAVTSLKNNGIQVYGDVVMNHKGGADATEMVRAVEVNPNNRNQEVTGEYTIEAWTRFDFPGRGNTHSSFKWRWYHFDGVDWDQSRRLSNRIYKFRGHGKAWDWEVDTEFGNYDYLMYADYDMDHPEVVNELRNWGVWYTNTLGLDGFRIDAVKHIKYSFTRDWINHVRSATGKNMFAVAEFWKNDLGAIENYLQKTNWNHSVFDVPLHYNLYNASKSGGNYDMRNIFNGTVVQRHPSHAVTFVDNHDSQPEEALESFVEEWFKPLAYALTLTREQGYPSVFYGDYYGIPTHGVPAMRSKIDPILEARQKYAYGPQHDYLDHPDVIGWTREGDSSHPKSGLATLITDGPGGSKRMYAGLKNAGETWYDITGNRSDTVKIGSDGWGEFHVNDGSVSIYVQK

SEQ ID NO: 37859 - protein, 480 aa, Bacillus sp.
NGTMMQYFEWYLPNDGNHWNRLNSDASNLKSKGITAVWIPPAWKGASQNDVGYGAYDLYDLGEFNQKGTVRTKYGTRSQLQAAVTSLKNNGIQVYGDVVMNHKGGADATEMVRAVEVNPNNRNQEVTGEYTIEAWTRFDFPGRGNTHSSFKWRWYHFDGVDWDQSRRLNNRIYKFRGHGKAWDWEVDTEFGNYDYLMYADYDMDHPEVVNELRNWGVWYTNTLGLDGFRIDAVKHIKYSFTRDWINHVRSATGKNMFAVAEFWQNDLGMIENYLQKTNWNHSVFDVPLHYNLYNASKSGGNYDMRNIFNGTVVQRHPSHAVTFVDNHDSQPEEALESFVEEWFKPLAYALTLTREQGYPSVFYGDYYGIPTHGVPAMRSKIDPILEARQKYAYGPQHDYLDHPDVIGWTREGDSSHPKSGLATLITDGPGGSKRMYAGLKNAGETWYDITGNRSDTVKIGSDGWGEFHVNDGSVSIYVQK

SEQ ID NO: 37860 - protein, 480 aa, Synthetic construct
NGTMMQYFEWYLPNDGNHWNRLNSDASNLKSKGITAVWIPPAWKGASQNDVGYGAYDLYDLGEFNQKGTVRTKYGTRSQLQAAVTSLKNNGIQVYGDVVMNHKGGADATEMVRAVEVNPNNRNQEVTGEYTIEAWTRFDFPGRGNTHSSFKWRWYHFDGVDWDQSRRLNNRIYKFRGHGKAWDWEVDTENGNYDYLMYADIDMDHPEVVNELRNWGVWYTNTLGLDGFRIDAVKHIKYSFTRDWINHVRSATGKNMFAVAEFWKNDLGAIENYLQKTNWNHSVFDVPLHYNLYNASKSGGNYDMRNIFNGTVVQRHPLHAVTFVDNHDSQPEEALESFVEEWFKPLAYALTLTREQGYPSVFYGDYYGIPTHGVPAMRSKIDPILEARQKYAYGPQHDYLDHPDVIGWTREGDSSHPKSGLATLITDGPGGSKRMYAGLKNAGETWYDITGNRSDTVKIGSDGWGEFHVNDGSVSIYVQK

SEQ ID NO: 37861 - protein, 480 aa, Synthetic construct
NGTMMQYFEWYLPNDGNHWNRLNSDASNLKSHGITAVWIPPAWKGASQNDVGYGAYDLYDLGEFNQKGTVRTKYGTRSQLQAAVTSLKNNGIQVYGDVVMNHKGGADATEMVRAVEVNPNNRNQEVTGEYTIEAWTRFDFPGRGNTHSSFKWRWYHFDGVDWDQSRRLNNRIYKFRGHGKAWDWEVDTENGNYDYLMYADIDMDHPEVVNELRNWGVWYTNTLGLDGFRIDAVKHIKYSFTRDWINHVRSATGKNMFAVAEFWKNDLGAIENYLQKTNWNHSVFDVPLHYNLYNASKSGGNYDMRNIFNGTVVQRHPSHAVTFVDNHDSQPEEALESFVEEWFKPLAYALTLTREQGYPSVFYGDYYGIPTHGVPAMRSKIDPILEARQKYAYGPQHDYLDHPDVIGWTREGDSSHPKSGLATLITDGPGGSKRMYAGLKNAGETWYDITGNRSDTVKIGSDGWGEFHVNDGSVSIYVQK

SEQ ID NO: 37862 - protein, 480 aa, Synthetic construct
NGTMMQYFEWYLPNDGNHWNRLNSDASNLKSKGITAVWIPPAWKGASQNDVGYGAYDLYDLGEFNQKGTVRTKYGTRSQLQAAVTSLKNNGIQVYGDVVMNHKGGADATEMVRAVEVNPNNRNQEVTGEYTIEAWTRFDFPGRGNTHSSFKWRWYHFDGVDWDQSRRLNNRIYKFRGHGKAWDWEVDTENGNYDYLMYADIDMDHPEVVNELRNWGVWYTNTLGLDGFRIDAVKHIKYSFTRDWINHVRSATGKNMFAVAEFWKNDLGAIENYLQKTNWNHSVFDVPLHYNLYNASKSGGNYDMRNIFNGTVVQRHPSHAVTFVDNHDSQPEEALESFVEEWFKPLAYALTLTREGGYPSVFYGDYYGIPTHGVPAMRSKIDPILEARQKYAYGPQHDYLDHPDVIGWTREGDSSHPKSGLATLITDGPGGSKRMYAGLKNAGETWYDITGNRSDTVKIGSDGWGEFHVNDGSVSIYVQK

SEQ ID NO: 37863 - protein, 480 aa, Synthetic construct
NGTMMQYFEWYLPNDGNHWNRLNSDASNLKSKGITAVWIPPAWKGASQNDVGYGAYDLYDLGEFNQKGTVRTKYGTRSQLQAAVTSLKNNGIQVYGDVVMNHKGGADATEMVRAVEVNPNNRNQEVTGEYTIEAWTRFDFPGRGNTHSSFKWRWYHFDGVDWDQSRRLNNRIYKFRGHGKAWDWEVDTENGNYDYLMYADIDMDHPEVVNELRNWGVWYTNTLGLDGFRIDAVKHIKYSFTRDWINHVRSATGKNMFAVAEFWKNDLGAIENYLQKTNWNHSVFDVPLHYNLYNASKSGGNYDMRNIFNGTVVQRHPSHAVTFVDNHDSQPEEALESFVEEWFKPLAYALTLTREQGYPSVFYGDYYGIPTHGVPAMRSKIDPILEARQKYAYGPQHDYLDHPDVIGWTREGDSSHPKSGLATLITDGPGGSKRMYAGLKNAGETWYDITGNRSDTVKIGSDGWGEFHVNDGSVSIYVQK

SEQ ID NO: 37864 - protein, 480 aa, Synthetic construct
NGTMMQYFEWYVPNDGNHWNRLNSDASNLKSKGITAVWIPPAWKGASQNDVGYGAYDLYDLGEFNQKGTVRTKYGTRSQLQAAVTSLKNNGIQVYGDVVMNHKGGADATEMVRAVEVNPNNRNQEVTGEYTIEAWTRFDFPGRGNTHSSFKWRWYHFDGVDWDQSRRLNNRIYKFRGHGKAWDWEVDTENGNYDYLMYADIDMDHPEVVNELRNWGVWYTNTLGLDGFRIDAVKHIKYSFTRDWINHVRSATGKNMFAVAEFWKNDLGAIENYLQKTNWNHSVFDVPLHYNLYNASKSGGNYDMRNIFNGTVVQRHPSHAVTFVDNHDSQPEEALESFVEEWFKPLAYALTLTREQGYPSVFYGDYYGIPTHGVPAMRSKIDPILEARQKYAYGPQHDYLDHPDVIGWTREGDSSHPKSGLATLITDGPGGSKRMYAGLKNAGETWYDITGNRSDTVKIGSDGWGEFHVNDGSVSIYVQK

SEQ ID NO: 37865 - protein, 480 aa, Bacillus sp.
NGTMMQYFEWYLPNDGNHWNRLNSDASNLKSKGITAVWIPPAWKGASQNDVGYGAYDLYDLGEFNQKGTVRTKYGTRSQLQAAVTSLKNNGIQVYGDVVMNHKGGADATEMVRAVEVNPNNRNQEVTGEYTIEAWTRFDFPGRGNTHSSFKWRWYHFDGVDWDQSRRLNNRIYKFRGHGKAWDWEVDTEFGNYDYLMYADYDMDHPDVVNELRNWGVWYTNTLGLDGFRIDAVKHIKYSFTRDWINHVRSATGKNMFAVAEFWKNDLGAIENYLQKTNWNHSVFDVPLHYNLYNASKSGGNYDMRNIFNGTVVQRHPSHAVTFVDNHDSQPEEALESFVEEWFKPLAYALTLTREQGYPSVFYGDYYGIPTHGVPAMRSKIDPILEARQKYAYGPQHDYLDHPDVIGWTREGDSSHPKSGLATLITDGPGGSKRMYAGLKNAGETWYDITGNRSDTVKIGSDGWGEFHVNDGSVSIYVQK

SEQ ID NO: 37866 - protein, 480 aa, Synthetic construct
NGTMMQYFEWYLPNDGNHWNRLNSDASNLKSKGITAVWIPPAWKGASQNDVGYGAYDLYDLGEFNQKGTVRTKYGTRSQLQAAVTSLKNNGIQVYGDVVFNHKGGADATEMVRAVEVNPNNRNQEVTGEYTIEAWTRFDFPGRGNTHSSFKWRWYHFDGVDWDQSRRLNNRIYKFRGHGKAWDWEVDTENGNYDYLMYADYDMDHPEVVNELRNWGVWYTNTLGLDGFRIDAVKHIKYSFTRDWINHVRSATGKNMFAVAEFWKNDLGAIENYLQKTNWNHSVFDVPLHYNLYNASKSGGNYDMRNIFNGTVVQRHPSHAVTFVDNHDSQPEEALESFVEEWFKPLAYALTLTREQGYPSVFYGDYYGIPTHGVPAMRSKIDPILEARQKYAYGPQHDYLDHPDVIGWTREGDSSHPKSGLATLITDGPGGSKRMYAGLKNAGETWYDITGNRSDTVKIGSDGWGEFHVNDGSVSIYVQK

SEQ ID NO: 37867 - protein, 480 aa, Bacillus sp.
NGTMMQYFEWYLPNDGNHWNRLNSDASNLKSKGITAVWIPPAWKGASQNDVGYGAYDLYDLGEFNQKGTVRTKYGTRSQLQAAVTSLKNNGIQVYGDVVMNHKGGADATEMVRAVEVNPNNRNQEVTGEYTIEAWTRFDFPGRGNTHSSFKWRWYHFDGVDWDQSRRLNNRIYKFRGHGKAWDWEVDTEFGNYDYLMYADYDMDHPEVVNELRNWGVWYTNTLGLDGFRIDAVKHIKYSFTRDWINHVRSATGKNMFAVAEFWQNDLGRIENYLQKTNWNHSVFDVPLHYNLYNASKSGGNYDMRNIFNGTVVQRHPSHAVTFVDNHDSQPEEALESFVEEWFKPLAYALTLTREQGYPSVFYGDYYGIPTHGVPAMRSKIDPILEARQKYAYGPQHDYLDHPDVIGWTREGDSSHPKSGLATLITDGPGGSKRMYAGLKNAGETWYDITGNRSDTVKIGSDGWGEFHVNDGSVSIYVQK

SEQ ID NO: 37868 - protein, 480 aa, Bacillus sp.
NGTMMQYFEWYLPNDGNHWNRLNSDASNLKSKGITAVWIPPAWKGASQNDVGYGAYDLYDLGEFNQKGTVRTKYGTRSQLQAAVTSLKNNGIQVYGDVVMNHKGGADATEMVRAVEVNPNNRNQEVTGEYTIEAWTRFDFPGRGNTHSSFKWRWYHFDGVDWDQSRKVSNRIYKFRGHGKAWDWEVDTEFGNYDYLMYTDYDMDHPEVVNELRNWGVWYTNTLGLDGFRIDAVKHIKYSFTRDWINHVRSATGKNMFAVAEFWKNDLGAIENYLQKTNWNHSVFDVPLHYNLYNASKSGGNYDMRNIFNGTVVQRHPSHAVTFVDNHDSQPEEALESFVEEWFKPLAYALTLTREQGYPSVFYGDYYGIPTHGVPAMRSKIDPILEARQKYAYGPQHDYLDHPDVIGWTREGDSSHPKSGLATLITDGPGGSKRMYAGLKNAGETWYDITGNRSDTVKIGSDGWGEFHVNDGSVSIYVQK

SEQ ID NO: 37869 - protein, 480 aa, Synthetic construct
NGTMMQYFEWYLPNDGNHWNRLNSDASNLKSKGITAVWIPPAWKGASQNDVGYGAYDLYDLGEFNQKGTVRTKYGTRSQLQAAVTSLKNNGIQVYGDVVMNHKGGADATEMVRAVEVNPNNRNQEVTGEYTIEAWTRFDFPGRGNTHSSFKWRWYHFDGVDWDQSRRLNNRIYKFRGHGKAWDWEVDTEFGNYDYLMYADYDMDHPEVVNELRNWGVWYTNTLGLDGFRIDAVKHIKYSFTRDWINHVRSATGKNMFAVAEFWKNDLGAIENYLQKTSWNHSVFDVPLHYNLYNASKSGGNYDMRNIFNGTVVQRHPSHAVTFVDNHDSQPEEALESFVEEWFKPLAYALTLTREQGYPSVFYGDYYGIPTHGVPAMRSKIDPILEARQKYAYGPQHDYLDHPDVIGWTREGDSSHPKSGLATLITDGPGGSKRMYAGLKNAGETWYDITGNRSDTVKIGSDGWGEFHVNDGSVSIYVQK

SEQ ID NO: 37870 - protein, 480 aa, Synthetic construct
NGTMMQYFEWYLPNDGNHWNRLNSDASNLKSKGITAVWIPPAWKGASQNDVGYGAYDLYDLGEFNQKGTVRTKYGTRSQLQAAVTSLKNNGIQVYGDVVMNHKGGADATEMVRAVEVNPNNRNQEVTGEYTIEAWTRFDFPGRGNTHSSFKWRWYHFDGVDWDQSRRLNNRIYKFRGHGKAWDWEVDTEFGNYDYLMYADYDMDHPEVVNELRNWGVWYTNTLGLDGFRIDAVKHIKYSFTRDWINHVRSATGKNMFAVAEFWQNDLGCIENYLQKTNWNHSVFDVPLHYNLYNASKSGGNYDMRNIFNGTVVQRHPSHAVTFVDNHDSQPEEALESFVEEWFKPLAYALTLTREQGYPSVFYGDYYGIPTHGVPAMRSKIDPILEARQKYAYGPQHDYLDHPDVIGWTREGDSSHPKSGLATLITDGPGGSKRMYAGLKNAGETWYDITGNRSDTVKIGSDGWGEFHVNDGSVSIYVQK

SEQ ID NO: 37871 - protein, 480 aa, Synthetic construct
NGTMMQYFEWYLPNDGNHWNRLNSDASNLKSKGITAVWIPPAWKGASQNDVGYGAYDLYDLGEFNQKGTVRTKYGTRSQLQAAVTSLKNNGIQVYGDVVMNHKGGADATEMVRAVEVNPNNRNQEVTGEYTIEAWTRFDFPGRGNTHSSFKWRWYHFDGVDWDQSRRLNNRIYKFRGHGKAWDWEVDTEFGNYDYLMYADYDMDHPEVVNELRNWGVWYTNTLGLDGFRIDAVKHIKYSFTRDWINHVRSATGKNMFAVAEFWKNDLGAIENYLQKTNWNHSVFDVPLHYNLYNASKSGGNYDMRNIFNGTVVQRHPSHAVTFVDNHDSQPEEALESFVDTWFKPLAYALTLTREQGYPSVFYGDYYGIPTHGVPAMRSKIDPILEARQKYAYGPQHDYLDHPDVIGWTREGDSSHPKSGLATLITDGPGGSKRMYAGLKNAGETWYDITGNRSDTVKIGSDGWGEFHVNDGSVSIYVQK

SEQ ID NO: 37872 - protein, 480 aa, Synthetic construct
NGTMMQYFEWYLPNDGNHWNRLNSDASNLKSKGITAVWIPPAWKGASQNDVGYGAYDLYDLGEFNQKGTVRTKYGTRSQLQAAVTSLKNNGIQVYGDVVMNHKGGADATEMVRAVEVNPNNRNQEVTGEYTIEAWTRFDFPGRGNTHSSFKWRWYHFDGVDWDQSRRLNNRIYKFRGHGKAWDWEVDTENGNYDYLMYADIDMDHPEVVNELRNWGVWYTNTLGLDGFRIDAVKHIKYSFTRDWIGHVRSATGKNMFAVAEFWKNDLGAIENYLQKTNWNHSVFDVPLHYNLYNASKSGGNYDMRNIFNGTVVQRHPSHAVTFVDNHDSQPEEALESFVEEWFKPLAYALTLTREQGYPSVFYGDYYGIPTHGVPAMRSKIDPILEARQKYAYGPQHDYLDHPDVIGWTREGDSSHPKSGLATLITDGPGGSKRMYAGLKNAGETWYDITGNRSDTVKIGSDGWGEFHVNDGSVSIYVQK

SEQ ID NO: 37873 - protein, 480 aa, Synthetic construct
NGTMMQYFEWYLPNDGNHWNRLNSDASNLKEKGITAVWIPPAWKGASQNDVGYGAYDLYDLGEFNQKGTVRTKYGTRSQLQAAVTSLKNNGIQVYGDVVMNHKGGADATEMVRAVEVNPNNRNQEVTGEYTIEAWTRFDFPGRGNTHSSFKWRWYHFDGVDWDQSRRLNNRIYKFRGHGKAWDWEVDTENGNYDYLMYADIDMDHPEVVNELRNWGVWYTNTLGLDGFRIDAVKHIKYSFTRDWINHVRSATGKNMFAVAEFWKNDLGAIENYLQKTNWNHSVFDVPLHYNLYNASKSGGNYDMRNIFNGTVVQRHPSHAVTFVDNHDSQPEEALESFVEEWFKPLAYALTLTREQGYPSVFYGDYYGIPTHGVPAMRSKIDPILEARQKYAYGPQHDYLDHPDVIGWTREGDSSHPKSGLATLITDGPGGSKRMYAGLKNAGETWYDITGNRSDTVKIGSDGWGEFHVNDGSVSIYVQK

SEQ ID NO: 37874 - protein, 480 aa, Bacillus sp.
NGTMMQYFEWYLPNDGNHWNRLNSDASNLKSKGITAVWIPPAWKGASQNDVGYGAYDLYDLGEFNQKGTVRTKYGTRSQLQAAVTSLKNNGIQVYGDVVMNHKGGADATEMVRAVEVNPNNRNQEVTGEYTIEAWTRFDFPGRGNTHSSFKWRWYHFDGVDWDQSRNLSNRIYKFRGHGKAWDWEVDTEFGNYDYLMYADYDMDHPEVVNELRNWGVWYTNTLGLDGFRIDAVKHIKYSFTRDWINHVRSATGKNMFAVAEFWKNDLGAIENYLQKTNWNHSVFDVPLHYNLYNASKSGGNYDMRNIFNGTVVQRHPSHAVTFVDNHDSQPEEALESFVEEWFKPLAYALTLTREQGYPSVFYGDYYGIPTHGVPAMRSKIDPILEARQKYAYGPQHDYLDHPDVIGWTREGDSSHPKSGLATLITDGPGGSKRMYAGLKNAGETWYDITGNRSDTVKIGSDGWGEFHVNDGSVSIYVQK

SEQ ID NO: 37875 - protein, 480 aa, Synthetic construct
NGTMMQYFEWYLPNDGNHWNRLNSDASNLKSKGITAVWIPPAWKGASQNDVGYGAYDLYDLGEFNQKGTVRTKYGTRSQLQAAVTSLKNNGIQVYGDVVMNHKGGADATEMVRAVEVNPNNRNQEVTGEYTIEAWTKFDFPGRGNTHSSFKWRWYHFDGVDWDQSRRLNNRIYKFRGHGKAWDWEVDTENGNYDYLMYADIDMDHPEVVNELRNWGVWYTNTLGLDGFRIDAVKHIKYSFTRDWINHVRSATGKNMFAVAEFWKNDLGAIENYLQKTNWNHSVFDVPLHYNLYNASKSGGNYDMRNIFNGTVVQRHPSHAVTFVDNHDSQPEEALESFVEEWFKPLAYALTLTREQGYPSVFYGDYYGIPTHGVPAMRSKIDPILEARQKYAYGPQHDYLDHPDVIGWTREGDSSHPKSGLATLITDGPGGSKRMYAGLKNAGETWYDITGNRSDTVKIGSDGWGEFHVNDGSVSIYVQK

SEQ ID NO: 37876 - protein, 480 aa, Bacillus sp.
NGTMMQYFEWYLPNDGNHWNRLNSDASNLKSKGITAVWIPPAWKGASQNDVGYGAYDLYDLGEFNQKGTVRTKYGTRSQLQAAVTSLKNNGIQVYGDVVMNHKGGADATEMVRAVEVNPNNRNQEVTGEYTIEAWTRFDFPGRGNTHSSFKWRWYHFDGVDWDQSRKLNNRIYKFRGHGKAWDWEVDTEFGNYDYLMYADYDMDHPEVVNELRNWGVWYTNTLGLDGFRIDAVKHIKYSFTRDWINHVRSATGKNMFAVAEFWKNDLGAIENYLQKTNWNHSVFDVPLHYNLYNASKSGGNYDMRNIFNGTVVQRHPSHAVTFVDNHDSQPEEALESFVEEWFKPLAYALTLTREQGYPSVFYGDYYGIPTHGVPAMRSKIDPILEARQKYAYGPQHDYLDHPDVIGWTREGDSSHPKSGLATLITDGPGGSKRMYAGLKNAGETWYDITGNRSDTVKIGSDGWGEFHVNDGSVSIYVQK

SEQ ID NO: 37877 - protein, 480 aa, Synthetic construct
NGTMMQYFEWYLPNDGNHWNRLNSDASNLKSKGITAVWIPPAWKGASQNDVGYGAYDLYDLGEFNQKGTVRTKYGTRSQLQAAVTSLKNNGIQVYGDVVMNHKGGADATEMVRAVEVNPNNRNQEVTGEYTIEAWTRFDFPGRGNTHSSFKWRWYHFDGVDWDQSRRLNNRIYKFRGHGKAWDWEVDTENGNYDYLMYADFDMDHPEVVNEIRNWGVWYTNTLGLDGFRIDAVKHIKYSFTRDWINHVRSATGKNMFAVAEFWKNDLGAIENYLQKTNWNHSVFDVPLHYNLYNASKSGGNYDMRNIFNGTVVQRHPSHAVTFVDNHDSQPEEALESFVEEWFKPLAYALTLTREQGYPSVFYGDYYGIPTHGVPAMRSKIDPILEARQKYAYGPQHDYLDHPDVIGWTREGDSSHPKSGLATLITDGPGGSKRMYAGLKNAGETWYDITGNRSDTVKIGSDGWGEFHVNDGSVSIYVQK

SEQ ID NO: 37878 - protein, 480 aa, Synthetic construct
NGTMMQYFEWYLPNDGNHWNRLNSDASNLKSKGITAVWIPPAWKGASQNDVGYGAYDLYDLGEFNQKGTVRTKYGTRSQLQAAVTSLKNNGIQVYGDVVMNHKGGADATEMVRAVEVNPNNRNQEVTGEYTIEAWTRFDFPGRGNTHSSFKWRWYHFDGVDWDQSRRLNNRIYKFRGHGKAWDWEVDTENGNYDYLMYADIDMDHPEVVNELRNWGVWYTNTLGLDGFRIDAVKHIKYSFTRDWIDHVRSATGKNMFAVAEFWKNDLGAIENYLQKTNWNHSVFDVPLHYNLYNASKSGGNYDMRNIFNGTVVQRHPSHAVTFVDNHDSQPEEALESFVEEWFKPLAYALTLTREQGYPSVFYGDYYGIPTHGVPAMRSKIDPILEARQKYAYGPQHDYLDHPDVIGWTREGDSSHPKSGLATLITDGPGGSKRMYAGLKNAGETWYDITGNRSDTVKIGSDGWGEFHVNDGSVSIYVQK

SEQ ID NO: 37879 - protein, 480 aa, Bacillus sp.
NGTMMQYFEWYLPNDGNHWNRLNSDASNLKSKGITAVWIPPAWKGASQNDVGYGAYDLYDLGEFNQKGTVRTKYGTRSQLQAAVTSLKNNGIQVYGDVVMNHKGGADATEMVRAVEVNPNNRNQEVTGEYTIEAWTRFDFPGRGNTHSSFKWRWYHFDGVDWDQSRNINNRIYKFRGHGKAWDWEVDTEFGNYDYLMYADYDMDHPEVVNELRNWGVWYTNTLGLDGFRIDAVKHIKYSFTRDWINHVRSATGKNMFAVAEFWKNDLGAIENYLQKTNWNHSVFDVPLHYNLYNASKSGGNYDMRNIFNGTVVQRHPSHAVTFVDNHDSQPEEALESFVEEWFKPLAYALTLTREQGYPSVFYGDYYGIPTHGVPAMRSKIDPILEARQKYAYGPQHDYLDHPDVIGWTREGDSSHPKSGLATLITDGPGGSKRMYAGLKNAGETWYDITGNRSDTVKIGSDGWGEFHVNDGSVSIYVQK

SEQ ID NO: 37880 - protein, 480 aa, Bacillus sp.
NGTMMQYFEWYLPNDGNHWNRLNSDASNLKSKGITAVWIPPAWKGASQNDVGYGAYDLYDLGEFNQKGTVRTKYGTRSQLQAAVTSLKNNGIQVYGDVVMNHKGGADATEMVRAVEVNPNNRNQEVTGEYTIEAWTRFDFPGRGNTHSSFKWRWYHFDGVDWDQSRRLNNRIYKFRGHGKAWDWEVDSEFGNYDYLMYADYDMDHPEVVNELRNWGVWYTNTLGLDGFRIDAVKHIKYSFTRDWINHVRSATGKNMFAVAEFWKNDLGAIENYLQKTNWNHSVFDVPLHYNLYNASKSGGNYDMRNIFNGTVVQRHPSHAVTFVDNHDSQPEEALESFVEEWFKPLAYALTLTREQGYPSVFYGDYYGIPTHGVPAMRSKIDPILEARQKYAYGPQHDYLDHPDVIGWTREGDSSHPKSGLATLITDGPGGSKRMYAGLKNAGETWYDITGNRSDTVKIGSDGWGEFHVNDGSVSIYVQK

SEQ ID NO: 37881 - protein, 480 aa, Synthetic construct
NGTMMQYFEWYLPNDGNHWNRLNSDASNLKSKGITAVWIPPAWKGASQNDVGYGAYDLYDLGEFNQKGTVRTKYGTRSQLQAAVTSLKNNGIQVYGDVVMNHKGGADATEMVRAVEVNPNNRNQEVTGEYTIEAWTHFDFPGRGNTHSSFKWRWYHFDGVDWDQSRRLNNRIYKFRGHGKAWDWEVDTENGNYDYLMYADIDMDHPEVVNELRNWGVWYTNTLGLDGFRIDAVKHIKYSFTRDWINHVRSATGKNMFAVAEFWKNDLGAIENYLQKTNWNHSVFDVPLHYNLYNASKSGGNYDMRNIFNGTVVQRHPSHAVTFVDNHDSQPEEALESFVEEWFKPLAYALTLTREQGYPSVFYGDYYGIPTHGVPAMRSKIDPILEARQKYAYGPQHDYLDHPDVIGWTREGDSSHPKSGLATLITDGPGGSKRMYAGLKNAGETWYDITGNRSDTVKIGSDGWGEFHVNDGSVSIYVQK

SEQ ID NO: 37882 - protein, 480 aa, Synthetic construct
NGTMMQYFEWYLPNDGNHWNRLNSDASNLKSKGITAVWIPPAWKGASQNDVGYGAYDLYDLGEFNQKGTVRTKYGTRSQLQAAVTSLKNNGIQVYGDVVMNHKGGADATEMVRAVEVNPNNRNQEVTGEYTIEAWTRFDFPGRGNTHSSFKWRWYHFDGVDWDQSRRLNNRIYKFRGHGKAWDWEVDTENGNYDYLMYADYDMDHPEVVNEIRNWGVWYTNTLGLDGFRIDAVKHIKYSFTRDWINHVRSATGKNMFAVAEFWKNDLGAIENYLQKTNWNHSVFDVPLHYNLYNASKSGGNYDMRNIFNGTVVQRHPSHAVTFVDNHDSQPEEALESFVEEWFKPLAYALTLTREQGYPSVFYGDYYGIPTHGVPAMRSKIDPILEARQKYAYGPQHDYLDHPDVIGWTREGDSSHPKSGLATLITDGPGGSKRMYAGLKNAGETWYDITGNRSDTVKIGSDGWGEFHVNDGSVSIYVQK

SEQ ID NO: 37883 - protein, 480 aa, Bacillus sp.
NGTMMQYFEWYLPNDGNHWNRLNSDASNLKSKGITAVWIPPAWKGASQNDVGYGAYDLYDLGEFNQKGTVRTKYGTRSQLQAAVTSLKNNGIQVYGDVVMNHKGGADATEMVRAVEVNPNNRNQEVTGEYTIEAWTRFDFPGRGNTHSSFKWRWYHFDGVDWDQSRKFNNRIYKFRGHGKAWDWEVDTEFGNYDYLMYADYDMDHPEVVNELRNWGVWYTNTLGLDGFRIDAVKHIKYSFTRDWINHVRSATGKNMFAVAEFWKNDLGAIENYLQKTNWNHSVFDVPLHYNLYNASKSGGNYDMRNIFNGTVVQRHPSHAVTFVDNHDSQPEEALESFVEEWFKPLAYALTLTREQGYPSVFYGDYYGIPTHGVPAMRSKIDPILEARQKYAYGPQHDYLDHPDVIGWTREGDSSHPKSGLATLITDGPGGSKRMYAGLKNAGETWYDITGNRSDTVKIGSDGWGEFHVNDGSVSIYVQK

SEQ ID NO: 37884 - protein, 480 aa, Synthetic construct
NGTMMQYFEWYLPNDGNHWNRLNSDASNLASKGITAVWIPPAWKGASQNDVGYGAYDLYDLGEFNQKGTVRTKYGTRSQLQAAVTSLKNNGIQVYGDVVMNHKGGADATEMVRAVEVNPNNRNQEVTGEYTIEAWTRFDFPGRGNTHSSFKWRWYHFDGVDWDQSRRLNNRIYKFRGHGKAWDWEVDTENGNYDYLMYADIDMDHPEVVNELRNWGVWYTNTLGLDGFRIDAVKHIKYSFTRDWINHVRSATGKNMFAVAEFWKNDLGAIENYLQKTNWNHSVFDVPLHYNLYNASKSGGNYDMRNIFNGTVVQRHPSHAVTFVDNHDSQPEEALESFVEEWFKPLAYALTLTREQGYPSVFYGDYYGIPTHGVPAMRSKIDPILEARQKYAYGPQHDYLDHPDVIGWTREGDSSHPKSGLATLITDGPGGSKRMYAGLKNAGETWYDITGNRSDTVKIGSDGWGEFHVNDGSVSIYVQK

SEQ ID NO: 37885 - protein, 480 aa, Synthetic construct
NGTMMQYFEWYLPNDGNHWNRLNSDASNLKSKGITAVWIPPAWKGASQNDVGYGAYDLYDLGEFNQKGTVRTKYGTRSQLQAAVTSLKNNGIQVYGDVVMNHKGGADATEMVRAVEVNPNNRNQEVTGEYTIEAWTRFDFPGRGNTHSSFKWRWYHFDGVDWDQSRRLNNRIYKFRGHGKAWDWEVDTENGNYDYLMYADIDMDHPEVVNELRNWGVWYTNTLGLDGFRIDAVKHIKYSFTRDWINHVRSATGKNMFAVAEFWKNDLGAIENYLQKTNWNHSVFDVPLHYNLYNASKGGGNYDMRNIFNGTVVQRHPSHAVTFVDNHDSQPEEALESFVEEWFKPLAYALTLTREQGYPSVFYGDYYGIPTHGVPAMRSKIDPILEARQKYAYGPQHDYLDHPDVIGWTREGDSSHPKSGLATLITDGPGGSKRMYAGLKNAGETWYDITGNRSDTVKIGSDGWGEFHVNDGSVSIYVQK

SEQ ID NO: 37886 - protein, 480 aa, Synthetic construct
NGTMMQYFEWYLPNDGNHWNRLNSDASNLKSKGITAVWIPPAWKGASQADVGYGAYDLYDLGEFNQKGTVRTKYGTRSQLQAAVTSLKNNGIQVYGDVVMNHKGGADATEMVRAVEVNPNNRNQEVTGEYTIEAWTRFDFPGRGNTHSSFKWRWYHFDGVDWDQSRRLNNRIYKFRGHGKAWDWEVDTENGNYDYLMYADIDMDHPEVVNELRNWGVWYTNTLGLDGFRIDAVKHIKYSFTRDWINHVRSATGKNMFAVAEFWKNDLGAIENYLQKTNWNHSVFDVPLHYNLYNASKSGGNYDMRNIFNGTVVQRHPSHAVTFVDNHDSQPEEALESFVEEWFKPLAYALTLTREQGYPSVFYGDYYGIPTHGVPAMRSKIDPILEARQKYAYGPQHDYLDHPDVIGWTREGDSSHPKSGLATLITDGPGGSKRMYAGLKNAGETWYDITGNRSDTVKIGSDGWGEFHVNDGSVSIYVQK

SEQ ID NO: 37887 - protein, 480 aa, Synthetic construct
NGTMMQYFEWYLPNDGNHWNRLNSDAQNLKSKGITAVWIPPAWKGASQNDVGYGAYDLYDLGEFNQKGTVRTKYGTRSQLQAAVTSLKNNGIQVYGDVVMNHKGGADATEMVRAVEVNPNNRNQEVTGEYTIEAWTRFDFPGRGNTHSSFKWRWYHFDGVDWDQSRRLNNRIYKFRGHGKAWDWEVDTENGNYDYLMYADIDMDHPEVVNELRNWGVWYTNTLGLDGFRIDAVKHIKYSFTRDWINHVRSATGKNMFAVAEFWKNDLGAIENYLQKTNWNHSVFDVPLHYNLYNASKSGGNYDMRNIFNGTVVQRHPSHAVTFVDNHDSQPEEALESFVEEWFKPLAYALTLTREQGYPSVFYGDYYGIPTHGVPAMRSKIDPILEARQKYAYGPQHDYLDHPDVIGWTREGDSSHPKSGLATLITDGPGGSKRMYAGLKNAGETWYDITGNRSDTVKIGSDGWGEFHVNDGSVSIYVQK

SEQ ID NO: 37888 - protein, 480 aa, Bacillus sp.
NGTMMQYFEWYLPNDGNHWNRLNSDASNLKSKGITAVWIPPAWKGASQNDVGYGAYDLYDLGEFNQKGTVRTKYGTRSQLQAAVTSLKNNGIQVYGDVVMNHKGGADATEMVRAVEVNPNNRNQEVTGEYTIEAWTRFDFPGRGNTHSSFKWRWYHFDGVDWDQSRRINNRIYKFRGHGKAWDWEVDTEFGNYDYLMYADYDMDHPEVVNELRNWGVWYTNTLGLDGFRIDAVKHIKYSFTRDWINHVRSATGKNMFAVAEFWKNDLGAIENYLQKTNWNHSVFDVPLHYNLYNASKSGGNYDMRNIFNGTVVQRHPSHAVTFVDNHDSQPEEALESFVEEWFKPLAYALTLTREQGYPSVFYGDYYGIPTHGVPAMRSKIDPILEARQKYAYGPQHDYLDHPDVIGWTREGDSSHPKSGLATLITDGPGGSKRMYAGLKNAGETWYDITGNRSDTVKIGSDGWGEFHVNDGSVSIYVQK

SEQ ID NO: 37889 - protein, 480 aa, Synthetic construct
NGTMMQYFEWYLPNDGNHWNRLNSDASNLKSKGITAVWIPPAWKGASQNDVGYGAYDLYDLGEFNQKGTVRTKYGTRSQLQAAVTSLKNNGIQVYGDVVMNHKGGADATEMVRAVEVNPNNRNQEVTGEYTIEAWTRFDFPGRGNTHSSFKWRWYHFDGVDWDQSRRLNNRIYKFRGHGKAWDWEVDTENGNYDYLMYADIDMDHPEVVNELRNWGVWYTNTLGLDGFRIDAVKHIKYSFTRDWINHVRAATGKNMFAVAEFWKNDLGAIENYLQKTNWNHSVFDVPLHYNLYNASKSGGNYDMRNIFNGTVVQRHPSHAVTFVDNHDSQPEEALESFVEEWFKPLAYALTLTREQGYPSVFYGDYYGIPTHGVPAMRSKIDPILEARQKYAYGPQHDYLDHPDVIGWTREGDSSHPKSGLATLITDGPGGSKRMYAGLKNAGETWYDITGNRSDTVKIGSDGWGEFHVNDGSVSIYVQK

SEQ ID NO: 37890 - protein, 480 aa, Synthetic construct
NGTMMQYFEWYLPNDGNHWNRLNSDASNLKSKGITAVWIPPAWKGASQNDVGYGAYDLYDLGEFNQKGTVRTKYGTRSQLQAAVTSLKNNGIQVYGDVVMNHKGGADATEMVRAVEVNPNNRNQEVTGEYTIEAWTRFDFPGRGNTHSSFKWRWYHFDGVDWDQSRRLNNRIYKFRGHGKAWDWEVDTENGNYDYLMYADIDMDHPEVVNEIRNWGVWYTNTLGLDGFRIDAVKHIKYSFTRDWINHVRSATGKNMFAVAEFWKNDLGAIENYLQKTNWNHSVFDVPLHYNLYNASKSGGNYDMRNIFNGTVVQRHPSHAVTFVDNHDSQPEEALESFVEEWFKPLAYALTLTREQGYPSVFYGDYYGIPTHGVPAMRSKIDPILEARQKYAYGPQHDYLDHPDVIGWTREGDSSHPKSGLATLITDGPGGSKRMYAGLKNAGETWYDITGNRSDTVKIGSDGWGEFHVNDGSVSIYVQK

SEQ ID NO: 37891 - protein, 480 aa, Synthetic construct
NGTMMQYFEWYLPNDGNHWNRLNSDASNLKSKGITAVWIPPAWKGASQNDVGYGAYDLYDLGEFNQKGTVRTKYGTRSQLQAAVTSLKNNGIQVYGDVVMNHKGGADATEMVRAVEVNPNNRNQEVTGEYTIEAWTRFDFPGRGNTHSSFKWRWYHFDGVDWDQSRRLNNRIYKFRGHGKAWDWEVDTENGNYDYLMYADIDMDHPEVVNELRNWGVWYTNTLGLDGFRIDAVKHIKYSFTRDWINHVRSATGKNMFAVAEFWKNDLGAIENYLQKTNWNHSVFDVPLHYNLYNASKSGGNYDMRKIFNGTVVQRHPSHAVTFVDNHDSQPEEALESFVEEWFKPLAYALTLTREQGYPSVFYGDYYGIPTHGVPAMRSKIDPILEARQKYAYGPQHDYLDHPDVIGWTREGDSSHPKSGLATLITDGPGGSKRMYAGLKNAGETWYDITGNRSDTVKIGSDGWGEFHVNDGSVSIYVQK

SEQ ID NO: 37892 - protein, 480 aa, Synthetic construct
NGTMMQYFEWYLPNDGNHWNRLNSDASNLKSKGITAVWIPPAWKGASQNDVGYGAYDLYDLGEFNQKGTVRTKYGTRSQLQAAVKSLKNNGIQVYGDVVMNHKGGADATEMVRAVEVNPNNRNQEVTGEYTIEAWTRFDFPGRGNTHSSFKWRWYHFDGVDWDQSRRLNNRIYKFRGHGKAWDWEVDTENGNYDYLMYADIDMDHPEVVNELRNWGVWYTNTLGLDGFRIDAVKHIKYSFTRDWINHVRSATGKNMFAVAEFWKNDLGAIENYLQKTNWNHSVFDVPLHYNLYNASKSGGNYDMRNIFNGTVVQRHPSHAVTFVDNHDSQPEEALESFVEEWFKPLAYALTLTREQGYPSVFYGDYYGIPTHGVPAMRSKIDPILEARQKYAYGPQHDYLDHPDVIGWTREGDSSHPKSGLATLITDGPGGSKRMYAGLKNAGETWYDITGNRSDTVKIGSDGWGEFHVNDGSVSIYVQK

SEQ ID NO: 37893 - protein, 480 aa, Synthetic construct
NGTMMQYFEWYLPNDGNHWNRLNSDASNLKSKGITAVWIPPAWKGASQNDVGYGAYDLYDLGEFNQKGTVRTKYGTRSQLQAAVTSLKNNGIQVYGDVVMNHKGGADATEMVRAVEVNPNNRNQEVTGEYTIEAWTRFDFPGRGNTHSSFKWRWYHFDGVDWDQSRRLNNRIYKFRGHGKAWDWEVDTENGNYDYLMYADIDMDHPEVVNELRNWGVWYTNTLQLDGFRIDAVKHIKYSFTRDWINHVRSATGKNMFAVAEFWKNDLGAIENYLQKTNWNHSVFDVPLHYNLYNASKSGGNYDMRNIFNGTVVQRHPSHAVTFVDNHDSQPEEALESFVEEWFKPLAYALTLTREQGYPSVFYGDYYGIPTHGVPAMRSKIDPILEARQKYAYGPQHDYLDHPDVIGWTREGDSSHPKSGLATLITDGPGGSKRMYAGLKNAGETWYDITGNRSDTVKIGSDGWGEFHVNDGSVSIYVQK

SEQ ID NO: 37894 - protein, 480 aa, Synthetic construct
NGTMMQYFEWYLPNDGNHWNRLNSDASNLKSKGITAVWIPPAWKGASQNDVGYGAYDLYDLGEFNQKGTVRTKYGTRSQLQAAVTSLKNNGIQVYGDVVMNHKGGADATEMVRAVEVNPNNRNQEVTGEYTIEAWTRFDFPGRGNTHSSFKWRWYHFDGVDWDQSRRLNNRIYKFRGHGKAWDWEVDTENGNYDYLMYADIDMDHPEVVNELRNWGVWYTNTLGLDGFRIDAVKHIKYSFTRDWLNHVRSATGKNMFAVAEFWKNDLGAIENYLQKTNWNHSVFDVPLHYNLYNASKSGGNYDMRNIFNGTVVQRHPSHAVTFVDNHDSQPEEALESFVEEWFKPLAYALTLTREQGYPSVFYGDYYGIPTHGVPAMRSKIDPILEARQKYAYGPQHDYLDHPDVIGWTREGDSSHPKSGLATLITDGPGGSKRMYAGLKNAGETWYDITGNRSDTVKIGSDGWGEFHVNDGSVSIYVQK

SEQ ID NO: 37895 - protein, 480 aa, Synthetic construct
NGTMMQYFEWYLPNDGNHWNRLNSDASNLKSKGITAVWIPPAWKGASQNDVGYGAYDLYDLGEFNQKGTVRTKYGTRSQLQAAVTSLKNNGIQVYGDVVMNHKGGADATEMVRAVEVNPNNRNQEVTGEYTIEAWTRFDFPGRGNTHSSFKWRWYHFDGVDWDQSRRLNNRIYKFRGHGKAWDWEVDTENGNYDYLMYADIDYDHPEAVNEQRNWGVWYTNTLGLDGFRIDAVKHIKYSFTRDWINHVRSATGKNMFAVAEFWKNDLGAIENYLQKTNWNHSVFDVPLHYNLYNASKSGGNYDMRNIFNGTVVQRHPSHAVTFVDNHDSQPEEALESFVEEWFKPLAYALTLTREQGYPSVFYGDYYGIPTHGVPAMRSKIDPILEARQKYAYGPQHDYLDHPDVIGWTREGDSSHPKSGLATLITDGPGGSKRMYAGLKNAGETWYDITGNRSDTVKIGSDGWGEFHVNDGSVSIYVQK

SEQ ID NO: 37896 - protein, 480 aa, Synthetic construct
NGTMMQYFEWYLPNDGNHWNRLNSDASNLKSKGITAVWIPPAWKGASQNDVGYGAYDLYDLGEFNQKGTVRTKYGTRSQLQAAVTSLKNNGIQVYGDVVMNHKGGADATEMVRAVEVNPSNRNQEVTGEYTIEAWTRFDFPGRGNTHSSFKWRWYHFDGVDWDQSRRLNNRIYKFRGHGKAWDWEVDTENGNYDYLMYADIDMDHPEVVNELRNWGVWYTNTLGLDGFRIDAVKHIKYSFTRDWINHVRSATGKNMFAVAEFWKNDLGAIENYLQKTNWNHSVFDVPLHYNLYNASKSGGNYDMRNIFNGTVVQRHPSHAVTFVDNHDSQPEEALESFVEEWFKPLAYALTLTREQGYPSVFYGDYYGIPTHGVPAMRSKIDPILEARQKYAYGPQHDYLDHPDVIGWTREGDSSHPKSGLATLITDGPGGSKRMYAGLKNAGETWYDITGNRSDTVKIGSDGWGEFHVNDGSVSIYVQK

SEQ ID NO: 37897 - protein, 480 aa, Synthetic construct
NGTMMQYFEWYLPNDGNHWNRLNSDASNLKSKGITAVWIPPAWKGASQNDVGYGAYDVYDLGEFNQKGTVRTKYGTRSQLQAAVTSLKNNGIQVYGDVVLNHKGGADATEMVRAVEVNPNNRNQEVTGEYTIEAWTRFDFPGRGNTHSSFKWRWYHFDGVDWDQSRRLNNRIYKFRGHGKAWDWEVDTENGNYDYLMYADYDMDHPEVVNELRNWGVWYTNTLGLDGFRIDAVKHIKYSFTRDWINHVRSATGKNMFAVAEFWKNDLGAIENYLQKTNWNHSVFDVPLHYNLYNASKSGGNYDMRNIFNGTVVQRHPSHAVTFVDNHDSQPEEALESFVEEWFKPLAYALTLTREQGYPSVFYGDYYGIPTHGVPAMRSKIDPILEARQKYAYGPQHDYLDHPDVIGWTREGDSSHPKSGLATLITDGPGGSKRMYAGLKNAGETWYDITGNRSDTVKIGSDGWGEFHVNDGSVSIYVQK

SEQ ID NO: 37898 - protein, 480 aa, Synthetic construct
NGTMMQYFEWYLPNDGNHWNRLNSDASNLKSKGITAVWIPPAWKGASQNDVGYGAYDLYDLGEFNQKGTVRTKYGTRSQLQAAVTSLKNNGIQVYGDVVMNHKGGADATEMVRAVEVNPNNRNQEVTGEYTIEAWTRFDFPGRGNTHSSFKWRWYHFDGVDWDQSRRLNNRIYKFRGHGKAWDWEVDTENGNYDYLMYADYDYDHPEAVNEMRNWGVWYTNTLGLDGFRIDAVKHIKYSFTRDWINHVRSATGKNMFAVAEFWKNDLGAIENYLQKTNWNHSVFDVPLHYNLYNASKSGGNYDMRNIFNGTVVQRHPSHAVTFVDNHDSQPEEALESFVEEWFKPLAYALTLTREQGYPSVFYGDYYGIPTHGVPAMRSKIDPILEARQKYAYGPQHDYLDHPDVIGWTREGDSSHPKSGLATLITDGPGGSKRMYAGLKNAGETWYDITGNRSDTVKIGSDGWGEFHVNDGSVSIYVQK

SEQ ID NO: 37899 - protein, 480 aa, Synthetic construct
NGTMMQYFEWYLPNDGNHWNRLNSDASNLKSKGITAVWIPPAWKGASQNDVGYGAYDLYDLGEFNQKGTVRTKYGTRSQLQAAVTSLKNNGIQVYGDVVMNHKGGADATEMVRAVEVNPNNRNQEVTGEYTIEAWTRFDFPGRGNTHSSFKWRWYHFDGVDWDQSRELSNRIYKFRGHGKAWDWEVDTEFGNYDYLMYADYDMDHPEVVNELRNWGVWYTNTLGLDGFRIDAVKHIKYSFTRDWINHVRSATGKNMFAVAEFWKNDLGAIENYLQKTNWNHSVFDVPLHYNLYNASKSGGNYDMRNIFNGTVVQRHPSHAVTFVDNHDSQPEEALESFVEEWFKPLAYALTLTREQGYPSVFYGDYYGIPTHGVPAMRSKIDPILEARQKYAYGPQHDYLDHPDVIGWTREGDSSHPKSGLATLITDGPGGSKRMYAGLKNAGETWYDITGNRSDTVKIGSDGWGEFHVNDGSVSIYVQK

SEQ ID NO: 37900 - protein, 480 aa, Synthetic construct
NGTMMQYFEWYLPNDGNHWNRLNSDAANLKSKGITAVWIPPAWKGASQNDVGYGAYDLYDLGEFNQKGTVRTKYGTRSQLQAAVTSLKNNGIQVYGDVVMNHKGGADATEMVRAVEVNPNNRNQEVTGEYTIEAWTRFDFPGRGNTHSSFKWRWYHFDGVDWDQSRRLNNRIYKFRGHGKAWDWEVDTENGNYDYLMYADIDMDHPEVVNELRNWGVWYTNTLGLDGFRIDAVKHIKYSFTRDWINHVRSATGKNMFAVAEFWKNDLGAIENYLQKTNWNHSVFDVPLHYNLYNASKSGGNYDMRNIFNGTVVQRHPSHAVTFVDNHDSQPEEALESFVEEWFKPLAYALTLTREQGYPSVFYGDYYGIPTHGVPAMRSKIDPILEARQKYAYGPQHDYLDHPDVIGWTREGDSSHPKSGLATLITDGPGGSKRMYAGLKNAGETWYDITGNRSDTVKIGSDGWGEFHVNDGSVSIYVQK

SEQ ID NO: 37901 - protein, 480 aa, Synthetic construct
NGTMMQYFEWYLPNDGNHWNRLNSDASNLKSKGITAVWIPPAWKGASQNDVGYGAYDLYDLGEFNQKGTVRTKYGTRSQLQAAVNSLKNNGIQVYGDVVMNHKGGADATEMVRAVEVNPNNRNQEVTGEYTIEAWTRFDFPGRGNTHSSFKWRWYHFDGVDWDQSRRLNNRIYKFRGHGKAWDWEVDTENGNYDYLMYADIDMDHPEVVNELRNWGVWYTNTLGLDGFRIDAVKHIKYSFTRDWINHVRSATGKNMFAVAEFWKNDLGAIENYLQKTNWNHSVFDVPLHYNLYNASKSGGNYDMRNIFNGTVVQRHPSHAVTFVDNHDSQPEEALESFVEEWFKPLAYALTLTREQGYPSVFYGDYYGIPTHGVPAMRSKIDPILEARQKYAYGPQHDYLDHPDVIGWTREGDSSHPKSGLATLITDGPGGSKRMYAGLKNAGETWYDITGNRSDTVKIGSDGWGEFHVNDGSVSIYVQK

SEQ ID NO: 37902 - protein, 480 aa, Synthetic construct
NGTMMQYFEWYLPNDGNHWNRLNSDASNLKSKGITAVWIPPAWKGASQNDVGYGAYDLYDLGEFNQKGTVRTKYGTRSQLQAAVTSLKNNGIQVYGDVVMNHKGGADATEMVRAVEVNPNNRNQEVTGEYTIEAWTRFDFPGRGNTHSSFKWRWYHFDGVDWDQSRRLNNRIYKFRGHGKAWDWEVDTENGNYDYLMYADIDMDHPEVVNELRNWGVWYTNTLGLDGFRIDAVKHIKYSFMRDWINHVRSATGKNMFAVAEFWKNDLGAIENYLQKTNWNHSVFDVPLHYNLYNASKSGGNYDMRNIFNGTVVQRHPSHAVTFVDNHDSQPEEALESFVEEWFKPLAYALTLTREQGYPSVFYGDYYGIPTHGVPAMRSKIDPILEARQKYAYGPQHDYLDHPDVIGWTREGDSSHPKSGLATLITDGPGGSKRMYAGLKNAGETWYDITGNRSDTVKIGSDGWGEFHVNDGSVSIYVQK

SEQ ID NO: 37903 - protein, 480 aa, Bacillus sp.
NGTMMQYFEWYLPNDGNHWNRLNSDASNLKSKGITAVWIPPAWKGASQNDVGYGAYDLYDLGEFNQKGTVRTKYGTRSQLQAAVTSLKNNGIQVYGDVVMNHKGGADATEMVRAVEVNPNNRNQEVTGEYTIEAWTRFDFPGRGNTHSSFKWRWYHFDGVDWDQSRRLNNRIYKFRGHGKAWDWEVDTEFGNYDYLMYADYDMDHPEVVNELKNWGVWYTNTLGLDGFRIDAVKHIKYSFTRDWINHVRSATGKNMFAVAEFWKNDLGAIENYLQKTNWNHSVFDVPLHYNLYNASKSGGNYDMRNIFNGTVVQRHPSHAVTFVDNHDSQPEEALESFVEEWFKPLAYALTLTREQGYPSVFYGDYYGIPTHGVPAMRSKIDPILEARQKYAYGPQHDYLDHPDVIGWTREGDSSHPKSGLATLITDGPGGSKRMYAGLKNAGETWYDITGNRSDTVKIGSDGWGEFHVNDGSVSIYVQK

SEQ ID NO: 37904 - protein, 480 aa, Synthetic construct
NGTMMQYFEWYLPNDGNHWNRLNSDASNLKSKGITAVWIPPAWKGASQNDVGYGAYDLYDLGEFNQKGTVRTKYGTRSQLQAAVTSLKNNGIQVYGDVVMNHKGGADATEMVRAVEVNPNNRNQEVTGEYTIEAWTRFDFPGRGNTHSSFKWRWYHFDGVDWDQSRRLNNRIYKFRGHGKAWDWEVDTENGNYDYLMYADIDMDHPEVVNELRNWGVWYTNTLGLDGFRIDAVKHIKYSFTRDWINHVRSATGKNMFAVAEFWKNDLGAIENYLQKTNWNHSVFDVPLHYNLYNASKSGGNYDMRNIFNGTVVQRHPTHAVTFVDNHDSQPEEALESFVEEWFKPLAYALTLTREQGYPSVFYGDYYGIPTHGVPAMRSKIDPILEARQKYAYGPQHDYLDHPDVIGWTREGDSSHPKSGLATLITDGPGGSKRMYAGLKNAGETWYDITGNRSDTVKIGSDGWGEFHVNDGSVSIYVQK

SEQ ID NO: 37905 - protein, 480 aa, Synthetic construct
NGTMMQYFEWYLPNDGNHWNRLNSDASNLKSKGITAVWIPPAWKGASQNDVGYGAYDLYDLGEFNQKGTVRTKYGTRSQLQRAVTSLKNNGIQVYGDVVMNHKGGADATEMVRAVEVNPNNRNQEVTGEYTIEAWTRFDFPGRGNTHSSFKWRWYHFDGVDWDQSRRLNNRIYKFRGHGKAWDWEVDTENGNYDYLMYADIDMDHPEVVNELRNWGVWYTNTLGLDGFRIDAVKHIKYSFTRDWINHVRSATGKNMFAVAEFWKNDLGAIENYLQKTNWNHSVFDVPLHYNLYNASKSGGNYDMRNIFNGTVVQRHPSHAVTFVDNHDSQPEEALESFVEEWFKPLAYALTLTREQGYPSVFYGDYYGIPTHGVPAMRSKIDPILEARQKYAYGPQHDYLDHPDVIGWTREGDSSHPKSGLATLITDGPGGSKRMYAGLKNAGETWYDITGNRSDTVKIGSDGWGEFHVNDGSVSIYVQK

SEQ ID NO: 37906 - protein, 480 aa, Synthetic construct
NGTMMQYFEWYLPNDGNHWRRLNSDASNLKSKGITAVWIPPAWKGASQNDVGYGAYDLYDLGEFNQKGTVRTKYGTRSQLQAAVTSLKNNGIQVYGDVVMNHKGGADATEMVRAVEVNPNNRNQEVTGEYTIEAWTRFDFPGRGNTHSSFKWRWYHFDGVDWDQSRRLNNRIYKFRGHGKAWDWEVDTENGNYDYLMYADIDMDHPEVVNELRNWGVWYTNTLGLDGFRIDAVKHIKYSFTRDWINHVRSATGKNMFAVAEFWKNDLGAIENYLQKTNWNHSVFDVPLHYNLYNASKSGGNYDMRNIFNGTVVQRHPSHAVTFVDNHDSQPEEALESFVEEWFKPLAYALTLTREQGYPSVFYGDYYGIPTHGVPAMRSKIDPILEARQKYAYGPQHDYLDHPDVIGWTREGDSSHPKSGLATLITDGPGGSKRMYAGLKNAGETWYDITGNRSDTVKIGSDGWGEFHVNDGSVSIYVQK

SEQ ID NO: 37907 - protein, 480 aa, Synthetic construct
NGTMMQYFEWYLPNDGNHWNRLNSDASNLKSKGITAVWIPPAWKGASQNDVGYGAYDLYDLGEFNQKGTVRTKYGTRSQLQAAVTSLKNNGIQVYGDVVMNHKGGADATEMVRAVEVNPNNRNQEVTGEYTIEAWTRFDFPGRGNTHSSFKWRWYHFDGVDWDQSRRLNNRIYKFRGHGKAWDWEVDTENGNYDYLMYADIDMDHPEVVNELRNWGVWYTNTLGLDGFRIDAVKHIKYSFTRDWINHVRSATGKNMFAVAEFWKNDLGAIENYLQKTNWNHSVFDVPLHYNLYNASKSGGNYDMRNIFNGTVVQRHPSHAVTFVDNHDSQPEEALESFVEEWFKPLAYATTLTREQGYPSVFYGDYYGIPTHGVPAMRSKIDPILEARQKYAYGPQHDYLDHPDVIGWTREGDSSHPKSGLATLITDGPGGSKRMYAGLKNAGETWYDITGNRSDTVKIGSDGWGEFHVNDGSVSIYVQK

SEQ ID NO: 37908 - protein, 480 aa, Synthetic construct
NGTMMQYFEWYLPNDGNHWNRLNSDASNLKSKGITAVWIPPAWKGASQNDVGYGAYDLYDLGEFHQKGTVRTKYGTRSQLQAAVTSLKNNGIQVYGDVVMNHKGGADATEMVRAVEVNPNNRNQEVTGEYTIEAWTRFDFPGRGNTHSSFKWRWYHFDGVDWDQSRRLNNRIYKFRGHGKAWDWEVDTENGNYDYLMYADIDMDHPEVVNELRNWGVWYTNTLGLDGFRIDAVKHIKYSFTRDWINHVRSATGKNMFAVAEFWKNDLGAIENYLQKTNWNHSVFDVPLHYNLYNASKSGGNYDMRNIFNGTVVQRHPSHAVTFVDNHDSQPEEALESFVEEWFKPLAYALTLTREQGYPSVFYGDYYGIPTHGVPAMRSKIDPILEARQKYAYGPQHDYLDHPDVIGWTREGDSSHPKSGLATLITDGPGGSKRMYAGLKNAGETWYDITGNRSDTVKIGSDGWGEFHVNDGSVSIYVQK

SEQ ID NO: 37909 - protein, 480 aa, Synthetic construct
NGTMMQYFEWYLPNDGNHWNRLNSDASNLKSKGITAVWIPPAWKGASQNDVGYGAYDLYDLGEFNQKGTVRTKYGTRSQLQAAVTSLKNNGIQVYGDVVMNHKGGADATEMVRAVEVNPNNRNQEVTGEYTIEAWTRFDFPGRGNTHSSFKWQWYHFDGVDWDQSRRLNNRIYKFRGHGKAWDWEVDTENGNYDYLMYADIDMDHPEVVNELRNWGVWYTNTLGLDGFRIDAVKHIKYSFTRDWINHVRSATGKNMFAVAEFWKNDLGAIENYLQKTNWNHSVFDVPLHYNLYNASKSGGNYDMRNIFNGTVVQRHPSHAVTFVDNHDSQPEEALESFVEEWFKPLAYALTLTREQGYPSVFYGDYYGIPTHGVPAMRSKIDPILEARQKYAYGPQHDYLDHPDVIGWTREGDSSHPKSGLATLITDGPGGSKRMYAGLKNAGETWYDITGNRSDTVKIGSDGWGEFHVNDGSVSIYVQK

SEQ ID NO: 37910 - protein, 480 aa, Synthetic construct
NGTMMQYFEWYLPNDGNHWNRLNSDASNLKSKGITAVWIPPAWKGASQNDVGYGAYDLYDLGEFNQKGTVRTKYGTRSQLQAAVTSLKNNGIQVYGDVVMNHKGGADATEMVRAVEVNPNNRNQEVTGEYTIEAWTRFDFPGRGNTHSSFKWRWYHFDGVDWDQSRRLNNRIYKFRGHGKAWDWEVDTENGNYDYLMYADIDMDHPEVVNELRNWGTWYTNTLGLDGFRIDAVKHIKYSFTRDWINHVRSATGKNMFAVAEFWKNDLGAIENYLQKTNWNHSVFDVPLHYNLYNASKSGGNYDMRNIFNGTVVQRHPSHAVTFVDNHDSQPEEALESFVEEWFKPLAYALTLTREQGYPSVFYGDYYGIPTHGVPAMRSKIDPILEARQKYAYGPQHDYLDHPDVIGWTREGDSSHPKSGLATLITDGPGGSKRMYAGLKNAGETWYDITGNRSDTVKIGSDGWGEFHVNDGSVSIYVQK

SEQ ID NO: 37911 - protein, 480 aa, Synthetic construct
NGTMMQYFEWYLPNDGNHWNRLNSDASNLKSKGITAVWIPPAWKGASQNDVGYGAYDLYDLGEFNQKGTVRTKYGTRSQLQAAVTSLKNNGIQVYGDVVMNHKGGADATEMVRAVEVNPNNRNQEVTGEYTIEAWTRFDFPGRGNTHSSFKWRWYHFDGVDWDQSRRLNNRIYKFRGHGKAWDWEVDTENGNYDYLMYADIDMDHPEVVNELRNWGVWYTNTLGLDGFRIDAVKHIKYSFTRDWINHVRSATGKNMFAVAEFWKNDLGAIENYLQKTNWNHSVFDVPLHYNLYSASKSGGNYDMRNIFNGTVVQRHPSHAVTFVDNHDSQPEEALESFVEEWFKPLAYALTLTREQGYPSVFYGDYYGIPTHGVPAMRSKIDPILEARQKYAYGPQHDYLDHPDVIGWTREGDSSHPKSGLATLITDGPGGSKRMYAGLKNAGETWYDITGNRSDTVKIGSDGWGEFHVNDGSVSIYVQK

SEQ ID NO: 37912 - protein, 480 aa, Synthetic construct
NGTMMQYFEWYLPNDGNHWNRLNSDASNLKSKGITAVWIPPAWKGASQNDVGYGAYDLYDLGEFNQKGTVRTKYGTRSQLQAAVTSLKNNGIQVYGDVVMNHKGGADATEMVRAVEVNPNNRNQEVTGEYTIEAWTGFDFPGRGNTHSSFKWRWYHFDGVDWDQSRRLNNRIYKFRGHGKAWDWEVDTENGNYDYLMYADIDMDHPEVVNELRNWGVWYTNTLGLDGFRIDAVKHIKYSFTRDWINHVRSATGKNMFAVAEFWKNDLGAIENYLQKTNWNHSVFDVPLHYNLYNASKSGGNYDMRNIFNGTVVQRHPSHAVTFVDNHDSQPEEALESFVEEWFKPLAYALTLTREQGYPSVFYGDYYGIPTHGVPAMRSKIDPILEARQKYAYGPQHDYLDHPDVIGWTREGDSSHPKSGLATLITDGPGGSKRMYAGLKNAGETWYDITGNRSDTVKIGSDGWGEFHVNDGSVSIYVQK

SEQ ID NO: 37913 - protein, 480 aa, Synthetic construct
NGTIMQYFEWYLPNDGNHWNRLNSDASNLKSKGITAVWIPPAWKGASQNDVGYGAYDLYDLGEFNQKGTVRTKYGTRSQLQAAVTSLKNNGIQVYGDVVMNHKGGADATEMVRAVEVNPNNRNQEVTGEYTIEAWTRFDFPGRGNTHSSFKWRWYHFDGVDWDQSRRLNNRIYKFRGHGKAWDWEVDTENGNYDYLMYADIDMDHPEVVNELRNWGVWYTNTLGLDGFRIDAVKHIKYSFTRDWINHVRSATGKNMFAVAEFWKNDLGAIENYLQKTNWNHSVFDVPLHYNLYNASKSGGNYDMRNIFNGTVVQRHPSHAVTFVDNHDSQPEEALESFVEEWFKPLAYALTLTREQGYPSVFYGDYYGIPTHGVPAMRSKIDPILEARQKYAYGPQHDYLDHPDVIGWTREGDSSHPKSGLATLITDGPGGSKRMYAGLKNAGETWYDITGNRSDTVKIGSDGWGEFHVNDGSVSIYVQK

SEQ ID NO: 37914 - protein, 480 aa, Synthetic construct
NGTMMQYFEWYLPNDGNHWNRLNSDASNLKSKGITAVWIPPAWKGASQNDVGYGAYDLYDLGEFNQKGTVRTKYGTRSQLQAAVTSLKNNGIQVYGDVVINHKGGADATEMVRAVEVNPNNRNQEVTGEYTIEAWTRFDFPGRGNTHSSFKWRWYHFDGVDWDQSRRLNNRIYKFRGHGKAWDWEVDTENGNYDYLMYADYDMDHPEVVNELRNWGVWYTNTLGLDGFRIDAVKHIKYSFTRDWINHVRSATGKNMFAVAEFWKNDLGAIENYLQKTNWNHSVFDVPLHYNLYNASKSGGNYDMRNIFNGTVVQRHPSHAVTFVDNHDSQPEEALESFVEEWFKPLAYALTLTREQGYPSVFYGDYYGIPTHGVPAMRSKIDPILEARQKYAYGPQHDYLDHPDVIGWTREGDSSHPKSGLATLITDGPGGSKRMYAGLKNAGETWYDITGNRSDTVKIGSDGWGEFHVNDGSVSIYVQK

SEQ ID NO: 37915 - protein, 480 aa, Synthetic construct
NGTMMQYFEWYLPNDGNHWNRLNSDASNLKSKGITAVWIPPAWKGASQNDVGYGAYDLYDLGEFNQKGTVRTKYGTRSQLQAAVTSLKNNGIQVYGDVVMNHKGGADATEMVRAVEVNPNNRNQEVTGEYTIEAWTRFDFPGRGNTHSSFKWRWYHFDGVDWDQSRRLNNRIYKFRGHGKAWDWEVDTENGNYDYLMYADYDMDHPEVVNELRNWGVWYTNTLGLDGFRIDAVKHIKYSFVRDWINHVRSATGKNMFAVAEFWKNDLGAIENYLQKTNWNHSVFDVPLHYNLYNASKSGGNYDMRNIFNGTVVQRHPSHAVTFVDNHDSQPEEALESFVEEWFKPLAYALTLTREQGYPSVFYGDYYGIPTHGVPAMRSKIDPILEARQKYAYGPQHDYLDHPDVIGWTREGDSSHPKSGLATLITDGPGGSKRMYAGLKNAGETWYDITGNRSDTVKIGSDGWGEFHVNDGSVSIYVQK

SEQ ID NO: 37916 - protein, 480 aa, Synthetic construct
NGTMMQYFEWYLPNDGNHWNRLNSDASNLKSKGITAVWIPPAWKGASQNDVGYGAYDLYDLGEFNQKGTVRTKYGTRSQLQAAVTSLKNNGIQVYGDVVMNHKGGADATEMVRAVEVNPNNRNQEVTGEYTIEAWTRFDFPGRGNTHSSFKWRWYHFDGVDWDQSRRLNNRIYKFRGHGKAWDWEVDTENGNYDYLMYADYDMDHPEVVNEVRNWGVWYTNTLGLDGFRIDAVKHIKYSFTRDWINHVRSATGKNMFAVAEFWKNDLGAIENYLQKTNWNHSVFDVPLHYNLYNASKSGGNYDMRNIFNGTVVQRHPSHAVTFVDNHDSQPEEALESFVEEWFKPLAYALTLTREQGYPSVFYGDYYGIPTHGVPAMRSKIDPILEARQKYAYGPQHDYLDHPDVIGWTREGDSSHPKSGLATLITDGPGGSKRMYAGLKNAGETWYDITGNRSDTVKIGSDGWGEFHVNDGSVSIYVQK

SEQ ID NO: 37917 - protein, 480 aa, Synthetic construct
NGTMMQYFEWYLPNDGNHWNRLNSDASNLKSKGITAVWIPPAWKGVSQNDVGYGAYDLYDLGEFNQKGTVRTKYGTRSQLQAAVTSLKNNGIQVYGDVVMNHKGGADATEMVRAVEVNPNNRNQEVTGEYTIEAWTRFDFPGRGNTHSSFKWRWYHFDGVDWDQSRQLSNRIYKFRGHGKAWDWEVDTEFGNYDYLMYADYDMDHPEVVNELRNWGVWYTNTLGLDGFRIDAVKHIKYSFTRDWINHVRSATGKNMFAVAEFWKNDLGAIENYLQKTNWNHSVFDVPLHYNLYNASKSGGNYDMRNIFNGTVVQRHPSHAVTFVDNHDSQPEEALESFVEEWFKPLAYALTLTREQGYPSVFYGDYYGIPTHGVPAMRSKIDPILEARQKYAYGPQHDYLDHPDVIGWTREGDSSHPKSGLATLITDGPGGSKRMYAGLKNAGETWYDITGNRSDTVKIGSDGWGEFHVNDGSVSIYVQK

SEQ ID NO: 37918 - protein, 480 aa, Synthetic construct
NGTMMQYFEWYLPNDGNHWNRLNTDASNLKSKGITAVWIPPAWKGASQNDVGYGAYDLYDLGEFNQKGTVRTKYGTRSQLQAAVTSLKNNGIQVYGDVVMNHKGGADATEMVRAVEVNPNNRNQEVTGEYTIEAWTRFDFPGRGNTHSSFKWRWYHFDGVDWDQSRRLNNRIYKFRGHGKAWDWEVDTENGNYDYLMYADIDMDHPEVVNELRNWGVWYTNTLGLDGFRIDAVKHIKYSFTRDWINHVRSATGKNMFAVAEFWKNDLGAIENYLQKTNWNHSVFDVPLHYNLYNASKSGGNYDMRNIFNGTVVQRHPSHAVTFVDNHDSQPEEALESFVEEWFKPLAYALTLTREQGYPSVFYGDYYGIPTHGVPAMRSKIDPILEARQKYAYGPQHDYLDHPDVIGWTREGDSSHPKSGLATLITDGPGGSKRMYAGLKNAGETWYDITGNRSDTVKIGSDGWGEFHVNDGSVSIYVQK

SEQ ID NO: 37919 - protein, 480 aa, Synthetic construct
NGTMMQYFEWYLPNDGNHWNRLNSDASNLKSKGITAVWIPPAWKGTSQNDVGYGAYDLYDLGEFNQKGTVRTKYGTRSQLQAAVTSLKNNGIQVYGDVVMNHKGGADATEMVRAVEVNPNNRNQEVTGEYTIEAWTRFDFPGRGNTHSSFKWRWYHFDGVDWDQSRRLNNRIYKFRGHGKAWDWEVDTENGNYDYLMYADIDMDHPEVVNELRNWGVWYTNTLGLDGFRIDAVKHIKYSFTRDWINHVRSATGKNMFAVAEFWKNDLGAIENYLQKTNWNHSVFDVPLHYNLYNASKSGGNYDMRNIFNGTVVQRHPSHAVTFVDNHDSQPEEALESFVEEWFKPLAYALTLTREQGYPSVFYGDYYGIPTHGVPAMRSKIDPILEARQKYAYGPQHDYLDHPDVIGWTREGDSSHPKSGLATLITDGPGGSKRMYAGLKNAGETWYDITGNRSDTVKIGSDGWGEFHVNDGSVSIYVQK

SEQ ID NO: 37920 - protein, 480 aa, Synthetic construct
NGTMMQYFEWYLPNDGNHWNRLNSDASNLKSKGITAVWIPPAWKGASQNDVGYGAYDLYDLGEFNQKGTVRTKYGTRSQLQAAVTSLKNNGIQVYGDVVMNHKGGADATEMVRAVEVNPNNRNQEVTGEYTIEAWTRFDFPGRGNTHSSFKWRWYHFDGVDWDQSRRLNNRIYKFRGHGKAWDWEVDTENGNYDYLMYADIDMDHPEVVNELRNWGVWYTNTLGLDGFRIDAVKHIKYSFTRDWINHVRSATGKNMFAVAEFWKNDLGAIENYLAKTNWNHSVFDVPLHYNLYNASKSGGNYDMRNIFNGTVVQRHPSHAVTFVDNHDSQPEEALESFVEEWFKPLAYALTLTREQGYPSVFYGDYYGIPTHGVPAMRSKIDPILEARQKYAYGPQHDYLDHPDVIGWTREGDSSHPKSGLATLITDGPGGSKRMYAGLKNAGETWYDITGNRSDTVKIGSDGWGEFHVNDGSVSIYVQK

SEQ ID NO: 37921 - protein, 480 aa, Synthetic construct
NGTMMQYFEWYLPNDGNHWNRLNSDASNLKSKGITAVWIPPAWKGASQNDVGYGAYDLYDLGEFNQKGTVRTKYGTRSQLQSAVTSLKNNGIQVYGDVVMNHKGGADATEMVRAVEVNPNNRNQEVTGEYTIEAWTRFDFPGRGNTHSSFKWRWYHFDGVDWDQSRRLNNRIYKFRGHGKAWDWEVDTENGNYDYLMYADIDMDHPEVVNELRNWGVWYTNTLGLDGFRIDAVKHIKYSFTRDWINHVRSATGKNMFAVAEFWKNDLGAIENYLQKTNWNHSVFDVPLHYNLYNASKSGGNYDMRNIFNGTVVQRHPSHAVTFVDNHDSQPEEALESFVEEWFKPLAYALTLTREQGYPSVFYGDYYGIPTHGVPAMRSKIDPILEARQKYAYGPQHDYLDHPDVIGWTREGDSSHPKSGLATLITDGPGGSKRMYAGLKNAGETWYDITGNRSDTVKIGSDGWGEFHVNDGSVSIYVQK

SEQ ID NO: 37922 - protein, 480 aa, Synthetic construct
NGTMMQYFEWYLPNDGNHWNRLNSDASNLKSKGITAVWIPPAWKGASQNDVGYGAYDLYDLGEFNQKGTVRTKYGTRSQLQAAVTSLKNNGIQVYGDVVMNHKGGADATEMVNAVEVNPNNRNQEVTGEYTIEAWTRFDFPGRGNTHSSFKWRWYHFDGVDWDQSRRLNNRIYKFRGHGKAWDWEVDTENGNYDYLMYADIDMDHPEVVNELRNWGVWYTNTLGLDGFRIDAVKHIKYSFTRDWINHVRSATGKNMFAVAEFWKNDLGAIENYLQKTNWNHSVFDVPLHYNLYNASKSGGNYDMRNIFNGTVVQRHPSHAVTFVDNHDSQPEEALESFVEEWFKPLAYALTLTREQGYPSVFYGDYYGIPTHGVPAMRSKIDPILEARQKYAYGPQHDYLDHPDVIGWTREGDSSHPKSGLATLITDGPGGSKRMYAGLKNAGETWYDITGNRSDTVKIGSDGWGEFHVNDGSVSIYVQK

SEQ ID NO: 37923 - protein, 480 aa, Synthetic construct
NGTMMQYFEWYLPNDGNHWNRLNSDASNLKSKGITAVWIPPAWKGASQNDVGYGAYDLYDLGEFNQKGTVRTKYGTRSQLQAAVTSLKNNGIQVYGDVVMNHKGGADATEMVRAVEVNPNNRNQEVTGEYTIEAWTRFDFPGRGNTHSSFKWRWYHFDGVDWDQSRRLNNRIYKFRGHGKAWDWEVDTENGNYDYLMYADIDMDHPEVVNELRNWGVWYTNTLGLDGFRIDAVKHIKYSFTRDWINHVRSATGKNMFAVAEFWKNDLGAIENYLQKTNWNHSVFDVPLHYNLYNASTSGGNYDMRNIFNGTVVQRHPSHAVTFVDNHDSQPEEALESFVEEWFKPLAYALTLTREQGYPSVFYGDYYGIPTHGVPAMRSKIDPILEARQKYAYGPQHDYLDHPDVIGWTREGDSSHPKSGLATLITDGPGGSKRMYAGLKNAGETWYDITGNRSDTVKIGSDGWGEFHVNDGSVSIYVQK

SEQ ID NO: 37924 - protein, 480 aa, Bacillus sp.
NGTMMQYFEWYLPNDGNHWNRLNSDASNLKSKGITAVWIPPAWKGVSQNDVGYGAYDLYDLGEFNQKGTVRTKYGTRSQLQAAVTSLKNNGIQVYGDVVMNHKGGADATEMVRAVEVNPNNRNQEVTGEYTIEAWTRFDFPGRGNTHSSFKWRWYHFDGVDWDQSRQFSNRIYKFRGHGKAWDWEVDTEFGNYDYLMYADYDMDHPEVVNELRNWGVWYTNTLGLDGFRIDAVKHIKYSFTRDWINHVRSATGKNMFAVAEFWKNDLGAIENYLQKTNWNHSVFDVPLHYNLYNASKSGGNYDMRNIFNGTVVQRHPSHAVTFVDNHDSQPEEALESFVEEWFKPLAYALTLTREQGYPSVFYGDYYGIPTHGVPAMRSKIDPILEARQKYAYGPQHDYLDHPDVIGWTREGDSSHPKSGLATLITDGPGGSKRMYAGLKNAGETWYDITGNRSDTVKIGSDGWGEFHVNDGSVSIYVQK

SEQ ID NO: 37925 - protein, 480 aa, Bacillus sp.
NGTMMQYFEWYLPNDGNHWNRLNSDASNLKSKGITAVWIPPAWKGASQNDVGYGAYDLYDLGEFNQKGTVRTKYGTRSQLQAAVTSLKNNGIQVYGDVVMNHKGGADATEMVRAVEVNPNNRNQEVTGEYTIEAWTRFDFPGRGNTHSSFKWRWYHFDGVDWDQSRRLNNRIYKFRGHGKAWDWEVDTEFGNYDYLMYADYDMDHPEVVNELRNWGVWYTNTLGLDGFRIDAVKHIKYSFTRDWINHVRSATGKNMFAVAEFWQNDLGVIENYLQKTNWNHSVFDVPLHYNLYNASKSGGNYDMRNIFNGTVVQRHPSHAVTFVDNHDSQPEEALESFVEEWFKPLAYALTLTREQGYPSVFYGDYYGIPTHGVPAMRSKIDPILEARQKYAYGPQHDYLDHPDVIGWTREGDSSHPKSGLATLITDGPGGSKRMYAGLKNAGETWYDITGNRSDTVKIGSDGWGEFHVNDGSVSIYVQK

SEQ ID NO: 37926 - protein, 480 aa, Synthetic construct
NGTMMQYFEWYLPNDGNHWNRLNSDASNLKSKGITAVWIPPAWKGASQNDVGYGAYDLYDLGEFNQKGTVRTKYGTRSQLQAAVTSLKNNGIQVYGDVVMNHKGGADATEMVRAVEVNPNNRNQEVTGEYTIEAWTRFDFPGRGNTHSSFKWRWYHFDGVDWDQSRRLNNRIYKFRGHGKAWDWEVDTENGNYDYLMYADIDMDHPEVVNELRNWGVWYTNTLGLDGFRIDAVKHIKYSFTRDWINNVRSATGKNMFAVAEFWKNDLGAIENYLQKTNWNHSVFDVPLHYNLYNASKSGGNYDMRNIFNGTVVQRHPSHAVTFVDNHDSQPEEALESFVEEWFKPLAYALTLTREQGYPSVFYGDYYGIPTHGVPAMRSKIDPILEARQKYAYGPQHDYLDHPDVIGWTREGDSSHPKSGLATLITDGPGGSKRMYAGLKNAGETWYDITGNRSDTVKIGSDGWGEFHVNDGSVSIYVQK

SEQ ID NO: 37927 - protein, 480 aa, Synthetic construct
NGTMMQYFEWYLPNDGNHWNRLNSDASNLKSVGITAVWIPPAWKGASQNDVGYGAYDLYDLGEFNQKGTVRTKYGTRSQLQAAVTSLKNNGIQVYGDVVMNHKGGADATEMVRAVEVNPNNRNQEVTGEYTIEAWTRFDFPGRGNTHSSFKWRWYHFDGVDWDQSRRLNNRIYKFRGHGKAWDWEVDTENGNYDYLMYADIDMDHPEVVNELRNWGVWYTNTLGLDGFRIDAVKHIKYSFTRDWINHVRSATGKNMFAVAEFWKNDLGAIENYLQKTNWNHSVFDVPLHYNLYNASKSGGNYDMRNIFNGTVVQRHPSHAVTFVDNHDSQPEEALESFVEEWFKPLAYALTLTREQGYPSVFYGDYYGIPTHGVPAMRSKIDPILEARQKYAYGPQHDYLDHPDVIGWTREGDSSHPKSGLATLITDGPGGSKRMYAGLKNAGETWYDITGNRSDTVKIGSDGWGEFHVNDGSVSIYVQK

SEQ ID NO: 37928 - protein, 480 aa, Bacillus sp.
NGTMMQYFEWYLPNDGNHWNRLNSDASNLKSKGITAVWIPPAWKGASQNDVGYGAYDLYDLGEFNQKGTVRTKYGTRSQLQAAVTSLKNNGIQVYGDVVMNHKGGADATEMVRAVEVNPNNRNQEVTGEYTIEAWTRFDFPGRGNTHSSFKWRWYHFDGVDWDQSRRLNNRIYKFRGHGKAWDWEVDTEFGNYDYLMYADYDMDHPEVVNELRNWGVWYTNTLGLDGFRIDAVKHIKYSFTRDWINHVRSATGKNMFAVAEFWKNDLGKIENYLQKTNWNHSVFDVPLHYNLYNASKSGGNYDMRNIFNGTVVQRHPSHAVTFVDNHDSQPEEALESFVEEWFKPLAYALTLTREQGYPSVFYGDYYGIPTHGVPAMRSKIDPILEARQKYAYGPQHDYLDHPDVIGWTREGDSSHPKSGLATLITDGPGGSKRMYAGLKNAGETWYDITGNRSDTVKIGSDGWGEFHVNDGSVSIYVQK

SEQ ID NO: 37929 - protein, 480 aa, Synthetic construct
NGTMMQYFEWYLPNDGNHWNRLNSDASNLKSKGITAVWIPPAWKGASQNDVGYGAYDLYDLGEFNQKGTVRTKYGTRSQLQAAVTSLKNNGIQVYGDVVMNHKGGADATEMVRAVEVNPNNRNQEVTGEYTIEAWTRFDFPGRGNTHSSFKWRWYHFDGVDWDQSRQLSNRIYKFRGHGKAWDWEVDTEFGNYDYLMYADYDMDHPEVVNELRNWGVWYTNTLGLDGFRIDAVKHIKYSFTRDWINHVRSATGKNMFAVAEFWKNDLGAIENYLQKTNWNHSVFDVPLHYNLYNASKSGGNYDMRNIFNGTVVQRHPSHAVTFVDNHDSQPEEALESFVEEWFKPLAYALTLTREQGYPSVFYGDYYGIPTHGVPAMRSKIDPILEARQKYAYGPQHDYLDHPDVIGWTREGDSSHPKSGLATLITDGPGGSKRMYAGLKNAGETWYDITGNRSDTVKIGSDGWGEFHVNDGSVSIYVQK

SEQ ID NO: 37930 - protein, 480 aa, Bacillus sp.
NGTMMQYFEWYLPNDGNHWNRLNSDASNLKSKGITAVWIPPAWKGASQNDVGYGAYDLYDLGEFNQKGTVRTKYGTRSQLQAAVTSLKNNGIQVYGDVVMNHKGGADATEMVRAVEVNPNNRNQEVTGEYTIEAWTRFDFPGRGNTHSSFKWRWYHFDGVDWDQSRRLNNRIYKFRGHGKAWDWEVDTEFGNYDYLMYADYDMDHPEVVNELRNWGVWYTNTLGLDGFRIDAVKHIKFSFTRDWINHVRSATGKNMFAVAEFWKNDLGAIENYLQKTNWNHSVFDVPLHYNLYNASKSGGNYDMRNIFNGTVVQRHPSHAVTFVDNHDSQPEEALESFVEEWFKPLAYALTLTREQGYPSVFYGDYYGIPTHGVPAMRSKIDPILEARQKYAYGPQHDYLDHPDVIGWTREGDSSHPKSGLATLITDGPGGSKRMYAGLKNAGETWYDITGNRSDTVKIGSDGWGEFHVNDGSVSIYVQK

SEQ ID NO: 37931 - protein, 480 aa, Synthetic construct
NGTMMQYFEWYLPNDGNHWNRLNSDASNLKSKGITAVWIPPAWKGASQNDVGYGAYDLYDLGEFNQKGTVRTKYGTRSQLQAAVTSLKNNGIQVYGDVVMNHKGGADATEMVRAVEVNPNNRNQEVTGEYTIQAWTRFDFPGRGNTHSSFKWRWYHFDGVDWDQSRRLNNRIYKFRGHGKAWDWEVDTENGNYDYLMYADIDMDHPEVVNELRNWGVWYTNTLGLDGFRIDAVKHIKYSFTRDWINHVRSATGKNMFAVAEFWKNDLGAIENYLQKTNWNHSVFDVPLHYNLYNASKSGGNYDMRNIFNGTVVQRHPSHAVTFVDNHDSQPEEALESFVEEWFKPLAYALTLTREQGYPSVFYGDYYGIPTHGVPAMRSKIDPILEARQKYAYGPQHDYLDHPDVIGWTREGDSSHPKSGLATLITDGPGGSKRMYAGLKNAGETWYDITGNRSDTVKIGSDGWGEFHVNDGSVSIYVQK

SEQ ID NO: 37932 - protein, 480 aa, Synthetic construct
NGTMMQYFEWYLPNDGNHWNRLNSDASNLKSKGITAVWIPPAWKGASQNDVGYGAYDLYDLGEFNQKGTVRTKYGTRSQLQAAVTSLKNNGIQVYGDVVMNHKGGADATEMVRAVEVNPNNRNQEVTGEYTIEAWTRFDFPGRGNTHSSFKWRWYHFDGVDWDQSRRLNNRIYKFRGHGKAWDWEVDTENGNYDYLMYADIDMDHPEVVNELRNWGVWYTNTLGLDGFRIDAVKHIKYSFTRDWINHVRSATGKNMFAVAEFWKNDLGAIENYLTKTNWNHSVFDVPLHYNLYNASKSGGNYDMRNIFNGTVVQRHPSHAVTFVDNHDSQPEEALESFVEEWFKPLAYALTLTREQGYPSVFYGDYYGIPTHGVPAMRSKIDPILEARQKYAYGPQHDYLDHPDVIGWTREGDSSHPKSGLATLITDGPGGSKRMYAGLKNAGETWYDITGNRSDTVKIGSDGWGEFHVNDGSVSIYVQK

SEQ ID NO: 37933 - protein, 480 aa, Synthetic construct
NGTMMQYFEWYLPNDGNHWNRLNSDASNLKSKGITAVWIPPAWKGASQNDVGYGAYDLYDLGEFNQKGTVRTKYGTRSQLQAAVTSLKNNGIQVYGDVVMNHKGGADATEMVRAVEVNPNNRNQEVTGEYTIEAWTRFDFPGRGNTHSSFKWRWYHFDGVDWDQSRRLNNRIYKFRGHGKAWDWEVDTENGNYDYLMYADIDMDHPEVVNELRNWGVWYTNTLGLDGFRIDAVKHIKYSFTRDWINHVRGATGKNMFAVAEFWKNDLGAIENYLQKTNWNHSVFDVPLHYNLYNASKSGGNYDMRNIFNGTVVQRHPSHAVTFVDNHDSQPEEALESFVEEWFKPLAYALTLTREQGYPSVFYGDYYGIPTHGVPAMRSKIDPILEARQKYAYGPQHDYLDHPDVIGWTREGDSSHPKSGLATLITDGPGGSKRMYAGLKNAGETWYDITGNRSDTVKIGSDGWGEFHVNDGSVSIYVQK

SEQ ID NO: 37934 - protein, 480 aa, Synthetic construct
NGTMMQYFEWYLPNDGNHWNRLNSDASNLKSKGITAVWIPPAWKGLSQNDVGYGAYDLYDLGEFNQKGTVRTKYGTRSQLQAAVTSLKNNGIQVYGDVVMNHKGGADATEMVRAVEVNPNNRNQEVTGEYTIEAWTRFDFPGRGNTHSSFKWRWYHFDGVDWDQSRNLSNRIYKFRGHGKAWDWEVDTEFGNYDYLMYTDYDMDHPEVVNELRNWGVWYTNTLGLDGFRIDAVKHIKYSFTRDWINHVRSATGKNMFAVAEFWKNDLGAIENYLQKTNWNHSVFDVPLHYNLYNASKSGGNYDMRNIFNGTVVQRHPSHAVTFVDNHDSQPEEALESFVEEWFKPLAYALTLTREQGYPSVFYGDYYGIPTHGVPAMRSKIDPILEARQKYAYGPQHDYLDHPDVIGWTREGDSSHPKSGLATLITDGPGGSKRMYAGLKNAGETWYDITGNRSDTVKIGSDGWGEFHVNDGSVSIYVQK

SEQ ID NO: 37935 - protein, 480 aa, Synthetic construct
NGTMMQYFEWYMPNDGNHWNRLNSDASNLKSKGITAVWIPPAWKGASQNDVGYGAYDLYDLGEFNQKGTVRTKYGTRSQLQAAVTSLKNNGIQVYGDVVMNHKGGADATEMVRAVEVNPNNRNQEVTGEYTIEAWTRFDFPGRGNTHSSFKWRWYHFDGVDWDQSRRLNNRIYKFRGHGKAWDWEVDTENGNYDYLMYADIDMDHPEVVNELRNWGVWYTNTLGLDGFRIDAVKHIKYSFTRDWINHVRSATGKNMFAVAEFWKNDLGAIENYLQKTNWNHSVFDVPLHYNLYNASKSGGNYDMRNIFNGTVVQRHPSHAVTFVDNHDSQPEEALESFVEEWFKPLAYALTLTREQGYPSVFYGDYYGIPTHGVPAMRSKIDPILEARQKYAYGPQHDYLDHPDVIGWTREGDSSHPKSGLATLITDGPGGSKRMYAGLKNAGETWYDITGNRSDTVKIGSDGWGEFHVNDGSVSIYVQK

SEQ ID NO: 37936 - protein, 480 aa, Bacillus sp.
NGTMMQYFEWYLPNDGNHWNRLNSDASNLKSKGITAVWIPPAWKGLSQNDVGYGAYDLYDLGEFNQKGTVRTKYGTRSQLQAAVTSLKNNGIQVYGDVVMNHKGGADATEMVRAVEVNPNNRNQEVTGEYTIEAWTRFDFPGRGNTHSSFKWRWYHFDGVDWDQSRDLNNRIYKFRGHGKAWDWEVDTEFGNYDYLMYADYDMDHPEVVNELRNWGVWYTNTLGLDGFRIDAVKHIKYSFTRDWINHVRSATGKNMFAVAEFWKNDLGAIENYLQKTNWNHSVFDVPLHYNLYNASKSGGNYDMRNIFNGTVVQRHPSHAVTFVDNHDSQPEEALESFVEEWFKPLAYALTLTREQGYPSVFYGDYYGIPTHGVPAMRSKIDPILEARQKYAYGPQHDYLDHPDVIGWTREGDSSHPKSGLATLITDGPGGSKRMYAGLKNAGETWYDITGNRSDTVKIGSDGWGEFHVNDGSVSIYVQK

SEQ ID NO: 37937 - protein, 480 aa, Synthetic construct
NGTMMQYFEWYLPNDGNHWNRLNSDASNLKSKGITAVWIPPAWKGASQNDVGYGAYDLYDLGEFNQKGTVRTKYGTRSQLQAAVTSLKNNGIQVYGDVVMNHKGGADATEMVRAVEVNPNNRNQEVTGEYTIEAWTRFDFPGRGNTHSSFKWRWYHFDGVDWDQSRRLNNRIYKFRGHGKAWDWEVDTENGNYDYLMYADIDMDHPEVVNELRNWGVWYTNTLGLDGFRIDAVKHIKYSFTRDWINHVRSATGKNMFAVAEFWKNDLGAIENYLQKTNWNHSVFDVPLHYNLYNASKSGGNYDMRNIFNGTVVQRHPSHAVTFVDNHDSQPEEALESFVEEWFKPLAYALTLTREQGYPSVFYGDYYGIPTHGVPAMRQKIDPILEARQKYAYGPQHDYLDHPDVIGWTREGDSSHPKSGLATLITDGPGGSKRMYAGLKNAGETWYDITGNRSDTVKIGSDGWGEFHVNDGSVSIYVQK

SEQ ID NO: 37938 - protein, 480 aa, Synthetic construct
NGTMMQYFEWYLPNDGNHWNRLNSDASNLKSKGITAVWIPPAWKGASQNDVGYGAYDLYDLGEFNQKGTVRTKYGTRSQLQAAVTSLKNNGIQVYGDVVMNHKGGADATEMVRAVEVNPNNRNQEVTGEYTIEAWTRFDFPGRGNTHSSFKWRWYHFDGVDWDQSRRLNNRIYKFRGHGKAWDWEVDTENGNYDYLMYADIDMDHPEVVNELRNWGVWYTNTLGLDGFRIDAVKHIKYSFTRDWINHVRSATGKNMFAVAEFWKNDLGAIENYLQKTNYNHSVFDVPLHYNLYNASKSGGNYDMRNIFNGTVVQRHPSHAVTFVDNHDSQPEEALESFVEEWFKPLAYALTLTREQGYPSVFYGDYYGIPTHGVPAMRSKIDPILEARQKYAYGPQHDYLDHPDVIGWTREGDSSHPKSGLATLITDGPGGSKRMYAGLKNAGETWYDITGNRSDTVKIGSDGWGEFHVNDGSVSIYVQK

SEQ ID NO: 37939 - protein, 480 aa, Synthetic construct
NGTMMQYFEWYLPNDGNHWNRLNSDASNLKSKGITAVWIPPAWKGASQNDVGYGAYDLYDLGEFNQKGTVRTKYGTRSQLQAAVTSLKNNGIQVYGDVVMNHKGGADATEMVRAVEVNPNNRNQEVTGEYTIEAWTRFDFPGRGNTHSSFKWRWYHFDGVDWDQSRRLNNRIYKFRGHGKAWDWEVDTENGNYDYLMYADLDMDHPEVVNEVRNWGVWYTNTLGLDGFRIDAVKHIKYSFTRDWINHVRSATGKNMFAVAEFWKNDLGAIENYLQKTNWNHSVFDVPLHYNLYNASKSGGNYDMRNIFNGTVVQRHPSHAVTFVDNHDSQPEEALESFVEEWFKPLAYALTLTREQGYPSVFYGDYYGIPTHGVPAMRSKIDPILEARQKYAYGPQHDYLDHPDVIGWTREGDSSHPKSGLATLITDGPGGSKRMYAGLKNAGETWYDITGNRSDTVKIGSDGWGEFHVNDGSVSIYVQK

SEQ ID NO: 37940 - protein, 480 aa, Synthetic construct
NGTMMQYFEWYLPNDGNHWNRLNSDASNLKSKGITAVWIPPAWKGASQNDVGYGAYDLYDLGEFNQKGTVRTKYGTRSQLQAAVTSLKNNGIQVYGDVVMNHKGGADATENVRAVEVNPNNRNQEVTGEYTIEAWTRFDFPGRGNTHSSFKWRWYHFDGVDWDQSRRLNNRIYKFRGHGKAWDWEVDTENGNYDYLMYADIDMDHPEVVNELRNWGVWYTNTLGLDGFRIDAVKHIKYSFTRDWINHVRSATGKNMFAVAEFWKNDLGAIENYLQKTNWNHSVFDVPLHYNLYNASKSGGNYDMRNIFNGTVVQRHPSHAVTFVDNHDSQPEEALESFVEEWFKPLAYALTLTREQGYPSVFYGDYYGIPTHGVPAMRSKIDPILEARQKYAYGPQHDYLDHPDVIGWTREGDSSHPKSGLATLITDGPGGSKRMYAGLKNAGETWYDITGNRSDTVKIGSDGWGEFHVNDGSVSIYVQK

SEQ ID NO: 37941 - protein, 480 aa, Synthetic construct
NGTMMQYFEWYLPNDGNHWNRLNSDASNLKSKGITAVWIPPAWKGASQNDVGYGAYDLYDLGEFNQKGTVRTKYGTRSQLQAAVTSLKNNGIQVYGDVVMNHKGGADATEMVRAVEVNPNNRNQEVTGEYTIEAWTRFDFPGRGNTHSSFKWRWYHFDGVDWDQSRRVSNRIYKFRGHGKAWDWEVDTEFGNYDYLMYADYDMDHPEVVNELRNWGVWYTNTLGLDGFRIDAVKHIKYSFTRDWINHVRSATGKNMFAVAEFWKNDLGAIENYLQKTNWNHSVFDVPLHYNLYNASKSGGNYDMRNIFNGTVVQRHPSHAVTFVDNHDSQPEEALESFVEEWFKPLAYALTLTREQGYPSVFYGDYYGIPTHGVPAMRSKIDPILEARQKYAYGPQHDYLDHPDVIGWTREGDSSHPKSGLATLITDGPGGSKRMYAGLKNAGETWYDITGNRSDTVKIGSDGWGEFHVNDGSVSIYVQK

SEQ ID NO: 37942 - protein, 480 aa, Synthetic construct
NGTMMQYFEWYLPNDGNHWNRLNSDASNLKSKGITAVWIPPAWKGASQNDVGYGAYDLYDLGEFNQKGTVRTKYGTRSQLQAAVTSLKNNGIQVYGDVVMNHKGGADATEMVRAVEVNPNNRNQEVTGEYTIEAWTRFDFPGRGNTHSSFKWRWYHFDGVDWDQSRRLNNRIYKFRGHGKAWDWEVDTENGNYDYLMYADIDMDHPEVVNELRNWGVWYTNTLGLDGFRIDAVKHIKYSFTRDWINHVRSATGKNMFAVAEFWKNDLGAIENYLQKTNWNHSVFDVPLHYNLYNASKSGGNYDMRNIFNGTVVQRHPSHAVTFVDNHDSQPEEALESFVEPWFKPLAYALTLTREQGYPSVFYGDYYGIPTHGVPAMRSKIDPILEARQKYAYGPQHDYLDHPDVIGWTREGDSSHPKSGLATLITDGPGGSKRMYAGLKNAGETWYDITGNRSDTVKIGSDGWGEFHVNDGSVSIYVQK

SEQ ID NO: 37943 - protein, 480 aa, Synthetic construct
NGTMMQYFEWYLPNDGNHWNRLNSDASNLKSKGITAVWIPPAWKGASQNDVGYGAYDLYDLGEFNQKGTVRTKYGTRSQLQAAVTSLKNNGIQVYGDVVMNHKGGADATEMVRAVEVNPNNRNQEVTGEYTIEAWTRFDFPGRGNTHSSFKWRWYHFDGVDWDQSRRLNNRIYKFRGHGKAWDWEVDTENGNYDYLMYADIDMDHPEVVNELRNWGVWYTNTLGLDGFRIDAVKHIKYSFTRDWINHVRSATGKNMFAVAEFWKNDLGAIENYLQKTNWNHSVFDVPLHYNLYNASKSGGNYDMRNIFNGTVVQRHPSHAVTFVDNHDSQPEEALESFVEEWFKPLAYALTLTREQGYPSVFYGDYYGIPTHGVPAMRSKIDPILAARQKYAYGPQHDYLDHPDVIGWTREGDSSHPKSGLATLITDGPGGSKRMYAGLKNAGETWYDITGNRSDTVKIGSDGWGEFHVNDGSVSIYVQK

SEQ ID NO: 37944 - protein, 480 aa, Synthetic construct
NGTMMQYFEWYLPNDGNHWNRLNSDASNLKSKGITAVWIPPAWKGASQNDVGYGAYDLYDLGEFNQKGTVRTKYGTRSQLQAAVTSLKNNGIQVYGDVVMNHKGGADATEMVRAVEVNPNNRNQEVTGEYTIEAWTRFDFPGRGNTHSSFKWRWYHFDGVDWDQSRKTNNRIYKFRGHGKAWDWEVDTEFGNYDYLMYADYDMDHPEVVNELRNWGVWYTNTLGLDGFRIDAVKHIKYSFTRDWINHVRSATGKNMFAVAEFWKNDLGAIENYLQKTNWNHSVFDVPLHYNLYNASKSGGNYDMRNIFNGTVVQRHPSHAVTFVDNHDSQPEEALESFVEEWFKPLAYALTLTREQGYPSVFYGDYYGIPTHGVPAMRSKIDPILEARQKYAYGPQHDYLDHPDVIGWTREGDSSHPKSGLATLITDGPGGSKRMYAGLKNAGETWYDITGNRSDTVKIGSDGWGEFHVNDGSVSIYVQK

SEQ ID NO: 37945 - protein, 480 aa, Synthetic construct
NGTMMQYFEWYLPNDGNHWNRLNSDASNLKSKGITAVWIPPAWKGASQNDVGYGAYDLYDLGEFNQKGTVRTKYGTRSQLQAAVTSLKNNGIQVYGDVVMNHKGGADATEMVRAVEVNPNNRNQEVTGEYTIEAWTRFDFPGRGNTHSSFKWRWYHFDGVDWDQSRSLNNRIYKFRGHGKAWDWEVDTENGNYDYLMYADIDMDHPEVVNELRNWGVWYTNTLGLDGFRIDAVKHIKYSFTRDWINHVRSATGKNMFAVAEFWKNDLGAIENYLQKTNWNHSVFDVPLHYNLYNASKSGGNYDMRNIFNGTVVQRHPSHAVTFVDNHDSQPEEALESFVEEWFKPLAYALTLTREQGYPSVFYGDYYGIPTHGVPAMRSKIDPILEARQKYAYGPQHDYLDHPDVIGWTREGDSSHPKSGLATLITDGPGGSKRMYAGLKNAGETWYDITGNRSDTVKIGSDGWGEFHVNDGSVSIYVQK

SEQ ID NO: 37946 - protein, 480 aa, Synthetic construct
NGTMMQYFEWYLPNDGNHWNRLNSDASNLKSKGITAVWIPPAWKGASQNDVGYGAYDLYDLGEFNQKGTVRTKYGTRSQLQAAVTSLKNNGIQVYGDVVMNHKGGADATEMVRAVEVNPNNRNQEVTGEYTIEAWTRFDFPGRGNTHSSFKWRWYHFDGVDWDQSRRLNNRIYKFRGHGKAWDWEVDTENGNYDYLMYADFDMDHPEVVNELRNWGVWYTNTLGLDGFRIDAVKHIKYSFVRDWINHVRSATGKNMFAVAEFWKNDLGAIENYLQKTNWNHSVFDVPLHYNLYNASKSGGNYDMRNIFNGTVVQRHPSHAVTFVDNHDSQPEEALESFVEEWFKPLAYALTLTREQGYPSVFYGDYYGIPTHGVPAMRSKIDPILEARQKYAYGPQHDYLDHPDVIGWTREGDSSHPKSGLATLITDGPGGSKRMYAGLKNAGETWYDITGNRSDTVKIGSDGWGEFHVNDGSVSIYVQK

SEQ ID NO: 37947 - protein, 480 aa, Synthetic construct
NGTMMQYFEWYLPNDGNHWNRLNSDASNLKSKGITAVWIPPAWKGASQNDVGYGAYDLYDLGEFNQKGTVRTKYGTRSQLQAAVTSLKNNGIQVYGDVVMNHKGGADATEMVRAVEVNPNNRNQEVTGEYTIEAWTRFDFPGRGNTHSSFKWRWYHFDGVDWDQSRRLNNRIYKFRGHGKAWDWEVDTENGNYDYLMYADIDMDHPEVVNELRRWGVWYTNTLGLDGFRIDAVKHIKYSFTRDWINHVRSATGKNMFAVAEFWKNDLGAIENYLQKTNWNHSVFDVPLHYNLYNASKSGGNYDMRNIFNGTVVQRHPSHAVTFVDNHDSQPEEALESFVEEWFKPLAYALTLTREQGYPSVFYGDYYGIPTHGVPAMRSKIDPILEARQKYAYGPQHDYLDHPDVIGWTREGDSSHPKSGLATLITDGPGGSKRMYAGLKNAGETWYDITGNRSDTVKIGSDGWGEFHVNDGSVSIYVQK

SEQ ID NO: 37948 - protein, 480 aa, Synthetic construct
NGTMMQYFEWYLPNDGNHWNRLNSDASNLKSKGITAVWIPPAWKGASQNDVGYGAYDLYDLGEFNQKGTVRTKYGTRSQLQAAVTSLKNNGIQVYGDVVMNHKGGADATEMVRAVEVNPNNRNQEVTGEYTIEAWTRFDFPGRGNTHSSFKWRWYHFDGVDWDQSRRLNNRIYKFRGHGKAWDWEVDTENGNYDYLMYADYDMDHPEVVNELRNWGVWYTNTLGLDGFRIDAVKHIKYSFTRDWINHVRSATGKNMFAVAEFWKNDLGAIENYLQKTNWNHSVFDVPLHYNLYNASKSGGNYDMRNIFNGTVVQRHPSHAVTFVDNHDSQPEEALESFVEEWFKPLAYALTLTREQGYPSVFYGDYYGIPTHGVPAMRSKIDPILEARQKYAYGPQHDYLDHPDVIGWTREGDSSHPKSGLATLITDGPGGSKRMYAGLKNAGETWYDITGNRSDTVKIGSDGWGEFHVNDGSVSIYVQK

SEQ ID NO: 37949 - protein, 480 aa, Synthetic construct
NGTMMQYFEWYLPNDGNHWNRLNSDASNLKSKGITAVWIPPAWKGASQNDVGYGAYDLYDLGEFNQKGTVRTKYGTRSQLQAAVTSLKNNGIQVYGDVVMNHKGGADATEMVRAVEVNPNNRNQEVTGEYTIEAWTRFDFPGRGNTHSSFKWRWYHFDGVDWDQSRRLNNRIYKFRGHGKAWDWEVDTENGNYDYLMYADIDMDHPEVVNELRNWGVWYTNTLGLDGFRIDAVKHIKYSFTRDWINHVRSATGKNMFAVAEFWKNDLGAIENYLQKTNWNHSVFDVPLHYNLYNASKSGGNYDMRNIFNGTVVQRHPSHAVTFVDNHDSQPEEALESFVEEWFKPLAYALTLTREQGYPSVFYGDYYGIPTHGVPAMRSKIDPILEARQQYAYGPQHDYLDHPDVIGWTREGDSSHPKSGLATLITDGPGGSKRMYAGLKNAGETWYDITGNRSDTVKIGSDGWGEFHVNDGSVSIYVQK

SEQ ID NO: 37950 - protein, 480 aa, Synthetic construct
NGTMMQYFEWYLPNDGNHWNRLNSDASNLKSKGITAVWIPPAWKGASQNDVGYGAYDLYDLGEFNQKGTVRTKYGTRSQLQAAVTSLKNNGIQVYGDVVMNHKGGADATEMVRAVEVNPNNRNQEVTGEYTIEAWTRFDFPGRGNTHSSFKWRWYHFDGVDWDQSRRLNNRIYKFRGHGKAWDWEVDTENGNYDYLMYADYDMDHPEVVNEIRNWGVWYTNTLGLDGFRIDAVKHIKYSFIRDWINHVRSATGKNMFAVAEFWKNDLGAIENYLQKTNWNHSVFDVPLHYNLYNASKSGGNYDMRNIFNGTVVQRHPSHAVTFVDNHDSQPEEALESFVEEWFKPLAYALTLTREQGYPSVFYGDYYGIPTHGVPAMRSKIDPILEARQKYAYGPQHDYLDHPDVIGWTREGDSSHPKSGLATLITDGPGGSKRMYAGLKNAGETWYDITGNRSDTVKIGSDGWGEFHVNDGSVSIYVQK

SEQ ID NO: 37951 - protein, 480 aa, Synthetic construct
NGTMMQYFEWYLPNDGNHWNRLNSDASNLKSKGITAVWIPPAWKGASQNDVGYGAYDLYDLGEFNQKGTVRTKYGTRSQLQAAVTSLKNNGIQVYGDVVMNHKGGADATEMVRAVEVNPNNRNQEVTGEYTIEAWTRFDFPGRGNTHSSFKWRWYHFDGVDWDQSRRLNNRIYKFRGHGKAWDWEVDTENGNYDYLMYADIDMDHPEVVNELRNWGVWYTNTLGLDGFRIDAVKHIKYSFTRDWINHVRSATGKNMFAVAEFWKNDLGAIENYLQKTNWNHSVFDVPLHYNLYNASKSGGNYDMRNIFNGTVVQRHPSHAVTFVDNHDSQPEEALESFVEEWFKPLAYALTLTREQGYPSVFYGDYYGIPTHGVPAMRSQIDPILEARQKYAYGPQHDYLDHPDVIGWTREGDSSHPKSGLATLITDGPGGSKRMYAGLKNAGETWYDITGNRSDTVKIGSDGWGEFHVNDGSVSIYVQK

SEQ ID NO: 37952 - protein, 480 aa, Synthetic construct
NGTMMQYFEWYLPNDGNHWNRLNSDASNLKSKGITAVWIPPAWKGASQNDVGYGAYDLYDLGEFNQKGTVRTKYGTRSQLQAAVTSLKNNGIQVYGDVVMNHKGGADATEMVRAVEVNPNNRNQEVTGEYTIEAWTRFDFPGRGNTHSSFKWRWYHFDGVDWDQSRRLNNRIYKFRGHGKAWDWEVDTENGNYDYLMYADIDMDHPEVVNELRNWGVWYTNTLGLDGFRIDAVKHIKYSFTRDWINHVRSATGKNMFAVAEFWKNDLGAIENYLQKTNWNHSVFDVPLHYNLYNASKSGGNYDMRQIFNGTVVQRHPSHAVTFVDNHDSQPEEALESFVEEWFKPLAYALTLTREQGYPSVFYGDYYGIPTHGVPAMRSKIDPILEARQKYAYGPQHDYLDHPDVIGWTREGDSSHPKSGLATLITDGPGGSKRMYAGLKNAGETWYDITGNRSDTVKIGSDGWGEFHVNDGSVSIYVQK

SEQ ID NO: 37953 - protein, 480 aa, Synthetic construct
NGTMMQYFEWYLPNDGNHWNRLNSDASNLKSKGITAVWIPPAWKGASQNDVGYGAYDLYDLGEFNQKGTVRTKYGTRSQLQAAVTSLKNNGIQVYGDVVMNHKGGADATEMVRAVEVNPNNRNQEVTGEYTIEAWTRFDFPGRGNTHSSFKWRWYHFDGVDWDQSRRLNNRIYKFRGHGKAWDWEVDTENGNYDYLMYADIDMDHPEVVNELRNWGVWYTNTLGLDGFRIDAVKHIKYSFTRDWINHVRSATGKNMFAVAEFWKNDLGAIENYLQKTNWNHSVFDVPLHYNLYNASKSGGNYDMRNIFNGTVVQRHPSHAVTFVDNHDSQPEEALESFVEEWFKPLAYALTLTREQGYPSVFYGDYYGIPTHGVPAYRSKIDPILEARQKYAYGPQHDYLDHPDVIGWTREGDSSHPKSGLATLITDGPGGSKRMYAGLKNAGETWYDITGNRSDTVKIGSDGWGEFHVNDGSVSIYVQK

SEQ ID NO: 37954 - protein, 344 aa, Bacillus sp.
DVTAVVVNPANRNQETSEELQLKVWTVFRFPGRGNTRSWQWYHSSGTDWDESRKTRLFKFRGWGAWDWEGGNYNYLTYIDDDDHPDGVANTKKWGLWYFNELSDGFRIEAGGHIKWIKSFIRDWVPAIRQVSFTVNFEWQNKVGKLEKYTNKNSIKSLHKVPLHFNLQAASSQGGGYNLRRALTGLVVERPPEKLVTVPNHDTQNGQAEFTIQIWFKPLAYAFILERDYGYPQFYGDIYGTKGLSPKEIFSLKDIPALKIKEYIYGPNHDPIHPYDVIGWTRPGDYPYFGLAAFLTDPGGRMKPNAGETWYDKHPGNRSDLVKIGPDKWGEFHINDGSISIYVK

SEQ ID NO: 37955 - protein, 480 aa, Cytophaga sp.
NGTMMQYFEWYVPNDGQQWNRLRTDAPYLSSVGITAVWTPPAYKGTSQADVGYGPYDLYDLGEFNQKGTVRTKYGTKGELKSAVNTLHSNGIQVYGDVVMNHKAGADYTENVIAVEVNPSNRYQETSGEYNIQAWTGFNFPGRGTTYSNWKWQWFHFDGTDWDQSRSLSRIFKFDGKAWDWEVSSENGNYDYLMYADYDYDHPDVVNEMKKWGVWYANEVGLDGYRLDAVKHIKFQFLKDWVDNARAATGKEMFTVGEYWQNDLGALNNYLAKVNYNQSLFDAPLHYNFYAASTGGGYYDMRNILNNTLVASNPTKAVTLVENHDTQPGQSLESTVQPWFKPLAYAFILTRSGGYPSVFYGDMYGTKGTTTREIPALKSKIEPLLKARKDYAYGTQRDYIDNPDVIGWTREGDSTKAKSGLATVITDGPGGSKRMYVGTSNAGEIWYDLTGNRTDKITIGSDGYATFPVNGGSVSVWVQQ

SEQ ID NO: 37956 - protein, 480 aa, Cytophaga sp.
NGTMMQYFEWYVPNDGQQWNRLRTDAPYLSSVGITAVWTPPAYKGTSQADVGYGPYDLYDLGEFNQKGTVRTKYGTKGELKSAVNTLHMNGIQVYGDVVMNHKAGADYTENVTAVEVNPSNRYQETSGEYNIQAWTGFNFPGRGTTYSNWKWQWFHFDGTDWDQSRSLSRIFKFDGKAWDWEVSSENGNYDYLMYADYDYDHPDVVNEMKKWGVWYANEVGLDGYRLDAVKHIKFQFLKDWVDNARAATGKEMFTVGEYWQNDLGALNNYLAKVNYNQSLFDAPLHYNFYAASTGGGYYDMRNILNNTLVASNPTKAVTLVENHDTQPGQSLESTVQPWFKPLAYAFILTRSGGYPSVFYGDMYGTKGTTTREIPALKSKIEPLLKARKDYAYGTQRDYIDNPDVIGWTREGDSTKAKSGLATVITDGPGGSKRMYVGTSNAGEIWYDLTGNRTDKITIGSDGYATFPVNGGSVSVWVQQ

SEQ ID NO: 37957 - protein, 480 aa, Cytophaga sp.
NGTMMQYFEWYVPNDGQQWNRLRTDAPYLSSVGITAVWTPPAYKGTSQADVGYGPYDLYDLGEFNQKGTVRTKYGTKGELKSAVNTLHSNGIQVYGDVVMNHKAGADYTENVTAVEVNPSNRYQETSGEYNIQAWTGFNFPGRGTTYSNWKWQWFHFDGTDWDQSRSLSRIFKFDGKAWDWEVSSENGNYDYLMYADYDYDHPDVVNEMKKWGVWYANEVGLDGYRLDAVKHIKFQFLKDWVDNARAATGKEMFTVGEYWQNDLGALNNYLAKVNYNQSLFDAPLHYNFYAASTGGGYYDMRNILNNTLVASNPTKAVTLVENHDTQPGQSLESTVQPWFKPLAYAFILTRSGGYPSVFYGDMYGTKGTTTREIPALKSKIEPLLKARKDYAYGTQRDYIDNPDVIGWTREGDATKAKSGLATVITDGPGGSKRMYVGTSNAGEIWYDLTGNRTDKITIGSDGYATFPVNGGSVSVWVQQ

SEQ ID NO: 37958 - protein, 480 aa, Cytophaga sp.
NGTMMQYFEWYVPNDGQQWNRLRTDAPYLSSVGITAVWTPPAYKGTSQADVGYGPYDLYDLGEFNQKGTVRTKYGTKGELKSAVNTLHSNGIQVYGDVVMNHKAGADYTENVTAVEVNPSNRYQETSGEYNIQAWTGFNFPGRGTTYSNWKWQWFHFDGTDWDQSRSLSRIFKFDGKAWDWEVSSENGNYDYLMYADYDYDHPDVVNEMKKWGVWYANEVGLDGYRLDAVKHIKFQFLKDWVDNARAATGKEMFTVGEYWQNDLGALNNYLAKVNYNQSLFDAPLHYNFYEASTGGGYYDMRNILNNTLVASNPTKAVTLVENHDTQPGQSLESTVQPWFKPLAYAFILTRSGGYPSVFYGDMYGTKGTTTREIPALKSKIEPLLKARKDYAYGTQRDYIDNPDVIGWTREGDSTKAKSGLATVITDGPGGSKRMYVGTSNAGEIWYDLTGNRTDKITIGSDGYATFPVNGGSVSVWVQQ

SEQ ID NO: 37959 - protein, 480 aa, Cytophaga sp.
NGTMMQYFEWYVPNDGQQWNRLRTDAPYLSSVGITAVWTPPAYKGTSQADVGYGPYDLYDLGEFNQKGTVRTKYGTKGELKSAVNTLHSNGIQVYGDVVMNHKAGADYTENVTAVEVNPSNRYQETSGEYNIQAWTGFNFMGRGTTYSNWKWQWFHFDGTDWDQSRSLSRIFKFDGKAWDWEVSSENGNYDYLMYADYDYDHPDVVNEMKKWGVWYANEVGLDGYRLDAVKHIKFQFLKDWVDNARAATGKEMFTVGEYWQNDLGALNNYLAKVNYNQSLFDAPLHYNFYAASTGGGYYDMRNILNNTLVASNPTKAVTLVENHDTQPGQSLESTVQPWFKPLAYAFILTRSGGYPSVFYGDMYGTKGTTTREIPALKSKIEPLLKARKDYAYGTQRDYIDNPDVIGWTREGDSTKAKSGLATVITDGPGGSKRMYVGTSNAGEIWYDLTGNRTDKITIGSDGYATFPVNGGSVSVWVQQ

SEQ ID NO: 37960 - protein, 480 aa, Cytophaga sp.
NGTMMQYFEWYVPNDGQQWNRLRTDAPYLSSVGITAVWTPPAYKGTSQADVGYGPYDLYDLGEFNQKGTVRTKYGTKGELKSAVNTLHSNGIQVYGDVVMNHKAGADYTENVTAVEVNPSNRYQETSGEYNIQAWTGFNFPGRGTTYSNWKWQWFHFDGTDWDQSRSLSRIFKFDGKAWDWEVSSENGNYDYLMYADYDYDHPDVVNEMKKWGVWYANEVGLDGYRLDAVKHIKFQFLKDWVDNARAATGKEMFTVGEYWQNDLGALNNYLAKVNYNQSLFDAPLHYNFYAASTGGGYYDMRNILNNTLVASNPTKAVTLVENHDTQPGQSLESTVQPWFKPLAYAFILTRSGGYPSVFYGDMYGTKGTTTREIPALKSKIEPLLKARKDYAYGTARDYIDNPDVIGWTREGDSTKAKSGLATVITDGPGGSKRMYVGTSNAGEIWYDLTGNRTDKITIGSDGYATFPVNGGSVSVWVQQ

SEQ ID NO: 37961 - protein, 480 aa, Cytophaga sp.
NGTMMQYFEWYVPNDGQQWNRLRTDAPYLSSVGITAVWTPPAYKGTSQADVGYGPYDLYDLGEFNQKGTVRTKYGTKGELKSAVNTLHSNGIQVYGDVVMNHKAGADYTENVTAVEVNPSNRYQETSGEYNIQAWTGFNFPGRGTTYSNWKWQWFHFDGTDWDQSRSLSRIFKFDGKAWDWEVSSENGNYDYLMYADYDYDHPDVVNEMKKWGVWYANEVGLDGYRLDAVKHIKFQFLKDWVDNARAATGKEMFTVGEYWQNDLGALNNYLAKVNYNQSLFDAPLHYNFYAASTGGGYYDMRNILNNTLVASNPTKAVTLVENHDTQPGQSLESTVQPWFKPLAYAFILTRSGGYPSVFYGDMYGTKGTTTREIPALKSKIEPLLKARKDYAYGTQRDYIDNPDVIGWTREGDSTKAKAGLATVITDGPGGSKRMYVGTSNAGEIWYDLTGNRTDKITIGSDGYATFPVNGGSVSVWVQQ

SEQ ID NO: 37962 - protein, 480 aa, Cytophaga sp.
NGTMMQYFEWYVPNDGQQWNRLRTDAPYLSSVGITAVWTPPAYKGTSQADVGYGPYDLYDLGEFNQKGTVRTKYGTKGELKSAVNTLHSNGIQVYGDVVMNHKAGADYTENVTAVEVNPSNRYQETSGEYNIQAWTGFNFPGRGTTYSNWKWQWFHFDGTDRDQSRSLSRIFKFDGKAWDWEVSSENGNYDYLMYADYDYDHPDVVNEMKKWGVWYANEVGLDGYRLDAVKHIKFQFLKDWVDNARAATGKEMFTVGEYWQNDLGALNNYLAKVNYNQSLFDAPLHYNFYAASTGGGYYDMRNILNNTLVASNPTKAVTLVENHDTQPGQSLESTVQPWFKPLAYAFILTRSGGYPSVFYGDMYGTKGTTTREIPALKSKIEPLLKARKDYAYGTQRDYIDNPDVIGWTREGDSTKAKSGLATVITDGPGGSKRMYVGTSNAGEIWYDLTGNRTDKITIGSDGYATFPVNGGSVSVWVQQ

SEQ ID NO: 37963 - protein, 480 aa, Cytophaga sp.
NGTMMQYFEWYVPNDGQQWNRLRTDAPYLSSVGITAVWTPPAYKGTSQADVGYGPYDLYDLGEFNQKGTVRTKYGTKGELKSAVNTLHSNGIQVYGDVVMNHKAGADYTENVTAVEVNPSARYQETSGEYNIQAWTGFNFPGRGTTYSNWKWQWFHFDGTDWDQSRSLSRIFKFDGKAWDWEVSSENGNYDYLMYADYDYDHPDVVNEMKKWGVWYANEVGLDGYRLDAVKHIKFQFLKDWVDNARAATGKEMFTVGEYWQNDLGALNNYLAKVNYNQSLFDAPLHYNFYAASTGGGYYDMRNILNNTLVASNPTKAVTLVENHDTQPGQSLESTVQPWFKPLAYAFILTRSGGYPSVFYGDMYGTKGTTTREIPALKSKIEPLLKARKDYAYGTQRDYIDNPDVIGWTREGDSTKAKSGLATVITDGPGGSKRMYVGTSNAGEIWYDLTGNRTDKITIGSDGYATFPVNGGSVSVWVQQ

SEQ ID NO: 37964 - protein, 480 aa, Cytophaga sp.
NGTMMQYFEWYVPNDGQQWNRLRTDAPYLSSVGITAVWTPPAYKGTSQADVGYGPYDLYDLGEFNQKGTVRTKYGTKGELKSAVNTLHSNGIQVYGDVVMNHKAGADYTENVTAVEVNPSNRYCETSGEYNIQAWTGFNFPGRGTTYSNWKWQWFHFDGTDWDQSRSLSRIFKFDGKAWDWEVSSENGNYDYLMYADYDYDHPDVVNEMKKWGVWYANEVGLDGYRLDAVKHIKFQFLKDWVDNARAATGKEMFTVGEYWQNDLGALNNYLAKVNYNQSLFDAPLHYNFYAASTGGGYYDMRNILNNTLVASNPTKAVTLVENHDTQPGQSLESTVQPWFKPLAYAFILTRSGGYPSVFYGDMYGTKGTTTREIPALKSKIEPLLKARKDYAYGTQRDYIDNPDVIGWTREGDSTKAKSGLATVITDGPGGSKRMYVGTSNAGEIWYDLTGNRTDKITIGSDGYATFPVNGGSVSVWVQQ

SEQ ID NO: 37965 - protein, 480 aa, Cytophaga sp.
NGTMMQYFEWYVPNDGQQWNRLRTDAPYLSSVGITAVWTPPAYKGTSQADVGYGPYDLYDLGEFNQKGTVRTKYGTKGELKSAVNTLHSNGIQVYGDVVMNHKAGADYTENVTAVEVNPSNRYQETSGEYNIQAWTGFNFPGRGTTYSNWKWQWFHFDGTDWDQSRSLSRIFKFDGKAWDWEVSSENGNYDYLMYADYDYDHPDVVNEMKKWGVWYANEVGLDGYRLDAVKHIKFQFLKDWVDNARAATGKEMFTVGEYWQNDLGALNNYLAKVNYNQSLFDAPLHYNFYAASTGGGYYDMRNILNNTLVASNPTKAVTLVENHDTQPGQSLESTVQPWFKPLAYAFILTRSGGYPSVFYGDMYGTKGTTTREIPALKSKIEDLLKARKDYAYGTQRDYIDNPDVIGWTREGDSTKAKSGLATVITDGPGGSKRMYVGTSNAGEIWYDLTGNRTDKITIGSDGYATFPVNGGSVSVWVQQ

SEQ ID NO: 37966 - protein, 480 aa, Cytophaga sp.
NGTMMQYFEWYVPNDGQQWNRLRTDAPYLSSVGITAVWTPPAYKGTSQADVGYGPYDLYDLGEFNQKGTVRTKYGTKGELKSAVNTLHSNGIQVYGDVVMNHKAGADYTENVTAVEVNPSNRYQETSGEYNIQAWTGFNFPGRGTTYSNWKWQWFHFDGTDWDQSRSLSRIFKFDGKAWDWEVSSENGNYDYLMYADYDYDHPDVVNEMKKWGVWYANEVGLDGYRLDAVKHIKFQFLKDWVDNARAATGKEMFTVGEYWQNDLGALNNYLAKVNYNQSLFDAPLHYNFYAASTGGGYYDMRNILNNTLVASNPTKAVTLVENHDTQPGQSLESTVQPWFKPLAYAFILTRSGGYPSVFYGDMYGTKGTTTREIPALKSKIEPLLKARKDYAYGTQRDYIDNPDVIGWTREGDSTKAVSGLATVITDGPGGSKRMYVGTSNAGEIWYDLTGNRTDKITIGSDGYATFPVNGGSVSVWVQQ

SEQ ID NO: 37967 - protein, 480 aa, Cytophaga sp.
NGTMMQYFEWYVPNDGQQWNRLRTDAPYLSSVGITAVWTPPAYKGTSQADVGYGPYDLYDLGEFNQKGTVRTKYGTKGELKSAVNTLHSNGIQVYGDVVMNHKAGADYTENVTAVEVNPSNRYQETSGEYNIQAWTGFNFPGRGTTYSNWKWQWFHFDGTDWDQSRSLSRIFKFDGKAWDWEVSSENGNYDYLMYADYDYDHTDVVNEMKKWGVWYANEVGLDGYRLDAVKHIKFQFLKDWVDNARAATGKEMFTVGEYWQNDLGALNNYLAKVNYNQSLFDAPLHYNFYAASTGGGYYDMRNILNNTLVASNPTKAVTLVENHDTQPGQSLESTVQPWFKPLAYAFILTRSGGYPSVFYGDMYGTKGTTTREIPALKSKIEPLLKARKDYAYGTQRDYIDNPDVIGWTREGDSTKAKSGLATVITDGPGGSKRMYVGTSNAGEIWYDLTGNRTDKITIGSDGYATFPVNGGSVSVWVQQ

SEQ ID NO: 37968 - protein, 480 aa, Cytophaga sp.
NGTMMQYFEWYVPNDGQQWNRLRTDAPYLSSVGITAVWTPPAYKGTSQADVGYGPYDLYDLGEFNQKGTVRTKYGTKGELKSAVNTLHSNGIQVYGDVVMNHKAGADYTENVDAVEVNPSNRYQETSGEYNIQAWTGFNFPGRGTTYSNWKWQWFHFDGTDWDQSRSLSRIFKFDGKAWDWEVSSENGNYDYLMYADYDYDHPDVVNEMKKWGVWYANEVGLDGYRLDAVKHIKFQFLKDWVDNARAATGKEMFTVGEYWQNDLGALNNYLAKVNYNQSLFDAPLHYNFYAASTGGGYYDMRNILNNTLVASNPTKAVTLVENHDTQPGQSLESTVQPWFKPLAYAFILTRSGGYPSVFYGDMYGTKGTTTREIPALKSKIEPLLKARKDYAYGTQRDYIDNPDVIGWTREGDSTKAKSGLATVITDGPGGSKRMYVGTSNAGEIWYDLTGNRTDKITIGSDGYATFPVNGGSVSVWVQQ

SEQ ID NO: 37969 - protein, 480 aa, Cytophaga sp.
NGTMMQYFEWYVPNDGQQWNRLRTDAPYLSSVGITAVWTPPAYKGTSQADVGYGPYDLYDLGEFNQKGTVRTKYGTMGELKSAVNTLHSNGIQVYGDVVMNHKAGADYTENVTAVEVNPSNRYQETSGEYNIQAWTGFNFPGRGTTYSNWKWQWFHFDGTDWDQSRSLSRIFKFDGKAWDWEVSSENGNYDYLMYADYDYDHPDVVNEMKKWGVWYANEVGLDGYRLDAVKHIKFQFLKDWVDNARAATGKEMFTVGEYWQNDLGALNNYLAKVNYNQSLFDAPLHYNFYAASTGGGYYDMRNILNNTLVASNPTKAVTLVENHDTQPGQSLESTVQPWFKPLAYAFILTRSGGYPSVFYGDMYGTKGTTTREIPALKSKIEPLLKARKDYAYGTQRDYIDNPDVIGWTREGDSTKAKSGLATVITDGPGGSKRMYVGTSNAGEIWYDLTGNRTDKITIGSDGYATFPVNGGSVSVWVQQ

SEQ ID NO: 37970 - protein, 480 aa, Cytophaga sp.
NGTMMQYFEWYVPNDGQQWNRLRTDAPYLSSVGITAVWTPPAYKGTSQADVGYGPYDLYDLGEFNQKGTVRTKYGTKGELKSAVNTLHSNGIQVYGDVVMNHKAGADYTENVTAVEVNPSNRYQETSGEYNIQAWTGFNFPGRGTTYSNWKWQWFHFDGTDWDQSRSLSRIFKFDGKAWDWEVSSENGNYDYLMYADYDYDHPDVVNEMKKWGVWYANEVGLDGYRLDAVKHIKFQFLKDWVDNARAATGKEMFTVGEYWQNDLGALNNYLAKVNYNQSLFDAPLHYNFYAASTGGGYYDMRNILNNTLVASNPTKAVTLVENHDTQPGQSLESTVQPWFKPLAYAFILTRSGGYPSVFYGDMYGTKGTTTREIPALKSKIEPLLKARKDYAYGTQRDYIDNPDVIGWTREGDETKAKSGLATVITDGPGGSKRMYVGTSNAGEIWYDLTGNRTDKITIGSDGYATFPVNGGSVSVWVQQ

SEQ ID NO: 37971 - protein, 480 aa, Cytophaga sp.
NGTMMQYFEWYVPNDGQQWNRLRTDAPYLSSVGITAVWTPPAYKGTSQADVGYGPYDLYDLGEFNQKGTVRTKYGTKGELKSAVNTLHSNGIQVYGDVVMNHKAGADYTENVTAVEVNASNRYQETSGEYNIQAWTGFNFPGRGTTYSNWKWQWFHFDGTDWDQSRSLSRIFKFDGKAWDWEVSSENGNYDYLMYADYDYDHPDVVNEMKKWGVWYANEVGLDGYRLDAVKHIKFQFLKDWVDNARAATGKEMFTVGEYWQNDLGALNNYLAKVNYNQSLFDAPLHYNFYAASTGGGYYDMRNILNNTLVASNPTKAVTLVENHDTQPGQSLESTVQPWFKPLAYAFILTRSGGYPSVFYGDMYGTKGTTTREIPALKSKIEPLLKARKDYAYGTQRDYIDNPDVIGWTREGDSTKAKSGLATVITDGPGGSKRMYVGTSNAGEIWYDLTGNRTDKITIGSDGYATFPVNGGSVSVWVQQ

SEQ ID NO: 37972 - protein, 480 aa, Cytophaga sp.
NGTMMQYFEWYVPNDGQQWNRLRTDAPYLSSVGITAVWTPPAYKGTSQADVGYGPYDLYDLGEFNQKGTVRTKYGTKGELKSAVNTLHSNGIQVYGDVVMNHKAGADYTENVTAVEVNPSNRYQETSGEYNIQAWTGFNFPGRGTTYSNWKWQWFHFDGTDYDQSRSLSRIFKFDGKAWDWEVSSENGNYDYLMYADYDYDHPDVVNEMKKWGVWYANEVGLDGYRLDAVKHIKFQFLKDWVDNARAATGKEMFTVGEYWQNDLGALNNYLAKVNYNQSLFDAPLHYNFYAASTGGGYYDMRNILNNTLVASNPTKAVTLVENHDTQPGQSLESTVQPWFKPLAYAFILTRSGGYPSVFYGDMYGTKGTTTREIPALKSKIEPLLKARKDYAYGTQRDYIDNPDVIGWTREGDSTKAKSGLATVITDGPGGSKRMYVGTSNAGEIWYDLTGNRTDKITIGSDGYATFPVNGGSVSVWVQQ

SEQ ID NO: 37973 - protein, 480 aa, Cytophaga sp.
NGTMMQYFEWYVPNDGQQWNRLRTDAPYLSSVGITAVWTPPAYKGTSQADVGYGPYDLYDLGEFNQKGGVRTKYGTKGELKSAVNTLHSNGIQVYGDVVMNHKAGADYTENVTAVEVNPSNRYQETSGEYNIQAWTGFNFPGRGTTYSNWKWQWFHFDGTDWDQSRSLSRIFKFDGKAWDWEVSSENGNYDYLMYADYDYDHPDVVNEMKKWGVWYANEVGLDGYRLDAVKHIKFQFLKDWVDNARAATGKEMFTVGEYWQNDLGALNNYLAKVNYNQSLFDAPLHYNFYAASTGGGYYDMRNILNNTLVASNPTKAVTLVENHDTQPGQSLESTVQPWFKPLAYAFILTRSGGYPSVFYGDMYGTKGTTTREIPALKSKIEPLLKARKDYAYGTQRDYIDNPDVIGWTREGDSTKAKSGLATVITDGPGGSKRMYVGTSNAGEIWYDLTGNRTDKITIGSDGYATFPVNGGSVSVWVQQ

SEQ ID NO: 37974 - protein, 480 aa, Cytophaga sp.
NGTMMQYFEWYVPNDGQQWNRLRTDAPYLSSVGITAVWTPPAYKGTSQADVGYGPYDLYDLGEFNQKGTVRTKYGTKGELKSAVNTLHSNGIQVYGDVVMNHKAGADYTENVTAVEVNPSNRYQETSGEYNIQAWTGFNFPGRGTTYSNWKWQWFHFDGTDWDQSRSLSRIFKFDGKAWDWEVSSENGNYDYLMYADYDYDHPDVVNEMKKWGVWYANEVGLDGYRLDAVKHIKFQFLKDWVDNARAATGKEMFTVGEYWQNDLGALNNYLAKVNYNQSLFDAPLHYNFYAASTGGGYYDMRNILNNTLVASNPTKAVTLVENHDTQPGQSLESTVQPWFKPLAYAFILTRSGGYPSVFYGDMYGTKGTTTREIPALKSKIEPLLKARKDYAYGTQRDYIDNPDVIGWTREGDSTKAASGLATVITDGPGGSKRMYVGTSNAGEIWYDLTGNRTDKITIGSDGYATFPVNGGSVSVWVQQ

SEQ ID NO: 37975 - protein, 480 aa, Cytophaga sp.
NGTMMQYFEWYVPNDGQQWNRLRTDAPYLSSVGITAVWTPPAYKGTSQADVGYGPYDLYDLGEFNQKGTVRTKYGTKGELKSAVNTLHSNGIQVYGDVVMNHKAGADYTENVTCVEVNPSNRYQETSGEYNIQAWTGFNFPGRGTTYSNWKWQWFHFDGTDWDQSRSLSRIFKFDGKAWDWEVSSENGNYDYLMYADYDYDHPDVVNEMKKWGVWYANEVGLDGYRLDAVKHIKFQFLKDWVDNARAATGKEMFTVGEYWQNDLGALNNYLAKVNYNQSLFDAPLHYNFYAASTGGGYYDMRNILNNTLVASNPTKAVTLVENHDTQPGQSLESTVQPWFKPLAYAFILTRSGGYPSVFYGDMYGTKGTTTREIPALKSKIEPLLKARKDYAYGTQRDYIDNPDVIGWTREGDSTKAKSGLATVITDGPGGSKRMYVGTSNAGEIWYDLTGNRTDKITIGSDGYATFPVNGGSVSVWVQQ

SEQ ID NO: 37976 - protein, 480 aa, Cytophaga sp.
NGTMMQYFEWYVPNDGQQWNRLRTDAPYLSSVGITAVWTPPAYKGTSQADVGYGPYDLYDLGEFNQKGTVRTKYGTKGELKSAVNTLHSNGIQVYGDVVMNHKAGADYTENVTAVEVNPSNRYQETSGEYNIQAWTGFNFPGRGTTYSNWKWQWFHFDGTDWDQSRSLSRIFKFDGKAWDWEVSSENGNYDYLMYADYDYDHPDVVNEMKKWGVWYANEVGLDGYRLDAVKHIKFQFLKDWVDNARAATGKEMFTVGEYWQNDLGALNNYLAKVNYNQSLFDAPLHYNFYAASTGGGYYDMRNILNNTLVASNPTKAVTLVLNHDTQPGQSLESTVQPWFKPLAYAFILTRSGGYPSVFYGDMYGTKGTTTREIPALKSKIEPLLKARKDYAYGTQRDYIDNPDVIGWTREGDSTKAKSGLATVITDGPGGSKRMYVGTSNAGEIWYDLTGNRTDKITIGSDGYATFPVNGGSVSVWVQQ

SEQ ID NO: 37977 - protein, 480 aa, Cytophaga sp.
NGTMMQYFEWYVPNDGQQWNRLRTDAPYLSSVGITAVWTPPAYKGTSQADVGYGPYDLYDLGEFNQKGTVRTKYGTKGELKSAVNTLHSNGIQVYGDVVMNHKAGADYTENVTSVEVNPSNRYQETSGEYNIQAWTGFNFPGRGTTYSNWKWQWFHFDGTDWDQSRSLSRIFKFDGKAWDWEVSSENGNYDYLMYADYDYDHPDVVNEMKKWGVWYANEVGLDGYRLDAVKHIKFQFLKDWVDNARAATGKEMFTVGEYWQNDLGALNNYLAKVNYNQSLFDAPLHYNFYAASTGGGYYDMRNILNNTLVASNPTKAVTLVENHDTQPGQSLESTVQPWFKPLAYAFILTRSGGYPSVFYGDMYGTKGTTTREIPALKSKIEPLLKARKDYAYGTQRDYIDNPDVIGWTREGDSTKAKSGLATVITDGPGGSKRMYVGTSNAGEIWYDLTGNRTDKITIGSDGYATFPVNGGSVSVWVQQ

SEQ ID NO: 37978 - protein, 480 aa, Cytophaga sp.
NGTMLQYFEWYVPNDGQQWNRLRTDAPYLSSVGITAVWTPPAYKGTSQADVGYGPYDLYDLGEFNQKGTVRTKYGTKGELKSAVNTLHSNGIQVYGDVVMNHKAGADYTENVTAVEVNPSNRYQETSGEYNIQAWTGFNFPGRGTTYSNWKWQWFHFDGTDWDQSRSLSRIFKFDGKAWDWEVSSENGNYDYLMYADYDYDHPDVVNEMKKWGVWYANEVGLDGYRLDAVKHIKFQFLKDWVDNARAATGKEMFTVGEYWQNDLGALNNYLAKVNYNQSLFDAPLHYNFYAASTGGGYYDMRNILNNTLVASNPTKAVTLVENHDTQPGQSLESTVQPWFKPLAYAFILTRSGGYPSVFYGDMYGTKGTTTREIPALKSKIEPLLKARKDYAYGTQRDYIDNPDVIGWTREGDSTKAKSGLATVITDGPGGSKRMYVGTSNAGEIWYDLTGNRTDKITIGSDGYATFPVNGGSVSVWVQQ

SEQ ID NO: 37979 - protein, 480 aa, Cytophaga sp.
NGTMMQYFEWYVPNDGQQWNRLRTDAPYLSSVGITAVWTPPAYKGTSQADVGYGPYDLYDLGEFNQKGTVRTKYGTKGELKSAVNTLHSNGIQVYGDVVMNHKAGADYTENVTAVEVNPSNRYQETSGEYNIQAWTGFNFPGRGTTYSNWKWQWFHFDGTDWDQSRSLSRIFKFDGKAWDWEVSSENGNYDYLMYADYDYDHPDVVNEMKKWGVWYANEVGLDGYRLDAVKHIKFQFLKDWVDNARAATGKEMFTVGEYWQNDLGALNNYLAKVNYNQSLFDAPLHYNFYAASTGGGYYDMRNILNNTLVASNPTKAVTLVENHDTQPGQSLESTVQPWFKPLAYAFILTRSGGYPSVFYGDMYGTKGTTTREIPALKSKIEPLLKARKDYAYGTQRDYIDNPDVIGWTREGDSTKAKSGLATVITDGPGGSKRMSVGTSNAGEIWYDLTGNRTDKITIGSDGYATFPVNGGSVSVWVQQ

SEQ ID NO: 37980 - protein, 480 aa, Cytophaga sp.
NGTMMQYFEWYVPNDGQQWNRLRTDAPYLSSVGITAVWTPPAYKGTSQADVGYGPYDLYDLGEFNQKGTVRTKYGTKGELKSAVNTLHSNGIQVYGDVVMNHKAGADYTENVTAVEVNPSNRYQETSGEYNIQAWTGFNFPGRGTTYSNWKWQWFHFDGTDWDQSRSLSRIFKFDGKAWDWEVSSENGNYDYLMYADYDYDHLDVVNEMKKWGVWYANEVGLDGYRLDAVKHIKFQFLKDWVDNARAATGKEMFTVGEYWQNDLGALNNYLAKVNYNQSLFDAPLHYNFYAASTGGGYYDMRNILNNTLVASNPTKAVTLVENHDTQPGQSLESTVQPWFKPLAYAFILTRSGGYPSVFYGDMYGTKGTTTREIPALKSKIEPLLKARKDYAYGTQRDYIDNPDVIGWTREGDSTKAKSGLATVITDGPGGSKRMYVGTSNAGEIWYDLTGNRTDKITIGSDGYATFPVNGGSVSVWVQQ

SEQ ID NO: 37981 - protein, 480 aa, Cytophaga sp.
NGTMMQYFEWYVPNDGQQWNRLRTDAPYLSSVGITAVWTPPAYKGTSQADVGYGPYDLYDLGEFNQKGTVRTKYGTKGELKSAVNTLHSNGIQVYGDVVMNHKAGADYTENVTAVEVNPSNRYQETSGEYNIQAWTGFNFPGRGTTYSNWKWQWFHFDGTDWDQSRSLSRIFKVDGKAWDWEVSSENGNYDYLMYADYDYDHPDVVNEMKKWGVWYANEVGLDGYRLDAVKHIKFQFLKDWVDNARAATGKEMFTVGEYWQNDLGALNNYLAKVNYNQSLFDAPLHYNFYAASTGGGYYDMRNILNNTLVASNPTKAVTLVENHDTQPGQSLESTVQPWFKPLAYAFILTRSGGYPSVFYGDMYGTKGTTTREIPALKSKIEPLLKARKDYAYGTQRDYIDNPDVIGWTREGDSTKAKSGLATVITDGPGGSKRMYVGTSNAGEIWYDLTGNRTDKITIGSDGYATFPVNGGSVSVWVQQ

SEQ ID NO: 37982 - protein, 480 aa, Cytophaga sp.
NGTMMQYFEWYVPNDGQQWNRLRTDAPYLSSVGITAVWTPPAYKGTSQADVGYGPYDLYDLGEFNQKGTVRTKYGTKGELKSAVNTLHSNGIQVYGDVVMNHKAGADYTENVTAVEVNPSNRYQETSGEYNIQAWTGFNFPGRGTTYSNWKWQWFHFDGTDWDQSRSLSRIFKFDGKAWDWEVSSENGNYDYLMYADYDYDHPDVVNEMKKWGVWYANEVGLDGYRLDAVKHIKFQFLKDWVDNARAATGKEMFTVGEYWQNDLHALNNYLAKVNYNQSLFDAPLHYNFYAASTGGGYYDMRNILNNTLVASNPTKAVTLVENHDTQPGQSLESTVQPWFKPLAYAFILTRSGGYPSVFYGDMYGTKGTTTREIPALKSKIEPLLKARKDYAYGTQRDYIDNPDVIGWTREGDSTKAKSGLATVITDGPGGSKRMYVGTSNAGEIWYDLTGNRTDKITIGSDGYATFPVNGGSVSVWVQQ

SEQ ID NO: 37983 - protein, 480 aa, Cytophaga sp.
NGTMMQYFEWYVPNDGQQWNRLRTDAPYLSSVGITAVWTPPAYKGTSQADVGYGPYDLYDLGEFNQKGTVRTKYGTKGELKSAVNTLHSNGIQVYGDVVMNHKAGADYTENVTAVEVNPSNRYQETSGEYNIQAWTGFNFPGRGTTYSNWKWQWFHFDGTDWDQSRSLSRIFKFDGKAWDWEVSSENGNYDYLMYADYDYDHPDVVNEMKKWGVWYANEVGLDGYRLDAVKHIKFQFLKDWVDNARAATGKEMFTVGEYWQNDLGALNNYLAKVNYNQSLFDAPLHYNFYAASTGGGYYDMRNILNNTLVASNPTKAVTLVENHDTQPGQSLESTVQPWFKPLAYAFILTRSGGYPSVFYGDMYGTKGTTTREIPALKSKIEPLLKARKDYAYGTQRDYIDNPDVIGWTREGDSTKAKSGLATVITDGMGGSKRMYVGTSNAGEIWYDLTGNRTDKITIGSDGYATFPVNGGSVSVWVQQ

SEQ ID NO: 37984 - protein, 480 aa, Cytophaga sp.
NGTMMQYFEWYVPNDGQQWNRLRTDAPYLSSVGITAVWTPPAYKGTSQADVGYGPYDLHDLGEFNQKGTVRTKYGTKGELKSAVNTLHSNGIQVYGDVVMNHKAGADYTENVTAVEVNPSNRYQETSGEYNIQAWTGFNFPGRGTTYSNWKWQWFHFDGTDWDQSRSLSRIFKFDGKAWDWEVSSENGNYDYLMYADYDYDHPDVVNEMKKWGVWYANEVGLDGYRLDAVKHIKFQFLKDWVDNARAATGKEMFTVGEYWQNDLGALNNYLAKVNYNQSLFDAPLHYNFYAASTGGGYYDMRNILNNTLVASNPTKAVTLVENHDTQPGQSLESTVQPWFKPLAYAFILTRSGGYPSVFYGDMYGTKGTTTREIPALKSKIEPLLKARKDYAYGTQRDYIDNPDVIGWTREGDSTKAKSGLATVITDGPGGSKRMYVGTSNAGEIWYDLTGNRTDKITIGSDGYATFPVNGGSVSVWVQQ

SEQ ID NO: 37985 - protein, 480 aa, Cytophaga sp.
NGTMMQYFEWYVPNDGQQWNRLRTDAPYLSSVGITAVWTPPAYKGTSQADVGYGPYDLYDLGEFNQKGTVRTKYGTKGELKSAVNTLHSNGIQVYGDVVMNHKAGADYTENVTAVEVNPSNRYQETSGEYNIQAWTGFNFPGRGTTYSNWKWQWFHFDGTDWDQSRSLSRIFKFDGKAWDWEVSSENGNYDYLMYADYDYDHPDVVNEMCKWGVWYANEVGLDGYRLDAVKHIKFQFLKDWVDNARAATGKEMFTVGEYWQNDLGALNNYLAKVNYNQSLFDAPLHYNFYAASTGGGYYDMRNILNNTLVASNPTKAVTLVENHDTQPGQSLESTVQPWFKPLAYAFILTRSGGYPSVFYGDMYGTKGTTTREIPALKSKIEPLLKARKDYAYGTQRDYIDNPDVIGWTREGDSTKAKSGLATVITDGPGGSKRMYVGTSNAGEIWYDLTGNRTDKITIGSDGYATFPVNGGSVSVWVQQ

SEQ ID NO: 37986 - protein, 480 aa, Cytophaga sp.
NGTMMQYFEWYVPNDGQQWNRLRTDAPYLSSVGITAVWTPPAYKGTSQADVGYGPYDLYDLGEFNQKGTVRTKYGTKGELKSAVNTLHSNGIQVYGDVVMNHKAGADYTENVTAVEVNPSNRYQETSGPYNIQAWTGFNFPGRGTTYSNWKWQWFHFDGTDWDQSRSLSRIFKFDGKAWDWEVSSENGNYDYLMYADYDYDHPDVVNEMKKWGVWYANEVGLDGYRLDAVKHIKFQFLKDWVDNARAATGKEMFTVGEYWQNDLGALNNYLAKVNYNQSLFDAPLHYNFYAASTGGGYYDMRNILNNTLVASNPTKAVTLVENHDTQPGQSLESTVQPWFKPLAYAFILTRSGGYPSVFYGDMYGTKGTTTREIPALKSKIEPLLKARKDYAYGTQRDYIDNPDVIGWTREGDSTKAKSGLATVITDGPGGSKRMYVGTSNAGEIWYDLTGNRTDKITIGSDGYATFPVNGGSVSVWVQQ

SEQ ID NO: 37987 - protein, 480 aa, Cytophaga sp.
NGTMMQYFEWYVPNDGQQWNRLRTDAPYLSSVGITAVWTPPAYKGTSQADVGYGPYDLYDLGEFNQKGTVRTKYGTKGELKSAVNTLHSNGIQVYGDVVMNHKAGADYTENVTAVEVNPSNRYQETSGEYNIQAWTGFNFPGRGTTYSNWKWQWFHFDGTDWDQSRSLSRIFKFDGKAWDWEVSSENGNYDYLMYADYDYDHPDVVNEMKKWGVWYANEVGLDGYRLDAVKHIKFQFLKDWVDNARAATGKEMFTVGEYWQNDLGALNNYLAKVNYNQSLFDAPLHYNFYAASTGGGYYDMRNILNNTLVASNPTKAVTLVENHDTQPGQSLESTVQPWFKPLAYAFILTRSGGYPSVFYGDMYGTKGTTTREIPAQKSKIEPLLKARKDYAYGTQRDYIDNPDVIGWTREGDSTKAKSGLATVITDGPGGSKRMYVGTSNAGEIWYDLTGNRTDKITIGSDGYATFPVNGGSVSVWVQQ

SEQ ID NO: 37988 - protein, 480 aa, Cytophaga sp.
NGTMMQYFEWYVPNDGQQWNRLRTDAPYLSSVGITAVWTPPAYKGTSQADVGYGPYDLYDLGEFNQKGTVRTKYGTKGELKSAVNTLHSNGIQVYGDVVMNHKAGADYTENVTAVEVNPSNRYQETSGEYNIQAWTGFNFPGRGTTYSNWKWQWFHFDGTDWDQSRSLSRIFKFDGKAWDWEVSSENGNYDYLMYADYDYDHPDVVNEMKKWGVWYANEVGLDGYRLDAVKHIKFQFLKDWVDNARAATGKEMFTVGEYWQNDLGALNNYLAKVNYNQSLFDAPLHYNFYAASTGGGYYDMRNILNNTLVASNPTKAVTLVENHDTQPGQSLESTVQPWFKPLAYAFILTRSGGYPSVFYGDMYGTKGTTTREIPALKSKIEPLLKARKDYAYGTQRDYIDNPDVIGWTREGDSTKAKSGLATVITDGPGGSKRMYVGTSNAREIWYDLTGNRTDKITIGSDGYATFPVNGGSVSVWVQQ

SEQ ID NO: 37989 - protein, 480 aa, Cytophaga sp.
NGTMMQYFEWYVPNDGQQWNRLRTDAPYLSSVGITAVWTPPAYKGTSQADVGYGPYDLYDLGEFNQKGTVRTKYGTKGELKSAVNTLHSNGIQVYGDVVMNHKAGADYTENVTAVEVNPSNRYQETSGEYNIQAWTGFNFPGRGTTYSNWKWQWFHFDGTDWDQSRSLSRIFKFDLKAWDWEVSSENGNYDYLMYADYDYDHPDVVNEMKKWGVWYANEVGLDGYRLDAVKHIKFQFLKDWVDNARAATGKEMFTVGEYWQNDLGALNNYLAKVNYNQSLFDAPLHYNFYAASTGGGYYDMRNILNNTLVASNPTKAVTLVENHDTQPGQSLESTVQPWFKPLAYAFILTRSGGYPSVFYGDMYGTKGTTTREIPALKSKIEPLLKARKDYAYGTQRDYIDNPDVIGWTREGDSTKAKSGLATVITDGPGGSKRMYVGTSNAGEIWYDLTGNRTDKITIGSDGYATFPVNGGSVSVWVQQ

SEQ ID NO: 37990 - protein, 480 aa, Cytophaga sp.
NGTMMQYFEWYVPNDGQQWNRLRTDAPYLSSVGITAVWTPPAYKGTSQADVGYGPYDLYDLGEFNQKGTVRTKYGTKGELKSAVNTLHSNGIQVYGDVVMNHKAGADYTENVTAVEVNPSNRYQETSGEYNIQAWTGFNFPGRGTTYSNWKWQWFHFDGTDCDQSRSLSRIFKFDGKAWDWEVSSENGNYDYLMYADYDYDHPDVVNEMKKWGVWYANEVGLDGYRLDAVKHIKFQFLKDWVDNARAATGKEMFTVGEYWQNDLGALNNYLAKVNYNQSLFDAPLHYNFYAASTGGGYYDMRNILNNTLVASNPTKAVTLVENHDTQPGQSLESTVQPWFKPLAYAFILTRSGGYPSVFYGDMYGTKGTTTREIPALKSKIEPLLKARKDYAYGTQRDYIDNPDVIGWTREGDSTKAKSGLATVITDGPGGSKRMYVGTSNAGEIWYDLTGNRTDKITIGSDGYATFPVNGGSVSVWVQQ

SEQ ID NO: 37991 - protein, 480 aa, Cytophaga sp.
NGTMMQYFEWYVPNDGQQWNRLRTDAPYLSSVGITAVWTPPAYKGTSQADVGYGPYDLYDLGEFNQKGTVRTKYGTKGELKSAVNTLHSNGIQVYGDVVMNHKAGADYTENVTAVEVNPSNRYQETSGEYNIQAWTGFNFPGRGTTYSNWKWQWFHFDGTDWDQSRSLSRIFKFDGKAWDWEVSSENGNYDYLMYADYDYDHPDVVNEMKKWGVWYANEVGLDGYRLDAVKHIKFQFLKDWVDNARAATGKEMFTVGEYWQNDLGALNNYLAKVNYNQSLFDAPLHYNFYAASTGGGYYDMRNILNNTLVASNPTKAVTLVENHDTQPGQSLESTVQPWFKPLAYAFILTRSGGYPSVFYGDMYGTKGTTTREIPALKSKIEPLLKARKDYAYGTQRDYIDNPDVIGWTREGDSTKAKSGTATVITDGPGGSKRMYVGTSNAGEIWYDLTGNRTDKITIGSDGYATFPVNGGSVSVWVQQ

SEQ ID NO: 37992 - protein, 480 aa, Cytophaga sp.
NGTMMQYFEWYVPNDGQQWNRLRTDAPYLSSVGITAVWTPPAYKGTSQADVGYGPYDLYDLGEFNQKGTVRTKYGTKGELKSAVNTLHSNGIQVYGDVVMNHKAGADYTENVTAVEVNPSNRYQETSGEYNIQAWTGFNFPGRGTTYSNWKWQWFHFDGTDWDQSRSLSRIFKFDGKAWDWEVSSENGNYDYLMYADYDYDHKDVVNEMKKWGVWYANEVGLDGYRLDAVKHIKFQFLKDWVDNARAATGKEMFTVGEYWQNDLGALNNYLAKVNYNQSLFDAPLHYNFYAASTGGGYYDMRNILNNTLVASNPTKAVTLVENHDTQPGQSLESTVQPWFKPLAYAFILTRSGGYPSVFYGDMYGTKGTTTREIPALKSKIEPLLKARKDYAYGTQRDYIDNPDVIGWTREGDSTKAKSGLATVITDGPGGSKRMYVGTSNAGEIWYDLTGNRTDKITIGSDGYATFPVNGGSVSVWVQQ

SEQ ID NO: 37993 - protein, 480 aa, Cytophaga sp.
NGTMMQYFEWYVPNDGQQWNRLRTDAPYLSSVGITAVWTPPAYKGTSQADVGYGPYDLYDLGEFNQKGTVRTKYGTKGELKSAVNTLHSNGIQVYGDVVMNHKAGADYTENVTAVEVNPSNRYQETSGEYNIQAWTGFNFPGRGTTYSNWKWQWFHFDGTDWDQSRSLSRIFKFDGKAWDWEVSSENGNYDYLMYADYDYDHPDVVNEMKKWGVWYANEVGLDGYRLDAVKHIKFQFLKDWVDNARAATGKELFTVGEYWQNDLGALNNYLAKVNYNQSLFDAPLHYNFYAASTGGGYYDMRNILNNTLVASNPTKAVTLVENHDTQPGQSLESTVQPWFKPLAYAFILTRSGGYPSVFYGDMYGTKGTTTREIPALKSKIEPLLKARKDYAYGTQRDYIDNPDVIGWTREGDSTKAKSGLATVITDGPGGSKRMYVGTSNAGEIWYDLTGNRTDKITIGSDGYATFPVNGGSVSVWVQQ

SEQ ID NO: 37994 - protein, 480 aa, Cytophaga sp.
NGTMMQYFEWYVPNDGQQWNRLRTDAPYLSSVGITAVWTPPAYKGTSQADVGYGPYDLYDLGEFNQKGTVRTKYGTKGELKSAVNTLHSNGIQVYGDVVMNHKAGADYTENVTAVEVNPSNRYQETSGEYNIQAWTGFNFPGRGTTYSNWKWQWFHFDGTDWDQSRSLSRIFKFDGKAWDWEVSSENTNYDYLMYADYDYDHPDVVNEMKKWGVWYANEVGLDGYRLDAVKHIKFQFLKDWVDNARAATGKEMFTVGEYWQNDLGALNNYLAKVNYNQSLFDAPLHYNFYAASTGGGYYDMRNILNNTLVASNPTKAVTLVENHDTQPGQSLESTVQPWFKPLAYAFILTRSGGYPSVFYGDMYGTKGTTTREIPALKSKIEPLLKARKDYAYGTQRDYIDNPDVIGWTREGDSTKAKSGLATVITDGPGGSKRMYVGTSNAGEIWYDLTGNRTDKITIGSDGYATFPVNGGSVSVWVQQ

SEQ ID NO: 37995 - protein, 480 aa, Cytophaga sp.
NGTMMQYFEWYVPNDGQQWNRLRTDAPYLSSVGITAVWTPPAYKGTSQADVGYGPYDLYDLGEFNQKGTVRTKYGTKGELKSAVNTLHSNGIQVYGDVVMNHKAGADYTENVTAVEVNPSNRYQETSGEYNIQAWTGFNFPGRGTTYSNWKWQWFHFDGTDWDQSRSLSRIFKFDGKAWDWEVSSENGNYDYLMYADYDYDHPDVVNEMKKWGVWYANEVGLDGYRLDAVKHIKFQFLKDWVDNARAATGKEMFTVGEYWQNDLGALNNYLAKVNYNQSLFDAPLHYNFYAASTGGGYYDMRNILNNTLVASNPTKAVTLVENHDTQPGQSLESTVQPWFKPLAYAFILTRSGGYPSVFYGDMYGTKGTTTREIPALKSKIEPLLKARKDYAYGTQRDYIDNPDVIGWTRVGDSTKAKSGLATVITDGPGGSKRMYVGTSNAGEIWYDLTGNRTDKITIGSDGYATFPVNGGSVSVWVQQ

SEQ ID NO: 37996 - protein, 480 aa, Cytophaga sp.
NGTMMQYFEWYVPNDGQQWNRLRTDAPYLSSVGITAVWTPPAYKGTSQADVGYGPYDLYDLGEFNQKGTVRTKYGTKGELKSAVNTLHSNGIQVYGDVVMNHKAGADYTENVTAVEVNPSNRYQETSGEYNIQAWTGFNFPGRGTTYSNWKWQWFHFDGTDWDQSRSLSRIFKFDGKAWDWEVSSENGNYDYLMYADYDYDHPDVVNEMKKWGVWYANEVGLDGYRLDAVKHIKFQFLKDWVDNARAATGKEMFTVGEYWQNDLGALNNYLAKVNYNQSLFDAPLHYNFYAASTGAGYYDMRNILNNTLVASNPTKAVTLVENHDTQPGQSLESTVQPWFKPLAYAFILTRSGGYPSVFYGDMYGTKGTTTREIPALKSKIEPLLKARKDYAYGTQRDYIDNPDVIGWTREGDSTKAKSGLATVITDGPGGSKRMYVGTSNAGEIWYDLTGNRTDKITIGSDGYATFPVNGGSVSVWVQQ

SEQ ID NO: 37997 - protein, 480 aa, Cytophaga sp.
NGTMMQYFEWYVPNDGQQWNRLRTDAPYLSSVGITAVWTPPAYKGTSQADVGYGPYDLYDLGEFNQKGTVRTKYGTKGELKSAVNTLHSNGIQVYGDVVMNHKAGADYTENVTAVEVNPSNRYQETSGEYNIQAWTGFNFPGRGTTYFNWKWQWFHFDGTDWDQSRSLSRIFKFDGKAWDWEVSSENGNYDYLMYADYDYDHPDVVNEMKKWGVWYANEVGLDGYRLDAVKHIKFQFLKDWVDNARAATGKEMFTVGEYWQNDLGALNNYLAKVNYNQSLFDAPLHYNFYAASTGGGYYDMRNILNNTLVASNPTKAVTLVENHDTQPGQSLESTVQPWFKPLAYAFILTRSGGYPSVFYGDMYGTKGTTTREIPALKSKIEPLLKARKDYAYGTQRDYIDNPDVIGWTREGDSTKAKSGLATVITDGPGGSKRMYVGTSNAGEIWYDLTGNRTDKITIGSDGYATFPVNGGSVSVWVQQ

SEQ ID NO: 37998 - protein, 480 aa, Cytophaga sp.
NGTMMQYFEWYVPNDGQQWNRLRTDAPYLSSVGITAVWTPPAYKGTSQADVGYGPYDLYDLGEFNQKGTVRTKYGTKGELKSAVNTLHSNGIQVYGDVVMNHKAGADYTENVTAVEVNPSNRYQETSGEYNIQAWTGFNFPGRGTTYSNWKWQWFHFDGTDWDQSRSLSRIFKFDGKAWDWEVSSENGNYDYLMYADYDYDHPDVVNEMKKWGVWYANEVGLDGYRLDAVKHIKFQFLKDWVDNARAATGKEMFTVGEYWQNDLGALNNYLAKVNYNQSLFDAPLHYNFYAASTGGGYYDMRNILNNSLVASNPTKAVTLVENHDTQPGQSLESTVQPWFKPLAYAFILTRSGGYPSVFYGDMYGTKGTTTREIPALKSKIEPLLKARKDYAYGTQRDYIDNPDVIGWTREGDSTKAKSGLATVITDGPGGSKRMYVGTSNAGEIWYDLTGNRTDKITIGSDGYATFPVNGGSVSVWVQQ

SEQ ID NO: 37999 - protein, 480 aa, Cytophaga sp.
NGTMMQYFEWYVPNDGQQWNRLRTDAPYLSSVGITAVWTPPAYKGTSQADVGYGPYDLYDLGEFNQKGTVRTKYGTKGELKSAVNTLHDNGIQVYGDVVMNHKAGADYTENVTAVEVNPSNRYQETSGEYNIQAWTGFNFPGRGTTYSNWKWQWFHFDGTDWDQSRSLSRIFKFDGKAWDWEVSSENGNYDYLMYADYDYDHPDVVNEMKKWGVWYANEVGLDGYRLDAVKHIKFQFLKDWVDNARAATGKEMFTVGEYWQNDLGALNNYLAKVNYNQSLFDAPLHYNFYAASTGGGYYDMRNILNNTLVASNPTKAVTLVENHDTQPGQSLESTVQPWFKPLAYAFILTRSGGYPSVFYGDMYGTKGTTTREIPALKSKIEPLLKARKDYAYGTQRDYIDNPDVIGWTREGDSTKAKSGLATVITDGPGGSKRMYVGTSNAGEIWYDLTGNRTDKITIGSDGYATFPVNGGSVSVWVQQ

SEQ ID NO: 38000 - protein, 480 aa, Cytophaga sp.
NGTMMQYFEWYVPNDGQQWNRLRTDAPYLSSVGITAVWTPPAYKGTSQADVGYGPYDLYDLGEFNQKGTVRTKYGTKGELKSAVNTLHSNGIQVYGDVVMNHKAGADYTENVTAVEVNPSNRYQETSGEYNIQAWTGFNFPGRGTTYSNWKWQWFHFDGTDWDQSRSLSRIFKFDGKAWDWEVSSENGNYDYLMYADYDYDHPDVVNEMKKWGVWYANEVGLDGYRLDAVKHIKFQFLKDWVDNARAATGKEMFTVGEYWQNDLGALNNYLAKVNYNQSLFDAPLHYNFYAASTGGGYYDMRNILNNTLVASNPTKAVTLVENHDTQPGQSLESTVQPWFKPLAYAFILTRSGGYPSVFYGDMYGTKGTTTREIPALKSKIEPLLKARKDYAYGTQRDYIDNPDVIGWTREGDSTKAKSGLATVITDGPGGSKRMFVGTSNAGEIWYDLTGNRTDKITIGSDGYATFPVNGGSVSVWVQQ

SEQ ID NO: 38001 - protein, 480 aa, Cytophaga sp.
NGTMMQYFEWYVPNDGQQWNRLRTDAPYLSSVGITAVWTPPAYKGTSQADVGYGPYDLYDLGEFNQKGTVRTKYGTNGELKSAVNTLHSNGIQVYGDVVMNHKAGADYTENVTAVEVNPSNRYQETSGEYNIQAWTGFNFPGRGTTYSNWKWQWFHFDGTDWDQSRSLSRIFKFDGKAWDWEVSSENGNYDYLMYADYDYDHPDVVNEMKKWGVWYANEVGLDGYRLDAVKHIKFQFLKDWVDNARAATGKEMFTVGEYWQNDLGALNNYLAKVNYNQSLFDAPLHYNFYAASTGGGYYDMRNILNNTLVASNPTKAVTLVENHDTQPGQSLESTVQPWFKPLAYAFILTRSGGYPSVFYGDMYGTKGTTTREIPALKSKIEPLLKARKDYAYGTQRDYIDNPDVIGWTREGDSTKAKSGLATVITDGPGGSKRMYVGTSNAGEIWYDLTGNRTDKITIGSDGYATFPVNGGSVSVWVQQ

SEQ ID NO: 38002 - protein, 480 aa, Cytophaga sp.
NGTMMQYFEWYVPNDGQQWNRLRTDAPYLSSVGITAVWTPPAYKGTSQADVGYGPYDLYDLGEFNQKGTVRTKYGTKGELKSAVNTLHSNGIQVYGDVVMNHKAGADYTENVTAVEVNPSNRYQETSGEYNIQAWTGFNFIGRGTTYSNWKWQWFHFDGTDWDQSRSLSRIFKFDGKAWDWEVSSENGNYDYLMYADYDYDHPDVVNEMKKWGVWYANEVGLDGYRLDAVKHIKFQFLKDWVDNARAATGKEMFTVGEYWQNDLGALNNYLAKVNYNQSLFDAPLHYNFYAASTGGGYYDMRNILNNTLVASNPTKAVTLVENHDTQPGQSLESTVQPWFKPLAYAFILTRSGGYPSVFYGDMYGTKGTTTREIPALKSKIEPLLKARKDYAYGTQRDYIDNPDVIGWTREGDSTKAKSGLATVITDGPGGSKRMYVGTSNAGEIWYDLTGNRTDKITIGSDGYATFPVNGGSVSVWVQQ

SEQ ID NO: 38003 - protein, 480 aa, Cytophaga sp.
NGTMMQYFEWYVPNDGQQWNRLRTDAPYLSSVGITAVWTPPAYKGTSQADVGYGPYDLYDLGEFNQKGTVRTKYGTKGELKSAVNTLHSNGIQVYGDVVMNHKAGADYTENVTAVEVNPSNRYQETSGEYNIQAWTGFNFPGRGTTYSNWKWQWFHFDGTDWDQSRSLSRIFKFDGKAWDWEVSSENGNYDYLMYADYDYDHPDVVNEMKKWGVWYANEVGLDGYRLDAVKHIKFQFLKDWVDNARAATGKEMFTVGEYWQNDLGALNNYLAKVNYNQSLFDAPLHYNFYAASTGHGYYDMRNILNNTLVASNPTKAVTLVENHDTQPGQSLESTVQPWFKPLAYAFILTRSGGYPSVFYGDMYGTKGTTTREIPALKSKIEPLLKARKDYAYGTQRDYIDNPDVIGWTREGDSTKAKSGLATVITDGPGGSKRMYVGTSNAGEIWYDLTGNRTDKITIGSDGYATFPVNGGSVSVWVQQ

SEQ ID NO: 38004 - protein, 480 aa, Cytophaga sp.
NGTMMQYFEWYVPNDGQQWNRLRTDAPYLSSVGITAVWTPPAYKGTSQADVGYGPYDLYDLGEFNQKGTVRTKYGTKGELKSAVNTLHSNGIQVLGDVVMNHKAGADYTENVTAVEVNPSNRYQETSGEYNIQAWTGFNFPGRGTTYSNWKWQWFHFDGTDWDQSRSLSRIFKFDGKAWDWEVSSENGNYDYLMYADYDYDHPDVVNEMKKWGVWYANEVGLDGYRLDAVKHIKFQFLKDWVDNARAATGKEMFTVGEYWQNDLGALNNYLAKVNYNQSLFDAPLHYNFYAASTGGGYYDMRNILNNTLVASNPTKAVTLVENHDTQPGQSLESTVQPWFKPLAYAFILTRSGGYPSVFYGDMYGTKGTTTREIPALKSKIEPLLKARKDYAYGTQRDYIDNPDVIGWTREGDSTKAKSGLATVITDGPGGSKRMYVGTSNAGEIWYDLTGNRTDKITIGSDGYATFPVNGGSVSVWVQQ

SEQ ID NO: 38005 - protein, 480 aa, Cytophaga sp.
NGTMMQYFEWYVPNDGQQWNRLRTDAPYLSSVGITAVWTPPAYKGTSQADVGYGPYDLYDLGEFNQKGTVRTKYGTKGELKSAVNTLHSNGIQVYGDVVMNHKAGADYTENVTAVEVNPSNRYQETSGEYNIQAWTGFNFPGRGTTYSNWKWQWFHFDGTDWDQSRSLSRIFKFDGKAWDWEVSSENGNYDYLMYADYDYDHPDVVNEMKKWGVWYANEVGLDGYRLDAVKHIKFQFLKDWVDNARAATGKEMFTVGEYWQNDLGALNNYLAKVNYNQSLFDAPLHYNFYAASTGGGYYDMRNILNNTLVASNPTKAVTLVENHDTQPGQSLESTVQPWFKPLAYAFILTRSGGYPSVFYGDMYGTKGTTTREIPALKSKIEPLLKARKDYAYGTQRDYIDNPDVIGWTREGDSTKIKSGLATVITDGPGGSKRMYVGTSNAGEIWYDLTGNRTDKITIGSDGYATFPVNGGSVSVWVQQ

SEQ ID NO: 38006 - protein, 480 aa, Cytophaga sp.
NGTMMQYFEWYVPNDGQQWNRLRTDAPYLSSVGITAVWTPPAYKGTSQADVGYGPYDLYDLGEFNQKGTVRTKYGTKGELKSAVNTLHSNGIQVYGDVVMNHKAGADYTENVTAVEVNPSNRYQENSGEYNIQAWTGFNFPGRGTTYSNWKWQWFHFDGTDWDQSRSLSRIFKFDGKAWDWEVSSENGNYDYLMYADYDYDHPDVVNEMKKWGVWYANEVGLDGYRLDAVKHIKFQFLKDWVDNARAATGKEMFTVGEYWQNDLGALNNYLAKVNYNQSLFDAPLHYNFYAASTGGGYYDMRNILNNTLVASNPTKAVTLVENHDTQPGQSLESTVQPWFKPLAYAFILTRSGGYPSVFYGDMYGTKGTTTREIPALKSKIEPLLKARKDYAYGTQRDYIDNPDVIGWTREGDSTKAKSGLATVITDGPGGSKRMYVGTSNAGEIWYDLTGNRTDKITIGSDGYATFPVNGGSVSVWVQQ

SEQ ID NO: 38007 - protein, 480 aa, Cytophaga sp.
NGTMMQYFEWYVPNDGQQWNRLRTDAPYLSSVGITAVWTPPAYKGTSQADVGYGPYDLYDLGEFNQKGTVRTKYGTKGELKSAVNTLHSNGIQVYGDVVMNHKAGADYTENVTAVEVNPSNRYQETSGEYNIQAWTGFNFPGRGTTYSNWKWQWFHFDGTDWDQSRSLSRIFKFDGKAWDWEVSSENGNYDYLMYADYDYDHPDVVNEMKKWGVWYANEVGLDGYRLDAVKHIKFQFLKDWVDNARAATGKEMFTVGEYWQNDLGALNNYLAKVNYNQSLFDAPLHYNFYAASTGGGYYDMRNILNNTLVASNPTKAVTLVENHDTQPGQSLESTVQPWFKPLAYAFILTRSGGYPSVFYGDMYGTKGTTTREIPALKSKIEPLLKARKDYAYGTQRDYIDNPDVIGWTREGDSTKAKSGLATVITDGPGGSKMMYVGTSNAGEIWYDLTGNRTDKITIGSDGYATFPVNGGSVSVWVQQ

SEQ ID NO: 38008 - protein, 480 aa, Cytophaga sp.
NGTMMQYFEWYVPNDGQQWNRLRTDAPYLSSVGITAVWTPPAYKGTSQADVGYGPYDLYDLGEFNQKGTVRTKYGTKGELKSAVNTLHSNGIQVYGDVVMNHKAGADYTENVTAEEVNPSNRYQETSGEYNIQAWTGFNFPGRGTTYSNWKWQWFHFDGTDWDQSRSLSRIFKFDGKAWDWEVSSENGNYDYLMYADYDYDHPDVVNEMKKWGVWYANEVGLDGYRLDAVKHIKFQFLKDWVDNARAATGKEMFTVGEYWQNDLGALNNYLAKVNYNQSLFDAPLHYNFYAASTGGGYYDMRNILNNTLVASNPTKAVTLVENHDTQPGQSLESTVQPWFKPLAYAFILTRSGGYPSVFYGDMYGTKGTTTREIPALKSKIEPLLKARKDYAYGTQRDYIDNPDVIGWTREGDSTKAKSGLATVITDGPGGSKRMYVGTSNAGEIWYDLTGNRTDKITIGSDGYATFPVNGGSVSVWVQQ

SEQ ID NO: 38009 - protein, 480 aa, Cytophaga sp.
NGTMMQYFEWYVPNDGQQWNRLRTDAPYLSSVGITAVWTPPAYKGTSQADVGYGPYDLYDLGEFNQKGTVRTKYGTKGELKSAVNTLHSNGIQVYGDVVMNHKAGADYTENVTAVEVNPSNRYQETSGEYNIQAWTGFNFPGRGTTYSNWKWQWFHFDGTDWDQSRSLSRIFKFDGKAWDWEVSSENGNYDYLMYADYDYDHPDVVNEMKKWGVWYANEVGLDGYRLDAVKHIKFQFLKDWVDNARAATGKEMFTVGEYWQNDLGALNNYLAKVNYNQSLFDAPLHYNFYAASTGGGYYDMANILNNTLVASNPTKAVTLVENHDTQPGQSLESTVQPWFKPLAYAFILTRSGGYPSVFYGDMYGTKGTTTREIPALKSKIEPLLKARKDYAYGTQRDYIDNPDVIGWTREGDSTKAKSGLATVITDGPGGSKRMYVGTSNAGEIWYDLTGNRTDKITIGSDGYATFPVNGGSVSVWVQQ

SEQ ID NO: 38010 - protein, 480 aa, Cytophaga sp.
NGTMMQYFEWYVPNDGQQWNRLRTDAPYLSSVGITAVWTPPAYKGTSQADVGYGPYDLYDLGEFNQKGTVRTKYGTKGELKSAVNTLHSNGIQVYGDVVMNHKAGADYTENVTAVEVNPSNRYQETSGEYNIQAWTGFNFPGRGTTYSNWKWQWFHFDGTDWDQSRSLSRIFKFDGKAWDWEVSSENGNYDYLMYADYDYDHPDVVNEMKKWGVWYANEVGLDGYRLDAVKHIKFQFLKDWVDNARAATGKEMFTVGEYWQNDLGALNNYLAKVNYNQSLFDAPLHYNFYAASTGGGYYDMRNILNNTLVASNPTKAVTLVENHDTQPGQSLESTVQPWFKPLAYAFILTRSGGYPSVFYGDMYGTKGTTTREIPALKSKIEPLLKARKDYAYGTQRDYIDNPDVIGWTREGDSTKAKSGLATVITDGEGGSKRMYVGTSNAGEIWYDLTGNRTDKITIGSDGYATFPVNGGSVSVWVQQ

SEQ ID NO: 38011 - protein, 480 aa, Cytophaga sp.
NGTMMQYFEWYVPNDGQQWNRLRTDAPYLSSVGITAVWTPPAYKGTSQADVGYGPYDLYDLGEFNQKGTVRTKYGTKGELKSAVNTLHSNGIQVYGDVVMNHKAGADYTENVTAVEVNPSNRYQETSGHYNIQAWTGFNFPGRGTTYSNFKWQWFHFDGTDWDQSRSLSRIFKFDGKAWDWPVSSENGNYDYLMYADYDYDHPDVVNEMKKWGVWYANEVGLDGYRLDAVKHIKFSFLKDWVDNARAATGKEMFTVGEYWQNDLGALNNYLAIVNYNQSLFDAPLHYNFYAASTGGGYYDMRNILNNTLVASNPTKAVTLVENHDTQPGQSLESTVQPWFKPLAYAFILTRSGGYPSVFYGDMYGTKGTTTREIPALKSKIEPLLKARKDYAYGTQRDYIDNPDVIGWTREGDSTKAKSGLATVITDGPGGSKRMYVGTSNAGEIWYDLTGNRTDKITIGSDGYATFPVNGGSVSVWVQQ

SEQ ID NO: 38012 - protein, 480 aa, Cytophaga sp.
NGTMMQYFEWYVPNDGQQWNRLRTDAPYLSSVGITAVWTPPAYKGTSQADVGYGPYDLYDLGEFNQKGTVRTKYGTKGELKSAVNTLHSNGIQVYGDVVMNHKAGADYTENVQAVEVNPSNRYQETSGEYNIQAWTGFNFPGRGTTYSNWKWQWFHFDGTDWDQSRSLSRIFKFDGKAWDWEVSSENGNYDYLMYADYDYDHPDVVNEMKKWGVWYANEVGLDGYRLDAVKHIKFQFLKDWVDNARAATGKEMFTVGEYWQNDLGALNNYLAKVNYNQSLFDAPLHYNFYAASTGGGYYDMRNILNNTLVASNPTKAVTLVENHDTQPGQSLESTVQPWFKPLAYAFILTRSGGYPSVFYGDMYGTKGTTTREIPALKSKIEPLLKARKDYAYGTQRDYIDNPDVIGWTREGDSTKAKSGLATVITDGPGGSKRMYVGTSNAGEIWYDLTGNRTDKITIGSDGYATFPVNGGSVSVWVQQ

SEQ ID NO: 38013 - protein, 480 aa, Cytophaga sp.
NGTMMQYFEWYVPNDGQQWNRLRTDAPYLSSVGITAVWTPPAYKGTSQADVGYGPYDLYDLGEFNQKGTVRTKYGTKGELKSAVNTLHSNGIQVYGDVVMNHKAGADYTENVTAVEVNPSNRYQETSGEYNIQAWTGFNFPGRGTTYSNWKWQWFHFDGTDWDQSRSLSRIFKFDGKAWDWEVSSENGNYDYLMYADYDYDHPDVVNEMKKWGVWYANEVGLDGYRLDAVKHIKFQFLKDWVDNARAATGKEMFTVGEYWQNDLGALNNYLAKVNYNQSLFDAPLHYNFYAASTGGGYYDMRNILNNTLVASNPTKAVTLVENHDTQPGQSLESTVQPWFKPLAYAFILTRSGGYPSVFYGDMYGTKGTTTREIPALKSKIEPLLKARKDYAYGTQRDYIDNPDVIGWTREGDSTKAKSGLATVITDGPGGSKRMYVGTSNAGEIWYDLTGNRTDKITIGCDGYATFPVNGGSVSVWVQQ

SEQ ID NO: 38014 - protein, 480 aa, Cytophaga sp.
NGTMMQYFEWYVPNDGQQWNRLRTDAPYLSSVGITAVWTPPAYKGTSQADVGYGPYDLYDLGEFNQKGTVRTKYGTKGELKSAVNTLHSNGIQVYGDVVMNHKAGADYTENVTAVEVNPSNRYQETSGEYNIQAWTGFNFPGRGTTYSNWKWQWFHFDGTDWDQSRSLSRIFKFDGKAWDWEVSSENGNYDYLMYADYDYDHPDVVNEMKKWGVWYANEVGLDGYRLDAVKHIKFQFLKDWVDNARAATGKEMFTVGEYWQNDLGALNNYLAKVNYNQSLFDAPLHYNFYAASTGGGYYDMRNILNNTLVASNPTKAVTLVENHDTQPGQSLESTVQPWFKPLAYAFILTRSGGYPSVFYGDMYGTKGTTTREIPALKSKIEPLLKARKDYAYGTQRDYIDNPDVIGWTRCGDSTKAKSGLATVITDGPGGSKRMYVGTSNAGEIWYDLTGNRTDKITIGSDGYATFPVNGGSVSVWVQQ

SEQ ID NO: 38015 - protein, 480 aa, Cytophaga sp.
NGTMMQYFEWYVPNDGQQWNRLRTDAPYLSSVGITAVWTPPAYKGTSQADVGYGPYDLYDLGEFNQKGTVRTKYGTKGELKSAVNTLHSNGIQVYGDVVMNHKAGADYTENVTAVEVNPSNRYQETSGEYNIQAWTGFNFPGRLTTYSNWKWQWFHFDGTDWDQSRSLSRIFKFDGKAWDWEVSSENGNYDYLMYADYDYDHPDVVNEMKKWGVWYANEVGLDGYRLDAVKHIKFQFLKDWVDNARAATGKEMFTVGEYWQNDLGALNNYLAKVNYNQSLFDAPLHYNFYAASTGGGYYDMRNILNNTLVASNPTKAVTLVENHDTQPGQSLESTVQPWFKPLAYAFILTRSGGYPSVFYGDMYGTKGTTTREIPALKSKIEPLLKARKDYAYGTQRDYIDNPDVIGWTREGDSTKAKSGLATVITDGPGGSKRMYVGTSNAGEIWYDLTGNRTDKITIGSDGYATFPVNGGSVSVWVQQ

SEQ ID NO: 38016 - protein, 480 aa, Cytophaga sp.
NGTMMQYFEWYVPNDGQQWNRLRTDAPYLSSVGITAVWTPPAYKGTSQADVGYGPYDLYDLGEFNQKGTVRTKYGTKGELKSAVNTLHSNGIQVYGDVVMNHKAGADYTENVTAVEVNPSNRYQETSGEYNIQAWTGFNFPGRGTTYSNWKWQWFHFDGTDWDQSRSLSRIFKFDGKAWDWEVSSENGNYDYLMYADYDYDHPDVVNEMKKWGVWYANEVGLDGYRLDAVKHIKFQFLKDWVDNARAATGKEMFTVGEYWQNDLGALNNYLAKVNYNQSLFDAPLHYNFYAASTGGGYYDMRNIMNNTLVASNPTKAVTLVENHDTQPGQSLESTVQPWFKPLAYAFILTRSGGYPSVFYGDMYGTKGTTTREIPALKSKIEPLLKARKDYAYGTQRDYIDNPDVIGWTREGDSTKAKSGLATVITDGPGGSKRMYVGTSNAGEIWYDLTGNRTDKITIGSDGYATFPVNGGSVSVWVQQ

SEQ ID NO: 38017 - protein, 480 aa, Cytophaga sp.
NGTMMQYFEWYVPNDGQQWNRLRTDAPYLSSVGITAVWTPPAYKGTSQADVGYGPYDLYDLGEFNQKGTVRTKYGTKGELKSAVNTLHSNGIQVYGDVVMNHKAGADYTENVTAVEVNPSNRYQETSGLYNIQAWTGFNFPGRGTTYSNWKWQWFHFDGTDWDQSRSLSRIFKFDGKAWDWEVSSENGNYDYLMYADYDYDHPDVVNEMKKWGVWYANEVGLDGYRLDAVKHIKFQFLKDWVDNARAATGKEMFTVGEYWQNDLGALNNYLAKVNYNQSLFDAPLHYNFYAASTGGGYYDMRNILNNTLVASNPTKAVTLVENHDTQPGQSLESTVQPWFKPLAYAFILTRSGGYPSVFYGDMYGTKGTTTREIPALKSKIEPLLKARKDYAYGTQRDYIDNPDVIGWTREGDSTKAKSGLATVITDGPGGSKRMYVGTSNAGEIWYDLTGNRTDKITIGSDGYATFPVNGGSVSVWVQQ

SEQ ID NO: 38018 - protein, 480 aa, Cytophaga sp.
NGTMMQYFEWYVPNDGQQWNRLRTDAPYLSSVGITAVWTPPAYKGTSQADVGYGPYDLYDLGEFNQKGTVRTKYGTKGELKSAVNTLHSNGIQVYGDVVMNHKAGADYTENVTAVEVNPSNRYQETSGEYNIQAWTGFNFPGRGTTYSNWIWQWFHFDGTDWDQSRSLSRIFKFDGKAWDWEVSSENGNYDYLMYADYDYDHPDVVNEMKKWGVWYANEVGLDGYRLDAVKHIKFQFLKDWVDNARAATGKEMFTVGEYWQNDLGALNNYLAKVNYNQSLFDAPLHYNFYAASTGGGYYDMRNILNNTLVASNPTKAVTLVENHDTQPGQSLESTVQPWFKPLAYAFILTRSGGYPSVFYGDMYGTKGTTTREIPALKSKIEPLLKARKDYAYGTQRDYIDNPDVIGWTREGDSTKAKSGLATVITDGPGGSKRMYVGTSNAGEIWYDLTGNRTDKITIGSDGYATFPVNGGSVSVWVQQ

SEQ ID NO: 38019 - protein, 480 aa, Cytophaga sp.
NGTMMQYFEWYVPNDGQQWNRLRTDAPYLSSVGITAVWTPPAYKGTSQADVGYGPYDLYDLGEFNQKGTVRTKYGTKGELKSAVNTLHSNGIQVYGDVVMNHKAGADYTENVTAVEVNPSNRYQETSGEYNIQAWTGFNFPGRGTTYSNWKWQWFHFDGTDWDQSRSLSRIFKFDGKAWDWEVSSENGNYDYLMYADYDYDHPDVVNEMKKWGVWYANEVGLDGYRLDAVKHIKFQFLKDWVDNARAATGKEMFTVGEYWQNDLGALNNYLAKVNYNQSLFDAPLHYNFYAASTGGGYYDMRNILNNTLVASNPTKAVTLVENHDTQPGQSLESTVCPWFKPLAYAFILTRSGGYPSVFYGDMYGTKGTTTREIPALKSKIEPLLKARKDYAYGTQRDYIDNPDVIGWTREGDSTKAKSGLATVITDGPGGSKRMYVGTSNAGEIWYDLTGNRTDKITIGSDGYATFPVNGGSVSVWVQQ

SEQ ID NO: 38020 - protein, 480 aa, Cytophaga sp.
NGTMMQYFEWYVPNDGQQWNRLRTDAPYLSSVGITAVWTPPAYKGTSQADVGYGPYDLYDLGEFNQKGTVRTKYGTKGELKSAVNTLHSNGIQVYGDVVMNHKAGADYTENVTAVEVNPSNRYQETSGEYNIQAWTGFNFPGRGTTYSNWKWQWFHFDGTDWDQSRSLSRIFKFDGKAWDWEVSSENGNYDYLMYADYDYDHPDVVNEMKKWGVWYANEVGLDGYRLDAVKHIKFQFLKDWVDNARAATGKEMFTVGEYWQNDLGALNNYLAKVNYNQSLFDAPLHYNFYAASTGGGYYDMRNILNNTLVASNPTKAVTLVENHDTQPGQSLESTVQPWFKPLAYAFILTRSGGYPSVFYGDMYGTKGTTTREIPALKSKIEPLLKARKDYAYGTQRDYIDNPDVIGWTREGDSTKAKSGLATVITDGPGGSKRMYVGTSNAGEIWYDLTGNRTDKITIGSDGYATFPVKGGSVSVWVQQ

SEQ ID NO: 38021 - protein, 480 aa, Cytophaga sp.
NGTMMQYFEWYVPNDGQQWNRLRTDAPYLSSVGITAVWTPPAYKGTSQADVGYGPYDLYDLGEFNQKGTVRTKYGTKGELKSAVNTLHSNGIQVYGDVVMNHKAGADYTENVTAVEVNPSNRYQETSGEYNIQAWTGFNFPGRGTTYSNWKWQWFHFDGTDWDQSRSLSRIFKFDGKAWDWEVSSENGNYDYLMYADYDYDHPDVVNEMKKWGVWYANEVGLDGYRLDAVKHIKFQFLKDWVDNARAATGKEMFTVGEYWQNDLGALNNYLAKVNYNQSLFDAPLHYNFYAASTGGGYYDMRNILNNTLVASNPTKAVTLVENHDTQPGQSLESTVQPWFKPLAYAFILTRSGGYPSVFYGDMYGTKGTTTREIPALKSKIEPLLKARKDYAYGTQRDYIDNPDVIGWTREGDSTKAESGLATVITDGPGGSKRMYVGTSNAGEIWYDLTGNRTDKITIGSDGYATFPVNGGSVSVWVQQ

SEQ ID NO: 38022 - protein, 480 aa, Cytophaga sp.
NGTMMQYFEWYVPNDGQQWNRLRTDAPYLSSVGITAVWTPPAYKGTSQADVGYGPYDLYDLGEFNQKGTVRTKYGTKGELKSAVNTLHSNGIQVYGDVVMNHKAGADYTENVTAVEVNPSNRYQETSGEYNIQAWTGFNFPGRGTTYSNWKWQWFHFDGTDWDQSRSLSRIFKFDGKAWDWEVSSENGNYDYLMYADYDYDHPDVVNEMKKWGVWYANEVGLDGYRLDAVKHIKFQFLKDWVDNARAATGKEMFTVGEYWQNDLGALNNYLAKVNYNQSLFDAPLHYNFYAASTGGGYYDMRNILNNTLVASNPTKAVTLVENHDTQPGQSLESTVQPWFKPLAYAFILTRSGGYPSVFYGDMYGTKGTTTREIPALKSKIEPLLKARKDYAYGTQRDYIDNNDVIGWTREGDSTKAKSGLATVITDGPGGSKRMYVGTSNAGEIWYDLTGNRTDKITIGSDGYATFPVNGGSVSVWVQQ

SEQ ID NO: 38023 - protein, 480 aa, Cytophaga sp.
NGTMMQYFEWYVPNDGQQWNRLRTDAPYLSSVGITAVWTPPAYKGTSQADVGYGPYDLYDLGEFNQKGTVRTKYGTKGELKSAVNTLHSNGIQVYGDVVMNHKAGADYTENVTAVEVNPSNRYQETSGEYNIQAWTGFNFPGRGTTYSNWKWQWFHFDGTDWDQSRSLSRIFKFDAKAWDWEVSSENGNYDYLMYADYDYDHPDVVNEMKKWGVWYANEVGLDGYRLDAVKHIKFQFLKDWVDNARAATGKEMFTVGEYWQNDLGALNNYLAKVNYNQSLFDAPLHYNFYAASTGGGYYDMRNILNNTLVASNPTKAVTLVENHDTQPGQSLESTVQPWFKPLAYAFILTRSGGYPSVFYGDMYGTKGTTTREIPALKSKIEPLLKARKDYAYGTQRDYIDNPDVIGWTREGDSTKAKSGLATVITDGPGGSKRMYVGTSNAGEIWYDLTGNRTDKITIGSDGYATFPVNGGSVSVWVQQ

SEQ ID NO: 38024 - protein, 480 aa, Cytophaga sp.
NGTMMQYFEWYVPNDGQQWNRLRTDAPYLSSVGITAVWTPPAYKGTSQADVGYGPYDLYDLGEFNQKGTVRTKYGTKGELKSAVNTLHSNGIQVYGDVVMNHKAGADYTENVTAVEVNPSNRYQETSGEYNIQAWTGFNFPGRGTTYSNWKWQWFHFDGTDWDQSRSLSRIFKFDGKAWDWEVSSENGNYDYLMYADYDYDHPDVVNEMKKWGVWYANEVGLDGYRLDAVKHIKFQFLKDWVDNARAATGKEMFTVGEYWQNDLGALNNYLAKVNYNQSLFDAPLHYNFYAASTGGGYYDMRNILNNTLVASNPTKAVTLVENHDTQPGQSLESTVQPWFKPLGYAFILTRSGGYPSVFYGDMYGTKGTTTREIPALKSKIEPLLKARKDYAYGTQRDYIDNPDVIGWTREGDSTKAKSGLATVITDGPGGSKRMYVGTSNAGEIWYDLTGNRTDKITIGSDGYATFPVNGGSVSVWVQQ

SEQ ID NO: 38025 - protein, 480 aa, Cytophaga sp.
NGTMMQYFEWYVPNDGQQWNRLRTDAPYLSSVGITAVWTPPAYKGTSQADVGYGPYDLYDLGEFNQKGTVRTKYGTKGELKSAVNTLHSNGIQVYGDVVMNHKAGADYTENVTAVEVNPSNRYQETSGEYNIQAWTGFNFPGRGTTYSNWKWQWFHFDGTDWDQSRSLSRIFKFDGKAWDWEVSSENGNYDYLMYADYDYDHPDVVNEMKKWGVWYANEVGLDGYRLDAVKHIKFQFLKDWVDNARAATGKEMFTVGEYWQNDLGALNNYLAKVNYNQSLFDAPLHYNFYAASTGGGYWDMRNILNNTLVASNPTKAVTLVENHDTQPGQSLESTVQPWFKPLAYAFILTRSGGYPSVFYGDMYGTKGTTTREIPALKSKIEPLLKARKDYAYGTQRDYIDNPDVIGWTREGDSTKAKSGLATVITDGPGGSKRMYVGTSNAGEIWYDLTGNRTDKITIGSDGYATFPVNGGSVSVWVQQ

SEQ ID NO: 38026 - protein, 480 aa, Cytophaga sp.
NGTMMQYFEWYVPNDGQQWNRLRTDAPYLSSVGITAVWTPPAYKGTSQADVGYGPYDLYDLGEFNQKGTVRTKYGTKGELKSAVNTLHSNGIQVYGDVVMNHKAGADYTENVTAVEVNPSNRYQETSGEYNIQAWTGFNFPGRGTTYSNWKWQWFHFDGTDWDQSRSLSRIFKFDGKAWDWEVSSENGNYDYLMYADYDYDHPDVVNEMKKWGVWYANEVGLDGYRLDAVKHIKFQFLKDWVDNARAATGKEMFTVGEYWQNDLGALNNYLAKVNYNQSLFDAPLHYNFYAASTGGGYYDMRNILNNTLVASNPTKAVTLVENHDTQPGQSLESTVQPWFKPLAYAFILTRSGGYPSVFYGDMYGTKGTTTREIPALKSKIEPLLKARKDYAYGTQREYIDNPDVIGWTREGDSTKAKSGLATVITDGPGGSKRMYVGTSNAGEIWYDLTGNRTDKITIGSDGYATFPVNGGSVSVWVQQ

SEQ ID NO: 38027 - protein, 480 aa, Cytophaga sp.
NGTMMQYFEWYVPNDGQQWNRLRTDAPYLSSVGITAVWTPPAYKGTSQADVGYGPYDLYDLGEFNQKGTVRTKYGTKGELKSAVNTLHSNGIQVYGDVVMNHKAGADYTENVTAVEVNPSNRYQETSGEYNIQAWTGFNFPGRGTTYSNWKWQWFHFDGTDWDQSRSLSRIFKFDGKAWDWEVSSENGNYDYLMYADYDYDHPDVVNEMKKWGVWYANEVGLDGYRLDAVKHIKFQFLKDWVDNARAATGKEMFTVGEYWQNDLGALNNYLAKVNYNQSLFDAPLHYNFYAASTGGGYYDMRNILNNTLVASNPTKAVTLVENHDTQPGQSLESTVQPWFKPLAYATILTRSGGYPSVFYGDMYGTKGTTTREIPALKSKIEPLLKARKDYAYGTQRDYIDNPDVIGWTREGDSTKAKSGLATVITDGPGGSKRMYVGTSNAGEIWYDLTGNRTDKITIGSDGYATFPVNGGSVSVWVQQ

SEQ ID NO: 38028 - protein, 480 aa, Cytophaga sp.
NGTMMQYFEWYVPNDGQQWNRLRTDAPYLSSVGITAVWTPPAYKGTSQADVGYGPYDLYDLGEFNQKGTVRTKYGTKGELKSAVNTLHSNGIQVYGDVVMNHKAGADYTENVTAVETNPSNRYQETSGEYNIQAWTGFNFPGRGTTYSNWKWQWFHFDGTDWDQSRSLSRIFKFDGKAWDWEVSSENGNYDYLMYADYDYDHPDVVNEMKKWGVWYANEVGLDGYRLDAVKHIKFQFLKDWVDNARAATGKEMFTVGEYWQNDLGALNNYLAKVNYNQSLFDAPLHYNFYAASTGGGYYDMRNILNNTLVASNPTKAVTLVENHDTQPGQSLESTVQPWFKPLAYAFILTRSGGYPSVFYGDMYGTKGTTTREIPALKSKIEPLLKARKDYAYGTQRDYIDNPDVIGWTREGDSTKAKSGLATVITDGPGGSKRMYVGTSNAGEIWYDLTGNRTDKITIGSDGYATFPVNGGSVSVWVQQ

SEQ ID NO: 38029 - protein, 480 aa, Cytophaga sp.
NGTMMQYFEWYVPNDGQQWNRLRTDAPYLSSVGITAVWTPPAYKGTSQADVGYGPYDLYDLGEFNQKGTVRTKYGTKGELKSAVNTLHSNGIQVYGDVVMNHKAGADYTENVTAVEVNPSNRYQETSGEYNIQAWTGFNFPGRGTTYSNWKWQWFHFDGTDWDQSRSLSRIFKFDGKAWDWEVSSENGNYDYLMYADYDYDHPDVVNEMKKWGVWYANEVGLDGYRLDAVKHIKFQFLKDWVDNARAATGKEMFTVGEYWQNDLGALNNYLAKVNYNQSLFDAPLHYNFYAASTGGGYYDMRNILNNTLVASNPTKAVTLVENHDTQPGQSLESTVQPWFKPLAYAFILTRSGGYPSVFYGDMYGTKGTTTREIPALKSKIEPLLKARKDYAYGTQRDYIDNPDVIGWTMEGDSTKAKSGLATVITDGPGGSKRMYVGTSNAGEIWYDLTGNRTDKITIGSDGYATFPVNGGSVSVWVQQ

SEQ ID NO: 38030 - protein, 480 aa, Cytophaga sp.
NGTMMQYFEWYVPNDGQQWNRLRTDAPYLSSVGITAVWTPPAYKGTSQADVGYGPYDLYDLGEFNQKGTVRTKYGTKGELKSAVNTLHSNGIQVYGDVVMNHKAGADYTENVTAVEVNPSNRYQETSGEYNIQAWTGFNFPGRGTTYSNWKWQWFHFDGTDWDQSRSLSRIFKFDGKAWDWEVSSENGNYDYLMYADYDYDHPDVVNEMKKWGVWYANEVGLDGYRLDAVKHIKFQFLKDWVDNARAATGKEMFTVGEYWQNDLGALNNYLAKVNYNQSLFDAPLHYNFYAASTGGGYYDMRNILNNTLVASNPTKAVTLVENHDTQPGQSLESTVQPWFKPLAYAFILTRSGGYPSVFYGDMYGTKGTTTREIPALKSKIEPLLKARKDYAYGTQRDYIDNPDVIGWTREGLSTKAKSGLATVITDGPGGSKRMYVGTSNAGEIWYDLTGNRTDKITIGSDGYATFPVNGGSVSVWVQQ

SEQ ID NO: 38031 - protein, 480 aa, Cytophaga sp.
NGTMMQYFEWYVPNDGQQWNRLRTDAPYLSSVGITAVWTPPAYKGTSQADVGYGPYDLYDLGEFNQKGTVRTKYGTKGELKSAVNTLHSNGIQVYGDVVMNHKAGADYTENVTAVEVNPSNRYQETSGEYNIQAWTGFNFPGRGTTHSNWKWQWFHFDGTDWDQSRSLSRIFKFDGKAWDWEVSSENGNYDYLMYADYDYDHPDVVNEMKKWGVWYANEVGLDGYRLDAVKHIKFQFLKDWVDNARAATGKEMFTVGEYWQNDLGALNNYLAKVNYNQSLFDAPLHYNFYAASTGGGYYDMRNILNNTLVASNPTKAVTLVENHDTQPGQSLESTVQPWFKPLAYAFILTRSGGYPSVFYGDMYGTKGTTTREIPALKSKIEPLLKARKDYAYGTQRDYIDNPDVIGWTREGDSTKAKSGLATVITDGPGGSKRMYVGTSNAGEIWYDLTGNRTDKITIGSDGYATFPVNGGSVSVWVQQ

SEQ ID NO: 38032 - protein, 480 aa, Cytophaga sp.
NGTMMQYFEWYVPNDGQQWNRLRTDAPYLSSVGITAVWTPPAYKGTSQADVGYGPYDLYDLGEFNQKGTVRTKYGTKGELKSAVNTLHSNGIQVYGDVVMNHKAGADYTENVGAVEVNPSNRYQETSGEYNIQAWTGFNFPGRGTTYSNWKWQWFHFDGTDWDQSRSLSRIFKFDGKAWDWEVSSENGNYDYLMYADYDYDHPDVVNEMKKWGVWYANEVGLDGYRLDAVKHIKFQFLKDWVDNARAATGKEMFTVGEYWQNDLGALNNYLAKVNYNQSLFDAPLHYNFYAASTGGGYYDMRNILNNTLVASNPTKAVTLVENHDTQPGQSLESTVQPWFKPLAYAFILTRSGGYPSVFYGDMYGTKGTTTREIPALKSKIEPLLKARKDYAYGTQRDYIDNPDVIGWTREGDSTKAKSGLATVITDGPGGSKRMYVGTSNAGEIWYDLTGNRTDKITIGSDGYATFPVNGGSVSVWVQQ

SEQ ID NO: 38033 - protein, 480 aa, Cytophaga sp.
NGTMMQYFEWYVPNDGQQWNRLRTDAPYLSSVGITAVWTPPAYKGTSQADVGYGPYDLYDLGEFNQKGTVRTKYGTKGELKSAVNTLHSNGIQVYGDVVMNHKAGADYTENVTAVEVNPSNRYQETSGEYNIQAWTGFNFPGRGTTYSNWKWQWFHFDGTDWDQSRSLSRIFKFDGKAWDWEVSSENGNYDYLMYADYDYDHPDVVNEMKKWGVWYANEVGLDGYRLDAVKHIKFQFLKDWVDNARAATGKEMFTVGEYWQNDLGALNNYLAKVNYNQSLFDAPLHYNFYAASTGDGYYDMRNILNNTLVASNPTKAVTLVENHDTQPGQSLESTVQPWFKPLAYAFILTRSGGYPSVFYGDMYGTKGTTTREIPALKSKIEPLLKARKDYAYGTQRDYIDNPDVIGWTREGDSTKAKSGLATVITDGPGGSKRMYVGTSNAGEIWYDLTGNRTDKITIGSDGYATFPVNGGSVSVWVQQ

SEQ ID NO: 38034 - protein, 480 aa, Cytophaga sp.
NGTMMQYFEWYVPNDGQQWNRLRTDAPYLSSVGITAVWTPPAYKGTSQADVGYGPYDLYDLGEFNQKGTVRTKYGTKGELKSAVNTLHSNGIQVYGDVVMNHKAGADYTENVTAVEVNPSNRYQETSGEYNIQAWTGFNFPGRGTEYSNWKWQWFHFDGTDWDQSRSLSRIFKFDGKAWDWEVSSENGNYDYLMYADYDYDHPDVVNEMKKWGVWYANEVGLDGYRLDAVKHIKFQFLKDWVDNARAATGKEMFTVGEYWQNDLGALNNYLAKVNYNQSLFDAPLHYNFYAASTGGGYYDMRNILNNTLVASNPTKAVTLVENHDTQPGQSLESTVQPWFKPLAYAFILTRSGGYPSVFYGDMYGTKGTTTREIPALKSKIEPLLKARKDYAYGTQRDYIDNPDVIGWTREGDSTKAKSGLATVITDGPGGSKRMYVGTSNAGEIWYDLTGNRTDKITIGSDGYATFPVNGGSVSVWVQQ

SEQ ID NO: 38035 - protein, 480 aa, Cytophaga sp.
NGTMMQYFEWYVPNDGQQWNRLRTDAPYLSSVGITAVWTPPAYKGTSQADVGYGPYDLYDLGEFNQKGTVRTKYGTKGELKSAVNTLHSNGIQVYGDVVMNHKAGADYTENVTAVEVNPSNRYQETSGEYNIQAWTGFNFPGRGTTYSNWKWQWFHFDGTDWDQSRSLSRIFKFDGKAWDWEVSSENGNYDYLMYADYDYDHPDVVNEMKKWGVWYANEVGLDGYRLDAVKHIKFQFLKDWVDNARAATGKEMFTVGEYWQNDLGALNNYLAKVNYNQSLFDAPLHYNFYAASTGGGYYDMRNILNNTLVASNPTKAVTLVENHDTQPGQSLESTVQPWFKPLAYAFILTRSGGYPSVFYGDMYGTKGTTTREIPALKSKIEPLLKARKDYAYGTQRDYIDNPDSIGWTREGDSTKAKSGLATVITDGPGGSKRMYVGTSNAGEIWYDLTGNRTDKITIGSDGYATFPVNGGSVSVWVQQ

SEQ ID NO: 38036 - protein, 480 aa, Cytophaga sp.
NGTMMQYFEWYVPNDGQQWNRLRTDAPYLSSVGITAVWTPPAYKGTSQADVGYGPYDLYDLGEFNQKGTVRTKYGTKGELKSAVNTLHSNGIQVYGDVVMNHKAGADYTENVTAVEVNPSNRYQETSGEYNIQAWTGFNFPGRGTTYHNWKWQWFHFDGTDWDQSRSLSRIFKFDGKAWDWEVSSENGNYDYLMYADYDYDHPDVVNEMKKWGVWYANEVGLDGYRLDAVKHIKFQFLKDWVDNARAATGKEMFTVGEYWQNDLGALNNYLAKVNYNQSLFDAPLHYNFYAASTGGGYYDMRNILNNTLVASNPTKAVTLVENHDTQPGQSLESTVQPWFKPLAYAFILTRSGGYPSVFYGDMYGTKGTTTREIPALKSKIEPLLKARKDYAYGTQRDYIDNPDVIGWTREGDSTKAKSGLATVITDGPGGSKRMYVGTSNAGEIWYDLTGNRTDKITIGSDGYATFPVNGGSVSVWVQQ

SEQ ID NO: 38037 - protein, 480 aa, Cytophaga sp.
NGTMMQYFEWYVPNDGQQWNRLRTDAPYLSSVGITAVWTPPAYKGTSQADVGYGPYDLYDLGEFNQKGTVRTKYGTKGELKSAVNTLHSNGIQVYGDVVMNHKAGADYTENVAAVEVNPSNRYQETSGEYNIQAWTGFNFPGRGTTYSNWKWQWFHFDGTDWDQSRSLSRIFKFDGKAWDWEVSSENGNYDYLMYADYDYDHPDVVNEMKKWGVWYANEVGLDGYRLDAVKHIKFQFLKDWVDNARAATGKEMFTVGEYWQNDLGALNNYLAKVNYNQSLFDAPLHYNFYAASTGGGYYDMRNILNNTLVASNPTKAVTLVENHDTQPGQSLESTVQPWFKPLAYAFILTRSGGYPSVFYGDMYGTKGTTTREIPALKSKIEPLLKARKDYAYGTQRDYIDNPDVIGWTREGDSTKAKSGLATVITDGPGGSKRMYVGTSNAGEIWYDLTGNRTDKITIGSDGYATFPVNGGSVSVWVQQ

SEQ ID NO: 38038 - protein, 480 aa, Cytophaga sp.
NGTMMQYFEWYVPNDGQQWNRLRTDAPYLSSVGITAVWTPPAYKGTSQADVGYGPYDLYDLGEFNQKGTVRTKYGTKGELKSAVNTLHSNGIQVYGDVVMNHKAGADYTENVTAVEVNPSNRYQETSGEYNIQAWTGFNFPGRGTTYSNWKWQWFHFDGTDWDQSRSLSRIFKFDGKAWDWEVSSENGNYDYLMYADYDYDHPDVVNEMKKWGVWYANEVGLDGYRLDAVKHIKFQFLKDWVDNARAAKGKEMFTVGEYWQNDLGALNNYLAKVNYNQSLFDAPLHYNFYAASTGGGYYDMRNILNNTLVASNPTKAVTLVENHDTQPGQSLESTVQPWFKPLAYAFILTRSGGYPSVFYGDMYGTKGTTTREIPALKSKIEPLLKARKDYAYGTQRDYIDNPDVIGWTREGDSTKAKSGLATVITDGPGGSKRMYVGTSNAGEIWYDLTGNRTDKITIGSDGYATFPVNGGSVSVWVQQ

SEQ ID NO: 38039 - protein, 480 aa, Cytophaga sp.
NGTMMQYFEWYVPNDGQQWNRLRTDAPYLSSVGITAVWTPPAYKGTSQADVGYGPYDLYDLGEFNQKGTVRTKYGTKGELKSAVNTLHSNGIQVYGDVVMNHKAGADYTENVTAVEVNPSNRYQETSGEYNIQAWTGFNFPGRGTTYSNWKWQWFHFDGTDWDQSRSLSRIFKFDGKAWDWEVSSENGNYDYLMYADYDYDHPDVVNEMKKWGVWYANEVGLDGYRLDAVKHIKFQFLKDWVDNARAATGKEMFTVGEYWQNDLGALNNYLAKVNYNQSLFDAPLHYNFYAASTGGGYYDMRNILNNTLVASNPTKAVTLVENHDTQPGQSLESTVQPWFKPLAYAFILTRSGGYPSVFYGDMYGTKGTTTREIPALKSKIEPLLKARKDYAYGTQRDYIDNPDVIGWTREGDSTKAKSGLATVITDGPDGSKRMYVGTSNAGEIWYDLTGNRTDKITIGSDGYATFPVNGGSVSVWVQQ

SEQ ID NO: 38040 - protein, 480 aa, Cytophaga sp.
NGSMMQYFEWYVPNDGQQWNRLRTDAPYLSSVGITAVWTPPAYKGTSQADVGYGPYDLYDLGEFNQKGTVRTKYGTKGELKSAVNTLHSNGIQVYGDVVMNHKAGADYTENVTAVEVNPSNRYQETSGEYNIQAWTGFNFPGRGTTYSNWKWQWFHFDGTDWDQSRSLSRIFKFDGKAWDWEVSSENGNYDYLMYADYDYDHPDVVNEMKKWGVWYANEVGLDGYRLDAVKHIKFQFLKDWVDNARAATGKEMFTVGEYWQNDLGALNNYLAKVNYNQSLFDAPLHYNFYAASTGGGYYDMRNILNNTLVASNPTKAVTLVENHDTQPGQSLESTVQPWFKPLAYAFILTRSGGYPSVFYGDMYGTKGTTTREIPALKSKIEPLLKARKDYAYGTQRDYIDNPDVIGWTREGDSTKAKSGLATVITDGPGGSKRMYVGTSNAGEIWYDLTGNRTDKITIGSDGYATFPVNGGSVSVWVQQ

SEQ ID NO: 38041 - protein, 480 aa, Cytophaga sp.
NGTMMQYFEWYVPNDGQQWNRLRTDAPYLSSVGITAVWTPPAYKGTSQADVGYGPYDLYDLGEFNQKGTVRTKYGTKGELKSAVNTLHSNGIQVYGDVVMNHKAGADYTENVTAVEINPSNRYQETSGEYNIQAWTGFNFPGRGTTYSNWKWQWFHFDGTDWDQSRSLSRIFKFDGKAWDWEVSSENGNYDYLMYADYDYDHPDVVNEMKKWGVWYANEVGLDGYRLDAVKHIKFQFLKDWVDNARAATGKEMFTVGEYWQNDLGALNNYLAKVNYNQSLFDAPLHYNFYAASTGGGYYDMRNILNNTLVASNPTKAVTLVENHDTQPGQSLESTVQPWFKPLAYAFILTRSGGYPSVFYGDMYGTKGTTTREIPALKSKIEPLLKARKDYAYGTQRDYIDNPDVIGWTREGDSTKAKSGLATVITDGPGGSKRMYVGTSNAGEIWYDLTGNRTDKITIGSDGYATFPVNGGSVSVWVQQ

SEQ ID NO: 38042 - protein, 480 aa, Cytophaga sp.
NGTMMQYFEWYVPNDGQQWNRLRTDAPYLSSVGITAVWTPPAYKGTSQADVGYGPYDLYDLGEFNQKGTVRTKYGTKGELKSAVNTLHSNGIQVYGDVVMNHKAGADYTENVTAVEVNPSNRYQETSGEYNIQAWTGFNFPGRGTTYSNWKWQWFHFDGTDWDQSRSLSRIFKFDGKAWDWEVSSENGNYDYLMYADYDYDHPDVVNEMKKWGVWYANEVGLDGYRLDAVKHIKFQFLKDWVDNARAATGKEMFTVGEYWQNDLGALNNYLAKVNYNQSLFDAPLHYNFYAASTGGGYYDMRNILNNTLVASNPTKAVTLVENHDTQPGQSLESTVQPWFKPLAYAFILTRSGGYPSVFYGDMYGTKGTTTREIPALKSKIEPLLKARFDYAYGTQRDYIDNPDVIGWTREGDSTKAKSGLATVITDGPGGSKRMYVGTSNAGEIWYDLTGNRTDKITIGSDGYATFPVNGGSVSVWVQQ

SEQ ID NO: 38043 - protein, 480 aa, Cytophaga sp.
NGTMMQYFEWYVPNDGQQWNRLRTDAPYLSSVGITAVWTPPAYKGTSQADVGYGPYDLYDLGEFNQKGTVRTKYGTKGELKSAVNTLHSNGIQVYGDVVMNHKAGADYTENVTAVEVNPSNRYQETSGEYNIQAWTGFNFPGRGTWYSNWKWQWFHFDGTDWDQSRSLSRIFKFDGKAWDWEVSSENGNYDYLMYADYDYDHPDVVNEMKKWGVWYANEVGLDGYRLDAVKHIKFQFLKDWVDNARAATGKEMFTVGEYWQNDLGALNNYLAKVNYNQSLFDAPLHYNFYAASTGGGYYDMRNILNNTLVASNPTKAVTLVENHDTQPGQSLESTVQPWFKPLAYAFILTRSGGYPSVFYGDMYGTKGTTTREIPALKSKIEPLLKARKDYAYGTQRDYIDNPDVIGWTREGDSTKAKSGLATVITDGPGGSKRMYVGTSNAGEIWYDLTGNRTDKITIGSDGYATFPVNGGSVSVWVQQ

SEQ ID NO: 38044 - protein, 480 aa, Cytophaga sp.
NGTMMQYFEWYVPNDGQQWNRLRTDAPYLSSVGITAVWTPPAYKGTSQADVGYGPYDLYDLGEFNQKGTVRTKYGTKGELKSAVNTLHSNGIQVYGDVVMNHKAGADYTENVTAVEVNPSNRYQETSGEYNIQAWTGFNFPGRGTTYSNWKWQWFHFDGTDWDQDRSLSRIFKFDGKAWDWEVSSENGNYDYLMYADYDYDHPDVVNEMKKWGVWYANEVGLDGYRLDAVKHIKFQFLKDWVDNARAATGKEMFTVGEYWQNDLGALNNYLAKVNYNQSLFDAPLHYNFYAASTGGGYYDMRNILNNTLVASNPTKAVTLVENHDTQPGQSLESTVQPWFKPLAYAFILTRSGGYPSVFYGDMYGTKGTTTREIPALKSKIEPLLKARKDYAYGTQRDYIDNPDVIGWTREGDSTKAKSGLATVITDGPGGSKRMYVGTSNAGEIWYDLTGNRTDKITIGSDGYATFPVNGGSVSVWVQQ

SEQ ID NO: 38045 - protein, 480 aa, Cytophaga sp.
NGTMMQYFEWYVPNDGQQWNRLRTDAPYLSSVGITAVWTPPAYKGTSQADVGYGPYDLYDLGEFNQKGTVRTKYGTKGELKSAVNTLHSNGIQVYGDVVMNHKAGADYTENVTAVEVNPSNRYQETSGEYNIQAWTGFNFPGRGTTYSNWKWQWFHFDGTDWDQSRSLSRIFKFDGKAWDWEVSSENGNYDYLMYADYDYDHPDVVNEMKKWGVWYANEVGLDGYRLDAVKHIKFQFLKDWVDNARAATGKEMFTVGEYWQNDLGALNNYLAKVNYNQSLFDAPLHYNFYAASTGGGYYDMRNILNNTLVASNPTKAVTLVENHDTQPGQSLESTVQPWFKPLAYAFILTRSGGYPSVFYGDMYGTKGTTTREIPALKSKIEPLLKARKDYAYGTQRDYIDNPDVIGWTREGDSTKAKSGLATVITDGPGGSKRMYVGTSNAGEIWYDLTGNRTVKITIGSDGYATFPVNGGSVSVWVQQ

SEQ ID NO: 38046 - protein, 480 aa, Cytophaga sp.
NGTMMQYFEWYVPNDGQQWNRLRTDAPYLSSVGITAVWTPPAYKGTSQADVGYGPYDLYDLGEFNQKGTVRTKYGTKGELKSAVNTLHSNGIQVYGDVVMNHKAGADYTENVTAVEVNPSNRYQETSGEYNIQAWTGFNFPGRGTTYSNWKWQWFHFDGTDWDQSRSLSRIFKFDGKAWDWEVSSENGNYDYLMYADYDYDHPDVVNEMKKWGVWYANEVGLDGYRLDAVKHIKFQFLKDWVDNARAATGKEMFTVGEYWQNDLGALNNYLAKVNYNQSLFDAPLHYNFYAASTGGGYYDMRNILNNTLVASNPTCAVTLVENHDTQPGQSLESTVQPWFKPLAYAFILTRSGGYPSVFYGDMYGTKGTTTREIPALKSKIEPLLKARKDYAYGTQRDYIDNPDVIGWTREGDSTKAKSGLATVITDGPGGSKRMYVGTSNAGEIWYDLTGNRTDKITIGSDGYATFPVNGGSVSVWVQQ

SEQ ID NO: 38047 - protein, 480 aa, Cytophaga sp.
NGTMMQYFEWYVPNDGQQWNRLRTDAPYLSSVGITAVWTPPAYKGTSQADVGYGPYDLYDLGEFNQKGTVRTKYGTKGELKSAVNTLHSNGIQVYGDVVMNHKAGADYTENVTAVEVNPSNRYQETSGEYNIQAWTGFNFPGRGTTYSNWKWQWFHFDGTDWDQSRSLSRIFKFDGKAWDWEVSSENGNYDYLMYADYDYDHPDVVNEMKKWGVWYANEVGLDGYRLDAVKHIKFQFLKDWVDNARAATGKEMFTVGEYWQNDLGALNNYLAKVNYNQSLFDAPLHYNFYAASTGGGYYDMRNILNNTLVASNPTKAVTLVENHDTQPGQSLESTVQPWFKPLAYAFILTRSGGYPSVFYGDMYGTKGTTTREIPALKSKIEPLLKARKDYAYGTQRDRIDNPDVIGWTREGDSTKAKSGLATVITDGPGGSKRMYVGTSNAGEIWYDLTGNRTDKITIGSDGYATFPVNGGSVSVWVQQ

SEQ ID NO: 38048 - protein, 480 aa, Cytophaga sp.
NGTMMQYFEWYVPNDGQQWNRLRTDAPYLSSVGITAVWTPPAYKGTSQADVGYGPYDLYDLGEFNQKGTVRTKYGTKGELKSAVNTLHSNGIQVYGDVVMNHKAGADYTENVTAVEVNPSNRYQETSGEYNIQAWTGFNFPGRGTTYSNWKWQWFHFDGTDWDQSRSLSRIFKFDGKAWDWEVSSENGNYDYLMYADYDYDHPDVVNEMKKWGVWYANEVGLDGYRLDAVKHIKFQFLKDWVDNARAATGKEMFTVGEYWQNDLGALNNYLAKVNYNQSLFDAPLHYNFYAASTGGGYYDMRNILNNTLVASNPTKAVTLVENHDTQPGQSLESTVQPWFKPLAYAFILTRSGGYPSVFYGDMYGTKGTTTREIPALKSKIEPLLKARKDYAYGTQRDYIDNPDVIGWTREGDSTKAKSGLATVITDGPGGSKRMYVGTSNAGEIWYDLTGNRTDKITIGSDGYATFPVNGGSVHVWVQQ

SEQ ID NO: 38049 - protein, 480 aa, Cytophaga sp.
NGTMMQYFEWYVPNDGQQWNRLRTDAPYLSSVGITAVWTPPAYKGTSQADVGYGPYDLYDLGEFNQKGTVRTKYGTKGELKSAVNTLHSNGIQVYGDVVMNHKAGADYTENVTAVEVNPSNRYQEMSGEYNIQAWTGFNFPGRGTTYSNWKWQWFHFDGTDWDQSRSLSRIFKFDGKAWDWEVSSENGNYDYLMYADYDYDHPDVVNEMKKWGVWYANEVGLDGYRLDAVKHIKFQFLKDWVDNARAATGKEMFTVGEYWQNDLGALNNYLAKVNYNQSLFDAPLHYNFYAASTGGGYYDMRNILNNTLVASNPTKAVTLVENHDTQPGQSLESTVQPWFKPLAYAFILTRSGGYPSVFYGDMYGTKGTTTREIPALKSKIEPLLKARKDYAYGTQRDYIDNPDVIGWTREGDSTKAKSGLATVITDGPGGSKRMYVGTSNAGEIWYDLTGNRTDKITIGSDGYATFPVNGGSVSVWVQQ

SEQ ID NO: 38050 - protein, 480 aa, Cytophaga sp.
NGTMMQYFEWYVPNDGQQWNRLRTDAPYLSSVGITAGWTPPAYKGTSQADVGYGPYDLYDLGEFNQKGTVRTKYGTKGELKSAVNTLHSNGIQVYGDVVMNHKAGADYTENVTAVEVNPSNRYQETSGEYNIQAWTGFNFPGRGTTYSNWKWQWFHFDGTDWDQSRSLSRIFKFDGKAWDWEVSSENGNYDYLMYADYDYDHPDVVNEMKKWGVWYANEVGLDGYRLDAVKHIKFQFLKDWVDNARAATGKEMFTVGEYWQNDLGALNNYLAKVNYNQSLFDAPLHYNFYAASTGGGYYDMRNILNNTLVASNPTKAVTLVENHDTQPGQSLESTVQPWFKPLAYAFILTRSGGYPSVFYGDMYGTKGTTTREIPALKSKIEPLLKARKDYAYGTQRDYIDNPDVIGWTREGDSTKAKSGLATVITDGPGGSKRMYVGTSNAGEIWYDLTGNRTDKITIGSDGYATFPVNGGSVSVWVQQ

SEQ ID NO: 38051 - protein, 480 aa, Cytophaga sp.
NGTMMQYFEWYVPNDGQQWNRLRTDAPYLSSVGITAVWTPPAYKGTSQADVGYGPYDLYDLGEFNQKGTVRTKYGTKGELKSAVNTLHSNGIQVYGDVVMNHKAGADYTENVTAVEVNPSNRYQETSGEYNIQAWTGFNFPGRGTTYSNWKWQWFHFDGTDWDQSRSLSRIFKFDGKAWDWEVSSENGNYDYLMYADYDYDHPDVVNEMKKWGVWYANEVGLDGYRLDAVKHIKFQFLKDWVDNARAATGKEMFTVGEYWQNDLGALNNYLAKVNYNQSLFDAPLHYNFYAASTGGGYYDMRNILNNTLVASNPTKAVTLVENHDTQPGQSLESTVQPWFKPLAYAFILTRSGGYPSVFYGDMYGTKGTTTREIPALKSKIEPLLKARKDYAYGTQRDYIDNPDVIGWTREGWSTKAKSGLATVITDGPGGSKRMYVGTSNAGEIWYDLTGNRTDKITIGSDGYATFPVNGGSVSVWVQQ

SEQ ID NO: 38052 - protein, 480 aa, Cytophaga sp.
NGTMMQYFEWYVPNDGQQWNRLRTDAPYLSSVGITAVWTPPAYKGTSQADVGYGPYDLYDLGEFNQKGTVRTKYGTKGELKSAVNTLHSNGIQVYGDVVMNHKAGADYTENVTAVEVNPSNRYQETSGEYNIQAWTGFNFPGRGTTHSNWKWQWFHFDGTDWDQSRSNSRIFKFHGKAWDWPVSSENGNYDYLMYADYDYDHPDVVNEMKKWGVWYANEVGLDGYRLDAVKHIKFSFLKDWVDNARAATGKEMFTVGEYWQNDLGALNNYLAKVNYNQSLFDAPLHYNFYAASTGGGYYDMRNILNNTLVASNPTKAVTLVENHDTQPGQSLESTVQPWFKPLAYAFILTRSGGYPSVFYGDMYGTKGTTTREIPALKSKIEPLLKARKDYAYGTQRDYIDNPDVIGWTREGDSTKAKSGLATVITDGPGGSKRMYVGTSNAGEIWYDLTGNRTDKITIGSDGYATFPVNGGSVSVWVQQ

SEQ ID NO: 38053 - protein, 480 aa, Cytophaga sp.
NGTMMQYFEWYVPNDGQQWNRLRTDAPYLSSVGITAKWTPPAYKGTSQADVGYGPYDLYDLGEFNQKGTVRTKYGTKGELKSAVNTLHSNGIQVYGDVVMNHKAGADYTENVTAVEVNPSNRYQETSGEYNIQAWTGFNFPGRGTTYSNWKWQWFHFDGTDWDQSRSLSRIFKFDGKAWDWEVSSENGNYDYLMYADYDYDHPDVVNEMKKWGVWYANEVGLDGYRLDAVKHIKFQFLKDWVDNARAATGKEMFTVGEYWQNDLGALNNYLAKVNYNQSLFDAPLHYNFYAASTGGGYYDMRNILNNTLVASNPTKAVTLVENHDTQPGQSLESTVQPWFKPLAYAFILTRSGGYPSVFYGDMYGTKGTTTREIPALKSKIEPLLKARKDYAYGTQRDYIDNPDVIGWTREGDSTKAKSGLATVITDGPGGSKRMYVGTSNAGEIWYDLTGNRTDKITIGSDGYATFPVNGGSVSVWVQQ

SEQ ID NO: 38054 - protein, 480 aa, Cytophaga sp.
NGQMMQYFEWYVPNDGQQWNRLRTDAPYLSSVGITAVWTPPAYKGTSQADVGYGPYDLYDLGEFNQKGTVRTKYGTKGELKSAVNTLHSNGIQVYGDVVMNHKAGADYTENVTAVEVNPSNRYQETSGEYNIQAWTGFNFPGRGTTYSNWKWQWFHFDGTDWDQSRSLSRIFKFDGKAWDWEVSSENGNYDYLMYADYDYDHPDVVNEMKKWGVWYANEVGLDGYRLDAVKHIKFQFLKDWVDNARAATGKEMFTVGEYWQNDLGALNNYLAKVNYNQSLFDAPLHYNFYAASTGGGYYDMRNILNNTLVASNPTKAVTLVENHDTQPGQSLESTVQPWFKPLAYAFILTRSGGYPSVFYGDMYGTKGTTTREIPALKSKIEPLLKARKDYAYGTQRDYIDNPDVIGWTREGDSTKAKSGLATVITDGPGGSKRMYVGTSNAGEIWYDLTGNRTDKITIGSDGYATFPVNGGSVSVWVQQ

SEQ ID NO: 38055 - protein, 480 aa, Cytophaga sp.
NGTMMQYFEWYVPNDGQQWNRLRTDAPYLSSVGITAVWTPPAYKGTSQADVGYGPYDLYDLGEFNQKGTVRTKYGTKGELKSAVNTLHSNGIQVYGDVVMNHKAGADYTENVTAVEVNPSNRYQETSGEYNIQAWTGFNFPGRGTTYSNWKWQWFHFDGTDWDQSRSLSRIFKFDGKAWDWEVSSQNGNYDYLMYADYDYDHPDVVNEMKKWGVWYANEVGLDGYRLDAVKHIKFQFLKDWVDNARAATGKEMFTVGEYWQNDLGALNNYLAKVNYNQSLFDAPLHYNFYAASTGGGYYDMRNILNNTLVASNPTKAVTLVENHDTQPGQSLESTVQPWFKPLAYAFILTRSGGYPSVFYGDMYGTKGTTTREIPALKSKIEPLLKARKDYAYGTQRDYIDNPDVIGWTREGDSTKAKSGLATVITDGPGGSKRMYVGTSNAGEIWYDLTGNRTDKITIGSDGYATFPVNGGSVSVWVQQ

SEQ ID NO: 38056 - protein, 480 aa, Cytophaga sp.
NGTMMQYFEWYVPNDGQQWNRLRTDAPYLSSVGITAVWTPPAYKGTSQADVGYGPYDLYDLGEFNQKGTVRTKYGTKGELKSAVNTLHSNGIQVYGDVVMNHKAGADYTENVTAVEVNPSNRYQETAGEYNIQAWTGFNFPGRGTTYSNWKWQWFHFDGTDWDQSRSLSRIFKFDGKAWDWEVSSENGNYDYLMYADYDYDHPDVVNEMKKWGVWYANEVGLDGYRLDAVKHIKFQFLKDWVDNARAATGKEMFTVGEYWQNDLGALNNYLAKVNYNQSLFDAPLHYNFYAASTGGGYYDMRNILNNTLVASNPTKAVTLVENHDTQPGQSLESTVQPWFKPLAYAFILTRSGGYPSVFYGDMYGTKGTTTREIPALKSKIEPLLKARKDYAYGTQRDYIDNPDVIGWTREGDSTKAKSGLATVITDGPGGSKRMYVGTSNAGEIWYDLTGNRTDKITIGSDGYATFPVNGGSVSVWVQQ

SEQ ID NO: 38057 - protein, 480 aa, Cytophaga sp.
NGTMMQYFEWYVPNDGQQWNRLRTDAPYLSSVGITAVWTPPAYKGTSQADVGYGPYDLYDLGEFNQKGTVRTKYGTKGELKSAVNTLHSNGIQVYGDVVMNHKAGADYTENVTAVEVNPSNRYQETSGEYNIQAWTGFNFPGRGTTYSNWKWQWFHFDGTDWDQSRSLSRIFKFDGKAWDWEVSSENGNYDYLMYADYDYDHPDVVNEMKKWGVWYANEVGLDGYRLDAVKHIKFQFLKDWVDNARAATGKEMFTVGEYWQNDLGALNNYLAKVNYNQSLFDAPLHYNFYAASTGGGYYDMNNILNNTLVASNPTKAVTLVENHDTQPGQSLESTVQPWFKPLAYAFILTRSGGYPSVFYGDMYGTKGTTTREIPALKSKIEPLLKARKDYAYGTQRDYIDNPDVIGWTREGDSTKAKSGLATVITDGPGGSKRMYVGTSNAGEIWYDLTGNRTDKITIGSDGYATFPVNGGSVSVWVQQ

SEQ ID NO: 38058 - protein, 480 aa, Cytophaga sp.
NGTMMQYFEWYVPNDGQQWNRLRTDAPYLSSVGITAVWTPPAYKGTSQADVGYGPYDLYDLGEFNQKGTVRTKYGTKGELKSAVNTLHSNGIQVYGDVVMNHKAGADYTENVTAVEVNPSNRYQETSGEYNIQAWTGFNFPGRGTTYSNWKWQWFHFDGTDWDQSRSLSRIFKFDGKAWDWEVSSENSNYDYLMYADYDYDHPDVVNEMKKWGVWYANEVGLDGYRLDAVKHIKFQFLKDWVDNARAATGKEMFTVGEYWQNDLGALNNYLAKVNYNQSLFDAPLHYNFYAASTGGGYYDMRNILNNTLVASNPTKAVTLVENHDTQPGQSLESTVQPWFKPLAYAFILTRSGGYPSVFYGDMYGTKGTTTREIPALKSKIEPLLKARKDYAYGTQRDYIDNPDVIGWTREGDSTKAKSGLATVITDGPGGSKRMYVGTSNAGEIWYDLTGNRTDKITIGSDGYATFPVNGGSVSVWVQQ

SEQ ID NO: 38059 - protein, 480 aa, Cytophaga sp.
NGTMMQYFEWYVPNDGQQWNRLRTDAPYLSSVGITAVWTPPAYKGTSQADVGYGPYDLYDLGEFNQKGTVRTKYGTKGELKSAVNTLHSNGIQVYGDVVMNHKASADYTENVTAVEVNPSNRYQETSGEYNIQAWTGFNFPGRGTTYSNWKWQWFHFDGTDWDQSRSLSRIFKFDGKAWDWEVSSENGNYDYLMYADYDYDHPDVVNEMKKWGVWYANEVGLDGYRLDAVKHIKFQFLKDWVDNARAATGKEMFTVGEYWQNDLGALNNYLAKVNYNQSLFDAPLHYNFYAASTGGGYYDMRNILNNTLVASNPTKAVTLVENHDTQPGQSLESTVQPWFKPLAYAFILTRSGGYPSVFYGDMYGTKGTTTREIPALKSKIEPLLKARKDYAYGTQRDYIDNPDVIGWTREGDSTKAKSGLATVITDGPGGSKRMYVGTSNAGEIWYDLTGNRTDKITIGSDGYATFPVNGGSVSVWVQQ

SEQ ID NO: 38060 - protein, 480 aa, Cytophaga sp.
NGTMMQYFEWYVPNDGQQWNRLRTDAPYLSSVGITAVWTPPAYKGTSQADVGYGPYDLYDLGEFNQKGTVRTKYGTKGELKSAVNTLHSNGIQVYGDVVMNHKAGADYTENVTAVEVNPSNRYQETMGEYNIQAWTGFNFPGRGTTYSNWKWQWFHFDGTDWDQSRSLSRIFKFDGKAWDWEVSSENGNYDYLMYADYDYDHPDVVNEMKKWGVWYANEVGLDGYRLDAVKHIKFQFLKDWVDNARAATGKEMFTVGEYWQNDLGALNNYLAKVNYNQSLFDAPLHYNFYAASTGGGYYDMRNILNNTLVASNPTKAVTLVENHDTQPGQSLESTVQPWFKPLAYAFILTRSGGYPSVFYGDMYGTKGTTTREIPALKSKIEPLLKARKDYAYGTQRDYIDNPDVIGWTREGDSTKAKSGLATVITDGPGGSKRMYVGTSNAGEIWYDLTGNRTDKITIGSDGYATFPVNGGSVSVWVQQ

SEQ ID NO: 38061 - protein, 480 aa, Cytophaga sp.
NGTMMQYFEWYVPNDGQQWNRLRTDAPYLSSVGITAVWTPPAYKGTSQADVGYGPYDLYDLGEFNQKGTVRTKYGTKGELKSAVNTLHSNGIQVYGDVVMNHKAGADYTENVTAVEVNPSNRYQETSGEYNIQAWTGFNFPGRGTTYSNWKWQWFHFDGTDWDQSRSLSRIFKFDGKAWDWEVSSENGNYDYLMYADYDYDHPDVVNEMKKWGVWYANEVGLDGYRLDAVKHIKFQFLKDWVDNARAATGKEMFTVGEYWQNDLGALNNYLAKVNYNQSLFDAPLHYNFYAASTGGGYYDMRNILNNTLVASNPTKAVTLVENHDTQPGQSLESTVQPWFKPLAYAFILTRSGGYPSVFYGDMYGTKGTTTREIPALKSKIEPLLKARKDYAYGTQRDYIDNPDVIGWTREGDSTKAKSGLATVITDGQGGSKRMYVGTSNAGEIWYDLTGNRTDKITIGSDGYATFPVNGGSVSVWVQQ

SEQ ID NO: 38062 - protein, 480 aa, Cytophaga sp.
NGTMMQYFEWYVPNDGQQWNRLRTDAPYLSSVGITAVWTPPAYKGTSQADVGYGPYDLYDLGEFNQKGTVRTKYGTKGELKSAVNTLHSNGIQVYGDVVMNHKAGADYTENVTAVEVNPSNRYQETSGEYNIQAWTGFNFPGRGTTYSNWKWQWFHFDGTDWDQSRSLSRIFKFDGKAWDWEVSSENGNYDYLMYADYDYDHPDVVNEMKKWGVWYANEVGLDGYRLDAVKHIKFQFLKDWVDNARAATGKEMFTVGEYWQNDLGALNNYLAKVNYNQSLFDAPLHYNFYAASTGGGYYDMRNILNNTLVASNPTKAVTLVENHDTQPGQSLESTVQPWFKPLAYAFILTRSGGYPSVFYGDMYGTKGTTTREIPALKSKIEPLLKARKDYAYGTQRDYIDNPDVIGWTREGDSTKAKSGLATVITDGPGGSKRMYVGTSNAGHIWYDLTGNRTDKITIGSDGYATFPVNGGSVSVWVQQ

SEQ ID NO: 38063 - protein, 480 aa, Cytophaga sp.
NGTMMQYFEWYVPNDGQQWNRLRTDAPYLSSVGITAVWTPPAYKGTSQADVGYGPYDLYDLGEFNQKGTVRTKYGTKGELKSAVNTLHSNGIQVYGDVVMNHKAGADYTENVTAVEVNPSNRYQETSGEYNIQAWTGFNFPGRGTTYSNWKWQWFHFDGTDWDQSRSLSRIFKFDGKAWDWEVSSENGNYDYLMYADYDYDHPDVVNEMKKWGVWYANEVGLDGYRLDAVKHIKFQFLKDWVDNARAATGKEMFTVGEYWQNDLGALNNYLAKVNYNQSLFDAPLHYNFYAASTGGGYYDMRNILNNTLVASNPTKAVTLVENHDTQPGQSLESTVQPWFKPLAYAFILTRSGGYPSVFYGDMYGTKGTTTREIPALKSKIEPLLKARKDYAYGTQRDYIDNPDVIGWTREGDSTKAKSGLATVITDGPGGSKRMNVGTSNAGEIWYDLTGNRTDKITIGSDGYATFPVNGGSVSVWVQQ

SEQ ID NO: 38064 - protein, 480 aa, Cytophaga sp.
NGTMMQYFEWYVPNDGQQWNRLRTDAPYLSSVGITAVWTPPAYKGTSQADVGYGPYDLYDLGEFNQKGTVRTKYGTKGELKSAVNTLHSNGIQVYGDVVMNHKAGADYTENVTAVEVNPSNRYQETSGEYNIQAWTGFNFPGRGTTYSNWKWQWFHFDGTDWDQSRSLSRIFKFDGKAWDWEVSSENGNYDYLMYADYDYAHPDVVNEMKKWGVWYANEVGLDGYRLDAVKHIKFQFLKDWVDNARAATGKEMFTVGEYWQNDLGALNNYLAKVNYNQSLFDAPLHYNFYAASTGGGYYDMRNILNNTLVASNPTKAVTLVENHDTQPGQSLESTVQPWFKPLAYAFILTRSGGYPSVFYGDMYGTKGTTTREIPALKSKIEPLLKARKDYAYGTQRDYIDNPDVIGWTREGDSTKAKSGLATVITDGPGGSKRMYVGTSNAGEIWYDLTGNRTDKITIGSDGYATFPVNGGSVSVWVQQ

SEQ ID NO: 38065 - protein, 480 aa, Cytophaga sp.
NGTMMQYFEWYVPNDGQQWNRLRTDAPYLSSVGITAVWTPPAYKGTSQADVGYGPYDLYDLGEFNQKGTVRTKYGTKGELKSAVNTLHSNGIQVYGDVVMNHKAGADYTENVTAVEVNPSNRYQETSGEYNIQAWTGFNFPGRGTTYSNWKWQWFHFDGTDWDQSRSLSRIFKFDGKAWDWEVSSENGNYDYLMYADYDYDHPDVVNEMKKWGVWYANEVGLDGYRLDAVKHIKFQFLKDWVDNARAATGKEMFTVGEYWQNDLGALNNYLAKVNYNQSLFDAPLHYNFYAASTGGGYYDMRNILNNTLVASNPTKAVTLVENHDTQPGQSLESTVQPWFKPLAYAFILTRSGGYPSVFYGDMYGTKGTTTREIPALKSKIEPLLKARKDYAYGTQRDYIDNPDVIGWTREGDSTKNKSGLATVITDGPGGSKRMYVGTSNAGEIWYDLTGNRTDKITIGSDGYATFPVNGGSVSVWVQQ

SEQ ID NO: 38066 - protein, 480 aa, Cytophaga sp.
NGTMMQYFEWYVPNDGQQWNRLRTDAPYLSSVGITAVWTPPAYKGTSQADVGYGPYDLYDLGEFNQKGTVRTKYGTKGELKSAVNTLHSNGIQVYGDVVMNHKAGADYTENVTAVEVNPSNRYQETSGEYNIQAWTGFNFPGRGTTYSNWKWQWFHFDGTDWDQSRSLSRIFKFDGKAWDWEVSSENGNYDYLMYADYDYDHPDVVNEMKKWGVWYANEVGFDGYRLDAVKHIKFQFLKDWVDNARAATGKEMFTVGEYWQNDLGALNNYLAKVNYNQSLFDAPLHYNFYAASTGGGYYDMRNILNNTLVASNPTKAVTLVENHDTQPGQSLESTVQPWFKPLAYAFILTRSGGYPSVFYGDMYGTKGTTTREIPALKSKIEPLLKARKDYAYGTQRDYIDNPDVIGWTREGDSTKAKSGLATVITDGPGGSKRMYVGTSNAGEIWYDLTGNRTDKITIGSDGYATFPVNGGSVSVWVQQ

SEQ ID NO: 38067 - protein, 480 aa, Cytophaga sp.
NGTMMQYFEWYVPNDGQQWNRLRTDAPYLSSVGITAVWTPPAYKGTSQADVGYGPYDLYDLGEFNQKGTVRTKYGTKGELKSAVNTLHSNGIQVYGDVVMNHKAGADYTENVTAVEVNPSNRYQETSGEYNIQAWTGFNFPGRGTTYSNWKWQWFHFDGTDQDQSRSLSRIFKFDGKAWDWEVSSENGNYDYLMYADYDYDHPDVVNEMKKWGVWYANEVGLDGYRLDAVKHIKFQFLKDWVDNARAATGKEMFTVGEYWQNDLGALNNYLAKVNYNQSLFDAPLHYNFYAASTGGGYYDMRNILNNTLVASNPTKAVTLVENHDTQPGQSLESTVQPWFKPLAYAFILTRSGGYPSVFYGDMYGTKGTTTREIPALKSKIEPLLKARKDYAYGTQRDYIDNPDVIGWTREGDSTKAKSGLATVITDGPGGSKRMYVGTSNAGEIWYDLTGNRTDKITIGSDGYATFPVNGGSVSVWVQQ

SEQ ID NO: 38068 - protein, 480 aa, Cytophaga sp.
NGTMMQYFEWYVPNDGQQWNRLRTDAPYLSSVGITAVWTPPAYKGTSQADVGYGPYDLYDLGEFNQKGTVRTKYGTKGELKSAVNTLHSNGIQVYGDVVMNHKAGADYTENVTAVEVNPSNRYQETSGEYNIQAWTGFNFPGRGTTYSNWKWQWFHFDGTDWDQSRSLSRIFKFDGKAWDWEVSSENGNYDYLMYADYDYDHPDVVNEMKKWGVWYANEVGLDGYRLDAVKHIKFQFLKDWVDNARAATGKEMFTVGEYWQNDLGALNNYLAKVNYNQSLFDAPLHYNFYAASTGGGYYDMRNILNNTLVASNPTKAVTLVENHDTQPGQSLESTVQPWFKPLAYAFILTRSGGYPSVFYGDMYGTKGTTTREIPALKSKIEPLLKARKDYAYGTQRDYIDNPDVIGWTRMGDSTKAKSGLATVITDGPGGSKRMYVGTSNAGEIWYDLTGNRTDKITIGSDGYATFPVNGGSVSVWVQQ

SEQ ID NO: 38069 - protein, 480 aa, Cytophaga sp.
NGTMMQYFEWYVPNDGQQWNRLRTDAPYLSSVGITAVWTPPAYKGTSQADVGYGPYDLYDLGEFNQKGTVRTKYGTKGELKSAVNTLHSNGIQVYGDVVMNHKAGADYTENVTAVEVNPSNRYQEWSGEYNIQAWTGFNFPGRGTTYSNWKWQWFHFDGTDWDQSRSLSRIFKFDGKAWDWEVSSENGNYDYLMYADYDYDHPDVVNEMKKWGVWYANEVGLDGYRLDAVKHIKFQFLKDWVDNARAATGKEMFTVGEYWQNDLGALNNYLAKVNYNQSLFDAPLHYNFYAASTGGGYYDMRNILNNTLVASNPTKAVTLVENHDTQPGQSLESTVQPWFKPLAYAFILTRSGGYPSVFYGDMYGTKGTTTREIPALKSKIEPLLKARKDYAYGTQRDYIDNPDVIGWTREGDSTKAKSGLATVITDGPGGSKRMYVGTSNAGEIWYDLTGNRTDKITIGSDGYATFPVNGGSVSVWVQQ

SEQ ID NO: 38070 - protein, 480 aa, Cytophaga sp.
NGTMMQYFEWYVPNDGQQWNRLRTDAPYLSSVGITAVWTPPAYKGTSQADVGYGPYDLYDLGEFNQKGTVRTKYGTKGELKSAVNTLHSNGIQVYGDVVMNHKAGADYTENVTAVEVNPSNRYQETSGEYNIQAWTGFNFPGRGTTYSNWKWQWFHFDGTDWDQSRSLSRIFKFDGKAWDWEVSSENGNYDYLMYADYDYDHPDVVNEMKKWGVWYANEVGLDGYRLDAVKHIKFQFLKDWVDNARAATGKEMFTVGEYWQNDLGALNNYLAKVNYNQSLFDAPLHYNFYAASTGGGYYDMRNILNNTLVASNPTKAVTLVENHDTQPGQSLESTVQPWFKPLAYAFILTRSGGYPSVFYGDMYGTKGTTTREIPALKSKIEPLLKARKDYAYGTQRDYIDNPDVIGWTREGDSTKFKSGLATVITDGPGGSKRMYVGTSNAGEIWYDLTGNRTDKITIGSDGYATFPVNGGSVSVWVQQ

SEQ ID NO: 38071 - protein, 480 aa, Cytophaga sp.
NGTMMQYFEWYVPNDGQQWNRLRTDAPYLSSVGITAVWTPPAYKGTSQADVGYGPYDLYDLGEFNQKGTVRTKYGTKGELKSAVNTLHSNGIQVYGDVVMNHKAGADYTENVTAVEVNPSNRYQETSGEYNIQAWTGFNFPGRGTTYSNWKWQWFHFDGTDWDQSRSLSRIFKFDGKAWDWEVSSENGNYDYLMYADYDYDHPDVVNEMKKWGVWYANEVGLDGYRLDAVKHIKFQFLKDWVDNARAATGKEMFTVGEYWQNDLGALNNYLAKVNYNQSLFDAPLHYNFYAASTGGGYYDMRNILNNTLVASNPTKAVTLVENHDTQPGQSLESTVQPWFKPLAYAFILTRSGGYPSVFYGDMYGTKGTTTREIPALKSKIEPLLKARKDYAFGTQRDYIDNPDVIGWTREGDSTKAKSGLATVITDGPGGSKRMYVGTSNAGEIWYDLTGNRTDKITIGSDGYATFPVNGGSVSVWVQQ

SEQ ID NO: 38072 - protein, 480 aa, Cytophaga sp.
NGTMMQYFEWYVPNDGQQWNRLRTDAPYLSSVGITAVWTPPAYKGTSQADVGYGPYDLYDLGEFNQKGTVRTKYGTKGELKSAVNTLHSNGIQVYGDVVMNHKAGADYTENVTAVEVNPSNRYQETSGEYNIQAWTGFNFPGRGTTYSNWKWQWFHFDGTDWDQSRSLSRIFKFDGKAWDWEVSSENGNYDYLMYADYDYDHPDVVNEMKKWGVWYANEVGLDGYRLDAVKHIKFQFLKDWVDNARAATGKEMFTVGEYWQNDLGALNNYLAKVNYNQSLFDAPLHYNFYAASTGGGYYDMRNILNNTLVASNPTKAVTLVENHDTQPGQSLESTVQPWFKPLAYAFILTRSGGYPSVFYGDMYGTKGTTTREIPALASKIEPLLKARKDYAYGTQRDYIDNPDVIGWTREGDSTKAKSGLATVITDGPGGSKRMYVGTSNAGEIWYDLTGNRTDKITIGSDGYATFPVNGGSVSVWVQQ

SEQ ID NO: 38073 - protein, 480 aa, Cytophaga sp.
NGTMMQYFEWYVPNDGQQWNRLRTDAPYLSSVGITAVWTPPAYKGTSQADVGYGPYDLYDLGEFNQKGTVRTKYGTKGELKSAVNTLHSNGIQVYGDVVMNHKAGADYTENVTAVEVNPSNRYQETSGEYNIQAWTGFNFPGRHTTYSNWKWQWFHFDGTDWDQSRSLSRIFKFDGKAWDWEVSSENGNYDYLMYADYDYDHPDVVNEMKKWGVWYANEVGLDGYRLDAVKHIKFQFLKDWVDNARAATGKEMFTVGEYWQNDLGALNNYLAKVNYNQSLFDAPLHYNFYAASTGGGYYDMRNILNNTLVASNPTKAVTLVENHDTQPGQSLESTVQPWFKPLAYAFILTRSGGYPSVFYGDMYGTKGTTTREIPALKSKIEPLLKARKDYAYGTQRDYIDNPDVIGWTREGDSTKAKSGLATVITDGPGGSKRMYVGTSNAGEIWYDLTGNRTDKITIGSDGYATFPVNGGSVSVWVQQ

SEQ ID NO: 38074 - protein, 480 aa, Cytophaga sp.
NGTMMQYFEWYVPNDGQQWNRLRTDAPYLSSVGITAVWTPPAYKGTSQADVGYGPYDLYDLGEFNQKGTVRTKYGTKGELKSAVNTLHSNGIQVYGDVVMNHKAGADYTENVTAVEVNPSNRYQETSGEYNIQAWTGFNFPGRGTTYSNWKWQWFHFDGTDWDQSRSLSRIFKFDGKAWDWEVSSENGNYDYLMYADYDYDHPDVVNEMKKWGVWYANEVGLDGYRLDAVKHIKFQFLKDWVDNARAATGKEMFTVGEYWQNDLGALNNYLAKVNYNQSLFDAPLHYNFYAASTGGGYYDMRNILNNTLVASNPTKAVTLVENHDTQPGQSLESTVQPWFKPLAYAFILTRSGGYPSVFYGDMYGTKGTTTREIPALKSKIEPLLKARKDYAYGTQRDYIDNPDVIGWTREGDSTKAKSGLATVQTDGPGGSKRMYVGTSNAGEIWYDLTGNRTDKITIGSDGYATFPVNGGSVSVWVQQ

SEQ ID NO: 38075 - protein, 480 aa, Cytophaga sp.
NGTMMQYFEWYVPNDGQQWNRLRTDAPYLSSVGITAVWTPPAYKGTSQADVGYGPYDLYDLGEFNQKGTVRTKYGTKGELKSAVNTLHSNGIQVYGDVVMNHKAGADYTENVTAVEVNPSNRYQETSGEYNIQAWTGFNFPGRGTTYSNWKWQWFHFDGTDWDQSRSLSRIFKFDGKAWDWEVSSENGNYDYLMYADYDYDHPDVVNEMKKWGVWYANEVGLDGYRLDAVKHIKFQFLKDWVDNARAATGKEMFTVGEYWQNDLGALNNYLAKVNYNQSLFDAPLHYNFYAASTGGGYYDMRNILNNTLVASNPTKAVTLVENHDTQPGQSLESTVQPWFKPLAYAFILTRSGGYPSVFYGDMYGTKGTTTREIPALKSKIEPLLKARKDYAYGTQRDEIDNPDVIGWTREGDSTKAKSGLATVITDGPGGSKRMYVGTSNAGEIWYDLTGNRTDKITIGSDGYATFPVNGGSVSVWVQQ

SEQ ID NO: 38076 - protein, 480 aa, Cytophaga sp.
NGTMMQYFEWYVPNDGQQWNRLRTDAPYLSSVGITAVWTPPAYKGTSQADVGYGPYDLYDLGEFNQKGTVRTKYGTKGELKSAVNTLHSNGIQVYGDVVMNHKAGADYTENVTAVEVNPSNRYQETSGEYNIQAWTGFNFPGRGTTYSNWKWQWFHFDGTDWDQSRSLSRIFKFDGKAWDWEVSSENGNYDYLMYADYDYDHPDVVNEMKKWGVWYANEVGLDGYRLDAVKHIKFQFLKDWVDNARAATGKEMFTVGEYWQIDLGALNNYLAKVNYNQSLFDAPLHYNFYAASTGGGYYDMRNILNNTLVASNPTKAVTLVENHDTQPGQSLESTVQPWFKPLAYAFILTRSGGYPSVFYGDMYGTKGTTTREIPALKSKIEPLLKARKDYAYGTQRDYIDNPDVIGWTREGDSTKAKSGLATVITDGPGGSKRMYVGTSNAGEIWYDLTGNRTDKITIGSDGYATFPVNGGSVSVWVQQ

SEQ ID NO: 38077 - protein, 480 aa, Cytophaga sp.
NGTMMQYFEWYVPNDGQQWNRLRTDAPYLSSVGITAVWTPPAYKGTSQADVGYGPYDLYDLGEFNQKGTVRTKYGTKGQLKSAVNTLHSNGIQVYGDVVMNHKAGADYTENVTAVEVNPSNRYQETSGEYNIQAWTGFNFPGRGTTYSNWKWQWFHFDGTDWDQSRSLSRIFKFDGKAWDWEVSSENGNYDYLMYADYDYDHPDVVNEMKKWGVWYANEVGLDGYRLDAVKHIKFQFLKDWVDNARAATGKEMFTVGEYWQNDLGALNNYLAKVNYNQSLFDAPLHYNFYAASTGGGYYDMRNILNNTLVASNPTKAVTLVENHDTQPGQSLESTVQPWFKPLAYAFILTRSGGYPSVFYGDMYGTKGTTTREIPALKSKIEPLLKARKDYAYGTQRDYIDNPDVIGWTREGDSTKAKSGLATVITDGPGGSKRMYVGTSNAGEIWYDLTGNRTDKITIGSDGYATFPVNGGSVSVWVQQ

SEQ ID NO: 38078 - protein, 480 aa, Cytophaga sp.
NGTMMQYFEWYVPNDGQQWNRLRTDAPYLSSVGITAVWTPPAYKGTSQADVGYGPYDLYDLGEFNQKGTVRTKYGTKGELKSAVNTLHSNGIQVYGDVVMNHKAGADYTENVTAVEVNPSNRYQETSGEYNIQAWTGFNFPGRGTTYSNWKWQWFHFDGTDWDQSRSLSRIFKFDGKAWDWEVSSENGNYDYLMYADYDYDHPDVVNEMKKWGVWYANEVGLDGYRLDAVKHIKFQFLKDWVDNARAATGKEMFTVGEYWQNDLGALNNYLAKVNYNQSLFDAPLHYNFYAASTGGGYYDMRNILNNTLVASNPTKAVTLVENHDTQPGQSLESTVQPWFKPLAYAFILTRSGGYPSVFYGDMYGTKGTTTREIPALKSKIEPLLKARKDYAYGTQRDYIDNPDVIGWTREGDSTKAKSGLATVITDGPGGSKNMYVGTSNAGEIWYDLTGNRTDKITIGSDGYATFPVNGGSVSVWVQQ

SEQ ID NO: 38079 - protein, 480 aa, Cytophaga sp.
NGTMMQYFEWYVPNDGQQWNRLRTDAPYLSSVGITAVWTPPAYKGTSQAEVGYGPYDLYDLGEFNQKGTVRTKYGTKGELKSAVNTLHSNGIQVYGDVVMNHKAGADYTENVTAVEVNPSNRYQETSGEYNIQAWTGFNFPGRGTTYSNWKWQWFHFDGTDWDQSRSLSRIFKFDGKAWDWEVSSENGNYDYLMYADYDYDHPDVVNEMKKWGVWYANEVGLDGYRLDAVKHIKFQFLKDWVDNARAATGKEMFTVGEYWQNDLGALNNYLAKVNYNQSLFDAPLHYNFYAASTGGGYYDMRNILNNTLVASNPTKAVTLVENHDTQPGQSLESTVQPWFKPLAYAFILTRSGGYPSVFYGDMYGTKGTTTREIPALKSKIEPLLKARKDYAYGTQRDYIDNPDVIGWTREGDSTKAKSGLATVITDGPGGSKRMYVGTSNAGEIWYDLTGNRTDKITIGSDGYATFPVNGGSVSVWVQQ

SEQ ID NO: 38080 - protein, 480 aa, Cytophaga sp.
NGTMMQYFEWYVPNDGQQWNRLRTDAPYLSSVGITAVWTPPAYKGTSQADVGYGPYDLYDLGEFNQKGTVRTKYGTKGELKSAVNTLHSNGIQVYGDVVMNHKAGADYTENVTAVEVNPSNRYQETSGEYNIQAWTGFNFPGRGTTYSNWKWQWFHFDGTDWDQSRSLSRIFKFDGKAWDWEVSSENGNYDYLMYADYDYDHPDVVNEMKKWGVWYANEVGLDGYRLDAVKHIKFQFLKDWVDNARAATGKEMFTVGEYWQNDLGALNNYLAKVNYNQSLFDAPLHYNFYAASTGGGYYDMRNILNNTLVASNPTKAVTLVENHDTQPGQSLESTVQPWFKPLAYAFILTRSGGYPSVFYGDMYGTKGTTTREIPALKSKIEPLLKARKDYAYGTQRDYIDNPDVIGWTREGDSTKAKSGLATVITDGPGGSKRMGVGTSNAGEIWYDLTGNRTDKITIGSDGYATFPVNGGSVSVWVQQ

SEQ ID NO: 38081 - protein, 480 aa, Cytophaga sp.
NGTMMQYFEWYVPNDGQQWNRLRTDAPYLSSVGITAVWTPPAYKGTSQADVGYGPYDLYDLGEFNQKGTVRTKYGTKGELKSAVNTLHSNGIQVYGDVVMNHKAGADYTENVTAVEVNPSNRYQETSGEYNIQAWTGFNFPGRGTTYSNWKWQWFHFDGTDWDQSRSLSRIFKFDGKAWDWEVSSENGNYDYLMYADYDYDHPDVVNEMKKWGVWYANEVGLDGYRLDAVKHIKFQFLKDWVDNARAATGKEMFTVGEYWQNDLGALNNYLAKVNYNQSLFDAPLHYNFYAASTGGGYYDMRNILNNTLVASNPTKAVTLVENHDTQPGQSLESTVQPWFKPLAYAFILTRSGGYPSVFYGDMYGTKGTTTREIPALKSKIEPLLKARKDYAYGTQRDYIDNPDVIGWTREGQSTKAKSGLATVITDGPGGSKRMYVGTSNAGEIWYDLTGNRTDKITIGSDGYATFPVNGGSVSVWVQQ

SEQ ID NO: 38082 - protein, 480 aa, Cytophaga sp.
NGTMMQYFEWYVPNDGQQWNRLRTDAPYLSSVGITAVWTPPAYKGTSQADVGYGPYDLYDLGEFNQKGTVRTKYGTKGELKSAVNTLHSNGIQVYGDVVMNHKAGADYTENVTAVEVNPSNRYQETSGEYNIQAWTGFNFPGRGTTYSNWKWQWFHFDGTDWDQSRSLSRIFKFDGKAWDWEVSSENGNYDYLMYADYDYDHPDVVNEMKKWGVWYANEVGLDGYRLDAVKHISFQFLKDWVDNARAATGKEMFTVGEYWQNDLGALNNYLAKVNYNQSLFDAPLHYNFYAASTGGGYYDMRNILNNTLVASNPTKAVTLVENHDTQPGQSLESTVQPWFKPLAYAFILTRSGGYPSVFYGDMYGTKGTTTREIPALKSKIEPLLKARKDYAYGTQRDYIDNPDVIGWTREGDSTKAKSGLATVITDGPGGSKRMYVGTSNAGEIWYDLTGNRTDKITIGSDGYATFPVNGGSVSVWVQQ

SEQ ID NO: 38083 - protein, 480 aa, Cytophaga sp.
NGTMMQYFEWYVPNDGQQWNRLRTDAPYLSSVGITAVWTPPAYKGTSQADVGYGPYDLYDLGEFNQKGTVRTKYGTKGELKSAVNTLHSNGIQVYGDVVMNHKAGADYTENVTAVEVNPSNRYDETSGEYNIQAWTGFNFPGRGTTYSNWKWQWFHFDGTDWDQSRSLSRIFKFDGKAWDWEVSSENGNYDYLMYADYDYDHPDVVNEMKKWGVWYANEVGLDGYRLDAVKHIKFQFLKDWVDNARAATGKEMFTVGEYWQNDLGALNNYLAKVNYNQSLFDAPLHYNFYAASTGGGYYDMRNILNNTLVASNPTKAVTLVENHDTQPGQSLESTVQPWFKPLAYAFILTRSGGYPSVFYGDMYGTKGTTTREIPALKSKIEPLLKARKDYAYGTQRDYIDNPDVIGWTREGDSTKAKSGLATVITDGPGGSKRMYVGTSNAGEIWYDLTGNRTDKITIGSDGYATFPVNGGSVSVWVQQ

SEQ ID NO: 38084 - protein, 480 aa, Cytophaga sp.
NGTMMQYFEWYVPNDGQQWNRLRTDAPYLSSVGITAVWTPPAYKGTSQADVGYGPYDLYDLGEFNQKGTVRTKYGTKGELKSAVNTLHSNGIQVYGDVVMNHKAGADYTENVTACEVNPSNRYQETSGEYNIQAWTGFNFPGRGTTYSNWKWQWFHFDGTDWDQSRSLSRIFKFDGKAWDWEVSSENGNYDYLMYADYDYDHPDVVNEMKKWGVWYANEVGLDGYRLDAVKHIKFQFLKDWVDNARAATGKEMFTVGEYWQNDLGALNNYLAKVNYNQSLFDAPLHYNFYAASTGGGYYDMRNILNNTLVASNPTKAVTLVENHDTQPGQSLESTVQPWFKPLAYAFILTRSGGYPSVFYGDMYGTKGTTTREIPALKSKIEPLLKARKDYAYGTQRDYIDNPDVIGWTREGDSTKAKSGLATVITDGPGGSKRMYVGTSNAGEIWYDLTGNRTDKITIGSDGYATFPVNGGSVSVWVQQ

SEQ ID NO: 38085 - protein, 480 aa, Cytophaga sp.
NGTMMQYFEWYVPNDGQQWNRLRTDAPYLSSVGITAVWTPPAYKGTSQADVGYGPYDLYDLGEFNQKGTVRTKYGTKGELKSAVNTLHSNGIQVYGDVVMNHKAGADYTENVTAVEVNPSNRYQETSGEYNIQAWTGFNFPGRGTTYSNWKWQWFHFDGTDWDQSRSLSRIFKFDGKAWDWEVSSENGNYDYLMYADYDYDHPDVVNEMKKWGVWYANEVGLDGYRLDAVKHIKFQFLKDWVDNARAATGKEMFTVGEYWQNDLGALNNYLAKVNYNQSLFDAPLHYNFYAASTGGGYYDMRNILNNTLVASNPTKAVTLVENHDTQPGQSLESTVQPWFKPLAYAFILTRSGGYPSVFYGDMYGTKGTTTREIPALQSKIEPLLKARKDYAYGTQRDYIDNPDVIGWTREGDSTKAKSGLATVITDGPGGSKRMYVGTSNAGEIWYDLTGNRTDKITIGSDGYATFPVNGGSVSVWVQQ

SEQ ID NO: 38086 - protein, 480 aa, Cytophaga sp.
NGTMMQYFEWYVPNDGQQWNRLRTDAPYLSSVGITAVWTPPAYKGTQQADVGYGPYDLYDLGEFNQKGTVRTKYGTKGELKSAVNTLHSNGIQVYGDVVMNHKAGADYTENVTAVEVNPSNRYQETSGEYNIQAWTGFNFPGRGTTYSNWKWQWFHFDGTDWDQSRSLSRIFKFDGKAWDWEVSSENGNYDYLMYADYDYDHPDVVNEMKKWGVWYANEVGLDGYRLDAVKHIKFQFLKDWVDNARAATGKEMFTVGEYWQNDLGALNNYLAKVNYNQSLFDAPLHYNFYAASTGGGYYDMRNILNNTLVASNPTKAVTLVENHDTQPGQSLESTVQPWFKPLAYAFILTRSGGYPSVFYGDMYGTKGTTTREIPALKSKIEPLLKARKDYAYGTQRDYIDNPDVIGWTREGDSTKAKSGLATVITDGPGGSKRMYVGTSNAGEIWYDLTGNRTDKITIGSDGYATFPVNGGSVSVWVQQ

SEQ ID NO: 38087 - protein, 480 aa, Cytophaga sp.
NGTMMQYFEWYVPNDGQQWNRLRTDAPYLSSVGITAVWTPPAYKGTSQADVGYGPYDLYDLGEFNQKGTVRTKYGTKGELKSAVNTLHCNGIQVYGDVVMNHKAGADYTENVTAVEVNPSNRYQETSGEYNIQAWTGFNFPGRGTTYSNWKWQWFHFDGTDWDQSRSLSRIFKFDGKAWDWEVSSENGNYDYLMYADYDYDHPDVVNEMKKWGVWYANEVGLDGYRLDAVKHIKFQFLKDWVDNARAATGKEMFTVGEYWQNDLGALNNYLAKVNYNQSLFDAPLHYNFYAASTGGGYYDMRNILNNTLVASNPTKAVTLVENHDTQPGQSLESTVQPWFKPLAYAFILTRSGGYPSVFYGDMYGTKGTTTREIPALKSKIEPLLKARKDYAYGTQRDYIDNPDVIGWTREGDSTKAKSGLATVITDGPGGSKRMYVGTSNAGEIWYDLTGNRTDKITIGSDGYATFPVNGGSVSVWVQQ

SEQ ID NO: 38088 - protein, 480 aa, Cytophaga sp.
NGTMMQYFEWYVPNDGQQWNRLRTDAPYLSSVGITAVWTPPAYKGTSQADVGYGPYDLYDLGEFNQKGTVRTKYGTKGELKSAVNTLHSNGIQVYGDVVMNHKAGADYTENVTAVEVNPSNRYQETSGEYNIQAWTGFNFPGRGTTYSNWKWQWFHFDGTDWDQSRSLSRIFKFDGKAWDWEVSSENGNYDYLMYADYDYDHPDVVNEMKKWGVWYANEVGLDGYRLDAVKHIKFQFLKDWVDNARAATGKEMFTVGEYWQNDLGALNNYLAKVNYNQSLFDAPLHYNFYAASTGGGYYDMRNILNNTLVASNPTKAVTLVENHDTQPGQSLESTVQPWFKPLAYAFILTRSGGYPSVFYGDMYGTKGTTTREIPALKSKIEPLLKARKDYAYGTQRDYIDNPDVIGWTREGDSTKAKSGLATVIADGPGGSKRMYVGTSNAGEIWYDLTGNRTDKITIGSDGYATFPVNGGSVSVWVQQ

SEQ ID NO: 38089 - protein, 480 aa, Cytophaga sp.
NGTMMQYFEWYVPNDGQQWNRLRTDAPYLSSVGITAVWTPPAYKGTSQADVGYGPYDLYDLGEFNQKGTVRTKYGTKGELKSAVNTLHSNGIQVYGDVVMNHKAGADYTENVTAVEVNPSNRYQETSGEYNIQAWTGFNFPGRGTTYSNWKWQWFHFDGTDWDQSRSLSRIFKFDGKAWDWEVSSENGNYDYLMYADYDYDHPDVVNEMKKWGVWYANEVGLDGYRLDAVKHIKFQFLKDWVDNARAATGKEMFTVGEYWQNDLGALNNYLAKVNYNQSLFDAPLHYNFYAASTGGGYYDMRNILNNTLVASNPTKAVTLVENHDTQPGQSLESTVQPWFKPLAYAFILTRSGGYPSVFYGDMYGTKGTTTREIPALKSKIEPLLKARKDYAYGTQRDYIDNPDVIGWTREGDSTKAKSGLATVITDGPGGSKRMYVGTSNAGEIWYDLTGNRTDKITIGSDGYATFPVNGGSVSVWVKQ

SEQ ID NO: 38090 - protein, 480 aa, Cytophaga sp.
NGTMMQYFEWYVPNDGQQWNRLRTDAPYLSSVGITAVWTPPAYKGTSDADVGYGPYDLYDLGEFNQKGTVRTKYGTKGELKSAVNTLHSNGIQVYGDVVMNHKAGADYTENVTAVEVNPSNRYQETSGEYNIQAWTGFNFPGRGTTYSNWKWQWFHFDGTDWDQSRSLSRIFKFDGKAWDWEVSSENGNYDYLMYADYDYDHPDVVNEMKKWGVWYANEVGLDGYRLDAVKHIKFQFLKDWVDNARAATGKEMFTVGEYWQNDLGALNNYLAKVNYNQSLFDAPLHYNFYAASTGGGYYDMRNILNNTLVASNPTKAVTLVENHDTQPGQSLESTVQPWFKPLAYAFILTRSGGYPSVFYGDMYGTKGTTTREIPALKSKIEPLLKARKDYAYGTQRDYIDNPDVIGWTREGDSTKAKSGLATVITDGPGGSKRMYVGTSNAGEIWYDLTGNRTDKITIGSDGYATFPVNGGSVSVWVQQ

SEQ ID NO: 38091 - protein, 480 aa, Cytophaga sp.
NGNMMQYFEWYVPNDGQQWNRLRTDAPYLSSVGITAVWTPPAYKGTSQADVGYGPYDLYDLGEFNQKGTVRTKYGTKGELKSAVNTLHSNGIQVYGDVVMNHKAGADYTENVTAVEVNPSNRYQETSGEYNIQAWTGFNFPGRGTTYSNWKWQWFHFDGTDWDQSRSLSRIFKFDGKAWDWEVSSENGNYDYLMYADYDYDHPDVVNEMKKWGVWYANEVGLDGYRLDAVKHIKFQFLKDWVDNARAATGKEMFTVGEYWQNDLGALNNYLAKVNYNQSLFDAPLHYNFYAASTGGGYYDMRNILNNTLVASNPTKAVTLVENHDTQPGQSLESTVQPWFKPLAYAFILTRSGGYPSVFYGDMYGTKGTTTREIPALKSKIEPLLKARKDYAYGTQRDYIDNPDVIGWTREGDSTKAKSGLATVITDGPGGSKRMYVGTSNAGEIWYDLTGNRTDKITIGSDGYATFPVNGGSVSVWVQQ

SEQ ID NO: 38092 - protein, 480 aa, Cytophaga sp.
NGTMMQYFEWYVPNDGQQWNRLRTDAPYLSSVGITAVWTPPAYKGTSQADVGYGPYDLYDLGEFNQKGTVRTKYGTKGELKSAVNTLHSNGIQVYGDVVMNHKAGADYTENVTAVEVNPSNRYQETSGEYNIQAWTGFNFPGRGTTYSNWKWQWFHFDGTDWDQSRSLSRIFKFDGKAWDWEVSSENGNYDYLMYADYDYDHPDVVNEMKKWGVWYANEVGLDGYRLDAVKHIKFQFLKDWVDNARAATGKEMFTVGEYWQNDLGALNNYLAKVNYNQSLFDAPLHYNFYAASTGGGYYDMRNILNNTLVASNPTKAVTLVENHDTQPGQSLESTVQPWFKPLAYAFILTRSGGYPSVFYGDMYGTKGTTTREIPALKSKIEPLLKARKDYAYGTQRDYIDNPDVIGWTREGDSTKAKSGLATVITDGPGISKRMYVGTSNAGEIWYDLTGNRTDKITIGSDGYATFPVNGGSVSVWVQQ

SEQ ID NO: 38093 - protein, 480 aa, Cytophaga sp.
NGTMMQYFEWYVPNDGQQWNRLRTDAPYLSSVGITAVWTPPAYKGTSQADVGYGPYDLYDLGEFNQKGTVRTKYGTKGELKSAVNTLHSNGIQVYGDVVMNHKAGADYTENVTAVEVNPSNRYQETSGEYNIQAWTGFNFPGRGTTYSNWKWQWFHFDGTDWDQSRSLSRIFKFDGKAWDWEVSSENGNYDYLMYADYDYDHPDVVNEMKKWGVWYANEVGLDGYRLDAVKHIKFQFLKDWVDNARAATGKEMFTVGEYWQNDLGALNNYLAKVNYNQSLFDAPLHYNFYAASTGGGYYDMRNILNNTLVASNPTKAVTLVENHDTQPGQSLESTVQPWFKPLAYAFILTRSGGYPSVFYGDMYGTKGTTTREIPALKSKIEPLLKARKDYAYGTQRDYIDNCDVIGWTREGDSTKAKSGLATVITDGPGGSKRMYVGTSNAGEIWYDLTGNRTDKITIGSDGYATFPVNGGSVSVWVQQ

SEQ ID NO: 38094 - protein, 480 aa, Cytophaga sp.
NGTMMQYFEWYVPNDGQQWNRLRTDAPYLSSVGITAVWTPPAYKGTSQADVGYGPYDLYDLGEFNQKGTVRTKYGTKGELKSAVNTLHSNGIQVYGDVVMNHKAGADYTENVTAVEVNPSNRYQETSGEYNIQAWTGFNFPGRGTTYSNWKWQWFHFDGTDWDQSRSLSRIFKFDGKAWDWEVSSENGNYDYLMYADYDYDHPDVVNEMKKWGVWYANEVGLDGYRLDAVKHIKFQFLKDWVDNARAATGKEMFTVGEYWQVDLGALNNYLAKVNYNQSLFDAPLHYNFYAASTGGGYYDMRNILNNTLVASNPTKAVTLVENHDTQPGQSLESTVQPWFKPLAYAFILTRSGGYPSVFYGDMYGTKGTTTREIPALKSKIEPLLKARKDYAYGTQRDYIDNPDVIGWTREGDSTKAKSGLATVITDGPGGSKRMYVGTSNAGEIWYDLTGNRTDKITIGSDGYATFPVNGGSVSVWVQQ

SEQ ID NO: 38095 - protein, 480 aa, Cytophaga sp.
NGTMMQYFEWYVPNDGQQWNRLRTDAPYLSSVGITAVWTPPAYKGTSQADVGYGPYDLYDLGEFNQKGTVRTKYGTKGELKSAVNTLHSNGIQVYGDVVMNHKAGADYTENVTAVEVNPSNRYQETSGEYNIQAWTGFNFPGRGTTYSNWKWQWFHFDGTDWDQSRSLSRIFKFDGKAWDWEVSSENGNYDYLMYADYDYDHPDVVNEMKKWGVWYANEVGLDGYRLDAVKHIKFQFLKDWVDNARAATGKEMFTVGEYWQNDLGALNNYLAKVNYNQSLFDAPLHYNFYAASTGGGYYDMRNILNNTLVASNPTKAVTLVENHDTQPGQSLESTVQPWFKPLAYAFILTRSGGYPSVFYGDMYGTKGTTTREIPALKSKIEPLLKARKDYAYGTQRDYIDNPDVIGWTREGDSTKAKSGLATVITDGPGGSKRMYVGTSNAGEIWYDLTGNRTDKITIGSDGYATFPVNGGSDSVWVQQ

SEQ ID NO: 38096 - protein, 480 aa, Cytophaga sp.
NGTMMQYFEWYVPNDGQQWNRLRTDAPYLSSVGITAVWTPPAYKGTSQADVGYGPYDLYDLGEFNQKGTVRTKYGTKGELKSAVNTLHSNGIQVYGDVVMNHKAGADYTENVTAVEVNPSNRYQETSGEYNIQAWTGFNFPGRGTAYSNWKWQWFHFDGTDWDQSRSLSRIFKFDGKAWDWEVSSENGNYDYLMYADYDYDHPDVVNEMKKWGVWYANEVGLDGYRLDAVKHIKFQFLKDWVDNARAATGKEMFTVGEYWQNDLGALNNYLAKVNYNQSLFDAPLHYNFYAASTGGGYYDMRNILNNTLVASNPTKAVTLVENHDTQPGQSLESTVQPWFKPLAYAFILTRSGGYPSVFYGDMYGTKGTTTREIPALKSKIEPLLKARKDYAYGTQRDYIDNPDVIGWTREGDSTKAKSGLATVITDGPGGSKRMYVGTSNAGEIWYDLTGNRTDKITIGSDGYATFPVNGGSVSVWVQQ

SEQ ID NO: 38097 - protein, 480 aa, Cytophaga sp.
NGTMMQYFEWYVPNDGQQWNRLRTDAPYLSSVGITAVWTPPAYKGTSQADVGYGPYDLYDLGEFNQKGTVRTKYGTKGELKSAVNTLHSNGIQVYGDVVMNHKAGADYTENVTAVEVNPSNRYQETSGEYNIQAWTGFNFPGRGTTYSNWKWQWFHFDGTDWDQSRSLSRIFKFDGKAWDWEVSSENGNYDYLMYADYDYDHPDVVNEMKKWGVWYANEVGLDGYRLDAVKHIKFQFLKDWVDNARAATGKEMFTVGEYWQNDLGALNNYLAKVNYNQSLFDAPLHYNFYAASTGGGYYDMRNILNNTLVASNPTKAVTLVENHDTQPGQSLESTVQPWFKPLAYAFILTRSGGYPSVFYGDMYGTKGTTTREIPALKSKIEPLLKARKDYAYGTQRDYIDNPDVIGWTREGDSTKAKSGLATVITDGPGGSKRMYVGTSNAGEIWYDLTGNRTDKITIDSDGYATFPVNGGSVSVWVQQ

SEQ ID NO: 38098 - protein, 480 aa, Cytophaga sp.
NGTMMQYFEWYVPNDGQQWNRLRTDAPYLSSVGITAVWTPPAYKGTSQADVGYGPYDLYDLGEFNQKGTVRTKYGTKGELKSAVNTLHSNGIQVYGDVVMNHKAGADYTENVTAVEVNPSNRYAETSGEYNIQAWTGFNFPGRGTTYSNWKWQWFHFDGTDWDQSRSLSRIFKFDGKAWDWEVSSENGNYDYLMYADYDYDHPDVVNEMKKWGVWYANEVGLDGYRLDAVKHIKFQFLKDWVDNARAATGKEMFTVGEYWQNDLGALNNYLAKVNYNQSLFDAPLHYNFYAASTGGGYYDMRNILNNTLVASNPTKAVTLVENHDTQPGQSLESTVQPWFKPLAYAFILTRSGGYPSVFYGDMYGTKGTTTREIPALKSKIEPLLKARKDYAYGTQRDYIDNPDVIGWTREGDSTKAKSGLATVITDGPGGSKRMYVGTSNAGEIWYDLTGNRTDKITIGSDGYATFPVNGGSVSVWVQQ

SEQ ID NO: 38099 - protein, 480 aa, Cytophaga sp.
NGTMMQYFEWYVPNDGQQWNRLRTDAPYLSSVGITAVWTPPAYKGTSQADVGYGPYDLYDLGEFNQKGTVRTKYGTKGELKSAVNTLHSNGIQVYGDVVMNHKAGADYTENVTAVEVNPSNRYQETSGEYNIQAWTGFNFPGRGTTYSNWKWQWFHFDGTDWDQSRSLSRIFKFDGKAWDWEVSSENGNYDYLMYADYDYDHPDVVNEMKKWGVWYANEVGLDGYRLDAVKHIKFQFLKDWVDNARAATGKEMFTVGEYWQNDLGALNNYLAKVNYNQSLFDAPLHYNFYAASTGGGYYDMRNILNNTLVASNPTKAVTLVENHDTQPGQSLESTVQPWFKPLAYAFILTRSGGYPSVFYGDMYGTKGTTTREIPALKSKIEPLLKARKDYAYGTQRDYIDNPDVIGWTREGDSTKAKSGLATVITDGPGGSKRMYVGTSNAGEIWYDLTGNRTDKITIGSDGYATFPVQGGSVSVWVQQ

SEQ ID NO: 38100 - protein, 480 aa, Cytophaga sp.
NGTMMQYFEWYVPNDGQQWNRLRTDAPYLSSVGITAVWTPPAYKGTSQADVGYGPYDLYDLGEFNQKGTVRTKYGTKGELKSAVNTLHSNGIQVYGDVVMNHKAGADYTENVTAVEVNPSNRYQETSGEYNIQAWTGFNFPGRGTTYSNWYWQWFHFDGTDWDQSRSLSRIFKFDGKAWDWEVSSENGNYDYLMYADYDYDHPDVVNEMKKWGVWYANEVGLDGYRLDAVKHIKFQFLKDWVDNARAATGKEMFTVGEYWQNDLGALNNYLAKVNYNQSLFDAPLHYNFYAASTGGGYYDMRNILNNTLVASNPTKAVTLVENHDTQPGQSLESTVQPWFKPLAYAFILTRSGGYPSVFYGDMYGTKGTTTREIPALKSKIEPLLKARKDYAYGTQRDYIDNPDVIGWTREGDSTKAKSGLATVITDGPGGSKRMYVGTSNAGEIWYDLTGNRTDKITIGSDGYATFPVNGGSVSVWVQQ

SEQ ID NO: 38101 - protein, 480 aa, Cytophaga sp.
NGTMMQYFEWYVPNDGQQWNRLRTDAPYLSSVGITAVWTPPAYKGTSQADVGYGPYDLYDLGEFNQKGTVRTKYGTKGELKSAVNTLHSNGIQVYGDVVMNHKAGADYTENVTAVEVNPSNRYQETSGEYNIQAWTGFNFPGRGTTYSNWKWQWFHFDGTDWDQSRSLSRIFKFDGKAWDWEVSSENGNYDYLMYADYDYDHPDVVNEMKKWGVWYANEVGLDGYRLDAVKHIKFQFLKDWVDNARAATGKEMFTVGEYWQNDLGALNNYLAKVNYNQSLFDAPLHYNFYAASTGGGYYDMRNILNNTLVASNPTKAVTLVENHDTQPGQSLESTVQPWFKPLAYAFILTRSGGYPSVFYGDMYGTKGTTTREIPALKSKIEPLLKARKDYAYGTQRDYIDNPDVIGWTRFGDSTKAKSGLATVITDGPGGSKRMYVGTSNAGEIWYDLTGNRTDKITIGSDGYATFPVNGGSVSVWVQQ

SEQ ID NO: 38102 - protein, 480 aa, Cytophaga sp.
NGTMMQYFEWYVPNDGQQWNRLRTDAPYLSSVGITAVWTPPAYKGTSQADVGYGPYDLYDLGEFNQKGTVRTKYGTKGELKSAVNTLHSNGIQVYGDVVMNHKAGADYTENVTAVEVNPSNRYQETSGEYNIQAWTGFNFPGRGTTYSNWKWQWFHFDGTDWDQSRSLSRIFKFDGKAWDWEVSSENHNYDYLMYADYDYDHPDVVNEMKKWGVWYANEVGLDGYRLDAVKHIKFQFLKDWVDNARAATGKEMFTVGEYWQNDLGALNNYLAKVNYNQSLFDAPLHYNFYAASTGGGYYDMRNILNNTLVASNPTKAVTLVENHDTQPGQSLESTVQPWFKPLAYAFILTRSGGYPSVFYGDMYGTKGTTTREIPALKSKIEPLLKARKDYAYGTQRDYIDNPDVIGWTREGDSTKAKSGLATVITDGPGGSKRMYVGTSNAGEIWYDLTGNRTDKITIGSDGYATFPVNGGSVSVWVQQ

SEQ ID NO: 38103 - protein, 480 aa, Cytophaga sp.
NGTMMQYFEWYVPNDGQQWNRLRTDAPYLSSVGFTAVWTPPAYKGTSQADVGYGPYDLYDLGEFNQKGTVRTKYGTKGELKSAVNTLHSNGIQVYGDVVMNHKAGADYTENVTAVEVNPSNRYQETSGEYNIQAWTGFNFPGRGTTYSNWKWQWFHFDGTDWDQSRSLSRIFKFDGKAWDWEVSSENGNYDYLMYADYDYDHPDVVNEMKKWGVWYANEVGLDGYRLDAVKHIKFQFLKDWVDNARAATGKEMFTVGEYWQNDLGALNNYLAKVNYNQSLFDAPLHYNFYAASTGGGYYDMRNILNNTLVASNPTKAVTLVENHDTQPGQSLESTVQPWFKPLAYAFILTRSGGYPSVFYGDMYGTKGTTTREIPALKSKIEPLLKARKDYAYGTQRDYIDNPDVIGWTREGDSTKAKSGLATVITDGPGGSKRMYVGTSNAGEIWYDLTGNRTDKITIGSDGYATFPVNGGSVSVWVQQ

SEQ ID NO: 38104 - protein, 480 aa, Cytophaga sp.
NGTMMQYFEWYVPNDGQQWNRLRTDAPYLSSVGITAVWTPPAYKGTSQADVGYGPYDLYDLGEFNQKGTVRTKYGTKGELKSAVNTLHSNGIQVYGDVVMNHKAGADYTENVTAVEVNPSNRYQETSGEYNIQAWTGFNFPGRGTTYSNWKWQWFHFDGTDWDQSRSLSRIFKFDGKAWDWEVSSENGNYDYLMYADYDYDHPDVVNEMKKWGVWYANEVGLDGYRLDAVKHIKFQFLKDWVDNARAATGKEMFTVGEYWQNDLGALNNYLAKVNYNQSLFDAPLHYNFYAASTGGGYYDMRNILNNTLVASNPTKAVTLVENHDTQPGQSLESTVQPWFKPLAYAFILTRSGGYPSVFYGDMYGTKGTTTREIPALKSKIEPLLKARKDYAYGTQRDYIDNPDVIGWTREGMSTKAKSGLATVITDGPGGSKRMYVGTSNAGEIWYDLTGNRTDKITIGSDGYATFPVNGGSVSVWVQQ

SEQ ID NO: 38105 - protein, 480 aa, Cytophaga sp.
NGTMMQYFEWYVPNDGQQWNRLRTDAPYLSSVGITAVWTPPAYKGTEQADVGYGPYDLYDLGEFNQKGTVRTKYGTKGELKSAVNTLHSNGIQVYGDVVMNHKAGADYTENVTAVEVNPSNRYQETSGEYNIQAWTGFNFPGRGTTYSNWKWQWFHFDGTDWDQSRSLSRIFKFDGKAWDWEVSSENGNYDYLMYADYDYDHPDVVNEMKKWGVWYANEVGLDGYRLDAVKHIKFQFLKDWVDNARAATGKEMFTVGEYWQNDLGALNNYLAKVNYNQSLFDAPLHYNFYAASTGGGYYDMRNILNNTLVASNPTKAVTLVENHDTQPGQSLESTVQPWFKPLAYAFILTRSGGYPSVFYGDMYGTKGTTTREIPALKSKIEPLLKARKDYAYGTQRDYIDNPDVIGWTREGDSTKAKSGLATVITDGPGGSKRMYVGTSNAGEIWYDLTGNRTDKITIGSDGYATFPVNGGSVSVWVQQ

SEQ ID NO: 38106 - protein, 480 aa, Cytophaga sp.
NGTMMQYFEWYVPNDGQQWNRLRTDAPYLSSVGITAVWTPPAYKGTSQADVGYGPYDLYDLGEFNQKGTVRTKYGTKGELKSAVNTLHSNGIQVYGDVVMNHKAGADYTENVTAVEVNPSNRYQETSGEYNIQAWTGFNFPGRGTTYSNWKWQWFHFDGTDWDQSRSLSRIFKFDGKAWDWEVSSENGNYDYLMYADYDYDHPDVVNEMKKWGVWYANEVGLDGYRLDAVKHIKFQFLKDWVDNARAATGKEMFTVGEYWQNDLGALNNYLAKVNYNQSLFDAPLHYNFYAASTGGGYYDMRNILNNTLVASNPTKAVTLVENHDTQPGQSLESTVQPWFKPLAYAFILTRSGGYPSVFYGDMYGTKGTTTREIPALKSKIEPLLKARKDYAAGTQRDYIDNPDVIGWTREGDSTKAKSGLATVITDGPGGSKRMYVGTSNAGEIWYDLTGNRTDKITIGSDGYATFPVNGGSVSVWVQQ

SEQ ID NO: 38107 - protein, 480 aa, Cytophaga sp.
NGTMMQYFEWYVPNDGQQWNRLRTDAPYLSSVGITAVWTPPAYKGTSQADVGYGPYDLYDLGEFNQKGTVRTKYGTKGELKSAVNTLHSNGIQVYGDVVMNHKAGADYTENVTAVEVNPSNRYQETSGEYNIQAWTGFNFPGRGTTYSNWKWQWFHFDGTDWDQSRSLSRIFKFDGKAWDWEVSSENGNYDYLMYADYDYDHPDVVNEMKKWGVWYANEVGLDGYRLDAVKHIKFQFLKDWVDNARAATGKEMFCVGEYWQNDLGALNNYLAKVNYNQSLFDAPLHYNFYAASTGGGYYDMRNILNNTLVASNPTKAVTLVENHDTQPGQSLESTVQPWFKPLAYAFILTRSGGYPSVFYGDMYGTKGTTTREIPALKSKIEPLLKARKDYAYGTQRDYIDNPDVIGWTREGDSTKAKSGLATVITDGPGGSKRMYVGTSNAGEIWYDLTGNRTDKITIGSDGYATFPVNGGSVSVWVQQ

SEQ ID NO: 38108 - protein, 480 aa, Cytophaga sp.
NGTMMQYFEWYVPNDGQQWNRLRTDAPYLSSVGITAVWTPPAYKGTSQADVGYGPYDLYDLGEFNQKGTVRTKYGTKGELKSAVNTLHSNGIQVYGDVVMNHKAGADYTENVTAVEVNPSNRYQETSGEYNIQAWTGFNFPGRGTTYSNWKWQWFHFDGTDWDQSRSLSRIFKFDGKAWDWEVSSENGNYDYLMYADYDYDHPDVVNEMKKWGVWYANEVGLDGYRLDAVKHIKFQFLKDWVDNARAATGKEMFTVGEYWQNDLGALNNYLAKVNYNQSLMDAPLHYNFYAASTGGGYYDMRNILNNTLVASNPTKAVTLVENHDTQPGQSLESTVQPWFKPLAYAFILTRSGGYPSVFYGDMYGTKGTTTREIPALKSKIEPLLKARKDYAYGTQRDYIDNPDVIGWTREGDSTKAKSGLATVITDGPGGSKRMYVGTSNAGEIWYDLTGNRTDKITIGSDGYATFPVNGGSVSVWVQQ

SEQ ID NO: 38109 - protein, 480 aa, Cytophaga sp.
NGTMMQYFEWYVPNDGQQWNRLRTDAPYLSSVGITAVWTPPAYKGTSQADVGYGPYDLYDLGEFNQKGTVRTKYGTKGELKSAVNTLHSNGIQVYGDVVMNHKAGADYTENVTAVEVNPSNRYQETSGNYNIQAWTGFNFPGRGTTYSNWKWQWFHFDGTDWDQSRSLSRIFKFDGKAWDWEVSSENGNYDYLMYADYDYDHPDVVNEMKKWGVWYANEVGLDGYRLDAVKHIKFQFLKDWVDNARAATGKEMFTVGEYWQNDLGALNNYLAKVNYNQSLFDAPLHYNFYAASTGGGYYDMRNILNNTLVASNPTKAVTLVENHDTQPGQSLESTVQPWFKPLAYAFILTRSGGYPSVFYGDMYGTKGTTTREIPALKSKIEPLLKARKDYAYGTQRDYIDNPDVIGWTREGDSTKAKSGLATVITDGPGGSKRMYVGTSNAGEIWYDLTGNRTDKITIGSDGYATFPVNGGSVSVWVQQ

SEQ ID NO: 38110 - protein, 480 aa, Cytophaga sp.
NGTMMQYFEWYVPNDGQQWNRLRTDAPYLSSVGITAVWTPPAYKGTSQADVGYGPYDLYDLGEFNQKGTVRTKYGTKGELKSAVNTLHSNGIQVYGDVVMNHKAGADYTENVTAVEVNPSNRYQETSGWYNIQAWTGFNFPGRGTTYSNWKWQWFHFDGTDWDQSRSLSRIFKFDGKAWDWEVSSENGNYDYLMYADYDYDHPDVVNEMKKWGVWYANEVGLDGYRLDAVKHIKFQFLKDWVDNARAATGKEMFTVGEYWQNDLGALNNYLAKVNYNQSLFDAPLHYNFYAASTGGGYYDMRNILNNTLVASNPTKAVTLVENHDTQPGQSLESTVQPWFKPLAYAFILTRSGGYPSVFYGDMYGTKGTTTREIPALKSKIEPLLKARKDYAYGTQRDYIDNPDVIGWTREGDSTKAKSGLATVITDGPGGSKRMYVGTSNAGEIWYDLTGNRTDKITIGSDGYATFPVNGGSVSVWVQQ

SEQ ID NO: 38111 - protein, 480 aa, Cytophaga sp.
NGTMMQYFEWYVPNDGQQWNRLRTDAPYLSSVGITAVWTPPAYKGTSQADVGYGPYDLYDLGEFNQKGTVRTKYGTKGELKSAVNTLHSNGIQVYGDVVMNHKAGADYTENVTAVEVNPSNRYQETSGEYNIQAWTGFNFPGRMTTYSNWKWQWFHFDGTDWDQSRSLSRIFKFDGKAWDWEVSSENGNYDYLMYADYDYDHPDVVNEMKKWGVWYANEVGLDGYRLDAVKHIKFQFLKDWVDNARAATGKEMFTVGEYWQNDLGALNNYLAKVNYNQSLFDAPLHYNFYAASTGGGYYDMRNILNNTLVASNPTKAVTLVENHDTQPGQSLESTVQPWFKPLAYAFILTRSGGYPSVFYGDMYGTKGTTTREIPALKSKIEPLLKARKDYAYGTQRDYIDNPDVIGWTREGDSTKAKSGLATVITDGPGGSKRMYVGTSNAGEIWYDLTGNRTDKITIGSDGYATFPVNGGSVSVWVQQ

SEQ ID NO: 38112 - protein, 480 aa, Cytophaga sp.
NGTMMQYFEWYVPNDGQQWNRLRTDAPYLSSVGITAVWTPPAYKGTSQADVGYGPYDLYDLGEFNQKGTVRTKYGTKGELKSAVNTLHSNGIQVYGDVVMNHKAGADYTENVTAVEVNPSNRYQETSGEYNIQAWTGFNFPGRGTTYSNWKWQWFHFDGTDWDQSRSLSRIFKFDGKAWDWEVSSENVNYDYLMYADYDYDHPDVVNEMKKWGVWYANEVGLDGYRLDAVKHIKFQFLKDWVDNARAATGKEMFTVGEYWQNDLGALNNYLAKVNYNQSLFDAPLHYNFYAASTGGGYYDMRNILNNTLVASNPTKAVTLVENHDTQPGQSLESTVQPWFKPLAYAFILTRSGGYPSVFYGDMYGTKGTTTREIPALKSKIEPLLKARKDYAYGTQRDYIDNPDVIGWTREGDSTKAKSGLATVITDGPGGSKRMYVGTSNAGEIWYDLTGNRTDKITIGSDGYATFPVNGGSVSVWVQQ

SEQ ID NO: 38113 - protein, 480 aa, Cytophaga sp.
NGTMMQYFEWYVPNDGQQWNRLRTDAPYLSSVGITAVWTPPAYKGTSQADVGYGPYDLYDLGEFNQKGTVRTKYGTKGELKSAVNTLHSNGIQVYGDVVMNHKAGADYTENVTAVEVNPSNRYQETSGEYNIQAWTGFNFPGRGTTYSNWKWQWFHFDGTDWDQSRSLSRIFKFDGKAWDWEVSSHNGNYDYLMYADYDYDHPDVVNEMKKWGVWYANEVGLDGYRLDAVKHIKFQFLKDWVDNARAATGKEMFTVGEYWQNDLGALNNYLAKVNYNQSLFDAPLHYNFYAASTGGGYYDMRNILNNTLVASNPTKAVTLVENHDTQPGQSLESTVQPWFKPLAYAFILTRSGGYPSVFYGDMYGTKGTTTREIPALKSKIEPLLKARKDYAYGTQRDYIDNPDVIGWTREGDSTKAKSGLATVITDGPGGSKRMYVGTSNAGEIWYDLTGNRTDKITIGSDGYATFPVNGGSVSVWVQQ

SEQ ID NO: 38114 - protein, 480 aa, Cytophaga sp.
NGTMMQYFEWYVPNDGQQWNRLRTDAPYLSSVGITAVWTPPAYKGTSQADVGYGPYDLYDLGEFNQKGTVRTKYGTKGELKSAVNTLHSNGIQVYGDVVMNHKAGADYVENVTAVEVNPSNRYQETSGEYNIQAWTGFNFPGRGTTYSNWKWQWFHFDGTDWDQSRSLSRIFKFDGKAWDWEVSSENGNYDYLMYADYDYDHPDVVNEMKKWGVWYANEVGLDGYRLDAVKHIKFQFLKDWVDNARAATGKEMFTVGEYWQNDLGALNNYLAKVNYNQSLFDAPLHYNFYAASTGGGYYDMRNILNNTLVASNPTKAVTLVENHDTQPGQSLESTVQPWFKPLAYAFILTRSGGYPSVFYGDMYGTKGTTTREIPALKSKIEPLLKARKDYAYGTQRDYIDNPDVIGWTREGDSTKAKSGLATVITDGPGGSKRMYVGTSNAGEIWYDLTGNRTDKITIGSDGYATFPVNGGSVSVWVQQ

SEQ ID NO: 38115 - protein, 480 aa, Cytophaga sp.
NGTMMQYFEWYVPNDGQQWNRLRTDAPYLSSVGITAVWTPPAYKGTSQADVGYGPYDLYDLGEFNQKGTVRTKYGTKGMLKSAVNTLHSNGIQVYGDVVMNHKAGADYTENVTAVEVNPSNRYQETSGEYNIQAWTGFNFPGRGTTYSNWKWQWFHFDGTDWDQSRSLSRIFKFDGKAWDWEVSSENGNYDYLMYADYDYDHPDVVNEMKKWGVWYANEVGLDGYRLDAVKHIKFQFLKDWVDNARAATGKEMFTVGEYWQNDLGALNNYLAKVNYNQSLFDAPLHYNFYAASTGGGYYDMRNILNNTLVASNPTKAVTLVENHDTQPGQSLESTVQPWFKPLAYAFILTRSGGYPSVFYGDMYGTKGTTTREIPALKSKIEPLLKARKDYAYGTQRDYIDNPDVIGWTREGDSTKAKSGLATVITDGPGGSKRMYVGTSNAGEIWYDLTGNRTDKITIGSDGYATFPVNGGSVSVWVQQ

SEQ ID NO: 38116 - protein, 480 aa, Cytophaga sp.
NGTMMQYFEWYVPNDGQQWNRLRTDAPYLSSVGITAVWTPPAYKGTSQADVGYGPYDLYDLGEFNQKGTVRTKYGTKGELKSAVNTLHHNGIQVYGDVVMNHKAGADYTENVTAVEVNPSNRYQETSGEYNIQAWTGFNFPGRGTTYSNWKWQWFHFDGTDWDQSRSLSRIFKFDGKAWDWEVSSENGNYDYLMYADYDYDHPDVVNEMKKWGVWYANEVGLDGYRLDAVKHIKFQFLKDWVDNARAATGKEMFTVGEYWQNDLGALNNYLAKVNYNQSLFDAPLHYNFYAASTGGGYYDMRNILNNTLVASNPTKAVTLVENHDTQPGQSLESTVQPWFKPLAYAFILTRSGGYPSVFYGDMYGTKGTTTREIPALKSKIEPLLKARKDYAYGTQRDYIDNPDVIGWTREGDSTKAKSGLATVITDGPGGSKRMYVGTSNAGEIWYDLTGNRTDKITIGSDGYATFPVNGGSVSVWVQQ

SEQ ID NO: 38117 - protein, 480 aa, Cytophaga sp.
NGTMMQYFEWYVPNDGQQWNRLRTDAPYLSSVGITAVWTPPAYKGTSQADVGYGPYDLYDLGEFNQKGTVRTKYGTTGELKSAVNTLHSNGIQVYGDVVMNHKAGADYTENVTAVEVNPSNRYQETSGEYNIQAWTGFNFPGRGTTYSNWKWQWFHFDGTDWDQSRSLSRIFKFDGKAWDWEVSSENGNYDYLMYADYDYDHPDVVNEMKKWGVWYANEVGLDGYRLDAVKHIKFQFLKDWVDNARAATGKEMFTVGEYWQNDLGALNNYLAKVNYNQSLFDAPLHYNFYAASTGGGYYDMRNILNNTLVASNPTKAVTLVENHDTQPGQSLESTVQPWFKPLAYAFILTRSGGYPSVFYGDMYGTKGTTTREIPALKSKIEPLLKARKDYAYGTQRDYIDNPDVIGWTREGDSTKAKSGLATVITDGPGGSKRMYVGTSNAGEIWYDLTGNRTDKITIGSDGYATFPVNGGSVSVWVQQ

SEQ ID NO: 38118 - protein, 480 aa, Cytophaga sp.
NGTMMQYFEWYVPNDGQQWNRLRTDAPYLSSVGITAVWTPPAYKGTSQADVGYGPYDLYDLGEFNQKGTVRTKYGTKGELKSAVNTLHSNGIQVYGDVVMNHKAGADYTENVTAVEVNPSNRYQETSGEYNIQAWTGFNFPGRGTTYSNWKWQWFHFDGTDWDQSRSLSRIFKFDGKAWDWEVSSENGNYDYLMYADYDYDHPDVVNEMKKWGVWYANEVGLDGYRLDAVKHIKFQFLKDWVDNARAATGKEMFTVGEYWQNDLGALNNYLAKVNYNQSLFDAPLHYNFYAASTGGGYYDMRNILNNTLVASNPTKAVTLVENHDTQPGQSLESTVQPWFKPLAYAFILTRSGGYPSVFYGDMYGTKGTTTREIPALKSKIEPLLKARKDYAYGTQRDYIDNPDIIGWTREGDSTKAKSGLATVITDGPGGSKRMYVGTSNAGEIWYDLTGNRTDKITIGSDGYATFPVNGGSVSVWVQQ

SEQ ID NO: 38119 - protein, 480 aa, Cytophaga sp.
NGTMMQYFEWYVPNDGQQWNRLRTDAPYLSSVGITAVWTPPAYKGTSQADVGYGPYDLDDLGEFNQKGTVRTKYGTKGELKSAVNTLHSNGIQVYGDVVMNHKAGADYTENVTAVEVNPSNRYQETSGEYNIQAWTGFNFPGRGTTYSNWKWQWFHFDGTDWDQSRSLSRIFKFDGKAWDWEVSSENGNYDYLMYADYDYDHPDVVNEMKKWGVWYANEVGLDGYRLDAVKHIKFQFLKDWVDNARAATGKEMFTVGEYWQNDLGALNNYLAKVNYNQSLFDAPLHYNFYAASTGGGYYDMRNILNNTLVASNPTKAVTLVENHDTQPGQSLESTVQPWFKPLAYAFILTRSGGYPSVFYGDMYGTKGTTTREIPALKSKIEPLLKARKDYAYGTQRDYIDNPDVIGWTREGDSTKAKSGLATVITDGPGGSKRMYVGTSNAGEIWYDLTGNRTDKITIGSDGYATFPVNGGSVSVWVQQ

SEQ ID NO: 38120 - protein, 480 aa, Cytophaga sp.
NGTMMQYFEWYVPNDGQQWNRLRTDAPYLSSVGITAVWTPPAYKGTSQADVGYGPYDLYDLGEFNQKGTVRTKYGTKGELKSAVNTLHSNGIQVYGDVVMNHKAGADYTENVTAVEVNPSNRYQETSGEYNIQAWTGFNFPGRGTTYSNWKWQWFHFDGTDWDQSRSLSRIFKFDGKAWDWEVSSENGNYDYLMYADYDYDHPDVVNEMKKWGVWYANEVGLDGYRLDAVKHIKFQFLKDWVDNARAATGKEMFTVGEYWQNDLGALNNYLAKVNYNQSLFDAPLHYNFYAASTGGGYYDMRNILNNTLVASNPTKAVTLVENHDTQPGQSLESTVQPWFKPLAYAFILTRSGGYPSVFYGDMYGTKGTTTREIPALKSKIEPLLKARKDYAYGTQRDYIDNPDVIGWTREGDSTKAKSGLATVITDGPGGSKRMYVGTSNAGEIWYDLTGNRTDKITIGSDGYATFPANGGSVSVWVQQ

SEQ ID NO: 38121 - protein, 480 aa, Cytophaga sp.
NGTMMQYFEWYVPNDGQQWNRLRTDAPYLSSVGITAVWTPPAYKGTSQADVGYGPYDLYDLGEFNQKGTVRTKYGTKGELKSAVNTLHSNGIQVYGDVVMNHKAGADYTENVTAVEVNPSNRYQECSGEYNIQAWTGFNFPGRGTTYSNWKWQWFHFDGTDWDQSRSLSRIFKFDGKAWDWEVSSENGNYDYLMYADYDYDHPDVVNEMKKWGVWYANEVGLDGYRLDAVKHIKFQFLKDWVDNARAATGKEMFTVGEYWQNDLGALNNYLAKVNYNQSLFDAPLHYNFYAASTGGGYYDMRNILNNTLVASNPTKAVTLVENHDTQPGQSLESTVQPWFKPLAYAFILTRSGGYPSVFYGDMYGTKGTTTREIPALKSKIEPLLKARKDYAYGTQRDYIDNPDVIGWTREGDSTKAKSGLATVITDGPGGSKRMYVGTSNAGEIWYDLTGNRTDKITIGSDGYATFPVNGGSVSVWVQQ

SEQ ID NO: 38122 - protein, 480 aa, Cytophaga sp.
NGTMMQYFEWYVPNDGQQWNRLRTDAPYLSSVGITAVWTPPAYKGTSQADVGYGPYDLYDLGEFNQKGTVRTKYGTKGELKSAVNTLHSNGIQVYGDVVMNHKAGADYTENVTAVEVNPSNRYQETSGEYNIQAWTGFNFPGRGTTYSNWKWQWFHFDGTDWDQSRSLSRIFKFDGKAWDWEVSSENGNYDYLMYADYDYDHPDVVNEMKKWGVWYANEVGLDGYRLDAVKHIKFQFLKEWVDNARAATGKEMFTVGEYWQNDLGALNNYLAKVNYNQSLFDAPLHYNFYAASTGGGYYDMRNILNNTLVASNPTKAVTLVENHDTQPGQSLESTVQPWFKPLAYAFILTRSGGYPSVFYGDMYGTKGTTTREIPALKSKIEPLLKARKDYAYGTQRDYIDNPDVIGWTREGDSTKAKSGLATVITDGPGGSKRMYVGTSNAGEIWYDLTGNRTDKITIGSDGYATFPVNGGSVSVWVQQ

SEQ ID NO: 38123 - protein, 480 aa, Cytophaga sp.
NGTMMQYFEWYVPNDGQQWNRLRTDAPYLSSVGITAVWTPPAYKGTSQADVGYGPYDLYDLGEFNQKGTVRTKYGTKGELKSAVNTLHSNGIQVYGDVVMNHKAGADYTENVTAVEMNPSNRYQETSGEYNIQAWTGFNFPGRGTTYSNWKWQWFHFDGTDWDQSRSLSRIFKFDGKAWDWEVSSENGNYDYLMYADYDYDHPDVVNEMKKWGVWYANEVGLDGYRLDAVKHIKFQFLKDWVDNARAATGKEMFTVGEYWQNDLGALNNYLAKVNYNQSLFDAPLHYNFYAASTGGGYYDMRNILNNTLVASNPTKAVTLVENHDTQPGQSLESTVQPWFKPLAYAFILTRSGGYPSVFYGDMYGTKGTTTREIPALKSKIEPLLKARKDYAYGTQRDYIDNPDVIGWTREGDSTKAKSGLATVITDGPGGSKRMYVGTSNAGEIWYDLTGNRTDKITIGSDGYATFPVNGGSVSVWVQQ

SEQ ID NO: 38124 - protein, 480 aa, Cytophaga sp.
NGTMMQYFEWYVPNDGQQWNRLRTDAPYLSSVGITAVWTPPAYKGTSQADVGYGPYDLYDLGEFNQKGTVRTKYGTKGELKSAVNTLHSNGIQVYGDVVMNHKAGADYTENVTAVEVNPSNRYQETSGEYNIQAWTGFNFPGRGTTYSNWKWQWFHFDGTDWDQSRSLSRIFKFDGKAWDWEVSSENGNYDYLMYADYDYDHPDVVNEMKKWGVWYANEVGLDGYRLDAVKHIKFQFLKDWVDNARAATGKEMFTVGEYWQNDLGALNNYLAKVNYNQSLFDAPLHYNFYAASTGSGYYDMRNILNNTLVASNPTKAVTLVENHDTQPGQSLESTVQPWFKPLAYAFILTRSGGYPSVFYGDMYGTKGTTTREIPALKSKIEPLLKARKDYAYGTQRDYIDNPDVIGWTREGDSTKAKSGLATVITDGPGGSKRMYVGTSNAGEIWYDLTGNRTDKITIGSDGYATFPVNGGSVSVWVQQ

SEQ ID NO: 38125 - protein, 480 aa, Cytophaga sp.
NGTMMQYFEWYVPNDGQQWNRLRTDAPYLSSVGITAVWTPPAYKGTSQADVGYGPYDLYDLGEFNQKGTVRTKYGTKGELKSAVNTLHSNGIQVYGDVVMNHKAGADYTENVTAREVNPSNRYQETSGEYNIQAWTGFNFPGRGTTYSNWKWQWFHFDGTDWDQSRSLSRIFKFDGKAWDWEVSSENGNYDYLMYADYDYDHPDVVNEMKKWGVWYANEVGLDGYRLDAVKHIKFQFLKDWVDNARAATGKEMFTVGEYWQNDLGALNNYLAKVNYNQSLFDAPLHYNFYAASTGGGYYDMRNILNNTLVASNPTKAVTLVENHDTQPGQSLESTVQPWFKPLAYAFILTRSGGYPSVFYGDMYGTKGTTTREIPALKSKIEPLLKARKDYAYGTQRDYIDNPDVIGWTREGDSTKAKSGLATVITDGPGGSKRMYVGTSNAGEIWYDLTGNRTDKITIGSDGYATFPVNGGSVSVWVQQ

SEQ ID NO: 38126 - protein, 480 aa, Cytophaga sp.
NGTMMQYFEWYVPNDGQQWNRLRTDAPYLSSVGITAVWTPPAYKGTSQADVGYGPYDLYDLGEFNQKGTVRTKYGTKGELKSAVNTLHSNGIQVYGDVVMNHKAGADYTENVTAVEVNPSNRYQETSGEYNIQAWTGFNFPGRGTTYSNWKWQWFHFDGTDWDQSRSLSRIFKFDGKAWDWEVSSENGNYDYLMYADYDYDHPDVVNEMKKWGVWYANEVGLDGYRLDAVKHIKFQFLKDWVDNARAATGKEMFTVGEYWQNDLGALNNYLAKVNYNQSLFDAPLHYNFYAASTGGGYYDMRNIYNNTLVASNPTKAVTLVENHDTQPGQSLESTVQPWFKPLAYAFILTRSGGYPSVFYGDMYGTKGTTTREIPALKSKIEPLLKARKDYAYGTQRDYIDNPDVIGWTREGDSTKAKSGLATVITDGPGGSKRMYVGTSNAGEIWYDLTGNRTDKITIGSDGYATFPVNGGSVSVWVQQ

SEQ ID NO: 38127 - protein, 480 aa, Cytophaga sp.
NGTMMQYFEWYVPNDGQQWNRLRTDAPYLSSVGITAVWTPPAYKGTSQADVGYGPYDLYDLGEFNQKGTVRTKYGTKGELKSAVNTLHSNGIQVYGDVVMNHKAGADYTENVTAVEVNPSNRYQETSGEYNIQAWTGFNFPGRGTTYSNWKWQWFHFDGTDWDQSRSLSRIFKFDGKAWDWEVSSENGNYDYLMYADYDYDHPDVVNEMKKWGVWYANEVGLDGYRLDAVKHIKFQFLKDWVDNARAATGKEMFTVGEYWQNDLGALNNYLAKVNYNQSLFDAPLHYNFYAASTGGGYYDMRNILNNTLVASNPTKAVTLVENHDTQPGQSLESTVQPWFKPLAYAFILTRSGGYPSVFYGDMYGTKGTTTREIPALKSKIEPLLKARKDYAYGTQRDYIDNPDVIGWTREGDSTKAKSGLATVITDGPGGSKRMYVGTSNATEIWYDLTGNRTDKITIGSDGYATFPVNGGSVSVWVQQ

SEQ ID NO: 38128 - protein, 480 aa, Cytophaga sp.
NGTMMQYFEWYVPNDGQQWNRLRTDAPYLSSVGITAVWTPPAYKGTSQADVGYGPYDLYDLGEFNQKGTVRTKYGTKGELKSAVNTLHSNGIQVYGDVVMNHKAGADYTENVTAVEVNPSNRYQETSGEYNIQAWTGFNFPGRGTTYSNWKWQWFHFDGTDWDQSRSLSRIFKFDGKAWDWEVSSENGNYDYLMYADYDYDHPDVVNEMKKWGVWYANEVGLDGYRLDAVKHIKFQFLKDWVDNARAATGKEMFTVGEYWQNDLGALNNYLAKVNYNQSLFDAPLHYNFYAASTGGGYYDMRNILNNTLVASNPTKAVTLVENHDTQPGQSLESTVQPWFKPLAYAFILTRSGGYPSVFYGDMYGTKGTTTREIPALKSKIEILLKARKDYAYGTQRDYIDNPDVIGWTREGDSTKAKSGLATVITDGPGGSKRMYVGTSNAGEIWYDLTGNRTDKITIGSDGYATFPVNGGSVSVWVQQ

SEQ ID NO: 38129 - protein, 480 aa, Cytophaga sp.
NGTMMQYFEWYVPNDGQQWNRLRTDAPYLSSVGITAVWTPPAYKGTSQADVGYGPYDLYDLGEFNQKGTVRTKYGTKGELKSAVNTLHSNGIQVYGDVVMNHKAGADYTENVTAVEVNPSNRYQETSGEYNIQAWTGFNFPGRGTTYSNWKWQWFHFDGTDWDQSRSLSRIFKFDGKAWDWEVSSENGNYDYLMYADYDYDHPDVVNEMKKWGVWYANEVGLDGYRLDAVKHIKFQFLKDWVDNARAATGKEMFTVGEYWMNDLGALNNYLAKVNYNQSLFDAPLHYNFYAASTGGGYYDMRNILNNTLVASNPTKAVTLVENHDTQPGQSLESTVQPWFKPLAYAFILTRSGGYPSVFYGDMYGTKGTTTREIPALKSKIEPLLKARKDYAYGTQRDYIDNPDVIGWTREGDSTKAKSGLATVITDGPGGSKRMYVGTSNAGEIWYDLTGNRTDKITIGSDGYATFPVNGGSVSVWVQQ

SEQ ID NO: 38130 - protein, 480 aa, Cytophaga sp.
NGTMMQYFEWYVPNDGQQWNRLRTDAPYLSSVGITAVWTPPAYKGTSQADVGYGPYDLYDLGEFNQKGTVRTKYGTKGELKSAVNTLHSNGIQVYGDVVMNHKAGADYTENVTAVEVNPSNRYQEDSGEYNIQAWTGFNFPGRGTTYSNWKWQWFHFDGTDWDQSRSLSRIFKFDGKAWDWEVSSENGNYDYLMYADYDYDHPDVVNEMKKWGVWYANEVGLDGYRLDAVKHIKFQFLKDWVDNARAATGKEMFTVGEYWQNDLGALNNYLAKVNYNQSLFDAPLHYNFYAASTGGGYYDMRNILNNTLVASNPTKAVTLVENHDTQPGQSLESTVQPWFKPLAYAFILTRSGGYPSVFYGDMYGTKGTTTREIPALKSKIEPLLKARKDYAYGTQRDYIDNPDVIGWTREGDSTKAKSGLATVITDGPGGSKRMYVGTSNAGEIWYDLTGNRTDKITIGSDGYATFPVNGGSVSVWVQQ

SEQ ID NO: 38131 - protein, 480 aa, Cytophaga sp.
NGTMMQYFEWYVPNDGQQWNRLRTDAPYLSSVGITAVWTPPAYKGTSQADVGYGPYDLYDLGEFNQKGTVRTKYGTKGELKSAVNTLHSNGIQVYGDVVMNHKAGADYTENVTAVEVNPSNRYQETSGEYNIQAWTGFNFPGRGTTYSNWKWQWFHFDGTDWDQSRSLSRIFKFDGKAWDWEVSSENGNYDYLMYADYDYDHPDVVNEMKKWGVWYANEVGLDGYRLDAVKHIKLQFLKDWVDNARAATGKEMFTVGEYWQNDLGALNNYLAKVNYNQSLFDAPLHYNFYAASTGGGYYDMRNILNNTLVASNPTKAVTLVENHDTQPGQSLESTVQPWFKPLAYAFILTRSGGYPSVFYGDMYGTKGTTTREIPALKSKIEPLLKARKDYAYGTQRDYIDNPDVIGWTREGDSTKAKSGLATVITDGPGGSKRMYVGTSNAGEIWYDLTGNRTDKITIGSDGYATFPVNGGSVSVWVQQ

SEQ ID NO: 38132 - protein, 480 aa, Cytophaga sp.
NGTMMQYFEWYVPNDGQQWNRLRTDAPYLSSVGITAVWTPPAYKGTSQADVGYGPYDLYDLGEFNQKGTVRTKYGTKGELKSAVNTLHSNGIQVYGDVVMNHKAGADYTENVTAVEVNPSNRYQETSGEYNIQAWTGFNFPGRGTTYSNWKWQWFHFDGTDWDQSRSLSRIFKFDGKAWDWEVSSENGNYDYLMYADYDYDHPDVVNEMKKWGVWYANEVGLDGYRLDAVKHIKFQFLKDWVDNARAATGKEMFTVGEYWQNDLGALNNYLAKVNYNQSLFDAPLHYNFYAASTGGGYYDMRNILNNTLVASNPTKAVTLVENHDTQPGQSLESTVQPWFKPLAYAFILTRSGGYPSVFYGDMYGTKGTTTREIPALKSKIEPLLKARKDYAYGTQRDYIDNPDVIGWTREGDVTKAKSGLATVITDGPGGSKRMYVGTSNAGEIWYDLTGNRTDKITIGSDGYATFPVNGGSVSVWVQQ

SEQ ID NO: 38133 - protein, 480 aa, Cytophaga sp.
NGTMMQYFEWYVPNDGQQWNRLRTDAPYLSSVGITAVWTPPAYKGTSQADVGYGPYDLYDLGEFNQKGTVRTKYGTKGELKSAVNTLHSNGIQVYGDVVMNHKAGADYTENVTAVEVNPSNRYQETSGEYNIQAWTGFNFPGRGTTYSNWKWQWFHFDGTDWDQSRSLSRIFKFDGKAWDWEVSSENGNYDYLMYADYDYDHPDVVNEMKKWGVWYANEVGLDGYRLDAVKHIKFQFLKDWVDNARAATGKEMFTVGEYWQTDLGALNNYLAKVNYNQSLFDAPLHYNFYAASTGGGYYDMRNILNNTLVASNPTKAVTLVENHDTQPGQSLESTVQPWFKPLAYAFILTRSGGYPSVFYGDMYGTKGTTTREIPALKSKIEPLLKARKDYAYGTQRDYIDNPDVIGWTREGDSTKAKSGLATVITDGPGGSKRMYVGTSNAGEIWYDLTGNRTDKITIGSDGYATFPVNGGSVSVWVQQ

SEQ ID NO: 38134 - protein, 480 aa, Cytophaga sp.
NGTMMQYFEWYVPNDGQQWNRLRTDAPYLSSVGITAVWTPPAYKGTSQADVGYGPYDLYDLGEFNQKGTVRTKYGTKGELKSAVNTLHSNGIQVYGDVVMNHKAGADYTENVTAVEVNPSNRYQETLGEYNIQAWTGFNFPGRGTTYSNWKWQWFHFDGTDWDQSRSLSRIFKFDGKAWDWEVSSENGNYDYLMYADYDYDHPDVVNEMKKWGVWYANEVGLDGYRLDAVKHIKFQFLKDWVDNARAATGKEMFTVGEYWQNDLGALNNYLAKVNYNQSLFDAPLHYNFYAASTGGGYYDMRNILNNTLVASNPTKAVTLVENHDTQPGQSLESTVQPWFKPLAYAFILTRSGGYPSVFYGDMYGTKGTTTREIPALKSKIEPLLKARKDYAYGTQRDYIDNPDVIGWTREGDSTKAKSGLATVITDGPGGSKRMYVGTSNAGEIWYDLTGNRTDKITIGSDGYATFPVNGGSVSVWVQQ

SEQ ID NO: 38135 - protein, 480 aa, Cytophaga sp.
NGTMMQYFEWYVPNDGQQWNRLRTDAPYLSSVGITAVWTPPAYKGTSQADVGYGPYDLYDLGEFNQKGTVRTKYGTKGELKSAVNTLHSNGIQVYGDVVMNHKAGADYTENVTAVEVNPSNRYQETSGEYNIQAWTGFNFPGRGTTYSNWKWQWFHFDGTDWDQSRSLSRIFKFDGKAWDWEVSSENGNYDYLMYADYDYDHPDVVNEMKKWGVWYANEVGLDGYRLDAVKHIKFQFLKDWVDNARAATGKEMFTVGEYWQNDLGALNNYLAKVNYNQSLFDAPLHYNFYAASTGGGYYDMRNILNNTLVASNPTKAVTLVENHDTQPGQSLESTVQPWFKPLAYAFILTRSGGYPSVFYGDMYGTKGTTTREIPALKSKIEPLLKARKDYAYGTQRDYIDNPDVIGWTREGDSTKAKSGLATVITDGPGGSKRMYVGTSNAGEIWYDLTGNRTDKITIGSDGYATFPVEGGSVSVWVQQ

SEQ ID NO: 38136 - protein, 480 aa, Cytophaga sp.
NGTMMQYFEWYVPNDGQQWNRLRTDAPYLSSVGITAVWTPPAYKGTSQADVGYGPYDLYDLGEFNQKGTVRTKYGTKGELKSAVNTLHQNGIQVYGDVVMNHKAGADYTENVTAVEVNPSNRYQETSGEYNIQAWTGFNFPGRGTTYSNWKWQWFHFDGTDWDQSRSLSRIFKFDGKAWDWEVSSENGNYDYLMYADYDYDHPDVVNEMKKWGVWYANEVGLDGYRLDAVKHIKFQFLKDWVDNARAATGKEMFTVGEYWQNDLGALNNYLAKVNYNQSLFDAPLHYNFYAASTGGGYYDMRNILNNTLVASNPTKAVTLVENHDTQPGQSLESTVQPWFKPLAYAFILTRSGGYPSVFYGDMYGTKGTTTREIPALKSKIEPLLKARKDYAYGTQRDYIDNPDVIGWTREGDSTKAKSGLATVITDGPGGSKRMYVGTSNAGEIWYDLTGNRTDKITIGSDGYATFPVNGGSVSVWVQQ

SEQ ID NO: 38137 - protein, 480 aa, Cytophaga sp.
NGTMMQYFEWYVPNDGQQWNRLRTDAPYLSSVGITAVWTPPAYKGTSQADVGYGPYDLYDLGEFNQKGTVRTKYGTKGELKSAVNTLHSNGIQVYGDVVMNHKAGADYTENVTAVEVNPSNRYQETSGEYNIQAWTGFNFPGRGTTYSNWKWQWFHFDGTDWDQSRSLSRIFKFDGKAWDWEVSSENGNYDYLMYADYDYDHPDVVNEMKKWGVWYANEVGLDGYRLDAVKHIKFQFLKDWVDNARAATGKEMFTVGEYWQNDLGALNNYLAKVNYNQSLFDAPLHYNFYAASTGEGYYDMRNILNNTLVASNPTKAVTLVENHDTQPGQSLESTVQPWFKPLAYAFILTRSGGYPSVFYGDMYGTKGTTTREIPALKSKIEPLLKARKDYAYGTQRDYIDNPDVIGWTREGDSTKAKSGLATVITDGPGGSKRMYVGTSNAGEIWYDLTGNRTDKITIGSDGYATFPVNGGSVSVWVQQ

SEQ ID NO: 38138 - protein, 480 aa, Cytophaga sp.
NGTMMQYFEWYVPNDGQQWNRLRTDAPYLSSVGITAVWTPPAYKGTSQADVGYGPYDLYDLGEFNQKGTVRTKYGTKGELKSAVNTLHSNGIQVYGDVVMNHKAGADYTENVTAVEVNPSNRYQETSGEYNIQAWTGFNFPGRGTTYSNWKWQWFHFDGTDWDQSRSLSRIFKFDGKAWDWEVSSENGNYDYLMYADYDYDHPDVVNEMKKWGVWYANEVGLDGYRLDAVKHIKFQFLKDWVDNARAATGKEMFTVGEYWQNDLGALNNYLAKVNYNQSLFDAPLHYNFYAASTGGGYYDMRNILNNTLVASNPTKAVTLVENHDTQPGQSLESTVQPWFKPLAYAFILTRSGGYPSVFYGDMYGTKGTTTREIPALKSKIEPLLKARKDYAYGTQRDYIDNPDVIGWTREGDSTKAKSGLATVITDGPGGSKRMKVGTSNAGEIWYDLTGNRTDKITIGSDGYATFPVNGGSVSVWVQQ

SEQ ID NO: 38139 - protein, 480 aa, Cytophaga sp.
NGTMMQYFEWYVPNDGQQWNRLRTDAPYLSSVGITAVWTPPAYKGTSQADVGYGPYDLYDLGEFNQKGTVRTKYGTKGELKSAVNTLHSNGIQVYGDVVMNHKAGADYTENVTAVEVNPSNRYQETSGEYNIQAWTGFNFPGRGTTYSNWKWQWFHFDGTDWDQSRSLSRIFKFDGKAWDWEVSSENGNYDYLMYADYDYDHPDVVNEMKKWGVWYANEVGLDGYRLDAVKHIKFQFLKDWVDNARAATGKEMFTVGEYWQNDLGALNNYLAKVNYNQSLFDAPLHYNFYAASTGGGYYDMRNILNNTLVASNPTKAVTLVENHDTQPGQSLESTVQPWFKPLAYAFILTRSGGYPSVFYGDMYGTKGTTTREIPALKSKIEPLLKARKDYAYGTQRDYIDNPDVIGWTREGDSTKAKSGLATVITDGPAGSKRMYVGTSNAGEIWYDLTGNRTDKITIGSDGYATFPVNGGSVSVWVQQ

SEQ ID NO: 38140 - protein, 480 aa, Cytophaga sp.
NGTMMQYFEWYVPNDGQQWNRLRTDAPYLSSVGITAVWTPPAYKGTSQADVGYGPYDLYDLGEFNQKGTVRTKYGTKGELKSAVNTLHSNGIQVYGDVVMNHKAGADYTENVKAVEVNPSNRYQETSGEYNIQAWTGFNFPGRGTTYSNWKWQWFHFDGTDWDQSRSLSRIFKFDGKAWDWEVSSENGNYDYLMYADYDYDHPDVVNEMKKWGVWYANEVGLDGYRLDAVKHIKFQFLKDWVDNARAATGKEMFTVGEYWQNDLGALNNYLAKVNYNQSLFDAPLHYNFYAASTGGGYYDMRNILNNTLVASNPTKAVTLVENHDTQPGQSLESTVQPWFKPLAYAFILTRSGGYPSVFYGDMYGTKGTTTREIPALKSKIEPLLKARKDYAYGTQRDYIDNPDVIGWTREGDSTKAKSGLATVITDGPGGSKRMYVGTSNAGEIWYDLTGNRTDKITIGSDGYATFPVNGGSVSVWVQQ

SEQ ID NO: 38141 - protein, 480 aa, Cytophaga sp.
NGTMMQYFEWYVPNDGQQWNRLRTDAPYLSSVGITAVWTPPAYKGTSQADVGYGPYDLYDLGEFNQKGTVRTKYGTKGELKSAVNTLHSNGIQVYGDVVMNHKAGADYTENVPAVEVNPSNRYQETSGEYNIQAWTGFNFPGRGTTYSNWKWQWFHFDGTDWDQSRSLSRIFKFDGKAWDWEVSSENGNYDYLMYADYDYDHPDVVNEMKKWGVWYANEVGLDGYRLDAVKHIKFQFLKDWVDNARAATGKEMFTVGEYWQNDLGALNNYLAKVNYNQSLFDAPLHYNFYAASTGGGYYDMRNILNNTLVASNPTKAVTLVENHDTQPGQSLESTVQPWFKPLAYAFILTRSGGYPSVFYGDMYGTKGTTTREIPALKSKIEPLLKARKDYAYGTQRDYIDNPDVIGWTREGDSTKAKSGLATVITDGPGGSKRMYVGTSNAGEIWYDLTGNRTDKITIGSDGYATFPVNGGSVSVWVQQ

SEQ ID NO: 38142 - protein, 480 aa, Cytophaga sp.
NGTMMQYFEWYVPNDGQQWNRLRTDAPYLSSVGITAVWTPPAYKGTSQADVGYGPYDLYDLGEFNQKGTVRTKYGTKGELKSAVNTLHSNGIQVYGDVVMNHKAGADYTENVTAVEVNPSNRYQETSGEYNIQAWTGFNFPGRGTTYSNWKWQWFHFDGTDWDQSRSLSRIFKFDGKAWDWEVSSENGNYDYLMYADYDYDHPDVVNEMKKWGVWYANEVGLDGYRLDAVKHIKFQFLKDWVDNARAATGKEMFTVGEYWQNDLGALNNYLAKVNYNQSLFDAPLHYNFYAASTGGGYYDMRNILNNTLVASNPTKAVTLVENHDTQPGQSLESTVQPWFKPLAYAFILTRSGGYPSVFYGDMYGTKGTTTREIPALKSKIEPLLKARKDYAYGTQRDYIDNPDVIGWTRQGDSTKAKSGLATVITDGPGGSKRMYVGTSNAGEIWYDLTGNRTDKITIGSDGYATFPVNGGSVSVWVQQ

SEQ ID NO: 38143 - protein, 480 aa, Cytophaga sp.
NGTMMQYFEWYVPNDGQQWNRLRTDAPYLSSVGITAVWTPPAYKGTSQADVGYGPYDLYDLGEFNQKGTVRTKYGTKGELKSAVNTLHSNGIQVYGDVVMNHKAGADYTENVTAVEVNPSNRYQETSGEYNIQAWTGFNFPGRGTTYSNWKWQWFHFDGTDWDQSRSLSRIFKFDGKAWDWEVSSENGNYDYLMYADYDYDHPDVVNEMKKWGVWYANEVGLDGYRLDAVKHIKFQFLKDWVDNARAATGKEMFTVGEYWQNDLGALNNYLAKVNYNQSLFDAPLHYNFYAASTGGGYYDMRNILNNTLVASNPTKAVTLVENHDTQPGQSLESTVQPWFKPLAYAFILTRSGGYPSVFYGDMYGTKGTTTREIPALKSKIEPLLKARKDYAYGTQRDYIDNPDVIGWTREGDSTKAKSGLATVITDGPGFSKRMYVGTSNAGEIWYDLTGNRTDKITIGSDGYATFPVNGGSVSVWVQQ

SEQ ID NO: 38144 - protein, 480 aa, Cytophaga sp.
NGTMMQYFEWYVPNDGQQWNRLRTDAPYLSSVGITAVWTPPAYKGTSQADVGYGPYDLYDLGEFNQKGTVRTKYGTKGELKSAVNTLHSNGIQVYGDVVMNHKAGADYTENVTAVEVNPSNRYQETSGEYNIQAWTGFNFPGRGTTYSNWKWQWFHFDGTDWDQSRSLSRIFKFDGKAWDWEVSSENGNYDYLMYADYDYDHPDVVNEMKKWGVWYANEVGLDGYRLDAVKHIKFQFLKDWVDNARAATGKEMFTVGEYWQNDLGALNNYLAKVNYNQSLFDAPLHYNFYAASTGGGYYDMRNILNNTLVASNPTKAVTLVENHDTQPGQSLESTVQPWFKPLAYAFILTRSGGYPSVFYGDMYGTKGTTTREIPALKSKIEPLLKARKDYAYGTQRDYIDNPDVIGWTREGDSTKAKSGLATVITDGPGGSKRMYVGTSNCGEIWYDLTGNRTDKITIGSDGYATFPVNGGSVSVWVQQ

SEQ ID NO: 38145 - protein, 480 aa, Cytophaga sp.
NGTMMQYFEWYVPNDGQQWNRLRTDAPYLSSVGITAVWTPPAYKGTSQADVGYGPYDLYDLGEFNQKGTVRTKYGTKGELKSAVNTLHSNGIQVYGDVVMNHKAGADYTENVTAVEVNPSNRYQETSGEYNIQAWTGFNFPGRGTTYSNWKWQWFHFDGTDWDQSRSLSRIFKFDGKAWDWEVSSENGNYDYLMYADYDYDHPDHVNEMKKWGVWYANEVGLDGYRLDAVKHIKFQFLKDWVDNARAATGKEMFTVGEYWQNDLGALNNYLAKVNYNQSLFDAPLHYNFYAASTGGGYYDMRNILNNTLVASNPTKAVTLVENHDTQPGQSLESTVQPWFKPLAYAFILTRSGGYPSVFYGDMYGTKGTTTREIPALKSKIEPLLKARKDYAYGTQRDYIDNPDVIGWTREGDSTKAKSGLATVITDGPGGSKRMYVGTSNAGEIWYDLTGNRTDKITIGSDGYATFPVNGGSVSVWVQQ

SEQ ID NO: 38146 - protein, 480 aa, Cytophaga sp.
NGTMMQYFEWYVPNDGQQWNRLRTDAPYLSSVGITAVWTPPAYKGTSQADVGYGPYDLYDLGEFNQKGTVRTKYGTKGELKSAVNTLHSNGIQVYGDVVMNHKAGADYTENVTAVEVNPSNRYQETSGEYNIQAWTGFNFPGRGTTYSNWKWQWFHFDGTDWDQSRSLSRIFKFDGKAWDWEVSSENGNYDYLMYADYDYDHPDVVNEMKKWGVWYANEVGLDGYRLDAVKHIKFQFLKDWVDNARAATGKEMFTVGEYWQNDLGALNNYLAKVNYNQSLFDAPLHYNFYAASTGGGYYDMRNILNNTLVASNPTKAVTLVENHDTQPGQSLESTVQPWFKPLAYAFILTRSGGYPSVFYGDMYGTKGTTTREIPALKSKIEPLLKARKDYAYGTQRDYIDNPDVIGWTRTGDSTKAKSGLATVITDGPGGSKRMYVGTSNAGEIWYDLTGNRTDKITIGSDGYATFPVNGGSVSVWVQQ

SEQ ID NO: 38147 - protein, 480 aa, Cytophaga sp.
NGTMMQYFEWYVPNDGQQWNRLRTDAPYLSSVGITAVWTPPAYKGTSQADVGYGPYDLYDLGEFNQKGTVRTKYGTKGELKSAVNTLHSNGIQVYGDVVMNHKAGADYTENVTAVEVNPSNRYQETSGEYNIQAWTGFNFPGRGTTYSNWKWQWFHFDGTDWDQSRSLSRIFKFDGKAWDWEVSSENGNYDYLMYADYDYDHPDVVNEMKKWGVWYANEVGLDGYRLDAVKHIKFQFLKDWVDNARAATGKEMFTVGEYWQNDLGALNNYLAKVNYNQSLFDAPLHYNFYAASTGGGYYDMRNILNNTLVASNPTKAVTLVENHDTQPGQSLYSTVQPWFKPLAYAFILTRSGGYPSVFYGDMYGTKGTTTREIPALKSKIEPLLKARKDYAYGTQRDYIDNPDVIGWTREGDSTKAKSGLATVITDGPGGSKRMYVGTSNAGEIWYDLTGNRTDKITIGSDGYATFPVNGGSVSVWVQQ

SEQ ID NO: 38148 - protein, 480 aa, Cytophaga sp.
NGTMMQYFEWYVPNDGQQWNRLRTDAPYLSSVGITAVWTPPAYKGTSQADVGYGPYDLYDLGEFNQKGTVRTKYGTKGELKSAVNTLHSNGIQVYGDVVMNHKAGADYTENVTAVEVNPSNRYQETSGEYNIQAWTGFNFPGRGTTYSNWKWQWFHFDGTDWDQSRSLSRIFKFDGKAWDWEVSSENGNYDYLMYADYDYDHPDVVNEMKKWGVWYANEVGLDGYRLDAVKHIKFQFLKDWVDNARAATGKEMFTVGEYWQNDLGALNNYLAKVNYNQSLFDAPLHYNFYAASTGGGYYDMRNILNNTLVASNPTKAVTLVENHDTQPGQSLESTVQPWFKPLAYAFILTRSGGYPSVFYGDMYGTKGTTTREIPALKSKIEPLLKARKDYAYGTQRDYIDNPDVIGWTREGDSTKAKSGLATVITDGPGGSKDMYVGTSNAGEIWYDLTGNRTDKITIGSDGYATFPVNGGSVSVWVQQ

SEQ ID NO: 38149 - protein, 480 aa, Cytophaga sp.
NGTMMQYFEWYVPNDGQQWNRLRTDAPYLSSVGITAVWTPPAYKGTSQADVGYGPYDLPDLGEFNQKGTVRTKYGTKGELKSAVNTLHSNGIQVYGDVVMNHKAGADYTENVTAVEVNPSNRYQETSGEYNIQAWTGFNFPGRGTTYSNWKWQWFHFDGTDWDQSRSLSRIFKFDGKAWDWEVSSENGNYDYLMYADYDYDHPDVVNEMKKWGVWYANEVGLDGYRLDAVKHIKFQFLKDWVDNARAATGKEMFTVGEYWQNDLGALNNYLAKVNYNQSLFDAPLHYNFYAASTGGGYYDMRNILNNTLVASNPTKAVTLVENHDTQPGQSLESTVQPWFKPLAYAFILTRSGGYPSVFYGDMYGTKGTTTREIPALKSKIEPLLKARKDYAYGTQRDYIDNPDVIGWTREGDSTKAKSGLATVITDGPGGSKRMYVGTSNAGEIWYDLTGNRTDKITIGSDGYATFPVNGGSVSVWVQQ

SEQ ID NO: 38150 - protein, 480 aa, Cytophaga sp.
NGTMMQYFEWYVPNDGQQWNRLRTDAPYLSSVGITAVWTPPAYKGTSQADVGYGPYDLYDLGEFNQKGTVRTKYGTKGELKSAVNTLHSNGIQVYGDVVMNHKAGADYTENVTAVEVNRSNRYQETSGEYNIQAWTGFNFPGRGTTYSNWKWQWFHFDGTDWDQSRSLSRIFKFDGKAWDWEVSSENGNYDYLMYADYDYDHPDVVNEMKKWGVWYANEVGLDGYRLDAVKHIKFQFLKDWVDNARAATGKEMFTVGEYWQNDLGALNNYLAKVNYNQSLFDAPLHYNFYAASTGGGYYDMRNILNNTLVASNPTKAVTLVENHDTQPGQSLESTVQPWFKPLAYAFILTRSGGYPSVFYGDMYGTKGTTTREIPALKSKIEPLLKARKDYAYGTQRDYIDNPDVIGWTREGDSTKAKSGLATVITDGPGGSKRMYVGTSNAGEIWYDLTGNRTDKITIGSDGYATFPVNGGSVSVWVQQ

SEQ ID NO: 38151 - protein, 480 aa, Cytophaga sp.
NGTMMQYFEWYVPNDGQQWNRLRTDAPYLSSVGITAVWTPPAYKGTSQADVGYGPYDLNDLGEFNQKGTVRTKYGTKGELKSAVNTLHSNGIQVYGDVVMNHKAGADYTENVTAVEVNPSNRYQETSGEYNIQAWTGFNFPGRGTTYSNWKWQWFHFDGTDWDQSRSLSRIFKFDGKAWDWEVSSENGNYDYLMYADYDYDHPDVVNEMKKWGVWYANEVGLDGYRLDAVKHIKFQFLKDWVDNARAATGKEMFTVGEYWQNDLGALNNYLAKVNYNQSLFDAPLHYNFYAASTGGGYYDMRNILNNTLVASNPTKAVTLVENHDTQPGQSLESTVQPWFKPLAYAFILTRSGGYPSVFYGDMYGTKGTTTREIPALKSKIEPLLKARKDYAYGTQRDYIDNPDVIGWTREGDSTKAKSGLATVITDGPGGSKRMYVGTSNAGEIWYDLTGNRTDKITIGSDGYATFPVNGGSVSVWVQQ

SEQ ID NO: 38152 - protein, 480 aa, Cytophaga sp.
NGTMMQYFEWYVPNDGQQWNRLRTDAPYLSSVGITAVWTPPAYKGTSQADVGYGPYDLYDLGEFNQKGTVRTKYGTKGELKSAVNTLHSNGIQVYGDVVMNHKAGADYTENVTAVEVNPSNRYQETSGEYNIQAWTGFNFPGRGTTYSNWKWQWFHFDGTDWDQSRSLSRIFKFDGKAWDWEVSSANGNYDYLMYADYDYDHPDVVNEMKKWGVWYANEVGLDGYRLDAVKHIKFQFLKDWVDNARAATGKEMFTVGEYWQNDLGALNNYLAKVNYNQSLFDAPLHYNFYAASTGGGYYDMRNILNNTLVASNPTKAVTLVENHDTQPGQSLESTVQPWFKPLAYAFILTRSGGYPSVFYGDMYGTKGTTTREIPALKSKIEPLLKARKDYAYGTQRDYIDNPDVIGWTREGDSTKAKSGLATVITDGPGGSKRMYVGTSNAGEIWYDLTGNRTDKITIGSDGYATFPVNGGSVSVWVQQ

SEQ ID NO: 38153 - protein, 480 aa, Cytophaga sp.
NGTMMQYFEWYVPNDGQQWNRLRTDAPYLSSVGITAVWTPPAYKGTSQADVGYGPYDLYDLGEFNQKGTVRTKYGTKGELKSAVNTLHSNGIQVYGDVVMNHKAGADYTENVTAVEVNPSNRYQETSGEYNIQAWTGFNFPGRGTTYSNWKWQWFHFDGTDWDQSRSLSRIFKFDGKAWDWEVSSENGNYDYLMYADYDYDHPDVVNEMKKWGVWYANEVGLDGYRLDAVKHIKFQFLKDWVDNARAATGKEMFTVGEYWQNDLGALNNYLAKVNYNQSLFDAPLHYNFYAASTGGGYYDMRNILNNTLVASNPTKAVTLVENHDTQPGQSLESTVQPWFKPLAYAFILTRSGGYPSVFYGDMYGTKGTTTREIPALKSKIERLLKARKDYAYGTQRDYIDNPDVIGWTREGDSTKAKSGLATVITDGPGGSKRMYVGTSNAGEIWYDLTGNRTDKITIGSDGYATFPVNGGSVSVWVQQ

SEQ ID NO: 38154 - protein, 480 aa, Cytophaga sp.
NGTMMQYFEWYVPNDGQQWNRLRTDAPYLSSVGITAVWTPPAYKGTSQADVGYGPYDLYDLGEFNQKGTVRTKYGTKGELKSAVNTLHSNGIQVYGDVVMNHKAGADYTENVTAVEVNPSNRYQETSGEYNIQAWTGFNFPGRGTTYSNWKWQWFHFDGTDWDQSRSLSRIFKFDGKAWDWEVSSENGNYDYLMYADYDYDHPDVVNEMKKWGVWYANEVGLDGYRLDAVKHIKFQFLKDWVDNARAATGKEMFTVGEYWQNDLGALNNYLAKVNYNQSLFDAPLHYNFYAASTGGGYYDMRNILNNTLVASNPTKAVTLVENHDTQPGQSLESTVQPWFKPLAYAFILTRSGGYPSVFYGDMYGTKGTTTREIPALKSKIEPLLKARKDYAYGTNRDYIDNPDVIGWTREGDSTKAKSGLATVITDGPGGSKRMYVGTSNAGEIWYDLTGNRTDKITIGSDGYATFPVNGGSVSVWVQQ

SEQ ID NO: 38155 - protein, 480 aa, Cytophaga sp.
NGTMMQYFEWYVPNDGQQWNRLRTDAPYLSSVGITAVWTPPAYKGTSQADVGYGPYDLYDLGEFNQKGTVRTKYGTKGELKSAVNTLHSNGIQVYGDVVMNHKAGADYTENVTAVEVNPSNRYQETSGEYNIQAWTGFNFPGRGTTYSNWKWQWFHFDGTDWDQSRSLSRIFKFDGKAWDWEVSSENGNYDYLMYADYDYDHPDVVNEMKKWGVWYANEVGLDGYRLDAVKHIKFQFLKDWVDNARAATGKEMFTVGEYWQNDLGALNNYLAKVNYNQSLFDAPLHYNFYAASTGGGYYDMRNILNNTLVASNPTKAVTLVENHDTQPGQSLESTVQPWFKPLAYAFILTRSGGYPSVFYGDMYGTKGTTTREIPALKSKIEPLLKARKDFAYGTQRDYIDNPDVIGWTREGDSTKAKSGLATVITDGPGGSKRMYVGTSNAGEIWYDLTGNRTDKITIGSDGYATFPVNGGSVSVWVQQ

SEQ ID NO: 38156 - protein, 480 aa, Cytophaga sp.
NGTMMQYFEWYVPNDGQQWNRLRTDAPYLSSVGITAVWTPPAYKGTSQADVGYGPYDLYDLGEFNQKGTVRTKYGTKGELKSAVNTLHSNGIQVYGDVVMNHKAGADYTENVTAVEVNPSNRYQETSGEYNIQAWTGFNFPGRGTTYRNWKWQWFHFDGTDWDQSRSLSRIFKFDGKAWDWEVSSENGNYDYLMYADYDYDHPDVVNEMKKWGVWYANEVGLDGYRLDAVKHIKFQFLKDWVDNARAATGKEMFTVGEYWQNDLGALNNYLAKVNYNQSLFDAPLHYNFYAASTGGGYYDMRNILNNTLVASNPTKAVTLVENHDTQPGQSLESTVQPWFKPLAYAFILTRSGGYPSVFYGDMYGTKGTTTREIPALKSKIEPLLKARKDYAYGTQRDYIDNPDVIGWTREGDSTKAKSGLATVITDGPGGSKRMYVGTSNAGEIWYDLTGNRTDKITIGSDGYATFPVNGGSVSVWVQQ

SEQ ID NO: 38157 - protein, 480 aa, Cytophaga sp.
NGTMMQYFEWYVPNDGQQWNRLRTDAPYLSSVGITAVWTPPAYKGTSQADVGYGPYDLYDLGEFNQKGTVRTKYGTKGELKSAVNTLHSNGIQVYGDVVMNHKAGADYTENVTAVEVNPSNRYQETSGEYNIQAWTGFNFPGRGTTYSNWKWQWFHFDGTDWDQSRSLSRIFKFDGKAWDWEVSSENGNYDYLMYADYDYDHPDVVNEMKKWGVWYANEVGLDGYRLDAVKHIKFQFLKDWVDNARAATGKEMFTVGEYWQNDLGALNNYLAKVNYNQSLFDAPLHYNFYAASTGGGYYDMRNILNNTLVASNPTKAVTLVENHDTQPGQSLESTVQPWFKPLAYAFILTRSGGYPSVFYGDMYGTKGTTTREIPALKSKIEPLLKARKDYAYGTQRDYIDNPDVIGWTREGDSTKLKSGLATVITDGPGGSKRMYVGTSNAGEIWYDLTGNRTDKITIGSDGYATFPVNGGSVSVWVQQ

SEQ ID NO: 38158 - protein, 480 aa, Cytophaga sp.
NGTMMQYFEWYVPNDGQQWNRLRTDAPYLSSVGITAVWTPPAYKGTSQADVGYGPYDLYDLGEFNQKGTVRTKYGTKGELKSAVNTLHSNGIQVYGDVVMNHKAGADYMENVTAVEVNPSNRYQETSGEYNIQAWTGFNFPGRGTTYSNWKWQWFHFDGTDWDQSRSLSRIFKFDGKAWDWEVSSENGNYDYLMYADYDYDHPDVVNEMKKWGVWYANEVGLDGYRLDAVKHIKFQFLKDWVDNARAATGKEMFTVGEYWQNDLGALNNYLAKVNYNQSLFDAPLHYNFYAASTGGGYYDMRNILNNTLVASNPTKAVTLVENHDTQPGQSLESTVQPWFKPLAYAFILTRSGGYPSVFYGDMYGTKGTTTREIPALKSKIEPLLKARKDYAYGTQRDYIDNPDVIGWTREGDSTKAKSGLATVITDGPGGSKRMYVGTSNAGEIWYDLTGNRTDKITIGSDGYATFPVNGGSVSVWVQQ

SEQ ID NO: 38159 - protein, 480 aa, Cytophaga sp.
NGTMMQYFEWYVPNDGQQWNRLRTDAPYLSSVGITAVWTPPAYKGTSQADVGYGPYDLYDLGEFNQKGTVRTKYGTKGELKSAVNTLHSNGIQVYGDVVMNHKAGADYTENVTAVEVNPSNRYQETSGEYNIQAWTGFNFPGRGTTYSNWKWQWFHFDGTDWDQSRSLSRIFKFDGKAWDWEVSSENGNYDYLMYADYDYDHPDVVNEMKKWGVWYANEVGLDGYRLDAVKHIKFQFLKDWVDNARAATGKEMFTVGEYWQNDLGALNNYLAKVNYNQSLFDAPLHYNFYAASTGGGYYDMRNILNNTLVASNPTKAVTLVENHDTQPGQSLESTVQPWFKPLAYAFILTRSGGYPSVFYGDMYGTKGTTTREIPALKSKIEPLLKARKDYAYGTQRDYIDNPDVIGWTREGDSTKAHSGLATVITDGPGGSKRMYVGTSNAGEIWYDLTGNRTDKITIGSDGYATFPVNGGSVSVWVQQ

SEQ ID NO: 38160 - protein, 480 aa, Cytophaga sp.
NGTMMQYFEWYVPNDGQQWNRLRTDAPYLSSVGITAVWTPPAYKGTSQADVGYGPYDLYDLGEFNQKGTVRTKYGTKGELKSAVNTLHSNGIQVYGDVVMNHKAGADYTENVTAVEVNPSNRYQETSGEYNIQAWTGFNFPGRGTTYSNWKWQWFHFDGTDWDQSRSLSRIFKFDGKAWDWYVSSENGNYDYLMYADYDYDHPDVVNEMKKWGVWYANEVGLDGYRLDAVKHIKFQFLKDWVDNARAATGKEMFTVGEYWQNDLGALNNYLAKVNYNQSLFDAPLHYNFYAASTGGGYYDMRNILNNTLVASNPTKAVTLVENHDTQPGQSLESTVQPWFKPLAYAFILTRSGGYPSVFYGDMYGTKGTTTREIPALKSKIEPLLKARKDYAYGTQRDYIDNPDVIGWTREGDSTKAKSGLATVITDGPGGSKRMYVGTSNAGEIWYDLTGNRTDKITIGSDGYATFPVNGGSVSVWVQQ

SEQ ID NO: 38161 - protein, 480 aa, Cytophaga sp.
NGTMMQYFEWYVPNDGQQWNRLRTDAPYLSSVGITAVWTPPAYKGTSQADVGYGPYDLYDLGEFNQKGTVRTKYGTKGELKSAVNTLHSNGIQVYGDVVMNHKAGADYTENVTAVEVNPSNRYQETSGEYNIQAWTGFNFPGRGTTYSNWKWQWFHFDGTDWDQSRSLSRIFKFDGKAWDWEVSSENGNYDYLMYADYDYDHPDVVNEMKKWGVWYANEVGLDGYRLDAVKHIKFQFLKDWVDNARAATGKEMFTVGEYWQNDLGALNNYLAKVNYNQSLFDAPLHYNFYAASTGGGYYDMRNILNNTLVASNPTKAVTLVENHDTQPGQSLESTVQPWFKPLAYAFILTRSGGYPSVFYGDMYGTKGTTTREIPALKSKIEPLLKARKDYAYGTQRDYIDNPDVIGWTREGDSTKAKSGLATVITDGKGGSKRMYVGTSNAGEIWYDLTGNRTDKITIGSDGYATFPVNGGSVSVWVQQ

SEQ ID NO: 38162 - protein, 480 aa, Cytophaga sp.
NGTMMQYFEWYVPNDGQQWNRLRTDAPYLSSVGITAVWTPPAYKGTSQADVGYGPYDLYDLGEFNQKGTVRTKYGTKGELKSAVNTLHSNGIQVYGDVVMNHKAGADYTENVTAVEVNPSNRYQETSGEYNIQAWTGFNFPGRGTTYSNWKWQWFHFDGTDWDQSRSLSRIFKFDGKAWDWEVSSENGNYDYLMYADYDYDHPDVVNEMKKWGVWYANEVGLDGYRLDAVKHIKFQFLKDWVDNARAATGKEMFTVGEYWQNDLGALNNYLAKVNYNQSLFDAPLHYNFYAASTGGGYYDMRNILNNTLVASNPTKAVTLVENHDTQPGQSLESTVQPWFKPLAYAFILTRSGGYPSVFYGDMYGTKGTTTREIPALKSKIEPLLKARKDYAYGTQRDYIDNPDVIGWTREGDSTKCKSGLATVITDGPGGSKRMYVGTSNAGEIWYDLTGNRTDKITIGSDGYATFPVNGGSVSVWVQQ

SEQ ID NO: 38163 - protein, 480 aa, Cytophaga sp.
NGTMMQYFEWYVPNDGQQWNRLRTDAPYLSSVGITAVWTPPAYKGTSQADVGYGPYDLYDLGEFNQKGTVRTKYGTKGELKSAVNTLHSNGIQVYGDVVMNHKAGADYTENVTAVEVNPSNRYQETSGEYNIQAWTGFNFPGRGTTYSNWKWQWFHFDGTDKDQSRSLSRIFKFDGKAWDWEVSSENGNYDYLMYADYDYDHPDVVNEMKKWGVWYANEVGLDGYRLDAVKHIKFQFLKDWVDNARAATGKEMFTVGEYWQNDLGALNNYLAKVNYNQSLFDAPLHYNFYAASTGGGYYDMRNILNNTLVASNPTKAVTLVENHDTQPGQSLESTVQPWFKPLAYAFILTRSGGYPSVFYGDMYGTKGTTTREIPALKSKIEPLLKARKDYAYGTQRDYIDNPDVIGWTREGDSTKAKSGLATVITDGPGGSKRMYVGTSNAGEIWYDLTGNRTDKITIGSDGYATFPVNGGSVSVWVQQ

SEQ ID NO: 38164 - protein, 480 aa, Cytophaga sp.
NGTMMQYFEWYVPNDGQQWNRLRTDAPYLSSVGITAVWTPPAYKGTSQADVGYGPYDLYDLGEFNQKGTVRTKYGTKGELKSAVNTLHSNGIQVYGDVVMNHKAGADYTENVTAVEVNPSNRYQETSGEYNIQAWTGFNFPGRGTTYSNWKWQWFHFDGTDWDQSRSLSRIFKFDGKAWDWEVSSENGNYDYLMYADYDYDHPDVVNEMKKWGVWYANEVGLDGYRLDAVKHIKFQFLKDWVDNARAATGKEMFTVGEYWQNDLGALNNYLAKVNYNQSLFDAPLHYNFYAASTGGGYYDMRNILNNTLVASNPTKAVTLVENHDTQPGQSLESTVQPWFKPLAYAFILTRSGGYPSVFYGDMYGTKGTTTREIPALKSKIEPLLKARKDYAYGTQRDYIDNPDVIGWTREGDSTKAISGLATVITDGPGGSKRMYVGTSNAGEIWYDLTGNRTDKITIGSDGYATFPVNGGSVSVWVQQ

SEQ ID NO: 38165 - protein, 480 aa, Cytophaga sp.
NGTMMQYFEWYVPNDGQQWNRLRTDAPYLSSVGITAVWTPPAYKGTSQADVGYGPYDLYDLGEFNQKGTVRTKYGIKGELKSAVNTLHSNGIQVYGDVVMNHKAGADYTENVTAVEVNPSNRYQETSGEYNIQAWTGFNFPGRGTTYSNWKWQWFHFDGTDWDQSRSLSRIFKFDGKAWDWEVSSENGNYDYLMYADYDYDHPDVVNEMKKWGVWYANEVGLDGYRLDAVKHIKFQFLKDWVDNARAATGKEMFTVGEYWQNDLGALNNYLAKVNYNQSLFDAPLHYNFYAASTGGGYYDMRNILNNTLVASNPTKAVTLVENHDTQPGQSLESTVQPWFKPLAYAFILTRSGGYPSVFYGDMYGTKGTTTREIPALKSKIEPLLKARKDYAYGTQRDYIDNPDVIGWTREGDSTKAKSGLATVITDGPGGSKRMYVGTSNAGEIWYDLTGNRTDKITIGSDGYATFPVNGGSVSVWVQQ

SEQ ID NO: 38166 - protein, 480 aa, Cytophaga sp.
NGTMMQYFEWYVPNDGQQWNRLRTDAPYLSSVGITAVWTPPAYKGTSQADVGYGPYDLYDLGEFNQKGTVRTKYGTKGELKSAVNTLHSNGIQVYGDVVMNHKAGADYTENVTAVEVNPSNRYQETSGEYNIQAWTGFNFPGRGTTYSNWKWQWFHFDGTDWDQSRSLSRIFKFDGKAWDWEVSSENGNYDYLMYADYDYDHPDVVNEMKKWGVWYANEVGLDGYRLDAVKHIKFQFLKDWVDNARAATGKEMFTVGEYWQNDLGALNNYLAKVNYNQSLFDAPLHYNFYAASTGGGYYDMRNILNNTLVASNPTKAVTLVENHDTQPGQSLESTVQPWFKPLAYAFILTRSGGYPSVFYGDMYGTKGTTTREIPALKSKIEPLLKARKDYAYGTQRDYIDNPDVIGWTREGDSTKAKSGLATVITDGPGGSKRMHVGTSNAGEIWYDLTGNRTDKITIGSDGYATFPVNGGSVSVWVQQ

SEQ ID NO: 38167 - protein, 480 aa, Cytophaga sp.
NGTMMQYFEWYVPNDGRQWNRLRTDAPYLSSVGITAVWTPPAYKGTSQADVGYGPYDLYDLGEFNQKGTVRTKYGTKGELKSAVNTLHSNGIQVYGDVVMNHKAGADYTENVTAVEVNPSNRYQETSGEYNIQAWTGFNFPGRGTTYSNWKWQWFHFDGTDWDQSRSLSRIFKFDGKAWDWEVSSENGNYDYLMYADYDYDHPDVVNEMKKWGVWYANEVGLDGYRLDAVKHIKFQFLKDWVDNARAATGKEMFTVGEYWQNDLGALNNYLAKVNYNQSLFDAPLHYNFYAASTGGGYYDMRNILNNTLVASNPTKAVTLVENHDTQPGQSLESTVQPWFKPLAYAFILTRSGGYPSVFYGDMYGTKGTTTREIPALKSKIEPLLKARKDYAYGTQRDYIDNPDVIGWTREGDSTKAKSGLATVITDGPGGSKRMYVGTSNAGEIWYDLTGNRTDKITIGSDGYATFPVNGGSVSVWVQQ

SEQ ID NO: 38168 - protein, 480 aa, Cytophaga sp.
NGTMMQYFEWYVPNDGQQWNRLRTDAPYLSSVGITAVWTPPAYKGTSQADVGYGPYDLYDLGEFNQKGTVRTKYGTKGELKSAVNTLHSNGIQVYGDVVMNHKAGADYTENVTAVEVNPSNRYQETSGEYNIQAWTGFNFPGRGTTYSNWKWQWFHFDGTDWDQSRSLSRIFKFDGKAWDWEVSSENGNYDYLMYADYDYDHPDVVNEMKKWGVWYANEVGLDGYRLDAVKHIKFQFLKDWVDNARAATGKEMFTVGEYWQNDLGALNNYLAKVNYNQSLFDAPLHYNFYAASTGGGYYDMRNILNNTLVASNPTKAVTLVENHDTQPGQSLESTVQPWFKPLAYAFILTRSGGYPSVFYGDMYGTKGTTTREIPALKSKIEPLLKARKDYAYGTQRDYIDNPDVIGWTREGDSTKSKSGLATVITDGPGGSKRMYVGTSNAGEIWYDLTGNRTDKITIGSDGYATFPVNGGSVSVWVQQ

SEQ ID NO: 38169 - protein, 480 aa, Cytophaga sp.
NGTMMQYFEWYVPNDGQQWNRLRTDAPYLSSVGITAVWTPPAYKGTSQADVGYGPYDLYDLGEFNQKGTVRTKYGTKGELKSAVNTLHSNGIQVYGDVVMNHKAGADYTENVTAVEVNPSNRYQETSGEYNIQAWTGFNFPGRGTTYSNWKWQWFHFDGTDWDQSRSLDRIFKFDGKAWDWEVSSENGNYDYLMYADYDYDHPDVVNEMKKWGVWYANEVGLDGYRLDAVKHIKFQFLKDWVDNARAATGKEMFTVGEYWQNDLGALNNYLAKVNYNQSLFDAPLHYNFYAASTGGGYYDMRNILNNTLVASNPTKAVTLVENHDTQPGQSLESTVQPWFKPLAYAFILTRSGGYPSVFYGDMYGTKGTTTREIPALKSKIEPLLKARKDYAYGTQRDYIDNPDVIGWTREGDSTKAKSGLATVITDGPGGSKRMYVGTSNAGEIWYDLTGNRTDKITIGSDGYATFPVNGGSVSVWVQQ

SEQ ID NO: 38170 - protein, 480 aa, Cytophaga sp.
NGTMMQYFEWYVPNDGQQWNRLRTDAPYLSSVGITAVWTPPAYKGTSQADVGYGPYDLYDLGEFNQKGTVRTKYGTKGELKSAVNTLHSNGIQVYGDVVMNHKAGADYTENVTAVEVNPSNRYQETSGEYNIQAWTGFNFPGRGTTYSNWKWQWFHFDGTDWDQSRSLSRIFKFDGKAWDWEVSSENGNYDYLMYADYDYDHPDVVNEMKKWGVWYANEVGLDGYRLDAVKHIKFQFLKDWVDNARAATGKEMFTVGEYWQNDLGALNNYLAKVNYNQSLFDAPLHYNFYAASTGGGYYDMRNILNNTLVASNPTKAVTLVENHDTQPGQSLESTVQPWFKPLAYAFILTRSGGYPSVFYGDMYGTKGTTTREIPALESKIEPLLKARKDYAYGTQRDYIDNPDVIGWTREGDSTKAKSGLATVITDGPGGSKRMYVGTSNAGEIWYDLTGNRTDKITIGSDGYATFPVNGGSVSVWVQQ

SEQ ID NO: 38171 - protein, 480 aa, Cytophaga sp.
NGTMMQYFEWYVPNDGQQWNRLRTDAPYLSSVGITAVWTPPAYKGTSQADVGYGPYDLYDLGEFNQKGTVRTKYGTKGELKSAVNTLHSNGIQVYGDVVMNHKAGADYTENVTAVEVNPSNRYQETSGEYNIQAYTGFNFPGRGTTYSNWKWQWFHFDGTDWDQSRSLSRIFKFDGKAWDWEVSSENGNYDYLMYADYDYDHPDVVNEMKKWGVWYANEVGLDGYRLDAVKHIKFQFLKDWVDNARAATGKEMFTVGEYWQNDLGALNNYLAKVNYNQSLFDAPLHYNFYAASTGGGYYDMRNILNNTLVASNPTKAVTLVENHDTQPGQSLESTVQPWFKPLAYAFILTRSGGYPSVFYGDMYGTKGTTTREIPALKSKIEPLLKARKDYAYGTQRDYIDNPDVIGWTREGDSTKAKSGLATVITDGPGGSKRMYVGTSNAGEIWYDLTGNRTDKITIGSDGYATFPVNGGSVSVWVQQ

SEQ ID NO: 38172 - protein, 480 aa, Cytophaga sp.
NGTMMQYFEWYVPNDGQQWNRLRTDAPYLSSVGITAVWTPPAYKGTSQADVGYGPYDLYDLGEFNQKGTVRTKYGTKGELKSAVNTLHSNGIQVYGDVVMNHKAGADYTENVTAVEVNPSNRYQETSGEYNIQAWTGFNFPGRGTTYSNWKWQWFHFDGTDWDQSRSLSRIFKFDGKAWDWEVSSENGNYDYLMYADYDYDHPDVVNEMKKWGVWYANEVGLDGYRLDAVKHIKFQFLKDWVDNARAATGKEMFTVGEYWQNDLGALNNYLAKVNYNQSLFDAPLHYNFYAASTGGGYYDMRNILNNTLVASNPTKAVTLVENHDTQPGQSLESTVQPWFKPLAYAFILTRSGGYPSVFYGDMYGTKGTTTREIPALKSKIEPLLKARKDKAYGTQRDYIDNPDVIGWTREGDSTKAKSGLATVITDGPGGSKRMYVGTSNAGEIWYDLTGNRTDKITIGSDGYATFPVNGGSVSVWVQQ

SEQ ID NO: 38173 - protein, 480 aa, Cytophaga sp.
NGTMMQYFEWYVPNDGQQWNRLRTDAPYLSSVGITAVWTPPAYKGTSQADVGYGPYDLYDLGEFNQKGTVRTKYGTKGELKSAVNTLHSNGIQVYGDVVMNHKAGADYTENVTAVEVNPSNRYQETSGEYNIQAWTGFNFPGRGTTYSNWKWQWFHFDGTDWDQSRSLSRIFKFDKKAWDWEVSSENGNYDYLMYADYDYDHPDVVNEMKKWGVWYANEVGLDGYRLDAVKHIKFQFLKDWVDNARAATGKEMFTVGEYWQNDLGALNNYLAKVNYNQSLFDAPLHYNFYAASTGGGYYDMRNILNNTLVASNPTKAVTLVENHDTQPGQSLESTVQPWFKPLAYAFILTRSGGYPSVFYGDMYGTKGTTTREIPALKSKIEPLLKARKDYAYGTQRDYIDNPDVIGWTREGDSTKAKSGLATVITDGPGGSKRMYVGTSNAGEIWYDLTGNRTDKITIGSDGYATFPVNGGSVSVWVQQ

SEQ ID NO: 38174 - protein, 480 aa, Cytophaga sp.
NGTMMQYFEWYVPNDGQQWNRLRTDAPYLSSVGITAVWTPPAYKGTSQADVGYGPYDLLDLGEFNQKGTVRTKYGTKGELKSAVNTLHSNGIQVYGDVVMNHKAGADYTENVTAVEVNPSNRYQETSGEYNIQAWTGFNFPGRGTTYSNWKWQWFHFDGTDWDQSRSLSRIFKFDGKAWDWEVSSENGNYDYLMYADYDYDHPDVVNEMKKWGVWYANEVGLDGYRLDAVKHIKFQFLKDWVDNARAATGKEMFTVGEYWQNDLGALNNYLAKVNYNQSLFDAPLHYNFYAASTGGGYYDMRNILNNTLVASNPTKAVTLVENHDTQPGQSLESTVQPWFKPLAYAFILTRSGGYPSVFYGDMYGTKGTTTREIPALKSKIEPLLKARKDYAYGTQRDYIDNPDVIGWTREGDSTKAKSGLATVITDGPGGSKRMYVGTSNAGEIWYDLTGNRTDKITIGSDGYATFPVNGGSVSVWVQQ

SEQ ID NO: 38175 - protein, 480 aa, Cytophaga sp.
NGTMMQYFEWYVPNDGQQWNRLRTDAPYLSSVGITAVWTPPAYKGTSQADVGYGPYDLYDLGEFNQKGTVRTKYGTKGELKSAVNTLHSNGIQVYGDVVMNHKAGADYTENVTAVEVNPSNRYQETSGEYNIQAWTGFNFPGRGTTYSNWKWQWFHFDGTDWDQSRSLSRIFKFDGKAWDWEVSSENGNYDYLMYADYDYDHPDVVNEMKKWGVWYANEVGLDGYRLDAVKHIKFQFLKDWVDNARAATGKEMFTVGEYWANDLGALNNYLAKVNYNQSLFDAPLHYNFYAASTGGGYYDMRNILNNTLVASNPTKAVTLVENHDTQPGQSLESTVQPWFKPLAYAFILTRSGGYPSVFYGDMYGTKGTTTREIPALKSKIEPLLKARKDYAYGTQRDYIDNPDVIGWTREGDSTKAKSGLATVITDGPGGSKRMYVGTSNAGEIWYDLTGNRTDKITIGSDGYATFPVNGGSVSVWVQQ

SEQ ID NO: 38176 - protein, 480 aa, Cytophaga sp.
NGTMMQYFEWYVPNDGQQWNRLRTDAPYLSSVGITAVWTPPAYKGTSQADVGYGPYDLYDLGEFNQKGTVRTKYGTKGELKSAVNTLHSNGIQVYGDVVMNHKAGADYTENVTAVEVNPSNRYQETSGEYNIQAWTGFNFPGRGTTYSNWKWQWFHFDGTDWDQSRSLSRIFKFDGKAWDWEVSSENGNYDYLMYADYDYDHPDVVNEMKKWGVWYANEVGLDGYRLDAVKHIKFQFLKDWVDNARAATGKEMFTVGEYWQNDLGALNNYLAKVNYNQSLFDAPLHYNFYAASTGGGYYDMRNILNNTLVASNPTKAVTLVENHDTQPGQSLESTVQPWFKPLAYAMILTRSGGYPSVFYGDMYGTKGTTTREIPALKSKIEPLLKARKDYAYGTQRDYIDNPDVIGWTREGDSTKAKSGLATVITDGPGGSKRMYVGTSNAGEIWYDLTGNRTDKITIGSDGYATFPVNGGSVSVWVQQ

SEQ ID NO: 38177 - protein, 480 aa, Cytophaga sp.
NGTMMQYFEWYVPNDGQQWNRLRTDAPYLSSVGITAVWTPPAYKGTSQADVGYGPYDLYDLGEFNQKGTVRTKYGTKGELKSAVNTLHSNGIQVYGDVVMNHKAGADYTENVTAVEVNPSNRYQETSGEYNIQAWTGFNFPGRGTTYSNWKWQWFHFDGTDWDQSRSLSRIFKFDGKAWDWEVSSENGNYDYLMYADYDYDHPDVVNEMKKWGVWYANEVGLDGYRLDAVKHIKFQFLKDWVDNARAATGKEMFTVGEYWQNDLGALNNYLAKVNYNQSLFDAPLHYNFYDASTGGGYYDMRNILNNTLVASNPTKAVTLVENHDTQPGQSLESTVQPWFKPLAYAFILTRSGGYPSVFYGDMYGTKGTTTREIPALKSKIEPLLKARKDYAYGTQRDYIDNPDVIGWTREGDSTKAKSGLATVITDGPGGSKRMYVGTSNAGEIWYDLTGNRTDKITIGSDGYATFPVNGGSVSVWVQQ

SEQ ID NO: 38178 - protein, 480 aa, Cytophaga sp.
NGTMMQYFEWYVPNDGQQWNRLRTDAPYLSSVGITAVWTPPAYKGTSQADVGYGPYDLYDLGEFNQKGTVRTKYGTKGELKSAVNTLHSNGIQVYGDVVMNHKAGADYTENVTAVEVNPSNRYQETSGEYNIQAWTGFNFPGRGTTYSNWKWQWFHFDGTDWDQSRSLSRIFKFDSKAWDWEVSSENGNYDYLMYADYDYDHPDVVNEMKKWGVWYANEVGLDGYRLDAVKHIKFQFLKDWVDNARAATGKEMFTVGEYWQNDLGALNNYLAKVNYNQSLFDAPLHYNFYAASTGGGYYDMRNILNNTLVASNPTKAVTLVENHDTQPGQSLESTVQPWFKPLAYAFILTRSGGYPSVFYGDMYGTKGTTTREIPALKSKIEPLLKARKDYAYGTQRDYIDNPDVIGWTREGDSTKAKSGLATVITDGPGGSKRMYVGTSNAGEIWYDLTGNRTDKITIGSDGYATFPVNGGSVSVWVQQ

SEQ ID NO: 38179 - protein, 480 aa, Cytophaga sp.
NGTMMQYFEWYVPNDGQQWNRLRTDAPYLSSVGITAVWTPPAYKGTSQADVGYGPYDLRDLGEFNQKGTVRTKYGTKGELKSAVNTLHSNGIQVYGDVVMNHKAGADYTENVTAVEVNPSNRYQETSGEYNIQAWTGFNFPGRGTTYSNWKWQWFHFDGTDWDQSRSLSRIFKFDGKAWDWEVSSENGNYDYLMYADYDYDHPDVVNEMKKWGVWYANEVGLDGYRLDAVKHIKFQFLKDWVDNARAATGKEMFTVGEYWQNDLGALNNYLAKVNYNQSLFDAPLHYNFYAASTGGGYYDMRNILNNTLVASNPTKAVTLVENHDTQPGQSLESTVQPWFKPLAYAFILTRSGGYPSVFYGDMYGTKGTTTREIPALKSKIEPLLKARKDYAYGTQRDYIDNPDVIGWTREGDSTKAKSGLATVITDGPGGSKRMYVGTSNAGEIWYDLTGNRTDKITIGSDGYATFPVNGGSVSVWVQQ

SEQ ID NO: 38180 - protein, 480 aa, Cytophaga sp.
NGTMMQYFEWYVPNDGQQWNRLRTDAPYLSSVGITAVWTPPAYKGTSQADVGYGPYDLYDLGEFNQKGTVRTKYGTKGELKSAVNTLHSNGIQVYGDVVMNHKAGADYTENVTAVEVNPSNRYQETSGEYNIQAWTGFNFPGRGTTYSNWKWQWFHFDGTDWDQSRSLSRIFKFDGKAWDWEVSSENGNYDYLMYADYDYDHPDVVNEMKKWGVWYANEVGLDGYRLDAVKHIKFQFLKDWVDNARAATGKEMFTVGEYWQNDLGALNNYLAKVNYNQSLFDAPLHYNFYAASTGGGYYDMRNILNNTLVASNPTKAVTLVENHDTQPGQSLESTVQPWFKPLAYAFILTRSGGYPSVFYGDMYGTKGTTTREIPALKSKIEPLLKARKDYAYGTQRDYIDNPDVIGWTREGDSTKAKSGLATVITDGPGGSKRMYVGTSHAGEIWYDLTGNRTDKITIGSDGYATFPVNGGSVSVWVQQ

SEQ ID NO: 38181 - protein, 480 aa, Cytophaga sp.
NGTMMQYFEWYVPNDGQQWNRLRTDAPYLSSVGITAVWTPPAYKGTSQADVGYGPYDLYDLGEFNQKGTVRTKYGTKGELKSAVNTLHSNGIQVYGDVVMNHKAGADYTENVTAVEVNPSNRYQETSGEYNIQAWTGFNFPGRGTTYSNWKWQWFHFDGTDWDQSRSLSRIFKFDGKAWDWEVSSENGNYDYLMYADYDYDHPDVVNEMKKWGVWYANEVGLDGYRLDAVKHIQFQFLKDWVDNARAATGKEMFTVGEYWQNDLGALNNYLAKVNYNQSLFDAPLHYNFYAASTGGGYYDMRNILNNTLVASNPTKAVTLVENHDTQPGQSLESTVQPWFKPLAYAFILTRSGGYPSVFYGDMYGTKGTTTREIPALKSKIEPLLKARKDYAYGTQRDYIDNPDVIGWTREGDSTKAKSGLATVITDGPGGSKRMYVGTSNAGEIWYDLTGNRTDKITIGSDGYATFPVNGGSVSVWVQQ

SEQ ID NO: 38182 - protein, 480 aa, Cytophaga sp.
NGTMMQYFEWYVPNDGQQWNRLRTDAPYLSSVGITAVWTPPAYKGTSQADVGYGPYDLYDLGEFNQKGTVRTKYGTKGELKSAVNTLHSNGIQVYGDVVMNHKAGADYTENVTAVEVNPSNRYQETSGEYNIQAWTGFNYPGRGTTYSNWKWQWFHFDGTDWDQSRSLSRIFKFDGKAWDWEVSSENGNYDYLMYADYDYDHPDVVNEMKKWGVWYANEVGLDGYRLDAVKHIKFQFLKDWVDNARAATGKEMFTVGEYWQNDLGALNNYLAKVNYNQSLFDAPLHYNFYAASTGGGYYDMRNILNNTLVASNPTKAVTLVENHDTQPGQSLESTVQPWFKPLAYAFILTRSGGYPSVFYGDMYGTKGTTTREIPALKSKIEPLLKARKDYAYGTQRDYIDNPDVIGWTREGDSTKAKSGLATVITDGPGGSKRMYVGTSNAGEIWYDLTGNRTDKITIGSDGYATFPVNGGSVSVWVQQ

SEQ ID NO: 38183 - protein, 480 aa, Cytophaga sp.
NGTMMQYFEWYVPNDGQQWNRLRTDAPYLSSVGITAVWTPPAYKGTSQADVGYGPYDLYDLGEFNQKGTVRTKYGTKGELKSAVNTLHSNGIQVYGDVVMNHKAGADYTENVTAVEVNPSNRYQETSGEYNIQAWTGFNFPGRGTTYSNWKWQWFHFDGTDWDQSRSLSRIFKFDGKAWDWEVSSTNGNYDYLMYADYDYDHPDVVNEMKKWGVWYANEVGLDGYRLDAVKHIKFQFLKDWVDNARAATGKEMFTVGEYWQNDLGALNNYLAKVNYNQSLFDAPLHYNFYAASTGGGYYDMRNILNNTLVASNPTKAVTLVENHDTQPGQSLESTVQPWFKPLAYAFILTRSGGYPSVFYGDMYGTKGTTTREIPALKSKIEPLLKARKDYAYGTQRDYIDNPDVIGWTREGDSTKAKSGLATVITDGPGGSKRMYVGTSNAGEIWYDLTGNRTDKITIGSDGYATFPVNGGSVSVWVQQ

SEQ ID NO: 38184 - protein, 480 aa, Cytophaga sp.
NGTMMQYFEWYVPNDGQQWNRLRTDAPYLSSVGITAVWTPPAYKGTSQADVGYGPYDLYDLGEFNQKGTVRTKYGTKGELKSAVNTLHSNGIQVYGDVVMNHKAGADYTENVTAVEVNPSNRYQETSGEYNIQAWTGFNFPGRGTTYSNWKWQWFHFDGTDWDQSRSLSRIFKFDGKAWDWEVSSENGNYDYLMYADYDYQHPDVVNEMKKWGVWYANEVGLDGYRLDAVKHIKFQFLKDWVDNARAATGKEMFTVGEYWQNDLGALNNYLAKVNYNQSLFDAPLHYNFYAASTGGGYYDMRNILNNTLVASNPTKAVTLVENHDTQPGQSLESTVQPWFKPLAYAFILTRSGGYPSVFYGDMYGTKGTTTREIPALKSKIEPLLKARKDYAYGTQRDYIDNPDVIGWTREGDSTKAKSGLATVITDGPGGSKRMYVGTSNAGEIWYDLTGNRTDKITIGSDGYATFPVNGGSVSVWVQQ

SEQ ID NO: 38185 - protein, 480 aa, Cytophaga sp.
NGTMMQYFEWYVPNDGQQWNRLRTDAPYLSSVGITAVWTPPAYKGTSQADVGYGPYDLYDLGEFNQKGTVRTKYGTKGELKSAVNTLHSNGIQVYGDVVMNHKAGADYTENVTAVEVNPSNRYQETSGEYNIQAWTGFNFPGRGTTYSNWKWQWFHFDGTDWDQSRSLSRIFKFDGKAWDWEVSSENGNYDYLMYADYDYDHPDVVNEMKKWGVWYANEVGLDGYRLDAVKHIKFQFLKDWVDNARAATGKEMFTVGEYWQNDLGALNNYLAKVNYNQSLFDAPLHYNFYAASTGGGYYDMRNILNNTLVASNPTKAVTLVENHDTQPGQSLESTVQPWFKPLAYAFILTRSGGYPSVFYGDMYGTKGTTTREIPALKSKIEPLLKARKDYAYGTQRDYIDNPDVIGWTREGDSTKAKSGLATVITDGPGGSKRMYVGTSNAGEIWYDLTGHRTDKITIGSDGYATFPVNGGSVSVWVQQ

SEQ ID NO: 38186 - protein, 480 aa, Cytophaga sp.
NGTMMQYFEWYVPNDGQQWNRLRTDAPYLSSVGITAVWTPPAYKGTSQADVGYGPYDLYDLGEFNQKGTVRTKYGMKGELKSAVNTLHSNGIQVYGDVVMNHKAGADYTENVTAVEVNPSNRYQETSGEYNIQAWTGFNFPGRGTTYSNWKWQWFHFDGTDWDQSRSLSRIFKFDGKAWDWEVSSENGNYDYLMYADYDYDHPDVVNEMKKWGVWYANEVGLDGYRLDAVKHIKFQFLKDWVDNARAATGKEMFTVGEYWQNDLGALNNYLAKVNYNQSLFDAPLHYNFYAASTGGGYYDMRNILNNTLVASNPTKAVTLVENHDTQPGQSLESTVQPWFKPLAYAFILTRSGGYPSVFYGDMYGTKGTTTREIPALKSKIEPLLKARKDYAYGTQRDYIDNPDVIGWTREGDSTKAKSGLATVITDGPGGSKRMYVGTSNAGEIWYDLTGNRTDKITIGSDGYATFPVNGGSVSVWVQQ

SEQ ID NO: 38187 - protein, 480 aa, Cytophaga sp.
NGTMMQYFEWYVPNDGQQWNRLRTDAPYLSSVGITAVWTPPAYKGTSQADVGYGPYDLYDLGEFNQKGTVRTKYGTKGELKSAVNTLHSNGIQVYGDVVMNHKAGADYTENVTAVEVNPSNRYQETSGEYNIQAWTGFNFPGRGTTYSNWKWQWFHFDGTDWDQSRSLSRIFKFDGKAWDWEVSSENGNYDYLMYADYDYDHPDVVNEMKKWGVWYANEVGLDGYRLDAVKHIKFQFLKDWVDNARAATGKEMFTVGEYWQNDLGALNNYLAKVNYNQSLFDAPLHYNFYAASTGGGYYDMRNILNNTLVASNPTKAVTLVENHDTQPGQSLESTVQPWFKPLAYAFILTRSGGYPSVFYGDMYGTKGTTTREIPALKSKIEPLLKARKDYAYGTQRDYIDNPDVIGWTREGDSTKAKSGLATVITDGHGGSKRMYVGTSNAGEIWYDLTGNRTDKITIGSDGYATFPVNGGSVSVWVQQ

SEQ ID NO: 38188 - protein, 480 aa, Cytophaga sp.
NGTMMQYFEWYVPNDGQQWNRLRTDAPYLSSVGITAVWTPPAYKGTSQADVGYGPYDLYDLGEFNQKGTVRTKYGTKGELKSAVNTLHSNGIQVYGDVVMNHKAGADYTENVTAVEVNPSNRYQETSGEYNIQAWTGFNFPGRGTTYSNWKWQWFHFDGTDWDQSRSLSRIFKFDGKAWDWEVSSENGNYDYLMYADYDYDHPDVVNEMKKWGVWYAVEVGLDGYRLDAVKHIKFQFLKDWVDNARAATGKEMFTVGEYWQNDLGALNNYLAKVNYNQSLFDAPLHYNFYAASTGGGYYDMRNILNNTLVASNPTKAVTLVENHDTQPGQSLESTVQPWFKPLAYAFILTRSGGYPSVFYGDMYGTKGTTTREIPALKSKIEPLLKARKDYAYGTQRDYIDNPDVIGWTREGDSTKAKSGLATVITDGPGGSKRMYVGTSNAGEIWYDLTGNRTDKITIGSDGYATFPVNGGSVSVWVQQ

SEQ ID NO: 38189 - protein, 480 aa, Cytophaga sp.
NGTMMQYFEWYVPNDGSQWNRLRTDAPYLSSVGITAVWTPPAYKGTSQADVGYGPYDLYDLGEFNQKGTVRTKYGTKGELKSAVNTLHSNGIQVYGDVVMNHKAGADYTENVTAVEVNPSNRYQETSGEYNIQAWTGFNFPGRGTTYSNWKWQWFHFDGTDWDQSRSLSRIFKFDGKAWDWEVSSENGNYDYLMYADYDYDHPDVVNEMKKWGVWYANEVGLDGYRLDAVKHIKFQFLKDWVDNARAATGKEMFTVGEYWQNDLGALNNYLAKVNYNQSLFDAPLHYNFYAASTGGGYYDMRNILNNTLVASNPTKAVTLVENHDTQPGQSLESTVQPWFKPLAYAFILTRSGGYPSVFYGDMYGTKGTTTREIPALKSKIEPLLKARKDYAYGTQRDYIDNPDVIGWTREGDSTKAKSGLATVITDGPGGSKRMYVGTSNAGEIWYDLTGNRTDKITIGSDGYATFPVNGGSVSVWVQQ

SEQ ID NO: 38190 - protein, 480 aa, Cytophaga sp.
NGTMMQYFEWYVPNDGQQWNRLRTDAPYLSSVGITAMWTPPAYKGTSQADVGYGPYDLYDLGEFNQKGTVRTKYGTKGELKSAVNTLHSNGIQVYGDVVMNHKAGADYTENVTAVEVNPSNRYQETSGEYNIQAWTGFNFPGRGTTYSNWKWQWFHFDGTDWDQSRSLSRIFKFDGKAWDWEVSSENGNYDYLMYADYDYDHPDVVNEMKKWGVWYANEVGLDGYRLDAVKHIKFQFLKDWVDNARAATGKEMFTVGEYWQNDLGALNNYLAKVNYNQSLFDAPLHYNFYAASTGGGYYDMRNILNNTLVASNPTKAVTLVENHDTQPGQSLESTVQPWFKPLAYAFILTRSGGYPSVFYGDMYGTKGTTTREIPALKSKIEPLLKARKDYAYGTQRDYIDNPDVIGWTREGDSTKAKSGLATVITDGPGGSKRMYVGTSNAGEIWYDLTGNRTDKITIGSDGYATFPVNGGSVSVWVQQ

SEQ ID NO: 38191 - protein, 480 aa, Cytophaga sp.
NGTMMQYFEWYVPNDGQQWNRLRTDAPYLSSVGITAVWTPPAYKGTSQADVGYGPYDLYDLGEFNQKGTVRTKYGTKGELKSAVNTLHSNGIQVYGDVVMNHKAGADYTENVTAVEVNPSNRYQETSGEYNIQAWTGFNFPGRGTTYSNWKWQWFHFDGTDWDQSRSLSRIFKFDGKAWDWEVSSENGNYDYLMYADYDYDHPDVVNEMKKWGVWYANEVGLDGYRLDAVKHIKFQFLKDWVDNARAATGKEMFTVGEYWQNDLGALNNYLAKVNYNQSLFDAPLHYNFYAASTGGGYYDMRNILNNTLVASNPTKAVTLVENHDTQPGQSLESTVQPWFKPLAYAFILTRSGGYPSVFYGDMYGTKGTTTREIPALSSKIEPLLKARKDYAYGTQRDYIDNPDVIGWTREGDSTKAKSGLATVITDGPGGSKRMYVGTSNAGEIWYDLTGNRTDKITIGSDGYATFPVNGGSVSVWVQQ

SEQ ID NO: 38192 - protein, 480 aa, Cytophaga sp.
NGTMMQYFEWYVPNDGQQWNRLRTDAPYLSSVGITAVWTPPAYKGTSQADVGYGPYDLYDLGEFNQKGTVRTKYGTKGELKSAVNTLHSNGIQVYGDVVMNHKAGADYTENVTAVEVNPSNRYQETSGEYNIQAWTGFNFPGRGTTYSNWKWQWFHFDGTDWDQSRSLSRIFKFDGKAWDWEVSSENGNYDYLMYADYDYDHPDVVNEMKKWGVWYANEVGLDGYRLDAVKHIKFQFLKDWVDNARAATGKEMFTVGEYWQNDLGALNNYLAKVNYNQSLFDAPLHYNFYAASTGGGYYDMRNILNNTLVASNPTKAVTLVENHDTQPGQSLESTVQPWFKPLAYAFILTRSGGYPSVFYGDMYGTKGTTTREIPAFKSKIEPLLKARKDYAYGTQRDYIDNPDVIGWTREGDSTKAKSGLATVITDGPGGSKRMYVGTSNAGEIWYDLTGNRTDKITIGSDGYATFPVNGGSVSVWVQQ

SEQ ID NO: 38193 - protein, 480 aa, Cytophaga sp.
NGTMMQYFEWYVPNDGQQWNRLRTDAPYLSSVGITAVWTPPAYKGTSQADVGYGPYDLYDLGEFNQKGTVRTKYGTKGELKSAVNTLHSNGIQVYGDVVMNHKAGADYTENVTAVEVNPSNRYQETSGEYNIQAWTGFNFPGRGTTYSNWKWQWFHFDGTDWDQSRSLSRIFKFDGKAWDWEVSSENGNYDYLMYADYDYDHPDVVNEMKKWGVWYANEVGLDGYRLDAVKHIKFQFLKDWVDNARAATGKEMFTVGEYWQNDLGALNNYLAKVNYNQSLFDAPLHYNFYAASTGGGYYDMENILNNTLVASNPTKAVTLVENHDTQPGQSLESTVQPWFKPLAYAFILTRSGGYPSVFYGDMYGTKGTTTREIPALKSKIEPLLKARKDYAYGTQRDYIDNPDVIGWTREGDSTKAKSGLATVITDGPGGSKRMYVGTSNAGEIWYDLTGNRTDKITIGSDGYATFPVNGGSVSVWVQQ

SEQ ID NO: 38194 - protein, 480 aa, Cytophaga sp.
NGTMMQYFEWYVPNDGQQWNRLRTDAPYLSSVGITAVWTPPAYKGTSQADVGYGPYDLYDLGEFNQKGTVRTKYGTKGELKSAVNTLHSNGIQVYGDVVMNHKAGADYTENVTAVEVNPSNRYQETSGEYNIQAWTGFNFPGRGTQYSNWKWQWFHFDGTDWDQSRSLSRIFKFDGKAWDWEVSSENGNYDYLMYADYDYDHPDVVNEMKKWGVWYANEVGLDGYRLDAVKHIKFQFLKDWVDNARAATGKEMFTVGEYWQNDLGALNNYLAKVNYNQSLFDAPLHYNFYAASTGGGYYDMRNILNNTLVASNPTKAVTLVENHDTQPGQSLESTVQPWFKPLAYAFILTRSGGYPSVFYGDMYGTKGTTTREIPALKSKIEPLLKARKDYAYGTQRDYIDNPDVIGWTREGDSTKAKSGLATVITDGPGGSKRMYVGTSNAGEIWYDLTGNRTDKITIGSDGYATFPVNGGSVSVWVQQ

SEQ ID NO: 38195 - protein, 480 aa, Cytophaga sp.
NGTMMQYFEWYVPNDGQQWNRLRTDAPYLSSVGITAVWTPPAYKGTSQADVGYGPYDLYDLGEFNQKGTVRTKYGTKGELKSAVNTLHSNGIQVYGDVVMNHKAGADYTENVTAVEVNPSNRYQETSGEYNIQAWTGFNFPGRGTTYSNWKWQWFHFDGTDWDQSRSLSRIFKFDGKAWDWEVSSENGNYDYLMYADYDYDHPDVVNEMKKWGVWYANEVGLDGYRLDAVKHIKFQFLKDWVDNARAATGKEMFTVGEYWQNDLGALNNYLAKVNYNQSLFDAPLHYNFYAASTGGGYYDMRNILNNTLVASNPTKAVTLVENHDTQPGQSLESTVQPWFKPLAYAFILTRSGGFPSVFYGDMYGTKGTTTREIPALKSKIEPLLKARKDYAYGTQRDYIDNPDVIGWTREGDSTKAKSGLATVITDGPGGSKRMYVGTSNAGEIWYDLTGNRTDKITIGSDGYATFPVNGGSVSVWVQQ

SEQ ID NO: 38196 - protein, 480 aa, Cytophaga sp.
NGTMMQYFEWYVPNDGQQWNRLRTDAPYLSSVGITAVWTPPAYKGTSQADVGYGPYDLYDLGEFNQKGTVRTKYGTKGELKSAVNTLHANGIQVYGDVVMNHKAGADYTENVTAVEVNPSNRYQETSGEYNIQAWTGFNFPGRGTTYSNWKWQWFHFDGTDWDQSRSLSRIFKFDGKAWDWEVSSENGNYDYLMYADYDYDHPDVVNEMKKWGVWYANEVGLDGYRLDAVKHIKFQFLKDWVDNARAATGKEMFTVGEYWQNDLGALNNYLAKVNYNQSLFDAPLHYNFYAASTGGGYYDMRNILNNTLVASNPTKAVTLVENHDTQPGQSLESTVQPWFKPLAYAFILTRSGGYPSVFYGDMYGTKGTTTREIPALKSKIEPLLKARKDYAYGTQRDYIDNPDVIGWTREGDSTKAKSGLATVITDGPGGSKRMYVGTSNAGEIWYDLTGNRTDKITIGSDGYATFPVNGGSVSVWVQQ

SEQ ID NO: 38197 - protein, 480 aa, Cytophaga sp.
NGTMMQYFEWYVPNDGQQWNRLRTDAPYLSSVGITAVWTPPAYKGTSQADVGYGPYDLYDLGEFNQKGTVRTKYGTKGELKSAVNTLHSNGIQVYGDVVMNHKAGADYTENVTAVEVNPSNRYQETSGEYNIQAWTGFNFPGRGTTYSNWKWQWFHFDGTDWDQSRSLSRIFKFDGKAWDWEVSSENGNYDYLMYADYDYDHPDVVNEMKKWGVWYANEVGLDGYRLDAVKHIKFQFLKDWVDNARAATGKEMFTVGEYWQNDLGALNNYLAKVNYNQSLFDAPLHYNFYAASTGGGYYDMRNILNNTLVASNPTKAVTLVENHDTQPGQSLESTVQPWFKPLAYAFILTRSGGYPSVFYGDMYGTKGTTTREIPALKSKIEPLLKARKDYAYGTQRDYIDNPDVIGWTREGDSTKAKSGLATVITDGPGGSKRMYVGTSNAGEIWYDLTGNRTDKITIGSDGYATFPVNGWSVSVWVQQ

SEQ ID NO: 38198 - protein, 480 aa, Cytophaga sp.
NGTMMQYFEWYVPNDGQQWNRLRTDAPYLSSVGITLVWTPPAYKGTSQADVGYGPYDLYDLGEFNQKGTVRTKYGTKGELKSAVNTLHSNGIQVYGDVVMNHKAGADYTENVTAVEVNPSNRYQETSGEYNIQAWTGFNFPGRGTTYSNWKWQWFHFDGTDWDQSRSLSRIFKFDGKAWDWEVSSENGNYDYLMYADYDYDHPDVVNEMKKWGVWYANEVGLDGYRLDAVKHIKFQFLKDWVDNARAATGKEMFTVGEYWQNDLGALNNYLAKVNYNQSLFDAPLHYNFYAASTGGGYYDMRNILNNTLVASNPTKAVTLVENHDTQPGQSLESTVQPWFKPLAYAFILTRSGGYPSVFYGDMYGTKGTTTREIPALKSKIEPLLKARKDYAYGTQRDYIDNPDVIGWTREGDSTKAKSGLATVITDGPGGSKRMYVGTSNAGEIWYDLTGNRTDKITIGSDGYATFPVNGGSVSVWVQQ

SEQ ID NO: 38199 - protein, 480 aa, Cytophaga sp.
NGTMMQYFEWYVPNDGQQWNRLRTDAPYLSSVGITAVWTPPAYKGTSQADVGYGPYDLYDLGEFNQKGTVRTKYGTKGELKSAVNTLHSNGIQVYGDVVMNHKAGADYTENVTAVEVNPSNRYQETSGEYNIQAWTGFNFPGRGTTYSNWKWQWFHFDGTDWDQSRSLSRIFKFDGKAWDWEVSSENGNYDYLMYADYDYDHPDVVNEMKKWGVWYANEVGLDGYRLDAVKHIKFQFLKDWVDNARAATGKEMFTVGEYWQNDLGALNNYLAKVNYNQSLFDAPLHYNFYAASTGGGYYDMRNILNNTLVASNPTKAVTLVENHDTQPGQSLESTVQPWFKPLAYAFILTRSGGYPSVFYGDMYGTKGTTTREIPALKSKIEPLLKARKDYAYGTQRDYIDNPDVIGWTREGDSTKAKSGVATVITDGPGGSKRMYVGTSNAGEIWYDLTGNRTDKITIGSDGYATFPVNGGSVSVWVQQ

SEQ ID NO: 38200 - protein, 480 aa, Cytophaga sp.
NGTMMQYFEWYVPNDGQQWNRLRTDAPYLSSVGITAVWTPPAYKGTSQADVGYGPYDLYDLGEFNQKGTVRTKYGTKGELKSAVNTLHSNGIQVYGDVVMNHKAGADYHENVTAVEVNPSNRYQETSGEYNIQAWTGFNFPGRGTTYSNWKWQWFHFDGTDWDQSRSLSRIFKFDGKAWDWEVSSENGNYDYLMYADYDYDHPDVVNEMKKWGVWYANEVGLDGYRLDAVKHIKFQFLKDWVDNARAATGKEMFTVGEYWQNDLGALNNYLAKVNYNQSLFDAPLHYNFYAASTGGGYYDMRNILNNTLVASNPTKAVTLVENHDTQPGQSLESTVQPWFKPLAYAFILTRSGGYPSVFYGDMYGTKGTTTREIPALKSKIEPLLKARKDYAYGTQRDYIDNPDVIGWTREGDSTKAKSGLATVITDGPGGSKRMYVGTSNAGEIWYDLTGNRTDKITIGSDGYATFPVNGGSVSVWVQQ

SEQ ID NO: 38201 - protein, 480 aa, Cytophaga sp.
NGTMMQYFEWYVPNDGQQWNRLRTDAPYLSSVGITAVWTPPAYKGTSQADVGYGPYDLYDLGEFNQKGTVRTKYGTKGELKSAVNTLHSNGIQVYGDVVMNHKAGADYTENVTAVEVNPSNRYQETSGEYNIQAWTGFNFPGRGTTYSNWKWQWFHFDGTDWDQSRSLSRIFKFDGKAWDWEVSSENRNYDYLMYADYDYDHPDVVNEMKKWGVWYANEVGLDGYRLDAVKHIKFQFLKDWVDNARAATGKEMFTVGEYWQNDLGALNNYLAKVNYNQSLFDAPLHYNFYAASTGGGYYDMRNILNNTLVASNPTKAVTLVENHDTQPGQSLESTVQPWFKPLAYAFILTRSGGYPSVFYGDMYGTKGTTTREIPALKSKIEPLLKARKDYAYGTQRDYIDNPDVIGWTREGDSTKAKSGLATVITDGPGGSKRMYVGTSNAGEIWYDLTGNRTDKITIGSDGYATFPVNGGSVSVWVQQ

SEQ ID NO: 38202 - protein, 480 aa, Cytophaga sp.
NGTMMQYFEWYVPNDGQQWNRLRTDAPYLSSVGITAVWTPPAYKGTSQADVGYGPYDLYDLGEFNQKGTVRTKYGTKGELKSAVNTLHSNGIQVYGDVVMNHKAGADYTENVTAVEVNPSNRYQETSGEYNIQAWTGFNFPGRGTTYSNWKWQWFHFDGTDWDQSRSLSRIFKFDGKAWDWEVSSENGNYDYLMYADYDYDHPDVVNEMEKWGVWYANEVGLDGYRLDAVKHIKFQFLKDWVDNARAATGKEMFTVGEYWQNDLGALNNYLAKVNYNQSLFDAPLHYNFYAASTGGGYYDMRNILNNTLVASNPTKAVTLVENHDTQPGQSLESTVQPWFKPLAYAFILTRSGGYPSVFYGDMYGTKGTTTREIPALKSKIEPLLKARKDYAYGTQRDYIDNPDVIGWTREGDSTKAKSGLATVITDGPGGSKRMYVGTSNAGEIWYDLTGNRTDKITIGSDGYATFPVNGGSVSVWVQQ

SEQ ID NO: 38203 - protein, 480 aa, Cytophaga sp.
NGTMMQYFEWYVPNDGQQWNRLRTDAPYLSSVGITAVWTPPAYKGTSQADVGYGPYDLYDLGEFNQKGTVRTKYGTKGELKSAVNTLHSNGIQVYGDVVMNHKAGADYTENVTAVEVNPSNRYQETSGEYNIQAWTGFNFPGRGTTYSNWKWQWFHFDGTDWDQSRSLSRIFKFDGKAWDWEVSQENGNYDYLMYADYDYDHPDVVNEMKKWGVWYANEVGLDGYRLDAVKHIKFQFLKDWVDNARAATGKEMFTVGEYWQNDLGALNNYLAKVNYNQSLFDAPLHYNFYAASTGGGYYDMRNILNNTLVASNPTKAVTLVENHDTQPGQSLESTVQPWFKPLAYAFILTRSGGYPSVFYGDMYGTKGTTTREIPALKSKIEPLLKARKDYAYGTQRDYIDNPDVIGWTREGDSTKAKSGLATVITDGPGGSKRMYVGTSNAGEIWYDLTGNRTDKITIGSDGYATFPVNGGSVSVWVQQ

SEQ ID NO: 38204 - protein, 480 aa, Cytophaga sp.
NGTMMQYFEWYVPNDGQQWNRLRTDAPYLSSVGITAVWTPPAYKGTSQADVGYGPYDLYDLGEFNQKGTVRTKYGTKGELKSAVNTLHSNGIQVYGDVVMNHKAGADYTENVTAVEVNPSNRYQETSGEYNIQAWTGFNFPGRGTTYSNWKWQWFHFDGTDWDQSRSLSRIFKFDGKAWDWEVSSENGNYDYLMYADYDYDHPDVVNEMKKWGVWYANEVGLDGYRLDAVKHIKFQFLKDWVDNARAATGKEMFTVGEYWQNDLGALNNYLAKVNYNQSLFDAPLHYNFYAASTGGGYYDMRNILNNTLVASNPTKAVTLVENHDTQPGQSLESTVQPWFKPLAYAFILTRSGGYPSVFYGDMYGTKGTTTREIPALKSKIEPLLKARKDYAYGTQRDYIDNPDVIGWTREGDRTKAKSGLATVITDGPGGSKRMYVGTSNAGEIWYDLTGNRTDKITIGSDGYATFPVNGGSVSVWVQQ

SEQ ID NO: 38205 - protein, 480 aa, Cytophaga sp.
NGTMMQYFEWYVPNDGQQWNRLRTDAPYLSSVGITAVWTPPAYKGTSQADVGYGPYDLYDLGEFNQKGTVRTKYGTKGELKSAVNTLHSNGIQVYGDVVMNHKAGADYTENVTAVEVNPSNRYQETSGEYNIQAWTGFNFPGRGTTYSNWKWQWFHFDGTDWDQSRSLSRIFKFDGKAWDWEVSSENGNYDYLMYADYDYDHPDVVNEMKKWGVWYAREVGLDGYRLDAVKHIKFQFLKDWVDNARAATGKEMFTVGEYWQNDLGALNNYLAKVNYNQSLFDAPLHYNFYAASTGGGYYDMRNILNNTLVASNPTKAVTLVENHDTQPGQSLESTVQPWFKPLAYAFILTRSGGYPSVFYGDMYGTKGTTTREIPALKSKIEPLLKARKDYAYGTQRDYIDNPDVIGWTREGDSTKAKSGLATVITDGPGGSKRMYVGTSNAGEIWYDLTGNRTDKITIGSDGYATFPVNGGSVSVWVQQ

SEQ ID NO: 38206 - protein, 480 aa, Cytophaga sp.
NGTMMQYFEWYVPNDGQQWNRLRTDAPYLSSVGITAVWTPPAYKGTSQADVGYGPYDLYDLGEFNQKGTVRTKYGTKGELKSAVNTLHSNGILVYGDVVMNHKAGADYTENVTAVEVNPSNRYQETSGEYNIQAWTGFNFPGRGTTYSNWKWQWFHFDGTDWDQSRSLSRIFKFDGKAWDWEVSSENGNYDYLMYADYDYDHPDVVNEMKKWGVWYANEVGLDGYRLDAVKHIKFQFLKDWVDNARAATGKEMFTVGEYWQNDLGALNNYLAKVNYNQSLFDAPLHYNFYAASTGGGYYDMRNILNNTLVASNPTKAVTLVENHDTQPGQSLESTVQPWFKPLAYAFILTRSGGYPSVFYGDMYGTKGTTTREIPALKSKIEPLLKARKDYAYGTQRDYIDNPDVIGWTREGDSTKAKSGLATVITDGPGGSKRMYVGTSNAGEIWYDLTGNRTDKITIGSDGYATFPVNGGSVSVWVQQ

SEQ ID NO: 38207 - protein, 480 aa, Cytophaga sp.
NGTMMQYFEWYVPNDGQQWNRLRTDAPYLSSVGITAVWTPPAYKGTSQADVGYGPYDLYDLGEFNQKGTVRTKYGTKGELKSAVNTLHSNGIQVYGDVVMNHKAGADYTENVTAVEVNPSNRYQETSGEYNIQAWTGFNFPGRGTTYSNWKWQWFHFDGTDWDQSRSLSRIFKFDNKAWDWEVSSENGNYDYLMYADYDYDHPDVVNEMKKWGVWYANEVGLDGYRLDAVKHIKFQFLKDWVDNARAATGKEMFTVGEYWQNDLGALNNYLAKVNYNQSLFDAPLHYNFYAASTGGGYYDMRNILNNTLVASNPTKAVTLVENHDTQPGQSLESTVQPWFKPLAYAFILTRSGGYPSVFYGDMYGTKGTTTREIPALKSKIEPLLKARKDYAYGTQRDYIDNPDVIGWTREGDSTKAKSGLATVITDGPGGSKRMYVGTSNAGEIWYDLTGNRTDKITIGSDGYATFPVNGGSVSVWVQQ

SEQ ID NO: 38208 - protein, 480 aa, Cytophaga sp.
NGTMMQYFEWYVPNDGQQWNRLRTDAPYLSSVGITAVWTPPAYKGTSQADVGYGPYDLYDLGEFNQKGTVRTKYGTKGELKSAVNTLHSNGIQVYGDVVMNHKAGADYTENVTAVEVNPSNRYQETSGEYNIQAWTGFNFPGRGTTYSNWKWQWFHFDGTDWDQSRSLSRIFKFDGKAWDWEVSSENGNYDYLMYADYDYDHPDVVNEMKKWGVWYANEVGLDGYRLDAVKHIKFQFLKDWVDNARAATGKEMFTVGEYWQNDLGALNNYLAKVNYNQSLFDAPLHYNFYAASTGGGYYDMRNILNNTLVASNPTKAVTLVENHDTQPGQSLASTVQPWFKPLAYAFILTRSGGYPSVFYGDMYGTKGTTTREIPALKSKIEPLLKARKDYAYGTQRDYIDNPDVIGWTREGDSTKAKSGLATVITDGPGGSKRMYVGTSNAGEIWYDLTGNRTDKITIGSDGYATFPVNGGSVSVWVQQ

SEQ ID NO: 38209 - protein, 480 aa, Cytophaga sp.
NGTMMQYFEWYVPNDGQQWNRLRTDAPYLSSVGITAVWTPPAYKGTSQADVGYGPYDLYDLGEFNQKGTVRTKYGTKGELKSAVNTLHSNGIQVYGDVVMNHKAGADYTENVTAVEVNPSNRYQETSGEYNIQAWTGFNFPGRGTTYSNWKWQWFHFDGTDWDQSRSLSRIFKFDGKAWDWEVSSENGNYDYLMYADYDYDHPDVVNEMKKWGVWYANEVGLDGYRLDAVKHIKFQFLKDWVDNARAATGKEMFTVGEYWQNDLGALNNYLAKVNYNQSLFDAPLHYNFYAASTGGGYYDMRNILNNTLVASNPTKAVTLVENHDTQPGQSLESTVQPWFKPLAYAFILTRSGGYPSVFYGDMYGTKGTTTREIPALKSKIEPLLKARKDYAYGTQRDYIDNPDVIGWAREGDSTKAKSGLATVITDGPGGSKRMYVGTSNAGEIWYDLTGNRTDKITIGSDGYATFPVNGGSVSVWVQQ

SEQ ID NO: 38210 - protein, 480 aa, Cytophaga sp.
NGTMMQYFEWYVPNDGQQWNRLRTDAPYLSSVGITAVWTPPAYKGTSQADVGYGPYDLYDLGEFNQKGTVRTKYGTKGELKSAVNTLHSNGIQVYGDVVMNHKAGADYTENVTAVEVNPSNRYQETSGEYNIQAWTGFNFPGRGTTYSNWKWQWFHFDGTDWDQSRSLSRIFKFDGKAWDWEVSSENGNYDYLMYADYDYDHVDVVNEMKKWGVWYANEVGLDGYRLDAVKHIKFQFLKDWVDNARAATGKEMFTVGEYWQNDLGALNNYLAKVNYNQSLFDAPLHYNFYAASTGGGYYDMRNILNNTLVASNPTKAVTLVENHDTQPGQSLESTVQPWFKPLAYAFILTRSGGYPSVFYGDMYGTKGTTTREIPALKSKIEPLLKARKDYAYGTQRDYIDNPDVIGWTREGDSTKAKSGLATVITDGPGGSKRMYVGTSNAGEIWYDLTGNRTDKITIGSDGYATFPVNGGSVSVWVQQ

SEQ ID NO: 38211 - protein, 480 aa, Cytophaga sp.
NGTMMQYFEWYVPNDGQQWNRLRTDAPYLSSVGITAVWTPPAYKGTSQADVGYGPYDLYDLGEFNQKGTVRTKYGTKGELKSAVNTLHSNGIQVYGDVVMNHKAGADYTENVTAVEVNPSNRYQETSGEYNIQAWTGFNFPGRGTTYSNWKWQWFHFDGTDWDQSRSLSRIFKFDGKAWDWEVSSENGNYDYLMYADYDYDHPDVVNEMKKWGVWYANEVGLDGYRLDAVKHIKFQFLKDWVDNARAATGKEMFTVGEYWQNDLGALNNYLAKVNYNQSLFDAPLHYNFYAASTGGGYYDMRNILNNTLVASNPTKAVTLVENHDTQPGQSLESTVQPWFKPAAYAFILTRSGGYPSVFYGDMYGTKGTTTREIPALKSKIEPLLKARKDYAYGTQRDYIDNPDVIGWTREGDSTKAKSGLATVITDGPGGSKRMYVGTSNAGEIWYDLTGNRTDKITIGSDGYATFPVNGGSVSVWVQQ

SEQ ID NO: 38212 - protein, 480 aa, Cytophaga sp.
NGTMMQYFEWYVPNDGQQWNRLRTAAPYLSSVGITAVWTPPAYKGTSQADVGYGPYDLYDLGEFNQKGTVRTKYGTKGELKSAVNTLHSNGIQVYGDVVMNHKAGADYTENVTAVEVNPSNRYQETSGEYNIQAWTGFNFPGRGTTYSNWKWQWFHFDGTDWDQSRSLSRIFKFDGKAWDWEVSSENGNYDYLMYADYDYDHPDVVNEMKKWGVWYANEVGLDGYRLDAVKHIKFQFLKDWVDNARAATGKEMFTVGEYWQNDLGALNNYLAKVNYNQSLFDAPLHYNFYAASTGGGYYDMRNILNNTLVASNPTKAVTLVENHDTQPGQSLESTVQPWFKPLAYAFILTRSGGYPSVFYGDMYGTKGTTTREIPALKSKIEPLLKARKDYAYGTQRDYIDNPDVIGWTREGDSTKAKSGLATVITDGPGGSKRMYVGTSNAGEIWYDLTGNRTDKITIGSDGYATFPVNGGSVSVWVQQ

SEQ ID NO: 38213 - protein, 480 aa, Cytophaga sp.
NGTMMQYFEWYVPNDGQQWNRLRTDAPYLSSVGITAVWTPPAYKGTSQADVGYGPYDLYDLGEFNQKGTVRTKYGTKGELKSAVNTLHSNGIQVYGDVVMNHKAGADYTENVTAVEVNPSNRYQETSGEYNIQAWTGFNFPGRGTTYSNWKWQWFHFDGTDWDQSRSLSRIFKFDGKAWDWEVSSENFNYDYLMYADYDYDHPDVVNEMKKWGVWYANEVGLDGYRLDAVKHIKFQFLKDWVDNARAATGKEMFTVGEYWQNDLGALNNYLAKVNYNQSLFDAPLHYNFYAASTGGGYYDMRNILNNTLVASNPTKAVTLVENHDTQPGQSLESTVQPWFKPLAYAFILTRSGGYPSVFYGDMYGTKGTTTREIPALKSKIEPLLKARKDYAYGTQRDYIDNPDVIGWTREGDSTKAKSGLATVITDGPGGSKRMYVGTSNAGEIWYDLTGNRTDKITIGSDGYATFPVNGGSVSVWVQQ

SEQ ID NO: 38214 - protein, 480 aa, Cytophaga sp.
NGTMMQYFEWYVPNDGQQWNRLRTDAPYLSSVGITAVWTPPAYKGTSQADVGYGPYDLYDLGEFNQKGTVRTKYGTKGELKSAVNTLHSNGIQVYGDVVMNHKAGADYTENVTAVEVNPSNRYQETSGEYNIQAWTGFNFPGRGTTYSNWKWQWFHFDGTDWDQSRSLSRIFKFDGKAWDWTVSSENGNYDYLMYADYDYDHPDVVNEMKKWGVWYANEVGLDGYRLDAVKHIKFQFLKDWVDNARAATGKEMFTVGEYWQNDLGALNNYLAKVNYNQSLFDAPLHYNFYAASTGGGYYDMRNILNNTLVASNPTKAVTLVENHDTQPGQSLESTVQPWFKPLAYAFILTRSGGYPSVFYGDMYGTKGTTTREIPALKSKIEPLLKARKDYAYGTQRDYIDNPDVIGWTREGDSTKAKSGLATVITDGPGGSKRMYVGTSNAGEIWYDLTGNRTDKITIGSDGYATFPVNGGSVSVWVQQ

SEQ ID NO: 38215 - protein, 480 aa, Cytophaga sp.
NGTMMQYFEWYVPNDGQQWNRLRTDAPYLSSVGITAVWTPPAYKGTSQADVGYGPYDLYDLGEFNQKGTVRTKYGTKGELKSAVNTLHSNGIQVYGDVVMNHKAGADYTENVTAVEVNPSNRYQETSGEYNIQAWTGFNFPGRGTTHSNWKWQWFHFDGTDWDQSRSNSRIFKFTGKAWDWEVSSENGNYDYLMYADYDYDHPDVVNEMKKWGVWYANEVGLDGYRLDAVKHIKFQFLKDWVDNARAATGKEMFTVGEYWQNDLGALNNYLAKVNYNQSLFDAPLHYNFYAASTGGGYYDMRNILNNTLVASNPTKAVTLVENHDTQPGQSLESTVQPWFKPLAYAFILTRSGGYPSVFYGDMYGTKGTTTREIPALKSKIEPLLKARKDYAYGTQRDYIDNPDVIGWTREGDSTKAKSGLATVITDGPGGSKRMYVGTSNAGEIWYDLTGNRTDKITIGSDGYATFPVNGGSVSVWVQQ

SEQ ID NO: 38216 - protein, 480 aa, Cytophaga sp.
NGTMMQYFEWYVPNDGQQWNRLRTDAPYLSSVGITAVWTPPAYKGTSQADVGYGPYDLYDLGEFNQKGTVRTKYGTKGELKSAVNTLHSNGIQVYGDVVMNHKAGADYTENVTAVEVNPSNRYQETSGEYNIQAWTGFNFPGRGTTYSNWKWQWFHFDGTDWDQSRSLSRIFKFDGKAWDWEVSSENGNYDYLMYADYDYDHPDVVNEMKKWGVWYANEVGLDGYRLDAVKHIKFQFLKDWVDNARAATGKEMFTVGEYWYNDLGALNNYLAKVNYNQSLFDAPLHYNFYAASTGGGYYDMRNILNNTLVASNPTKAVTLVENHDTQPGQSLESTVQPWFKPLAYAFILTRSGGYPSVFYGDMYGTKGTTTREIPALKSKIEPLLKARKDYAYGTQRDYIDNPDVIGWTREGDSTKAKSGLATVITDGPGGSKRMYVGTSNAGEIWYDLTGNRTDKITIGSDGYATFPVNGGSVSVWVQQ

SEQ ID NO: 38217 - protein, 480 aa, Cytophaga sp.
NGTMMQYFEWYVPNDGQQWNRLRTDAPYLSSVGITAVWTPPAYKGTSQADVGYGPYDLYDLGEFNQKGTVRTKYGTKGELKSAVNTLHSNGIQVYGDVVMNHKAGADYTENVTAVEVNPSNRYQETSGEYNIQAWTGFNFPGRGTTYSNWKWQWFHFDGTDWDQSRSLSRIFKFDGKAWDWEVSSENGNYDYLMYADYDYDHPDVVNEMKKWGVWYANEVGLDGYRLDAVKHIKFQFLKDWVDNARAATGKEMFTVGEYWQNDLMALNNYLAKVNYNQSLFDAPLHYNFYAASTGGGYYDMRNILNNTLVASNPTKAVTLVENHDTQPGQSLESTVQPWFKPLAYAFILTRSGGYPSVFYGDMYGTKGTTTREIPALKSKIEPLLKARKDYAYGTQRDYIDNPDVIGWTREGDSTKAKSGLATVITDGPGGSKRMYVGTSNAGEIWYDLTGNRTDKITIGSDGYATFPVNGGSVSVWVQQ

SEQ ID NO: 38218 - protein, 480 aa, Cytophaga sp.
NGTMMQYFEWYVPNDGQQWNRLRTDAPYLSSVGITAVWTPPAYKGTSQADVGYGPYDLYDLGEFNQKGTVRTKYGTKGELKSAVNTLHSNGIQVYGDVVMNHKAGADYTENVTAVEVNPSNRYQETSGEYNIQAWTGFNFPGRGTTYSNWDWQWFHFDGTDWDQSRSLSRIFKFDGKAWDWEVSSENGNYDYLMYADYDYDHPDVVNEMKKWGVWYANEVGLDGYRLDAVKHIKFQFLKDWVDNARAATGKEMFTVGEYWQNDLGALNNYLAKVNYNQSLFDAPLHYNFYAASTGGGYYDMRNILNNTLVASNPTKAVTLVENHDTQPGQSLESTVQPWFKPLAYAFILTRSGGYPSVFYGDMYGTKGTTTREIPALKSKIEPLLKARKDYAYGTQRDYIDNPDVIGWTREGDSTKAKSGLATVITDGPGGSKRMYVGTSNAGEIWYDLTGNRTDKITIGSDGYATFPVNGGSVSVWVQQ

SEQ ID NO: 38219 - protein, 480 aa, Cytophaga sp.
NGTMMQYFEWYVPNDGQQWNRLRTDAPYLSSVGITAVWTPPAYKGTSQADVGYGPYDLYDLGEFNQKGTVRTKYGTKGELKSAVNTLHSNGIQVYGDVVMNHKAGADYTENVTAVEVNPSNRYQETSGEYNIQAWTGFNFPGRGTTYSNWKWQWFHFDGTDWDQSRSLSRIFKFDGKAWDWEVSSENGNYDYLMYADYDYDHPDVVNEMKKWGVWYANEVGLDGYRLDAVKHIKFQFLKDWVDNARAATGKEMFTVGEYWQNDLGALNNYLAKVNYNQSLFDAPLHYNFYAASTGGGYYDMRNILNNTLVASNPTKAVTLVENHDTQPGQSLESTVQPWFKPLAYAFILTRSGGYPSVFYGDMYGTKGTTTREIPALKSKIEPLLKARKDYAYGTQRDYIDNPDVIGWTREGDSTKAKSGLATVITDGPGGSKRMYVGTSNAGEIWYDLTGNRTDKITINSDGYATFPVNGGSVSVWVQQ

SEQ ID NO: 38220 - protein, 480 aa, Cytophaga sp.
NGTMMQYFEWYVPNDGQQWNRLRTDAPYLSSVGITAVWTPPAYKGTSQADVGYGPYDLYDLGEFNQKGTVRTKYGTKGELKSAVNTLHSNGIQVYGDVVMNHKAGADYTENVTAVEVNPSNRYQETSGEYNIQAWTGFNFPGRGTTYSNWKWQWFHFDGTDWDQSRSLSRIFKFDGKAWDWEVSSENGNYDYLMYADYDYDHPDVVNEMKKWGVWYANEVGLDGYRLDAVKHIKFQFLKDWVDNARAATGKEMFTVGEYWQNDLGALNNYLAKVNYNQSLFDAPLHYNFYAASTGGGYYDMTNILNNTLVASNPTKAVTLVENHDTQPGQSLESTVQPWFKPLAYAFILTRSGGYPSVFYGDMYGTKGTTTREIPALKSKIEPLLKARKDYAYGTQRDYIDNPDVIGWTREGDSTKAKSGLATVITDGPGGSKRMYVGTSNAGEIWYDLTGNRTDKITIGSDGYATFPVNGGSVSVWVQQ

SEQ ID NO: 38221 - protein, 480 aa, Cytophaga sp.
NGTMMQYFEWYVPNDGQQWNRLRTDAPYLSSVGITAVWTPPAYKGTSQADVGYGPYDLYDLGEFNQKGTVRTKYGTKGELKSAVNTLHSNGIQVYGDVVMNHKAGADYTENVTAVEVNPSNRYQETSGEYNIQAWTGFNFPGRGTTYSNWKWQWFHFDGTDWDQSRSLSRIFKFDGKAWDWEVSSENGNYDYLMYADYDYDHPDVVNEMKKWGVWYANEVGLDGYRLDAVKHIKFQFLKDWVDNARAATGKEMFTVGEYWQNDLGALNNYLAKVNYNQSLFDAPLHYNFYAASTGGGYYDMRNILNNTLVASNPTKAVTLVENHDTQPGQSLESTVQPWFKPLAYAFILTRSGGYPSVFYGDMYGTKGTTTREIPALKSKIEPLLKARKDYAYGTQRDYIDNPDVIGWTREGDSTKAKSGLATVITDGPGGSKRMYVGTSNAGEIWYDLTGNRTDKITTGSDGYATFPVNGGSVSVWVQQ

SEQ ID NO: 38222 - protein, 480 aa, Cytophaga sp.
NGTMMQYFEWYVPNDGQQWNRLRTDAPYLSSVGITAVWTPPAYKGTSQADVGYGPYDLYDLGEFNQKGTVRTKYGTKGELKSAVNTLHSNGIQVYGDVVMNHKAGADYTENVTAVEVNPSNRYQETSGEYNIQAWTGFNFPGRGTTYSNWKWQWFHFDGTDWDQSRSLSRIFKFDGKAWDWEVSSENGNYDYLMYADYDYDHPDVVNEMMKWGVWYANEVGLDGYRLDAVKHIKFQFLKDWVDNARAATGKEMFTVGEYWQNDLGALNNYLAKVNYNQSLFDAPLHYNFYAASTGGGYYDMRNILNNTLVASNPTKAVTLVENHDTQPGQSLESTVQPWFKPLAYAFILTRSGGYPSVFYGDMYGTKGTTTREIPALKSKIEPLLKARKDYAYGTQRDYIDNPDVIGWTREGDSTKAKSGLATVITDGPGGSKRMYVGTSNAGEIWYDLTGNRTDKITIGSDGYATFPVNGGSVSVWVQQ

SEQ ID NO: 38223 - protein, 480 aa, Cytophaga sp.
NGTMMQYFEWYVPNDGQQWNRLRTDAPYLSSVGITAVWTPPAYKGTSQADVGYGPYDLYDLGEFNQKGTVRTKYGTKGELKSAVNTLHSNGIQVYGDVVMNHKAGADYTENVTAVEVNPSNRYQETSGEYNIQAWTGFNFPGRGTTYSNWKWQWFHFDGTDWDQSRSLSRIFKFDGKAWDWEVSSENGNYDYLMYADYDYDHPDVVNEMKKWGVWYANEVGLDGYRLDAVKHIKFQFLKDWVDNARAATGKEMFTVGEYWQNDLGALNNYLAKVNYNQSLFDAPLHYNFYAASTGGGYYDMRNILNNTLVASNPTKAVTLVENHDTQPGQSLGSTVQPWFKPLAYAFILTRSGGYPSVFYGDMYGTKGTTTREIPALKSKIEPLLKARKDYAYGTQRDYIDNPDVIGWTREGDSTKAKSGLATVITDGPGGSKRMYVGTSNAGEIWYDLTGNRTDKITIGSDGYATFPVNGGSVSVWVQQ

SEQ ID NO: 38224 - protein, 480 aa, Cytophaga sp.
NGTMMQYFEWYVPNDGQQWNRLRTDAPYLSSVGITAVWTPPAYKGTSQADVGYGPYDLYDLGEFNQKGTVRTKYGTKGELKSAVNTLHSNGIQVYGDVVMNHKAGADYTENVTAVEVNPSNRYQETSGEYNIQAWTGFNFPGRGTTYSNWKWQWFHFDGTDWDQSRSLSRIFKFDGKAWDWEVSSENGNYDYLMYADYDYDHPDVVNEMKKWGVWYANEVGLDGYRLDAVKHIKFQFLKDWVDNARAATGKEMFTVGEYWQNDLGALNNYLAKVNYNQSLFDAPLHYNFYAASTGGGYYDMRNILNNTLVASNPTKAVTLVENHDTQPGQSLESTVQPWFKPLAYAFILTRSGGYPSVFYGDMYGTKGTTTREIPALKSKIEPLLKARKDYAYGTQRDYIDNPDVIGWTREGDCTKAKSGLATVITDGPGGSKRMYVGTSNAGEIWYDLTGNRTDKITIGSDGYATFPVNGGSVSVWVQQ

SEQ ID NO: 38225 - protein, 480 aa, Cytophaga sp.
NGTMMQYFEWYVPNDGQQWNRLRTDAPYLSSVGITAVWTPPAYKGTSQADVGYGPYDLYDLGEFNQKGTVRTKYGTKGELKSAVNTLHSNGIQVYGDVVMNHKAGADYTENVTAVEVNPSNRYNETSGEYNIQAWTGFNFPGRGTTYSNWKWQWFHFDGTDWDQSRSLSRIFKFDGKAWDWEVSSENGNYDYLMYADYDYDHPDVVNEMKKWGVWYANEVGLDGYRLDAVKHIKFQFLKDWVDNARAATGKEMFTVGEYWQNDLGALNNYLAKVNYNQSLFDAPLHYNFYAASTGGGYYDMRNILNNTLVASNPTKAVTLVENHDTQPGQSLESTVQPWFKPLAYAFILTRSGGYPSVFYGDMYGTKGTTTREIPALKSKIEPLLKARKDYAYGTQRDYIDNPDVIGWTREGDSTKAKSGLATVITDGPGGSKRMYVGTSNAGEIWYDLTGNRTDKITIGSDGYATFPVNGGSVSVWVQQ

SEQ ID NO: 38226 - protein, 480 aa, Cytophaga sp.
NGTMMQYFEWYVPNDGQQWNRLRTDAPYLSSVGITAVWTPPAYKGTSSADVGYGPYDLYDLGEFNQKGTVRTKYGTKGELKSAVNTLHSNGIQVYGDVVMNHKAGADYTENVTAVEVNPSNRYQETSGEYNIQAWTGFNFPGRGTTYSNWKWQWFHFDGTDWDQSRSLSRIFKFDGKAWDWEVSSENGNYDYLMYADYDYDHPDVVNEMKKWGVWYANEVGLDGYRLDAVKHIKFQFLKDWVDNARAATGKEMFTVGEYWQNDLGALNNYLAKVNYNQSLFDAPLHYNFYAASTGGGYYDMRNILNNTLVASNPTKAVTLVENHDTQPGQSLESTVQPWFKPLAYAFILTRSGGYPSVFYGDMYGTKGTTTREIPALKSKIEPLLKARKDYAYGTQRDYIDNPDVIGWTREGDSTKAKSGLATVITDGPGGSKRMYVGTSNAGEIWYDLTGNRTDKITIGSDGYATFPVNGGSVSVWVQQ

SEQ ID NO: 38227 - protein, 480 aa, Cytophaga sp.
NGTMMQYFEWYVPNDGQQWNRLRTDAPYLSSVGITAVWTPPAYKGTSQADVGYGPYDLYDLGEFNQKGTVRTKYGTKGELKSAVNTLHSNGIQVYGDVVMNHKAGADYTENVTAVEVNPSNRYQETSGEYNIQAFTGFNFPGRGTTYSNWKWQWFHFDGTDWDQSRSLSRIFKFDGKAWDWEVSSENGNYDYLMYADYDYDHPDVVNEMKKWGVWYANEVGLDGYRLDAVKHIKFQFLKDWVDNARAATGKEMFTVGEYWQNDLGALNNYLAKVNYNQSLFDAPLHYNFYAASTGGGYYDMRNILNNTLVASNPTKAVTLVENHDTQPGQSLESTVQPWFKPLAYAFILTRSGGYPSVFYGDMYGTKGTTTREIPALKSKIEPLLKARKDYAYGTQRDYIDNPDVIGWTREGDSTKAKSGLATVITDGPGGSKRMYVGTSNAGEIWYDLTGNRTDKITIGSDGYATFPVNGGSVSVWVQQ

SEQ ID NO: 38228 - protein, 480 aa, Cytophaga sp.
NGTMMQYFEWYVPNDGQQWNRLRTDAPYLSSVGITAVWTPPAYKGTSQADVGYGPYDLYDLGEFNQKGTVRTKYGTKGELKSAVNTLHSNGIQVYGDVVMNHKAGADYTENVTAVEVNPSNRYQETNGEYNIQAWTGFNFPGRGTTYSNWKWQWFHFDGTDWDQSRSLSRIFKFDGKAWDWEVSSENGNYDYLMYADYDYDHPDVVNEMKKWGVWYANEVGLDGYRLDAVKHIKFQFLKDWVDNARAATGKEMFTVGEYWQNDLGALNNYLAKVNYNQSLFDAPLHYNFYAASTGGGYYDMRNILNNTLVASNPTKAVTLVENHDTQPGQSLESTVQPWFKPLAYAFILTRSGGYPSVFYGDMYGTKGTTTREIPALKSKIEPLLKARKDYAYGTQRDYIDNPDVIGWTREGDSTKAKSGLATVITDGPGGSKRMYVGTSNAGEIWYDLTGNRTDKITIGSDGYATFPVNGGSVSVWVQQ

SEQ ID NO: 38229 - protein, 480 aa, Cytophaga sp.
NGTMMQYFEWYVPNDGQQWNRLRTDAPYLSSVGITAVWTPPAYKGTSQADVGYGPYDLYDLGEFNQKGTVRTKYGTKGELKSAVNTLHSNGIQVYGDVVMNHKAGADYTENVTAVEVNPSNRYQETSGEYNIQAWTGFNFPGRGTTYSNWKWQWFHFDGTDWDQSRSLSRIFKFDGKAWDWEVSSENGNYDYLMYADYDYDHPDVVNEMKKWGVWYANEVGLDGYRLDAVKHIKFQFLKDWVDNARAATGKEMFTVGEYWQNDLGALNNYLAKVNYNQSLFDAPLHYNFYAASTGGGYYDMRNILNNTLVASNPTKAVTLVENHDTQPGQSLESTVQPWFKPLAYAFILTRSGGYPSVFYGDMYGTKGTTTREIPALKSKIEPLLKARKDYAYGTQRDYIDNPDVIGWTREGDSTKAKQGLATVITDGPGGSKRMYVGTSNAGEIWYDLTGNRTDKITIGSDGYATFPVNGGSVSVWVQQ

SEQ ID NO: 38230 - protein, 480 aa, Cytophaga sp.
NGTMMQYFEWYVPNDGQQWNRLRTDAPYLSSVGITAVWTPPAYKGTRQADVGYGPYDLYDLGEFNQKGTVRTKYGTKGELKSAVNTLHSNGIQVYGDVVMNHKAGADYTENVTAVEVNPSNRYQETSGEYNIQAWTGFNFPGRGTTYSNWKWQWFHFDGTDWDQSRSLSRIFKFDGKAWDWEVSSENGNYDYLMYADYDYDHPDVVNEMKKWGVWYANEVGLDGYRLDAVKHIKFQFLKDWVDNARAATGKEMFTVGEYWQNDLGALNNYLAKVNYNQSLFDAPLHYNFYAASTGGGYYDMRNILNNTLVASNPTKAVTLVENHDTQPGQSLESTVQPWFKPLAYAFILTRSGGYPSVFYGDMYGTKGTTTREIPALKSKIEPLLKARKDYAYGTQRDYIDNPDVIGWTREGDSTKAKSGLATVITDGPGGSKRMYVGTSNAGEIWYDLTGNRTDKITIGSDGYATFPVNGGSVSVWVQQ

SEQ ID NO: 38231 - protein, 480 aa, Cytophaga sp.
NGTMMQYFEWYVPNDGQQWNRLRTDAPYLSSVGITAVWTPPAYKGTSQADVGYGPYDLYDLGEFNQKGTVRTKYGTKGELKSAVNTLHSNGIQVYGDVVMNHKAGADYTENVTAVEVNPSNRYQETSGEYNIQAWTGFNFPGRGTTYSNWKWQWFHFDGTDWDQSRSLSRIFKFDGKAWDWEVSSENGNYDYLMYADYDYDHPDVVNEMKKWGVWYANEVGLDGYRLDAVKHIKFQFLKDWVDNARAATGKEMFTVGEYWVNDLGALNNYLAKVNYNQSLFDAPLHYNFYAASTGGGYYDMRNILNNTLVASNPTKAVTLVENHDTQPGQSLESTVQPWFKPLAYAFILTRSGGYPSVFYGDMYGTKGTTTREIPALKSKIEPLLKARKDYAYGTQRDYIDNPDVIGWTREGDSTKAKSGLATVITDGPGGSKRMYVGTSNAGEIWYDLTGNRTDKITIGSDGYATFPVNGGSVSVWVQQ

SEQ ID NO: 38232 - protein, 480 aa, Cytophaga sp.
NGTMMQYFEWYVPNDGQQWNRLRTDAPYLSSVGITAVWTPPAYKGTSQADVGYGPYDLYDLGEFNQKGTVRTKYGTKGELKSAVNTLHSNGIQVYGDVVMNHKAGADYTENVTAVEVNPSNRYQETSGEYNIQAWTGFNFPGRGTHYSNWKWQWFHFDGTDWDQSRSLSRIFKFDGKAWDWEVSSENGNYDYLMYADYDYDHPDVVNEMKKWGVWYANEVGLDGYRLDAVKHIKFQFLKDWVDNARAATGKEMFTVGEYWQNDLGALNNYLAKVNYNQSLFDAPLHYNFYAASTGGGYYDMRNILNNTLVASNPTKAVTLVENHDTQPGQSLESTVQPWFKPLAYAFILTRSGGYPSVFYGDMYGTKGTTTREIPALKSKIEPLLKARKDYAYGTQRDYIDNPDVIGWTREGDSTKAKSGLATVITDGPGGSKRMYVGTSNAGEIWYDLTGNRTDKITIGSDGYATFPVNGGSVSVWVQQ

SEQ ID NO: 38233 - protein, 480 aa, Cytophaga sp.
NGTMMQYFEWYVPNDGQQWNRLRTDAPYLSSVGITAVWTPPAYKGTSQADVGYGPYDLYDLGEFNQKGTVRTKYGTKGELKSAVNTLHSNGIQVYGDVVMNHKAGADYTENVTAVEVNPSNRYQETSGEYNIQAWTGFNFYGRGTTYSNWKWQWFHFDGTDWDQSRSLSRIFKFDGKAWDWEVSSENGNYDYLMYADYDYDHPDVVNEMKKWGVWYANEVGLDGYRLDAVKHIKFQFLKDWVDNARAATGKEMFTVGEYWQNDLGALNNYLAKVNYNQSLFDAPLHYNFYAASTGGGYYDMRNILNNTLVASNPTKAVTLVENHDTQPGQSLESTVQPWFKPLAYAFILTRSGGYPSVFYGDMYGTKGTTTREIPALKSKIEPLLKARKDYAYGTQRDYIDNPDVIGWTREGDSTKAKSGLATVITDGPGGSKRMYVGTSNAGEIWYDLTGNRTDKITIGSDGYATFPVNGGSVSVWVQQ

SEQ ID NO: 38234 - protein, 480 aa, Cytophaga sp.
NGTMMQYFEWYVPNDGQQWNRLRTDAPYLSSVGITAVWTPPAYKGTSQADVGYGPYDLYDLGEFNQKGTVRTKYGTKGELKSAVNTLHSNGIQVYGDVVMNHKAGADYTENVTAVEVNPSNRYQETSGEYNIQAWTGFNFPGRGTTYSNWKWQWFHFDGTDWDQSRSLSRIFKFDGKAWDWEVSSENGNYDYLMYADYDYDHPDVVNEMKKWGVWYANEVGLDGYRLDAVKHIKFQFCKDWVDNARAATGKEMFTVGEYWQNDLGALNNYLAKVNYNQSLFDAPLHYNFYAASTGGGYYDMRNILNNTLVASNPTKAVTLVENHDTQPGQSLESTVQPWFKPLAYAFILTRSGGYPSVFYGDMYGTKGTTTREIPALKSKIEPLLKARKDYAYGTQRDYIDNPDVIGWTREGDSTKAKSGLATVITDGPGGSKRMYVGTSNAGEIWYDLTGNRTDKITIGSDGYATFPVNGGSVSVWVQQ

SEQ ID NO: 38235 - protein, 480 aa, Cytophaga sp.
NGTMMQYFEWYVPNDGQQWNRLRTDAPYLSSVGITAVWTPPAYKGTSQADVGYGPYDLYDLGEFNQKGTVRTKYGTKGELKSAVNTLHSNGIQVYGDVVMNHKAGADYTENVTAVEVNPSNRYQETSGEYNIQAWTGFNFPGRGTTYSNWKWQWFHFDGTDWDQSRSLSRIFKFDGKAWDWEVSSENGNYDYLMYADYDYDHPDVVNEMKKWGVWYANEVGLDGYRLDAVKHIKFQFLKDWVDNARAATGKEMFTVGEYWQNDLGALNNYLAKVNYNQSLFDAPLHYNFYAASTGGGYYDMRNILNNTLVASNPTKAVTLVENHDTQPGQSLESTVQPWFKPLAYAFILTRSGGYPSVFYGDMYGTKGTTTREIPALKSKIEPLLKARKDYAYGTQRDYIDNPDVIGWTREGDSTKAKSGLATVITDGPGGSKRMYVGTSNAGEIWYDLTGNRTDKITIGSDGYATFPLNGGSVSVWVQQ

SEQ ID NO: 38236 - protein, 480 aa, Cytophaga sp.
NGTMMQYFEWYVPNDGQQWNRLRTDAPYLSSVGITAVWTPPAYKGTSQADVGYGPYDLYDLGEFNQKGTVRTKYGTKGELKSAVNTLHSNGIQVYGDVVMNHKAGADYTENVTAVEVNPSNRYQETSGEYNIQAWTGFNFPGRGTTYSNWKWQWFHFDGTDWDQSRSLSRIFKFDGKAWDWEVSSENGNYDYLMYADYDYDHFDVVNEMKKWGVWYANEVGLDGYRLDAVKHIKFQFLKDWVDNARAATGKEMFTVGEYWQNDLGALNNYLAKVNYNQSLFDAPLHYNFYAASTGGGYYDMRNILNNTLVASNPTKAVTLVENHDTQPGQSLESTVQPWFKPLAYAFILTRSGGYPSVFYGDMYGTKGTTTREIPALKSKIEPLLKARKDYAYGTQRDYIDNPDVIGWTREGDSTKAKSGLATVITDGPGGSKRMYVGTSNAGEIWYDLTGNRTDKITIGSDGYATFPVNGGSVSVWVQQ

SEQ ID NO: 38237 - protein, 480 aa, Cytophaga sp.
NGTMMQYFEWYVPNDGQQWNRLRTDAPYLSSVGITAVWTPPAYKGTSQADVGYGPYDLYDLGEFNQKGTVRTKYGTKGELKSAVNTLHSNGIQVYGDVVMNHKAGADYTENVTAVEVNPSNRYQETSGEYNIQAWTGFNFPGRGTTYSNWKWQWFHFDGTDWDQSRSLSRIFKFDGKAWDWEVSSENGNYDYLMYADYDYDHPDVVNEMKKWGVWYASEVGLDGYRLDAVKHIKFQFLKDWVDNARAATGKEMFTVGEYWQNDLGALNNYLAKVNYNQSLFDAPLHYNFYAASTGGGYYDMRNILNNTLVASNPTKAVTLVENHDTQPGQSLESTVQPWFKPLAYAFILTRSGGYPSVFYGDMYGTKGTTTREIPALKSKIEPLLKARKDYAYGTQRDYIDNPDVIGWTREGDSTKAKSGLATVITDGPGGSKRMYVGTSNAGEIWYDLTGNRTDKITIGSDGYATFPVNGGSVSVWVQQ

SEQ ID NO: 38238 - protein, 480 aa, Cytophaga sp.
NGTMMQYFEWYVPNDGQQWNRLRTDAPYLSSVGITAVWTPPAYKGTSQADVGYGPYDLYDLGEFNQKGTVRTKYGTKGELKSAVNTLHSNGIQVYGDVVMNHKAGADYTENVTAVEVNPSNRYQETSGEYNIQAWTGFNFPGRGTTYSNWKWQWFHFDGTDWDQSRSLSRIFKFDGKAWDWEVSSENGNYDYLMYADYDYDHPDVVNEMKKWGVWYANEVGLDGYRLDAVKHIKFQFLKDWVDNARAATGKEMFTVGEYWQNDLGALNNYLAKVNYNQSLFDAPLHYNFYAASTGGGYYDMRNILNNTLVASNPTKAVTLVENHDTQPGQSLESTVQPWFKPLAYAFILTRSGGYPSVFYGDMYGTKGTTTREIPALKSKIEPLLKARSDYAYGTQRDYIDNPDVIGWTREGDSTKAKSGLATVITDGPGGSKRMYVGTSNAGEIWYDLTGNRTDKITIGSDGYATFPVNGGSVSVWVQQ

SEQ ID NO: 38239 - protein, 480 aa, Cytophaga sp.
NGTMMQYFEWYVPNDGQQWNRLRTDAPYLSSVGITAVWTPPAYKGTSQADVGYGPYDLYDLGEFNQKGTVRTKYGTKGELKSAVNTLHSNGIQVYGDVVMNHKAGADYTENVTAVEVNSSNRYQETSGEYNIQAWTGFNFPGRGTTYSNWKWQWFHFDGTDWDQSRSLSRIFKFDGKAWDWEVSSENGNYDYLMYADYDYDHPDVVNEMKKWGVWYANEVGLDGYRLDAVKHIKFQFLKDWVDNARAATGKEMFTVGEYWQNDLGALNNYLAKVNYNQSLFDAPLHYNFYAASTGGGYYDMRNILNNTLVASNPTKAVTLVENHDTQPGQSLESTVQPWFKPLAYAFILTRSGGYPSVFYGDMYGTKGTTTREIPALKSKIEPLLKARKDYAYGTQRDYIDNPDVIGWTREGDSTKAKSGLATVITDGPGGSKRMYVGTSNAGEIWYDLTGNRTDKITIGSDGYATFPVNGGSVSVWVQQ

SEQ ID NO: 38240 - protein, 480 aa, Cytophaga sp.
NGTMMQYFEWYVPNDGQQWNRLRTDAPYLSSVGITAVWTPPAYKGTSQADVGYGPYDLYDLGEFNQKGTVRTKYGTKGELKSAVNTLHSNGIQVYGDVVMNHKAGADYTENVTAVEVNPSNRYQETSGEYNIQAWTGFNFPGRGTTYSNWKWQWFHFDGTDWDQNRSLSRIFKFDGKAWDWEVSSENGNYDYLMYADYDYDHPDVVNEMKKWGVWYANEVGLDGYRLDAVKHIKFQFLKDWVDNARAATGKEMFTVGEYWQNDLGALNNYLAKVNYNQSLFDAPLHYNFYAASTGGGYYDMRNILNNTLVASNPTKAVTLVENHDTQPGQSLESTVQPWFKPLAYAFILTRSGGYPSVFYGDMYGTKGTTTREIPALKSKIEPLLKARKDYAYGTQRDYIDNPDVIGWTREGDSTKAKSGLATVITDGPGGSKRMYVGTSNAGEIWYDLTGNRTDKITIGSDGYATFPVNGGSVSVWVQQ

SEQ ID NO: 38241 - protein, 480 aa, Cytophaga sp.
NGTMMQYFEWYVPNDGQQWNRLRTDAPYLSSVGITAVWTPPAYKGTSQADVGYGPYDLYDLGEFNQKGTVRTKYGTKGELKSAVNTLHSNGIQVYGDVVMNHKAGADYTENVTAVEVNPSNRYQETSGEYNIQAWTGFNFPGRGTTYSNWKWQWFHFDGTDWDQSRSLSRIFKFDGKAWDWEVSSENGNYDYLMYADYDYDHPDVVNEMKKWGVWYANEVGLDGYRLDAVKHIKFQFLKDWVDNARAATGKEMFTVGEYWQNDLGALNNYLAKVNYNQSLFDAPLHYNFYAASTGGGYYDMRNILNNTLVASNPTKAVTLVENHDTQPGQSLESTVQPWFKPLAYAFILTRSGGYPSVFYGDMYGTKGTTTREIPALKSKIEPLLKARKDYAYGTQRDYIDNPDVIGWTREGDSTKAKSGLATVITDGFGGSKRMYVGTSNAGEIWYDLTGNRTDKITIGSDGYATFPVNGGSVSVWVQQ

SEQ ID NO: 38242 - protein, 480 aa, Cytophaga sp.
NGTMMQYFEWYVPNDGQQWNRLRTDAPYLSSVGITAVWTPPAYKGTSQADVGYGPYDLYDLGEFNQKGTVRTKYGTKGELKSAVNTLHSNGIQVYGDVVMNHKAGADYTENVTAVEVNPSNRYQETSGEYNIQAWTGFNFPGRKTTYSNWKWQWFHFDGTDWDQSRSLSRIFKFDGKAWDWEVSSENGNYDYLMYADYDYDHPDVVNEMKKWGVWYANEVGLDGYRLDAVKHIKFQFLKDWVDNARAATGKEMFTVGEYWQNDLGALNNYLAKVNYNQSLFDAPLHYNFYAASTGGGYYDMRNILNNTLVASNPTKAVTLVENHDTQPGQSLESTVQPWFKPLAYAFILTRSGGYPSVFYGDMYGTKGTTTREIPALKSKIEPLLKARKDYAYGTQRDYIDNPDVIGWTREGDSTKAKSGLATVITDGPGGSKRMYVGTSNAGEIWYDLTGNRTDKITIGSDGYATFPVNGGSVSVWVQQ

SEQ ID NO: 38243 - protein, 480 aa, Cytophaga sp.
NGTMMQYFEWYVPNDGQQWNRLRTDAPYLSSVGITAVWTPPAYKGTSQADVGYGPYDLYDLGEFNQKGTVRTKYGTKGELKSAVNTLHSNGIQVYGDVVMNHKAGADYTENVTAVEVNPSNRYQETSGEYNIQAWTGFNFPGRGTTYSNWKWQWFHFDGTDWDQSRSLSRIFKFDGKAWDWEVSSENGNYDYLMYADYDYDHPDVVNEMKKWGVWYANEVGLDGYRLDAVKHIKFQFLKDWVDNARAATGKEMFTVGEYWQNDLGALNNYLAKVNYNQSLFDAPLHYNFYAASTGGGYYDMRNILNNTLVASNPTKAVTLVENHDTQPGQSLESTVQPWFKPLAYAFILTRSGGYPSVFYGDMYGTKGTTTREIPALKSKIEPLLKARKDYAYGTQRDYIDNPDVIGWTREGDSTKGKSGLATVITDGPGGSKRMYVGTSNAGEIWYDLTGNRTDKITIGSDGYATFPVNGGSVSVWVQQ

SEQ ID NO: 38244 - protein, 480 aa, Cytophaga sp.
NGTMMQYFEWYVPNDGQQWNRLRTDAPYLSSVGITAVWTPPAYKGTSQADVGYGPYDLYDLGEFNQKGTVRTKYGTKGELKSAVNTLHSNGIQVYGDVVMNHKAGADYTENVTAVEVNPSNRYQETSGEYNIQAWTGFNFPGRGTTYSNWKWQWFHFDGTDWDQSRSLSRIFKFDGKAWDWSVSSENGNYDYLMYADYDYDHPDVVNEMKKWGVWYANEVGLDGYRLDAVKHIKFQFLKDWVDNARAATGKEMFTVGEYWQNDLGALNNYLAKVNYNQSLFDAPLHYNFYAASTGGGYYDMRNILNNTLVASNPTKAVTLVENHDTQPGQSLESTVQPWFKPLAYAFILTRSGGYPSVFYGDMYGTKGTTTREIPALKSKIEPLLKARKDYAYGTQRDYIDNPDVIGWTREGDSTKAKSGLATVITDGPGGSKRMYVGTSNAGEIWYDLTGNRTDKITIGSDGYATFPVNGGSVSVWVQQ

SEQ ID NO: 38245 - protein, 480 aa, Cytophaga sp.
NGTMMQYFEWYVPNDGQQWNRLRTDAPYLSSVGITATWTPPAYKGTSQADVGYGPYDLYDLGEFNQKGTVRTKYGTKGELKSAVNTLHSNGIQVYGDVVMNHKAGADYTENVTAVEVNPSNRYQETSGEYNIQAWTGFNFPGRGTTYSNWKWQWFHFDGTDWDQSRSLSRIFKFDGKAWDWEVSSENGNYDYLMYADYDYDHPDVVNEMKKWGVWYANEVGLDGYRLDAVKHIKFQFLKDWVDNARAATGKEMFTVGEYWQNDLGALNNYLAKVNYNQSLFDAPLHYNFYAASTGGGYYDMRNILNNTLVASNPTKAVTLVENHDTQPGQSLESTVQPWFKPLAYAFILTRSGGYPSVFYGDMYGTKGTTTREIPALKSKIEPLLKARKDYAYGTQRDYIDNPDVIGWTREGDSTKAKSGLATVITDGPGGSKRMYVGTSNAGEIWYDLTGNRTDKITIGSDGYATFPVNGGSVSVWVQQ

SEQ ID NO: 38246 - protein, 480 aa, Cytophaga sp.
NGTMMQYFEWYVPNDGQQWNRLRTDAPYLSSVGITAHWTPPAYKGTSQADVGYGPYDLYDLGEFNQKGTVRTKYGTKGELKSAVNTLHSNGIQVYGDVVMNHKAGADYTENVTAVEVNPSNRYQETSGEYNIQAWTGFNFPGRGTTYSNWKWQWFHFDGTDWDQSRSLSRIFKFDGKAWDWEVSSENGNYDYLMYADYDYDHPDVVNEMKKWGVWYANEVGLDGYRLDAVKHIKFQFLKDWVDNARAATGKEMFTVGEYWQNDLGALNNYLAKVNYNQSLFDAPLHYNFYAASTGGGYYDMRNILNNTLVASNPTKAVTLVENHDTQPGQSLESTVQPWFKPLAYAFILTRSGGYPSVFYGDMYGTKGTTTREIPALKSKIEPLLKARKDYAYGTQRDYIDNPDVIGWTREGDSTKAKSGLATVITDGPGGSKRMYVGTSNAGEIWYDLTGNRTDKITIGSDGYATFPVNGGSVSVWVQQ

SEQ ID NO: 38247 - protein, 480 aa, Cytophaga sp.
NGTMMQYFEWYVPNDGQQWNRLRTDAPYLSSVGITAVWTPPAYKGTSQADVGYGPYDLYDLGEFNQKGTVRTKYGTKGELKSAVNTLHSNGIQVYGDVVMNHKAGADYTENVTAVEVNPSNRYQETSGEYNIQAWTGFNFPGRGTTYSNWKWQWFHFDGTDWDQSRSLSRIFKFDGKAWDWEVSSENGNYDYLMYADYDYDHPDVVNEMKKWGVWYANEVGLDGYRLDAVKHIKFQFLKDWVDNARAATGKEMFTVGEYWQNDLGALNNYLAKVNYNQSLFDAPLHYNFYAASTGGGYYDMRNILNNTLVASNPTKAVTLVENHDTQPGQSLESTVQPWFKPLAYAFILTRSGGYPSVFYGDMYGTKGTTTREIPALKSKIEPLVKARKDYAYGTQRDYIDNPDVIGWTREGDSTKAKSGLATVITDGPGGSKRMYVGTSNAGEIWYDLTGNRTDKITIGSDGYATFPVNGGSVSVWVQQ

SEQ ID NO: 38248 - protein, 480 aa, Cytophaga sp.
NGTMMQYFEWYVPNDGQQWNRLRTDAPYLSSVGITAVWTPPAYKGTSQADVGYGPYDLVDLGEFNQKGTVRTKYGTKGELKSAVNTLHSNGIQVYGDVVMNHKAGADYTENVTAVEVNPSNRYQETSGEYNIQAWTGFNFPGRGTTYSNWKWQWFHFDGTDWDQSRSLSRIFKFDGKAWDWEVSSENGNYDYLMYADYDYDHPDVVNEMKKWGVWYANEVGLDGYRLDAVKHIKFQFLKDWVDNARAATGKEMFTVGEYWQNDLGALNNYLAKVNYNQSLFDAPLHYNFYAASTGGGYYDMRNILNNTLVASNPTKAVTLVENHDTQPGQSLESTVQPWFKPLAYAFILTRSGGYPSVFYGDMYGTKGTTTREIPALKSKIEPLLKARKDYAYGTQRDYIDNPDVIGWTREGDSTKAKSGLATVITDGPGGSKRMYVGTSNAGEIWYDLTGNRTDKITIGSDGYATFPVNGGSVSVWVQQ

SEQ ID NO: 38249 - protein, 480 aa, Cytophaga sp.
NGTMMQYFEWYVPNDGQQWNRLRTDAPYLSSVGITAVWTPPAYKGTSQADVGYGPYDLYDLGEFNQKGTVRTKYGTKGELKSAVNTLHSNGIQVYGDVVMNHKAGADYTENVTAVEVNPSNRYQETSGEYNIQAWTGFNFPGRGTTYSNWKWQWFHFDGTDWDQSRSLSRIFKFDGKAWDWEVSSENGNYDYLMYADYDYDHPDVVNEMKKWGVWYANEVGLDGYRLDAVKHIKFQFLKDWVDNARAATGKEMFTVGEYWQNDLGALNNYLAKVNYNQSLFDAPLHYNFYAASTGGGYYDMRNILNNTLVASNPTKAVTLVENHDTQPGQSLESTVQPWFKPLAYAFILTRSGGYPSVFYGDMYGTKGTTTREIPALKSKIEPLLKARKDYAYGTQRDYIDNPDVIGWTREGDSTKAKSGLATVITDGPGGSKRMYVGTSNAGEIWYDLTGYRTDKITIGSDGYATFPVNGGSVSVWVQQ

SEQ ID NO: 38250 - protein, 480 aa, Cytophaga sp.
NGTMMQYFEWYVPNDGQQWNRLRTDAPYLSSVGITAVWTPPAYKGTSQADVGYGPYDLYDLGEFNQKGTVRTKYGTKGELKSAVNTLHSNGIQVYGDVVMNHKAGADYTENVTAVEVNPSNRYQETSGEYNIQAWTGFNFPGRGTTYSNWKWQWFHFDGTDWDQSRSLSRIFKFDGKAWDWEVSSENGNYDYLMYADYDYDHPDVVNEMFKWGVWYANEVGLDGYRLDAVKHIKFQFLKDWVDNARAATGKEMFTVGEYWQNDLGALNNYLAKVNYNQSLFDAPLHYNFYAASTGGGYYDMRNILNNTLVASNPTKAVTLVENHDTQPGQSLESTVQPWFKPLAYAFILTRSGGYPSVFYGDMYGTKGTTTREIPALKSKIEPLLKARKDYAYGTQRDYIDNPDVIGWTREGDSTKAKSGLATVITDGPGGSKRMYVGTSNAGEIWYDLTGNRTDKITIGSDGYATFPVNGGSVSVWVQQ

SEQ ID NO: 38251 - protein, 480 aa, Cytophaga sp.
NGTMMQYFEWYVPNDGQQWNRLRTDAPYLSSVGITAVWTPPAYKGTSQADVGYGPYDLSDLGEFNQKGTVRTKYGTKGELKSAVNTLHSNGIQVYGDVVMNHKAGADYTENVTAVEVNPSNRYQETSGEYNIQAWTGFNFPGRGTTYSNWKWQWFHFDGTDWDQSRSLSRIFKFDGKAWDWEVSSENGNYDYLMYADYDYDHPDVVNEMKKWGVWYANEVGLDGYRLDAVKHIKFQFLKDWVDNARAATGKEMFTVGEYWQNDLGALNNYLAKVNYNQSLFDAPLHYNFYAASTGGGYYDMRNILNNTLVASNPTKAVTLVENHDTQPGQSLESTVQPWFKPLAYAFILTRSGGYPSVFYGDMYGTKGTTTREIPALKSKIEPLLKARKDYAYGTQRDYIDNPDVIGWTREGDSTKAKSGLATVITDGPGGSKRMYVGTSNAGEIWYDLTGNRTDKITIGSDGYATFPVNGGSVSVWVQQ

SEQ ID NO: 38252 - protein, 480 aa, Cytophaga sp.
NGTMMQYFEWYVPNDGQQWNRLRTDAPYLSSVGITAVWTPPAYKGTSQADVGYGPYDLYDLGEFNQKGTVRTKYGTKGELKSAVNTLHSNGIQVYGDVVMNHKAGADYTENVTAVEVNPSNRYQETSGEYNIQAWTGFNFPGRGTTYSNWKWQWFHFDGTDWDQSRSLSRIFKFDGKAWDWEVSSENGNYDYLMYADYDYNHPDVVNEMKKWGVWYANEVGLDGYRLDAVKHIKFQFLKDWVDNARAATGKEMFTVGEYWQNDLGALNNYLAKVNYNQSLFDAPLHYNFYAASTGGGYYDMRNILNNTLVASNPTKAVTLVENHDTQPGQSLESTVQPWFKPLAYAFILTRSGGYPSVFYGDMYGTKGTTTREIPALKSKIEPLLKARKDYAYGTQRDYIDNPDVIGWTREGDSTKAKSGLATVITDGPGGSKRMYVGTSNAGEIWYDLTGNRTDKITIGSDGYATFPVNGGSVSVWVQQ

SEQ ID NO: 38253 - protein, 480 aa, Cytophaga sp.
NGTMMQYFEWYVPNDGQQWNRLRTDAPYLSSVGITAVWTPPAYKGTSQADVGYGPYDLYDLGEFNQKGTVRTKYGTKGELKSAVNTLHSNGIQVYGDVVMNHKAGADYTENVTAVEVNPSNRYQETSGEYNIQAWTGFNFPGRGTTYSNWKWQWFHFDGTDWDQSRSLSRIFKFDGKAWDWEVSSENGNYDYLMYADYDYDHPDVVNEMKKWGVWYANEVGLDGYRLDAVKHIKFQFLKDWVDNARAATGKEMFTVGEYWQNDLGALNNYLAKVNYNQSLFDAPLHYNFYAASTGGGYYDMRNILNNTLVASNPTKAVTLVENHDTQPGQSLESTVQPWFKPLAYAFILTRSGGYPSVFYGDMYGTKGTTTREIPALKSKIEPLLKARKDYAYGTQRDYIDNPDVIGWTREGDSTKAMSGLATVITDGPGGSKRMYVGTSNAGEIWYDLTGNRTDKITIGSDGYATFPVNGGSVSVWVQQ

SEQ ID NO: 38254 - protein, 480 aa, Cytophaga sp.
NGTMYQYFEWYVPNDGQQWNRLRTDAPYLSSVGITAVWTPPAYKGTSQADVGYGPYDLYDLGEFNQKGTVRTKYGTKGELKSAVNTLHSNGIQVYGDVVMNHKAGADYTENVTAVEVNPSNRYQETSGEYNIQAWTGFNFPGRGTTYSNWKWQWFHFDGTDWDQSRSLSRIFKFDGKAWDWEVSSENGNYDYLMYADYDYDHPDVVNEMKKWGVWYANEVGLDGYRLDAVKHIKFQFLKDWVDNARAATGKEMFTVGEYWQNDLGALNNYLAKVNYNQSLFDAPLHYNFYAASTGGGYYDMRNILNNTLVASNPTKAVTLVENHDTQPGQSLESTVQPWFKPLAYAFILTRSGGYPSVFYGDMYGTKGTTTREIPALKSKIEPLLKARKDYAYGTQRDYIDNPDVIGWTREGDSTKAKSGLATVITDGPGGSKRMYVGTSNAGEIWYDLTGNRTDKITIGSDGYATFPVNGGSVSVWVQQ

SEQ ID NO: 38255 - protein, 480 aa, Cytophaga sp.
NGTMMQYFEWYVPNDGQQWNRLRTDAPYLSSVGITAVWTPPAYKGTSQADVGYGPYDLYDLGEFNQKGTVRTKYGTKGELKSAVNTLHSNGIQVYGDVVMNHKAGADYTENVTASEVNPSNRYQETSGEYNIQAWTGFNFPGRGTTYSNWKWQWFHFDGTDWDQSRSLSRIFKFDGKAWDWEVSSENGNYDYLMYADYDYDHPDVVNEMKKWGVWYANEVGLDGYRLDAVKHIKFQFLKDWVDNARAATGKEMFTVGEYWQNDLGALNNYLAKVNYNQSLFDAPLHYNFYAASTGGGYYDMRNILNNTLVASNPTKAVTLVENHDTQPGQSLESTVQPWFKPLAYAFILTRSGGYPSVFYGDMYGTKGTTTREIPALKSKIEPLLKARKDYAYGTQRDYIDNPDVIGWTREGDSTKAKSGLATVITDGPGGSKRMYVGTSNAGEIWYDLTGNRTDKITIGSDGYATFPVNGGSVSVWVQQ

SEQ ID NO: 38256 - protein, 480 aa, Cytophaga sp.
NGTMMQYFEWYVPNDGQQWNRLRTDAPYLSSVGITAVWTPPAYKGTSQADVGYGPYDVYDLGEFNQKGTVRTKYGTKGELKSAVNTLHSNGIQVYGDVVMNHKAGADYTENVTAVEVNPSNRYQETSGEYNIQAWTGFNFPGRGTTYSNWKWQWFHFDGTDWDQSRSLSRIFKFDGKAWDWEVSSENGNYDYLMYADYDYDHPDVVNEMKKWGVWYANEVGLDGYRLDAVKHIKFQFLKDWVDNARAATGKEMFTVGEYWQNDLGALNNYLAKVNYNQSLFDAPLHYNFYAASTGGGYYDMRNILNNTLVASNPTKAVTLVENHDTQPGQSLESTVQPWFKPLAYAFILTRSGGYPSVFYGDMYGTKGTTTREIPALKSKIEPLLKARKDYAYGTQRDYIDNPDVIGWTREGDSTKAKSGLATVITDGPGGSKRMYVGTSNAGEIWYDLTGNRTDKITIGSDGYATFPVNGGSVSVWVQQ

SEQ ID NO: 38257 - protein, 480 aa, Cytophaga sp.
NGTMMQYFEWYVPNDGQQWNRLRTDAPYLSSVGITAVWTPPAYKGTSQADVGYGPYDLYDLGEFNQKGTVRTKYGTKGELKSAVNTLHSNGIQVYGDVVMNHKAGADYTENVTAVEVNPSNRYQETSGEYNIQAWTGFNFPGRGTTYSNWKWQWFHFDGTDWDQSRSLSRIFKFDGKAWDWEVSSENGNYDYLMYADYDYDHPDVVNEMKKWGVWYANEVGLDGYRLDAVKHIKFQFLKDWVDNARAATGKEMFTVGEYWQNDLGALNNYLAKVNYNQSLFDAPLHYNFYAASTGGGYYDMRNILNNTLVASNPTKAVTLVENHDTQPGQSLESTVQPWFKPLAYAFILTRSGGYPSVFYGDMYGTKGTTTREIPALKSKIEPLLKARKDYAYGTQRDYIDNPDVIGWTREGDSTKAKSGLATVVTDGPGGSKRMYVGTSNAGEIWYDLTGNRTDKITIGSDGYATFPVNGGSVSVWVQQ

SEQ ID NO: 38258 - protein, 480 aa, Cytophaga sp.
NGTMMQYFEWYVPNDGQQWNRLRTDAPYLSSVGITAVWTPPAYKGTSQADVGYGPYDLYDLGEFNQKGTVRTKYGTHGELKSAVNTLHSNGIQVYGDVVMNHKAGADYTENVTAVEVNPSNRYQETSGEYNIQAWTGFNFPGRGTTYSNWKWQWFHFDGTDWDQSRSLSRIFKFDGKAWDWEVSSENGNYDYLMYADYDYDHPDVVNEMKKWGVWYANEVGLDGYRLDAVKHIKFQFLKDWVDNARAATGKEMFTVGEYWQNDLGALNNYLAKVNYNQSLFDAPLHYNFYAASTGGGYYDMRNILNNTLVASNPTKAVTLVENHDTQPGQSLESTVQPWFKPLAYAFILTRSGGYPSVFYGDMYGTKGTTTREIPALKSKIEPLLKARKDYAYGTQRDYIDNPDVIGWTREGDSTKAKSGLATVITDGPGGSKRMYVGTSNAGEIWYDLTGNRTDKITIGSDGYATFPVNGGSVSVWVQQ

SEQ ID NO: 38259 - protein, 480 aa, Cytophaga sp.
NGTMMQYFEWYVPNDGQQWNRLRTDAPYLSSVGITAVWTPPAYKGTAQADVGYGPYDLYDLGEFNQKGTVRTKYGTKGELKSAVNTLHSNGIQVYGDVVMNHKAGADYTENVTAVEVNPSNRYQETSGEYNIQAWTGFNFPGRGTTYSNWKWQWFHFDGTDWDQSRSLSRIFKFDGKAWDWEVSSENGNYDYLMYADYDYDHPDVVNEMKKWGVWYANEVGLDGYRLDAVKHIKFQFLKDWVDNARAATGKEMFTVGEYWQNDLGALNNYLAKVNYNQSLFDAPLHYNFYAASTGGGYYDMRNILNNTLVASNPTKAVTLVENHDTQPGQSLESTVQPWFKPLAYAFILTRSGGYPSVFYGDMYGTKGTTTREIPALKSKIEPLLKARKDYAYGTQRDYIDNPDVIGWTREGDSTKAKSGLATVITDGPGGSKRMYVGTSNAGEIWYDLTGNRTDKITIGSDGYATFPVNGGSVSVWVQQ

SEQ ID NO: 38260 - protein, 480 aa, Cytophaga sp.
NGTMMQYFEWYVPNDGQQWNRLRTDAPYLSSVGITAVWTPPAYKGTSVADVGYGPYDLYDLGEFNQKGTVRTKYGTKGELKSAVNTLHSNGIQVYGDVVMNHKAGADYTENVTAVEVNPSNRYQETSGEYNIQAWTGFNFPGRGTTYSNWKWQWFHFDGTDWDQSRSLSRIFKFDGKAWDWEVSSENGNYDYLMYADYDYDHPDVVNEMKKWGVWYANEVGLDGYRLDAVKHIKFQFLKDWVDNARAATGKEMFTVGEYWQNDLGALNNYLAKVNYNQSLFDAPLHYNFYAASTGGGYYDMRNILNNTLVASNPTKAVTLVENHDTQPGQSLESTVQPWFKPLAYAFILTRSGGYPSVFYGDMYGTKGTTTREIPALKSKIEPLLKARKDYAYGTQRDYIDNPDVIGWTREGDSTKAKSGLATVITDGPGGSKRMYVGTSNAGEIWYDLTGNRTDKITIGSDGYATFPVNGGSVSVWVQQ

SEQ ID NO: 38261 - protein, 480 aa, Cytophaga sp.
NGTMMQYFEWYVPNDGQQWNRLRTDAPYLSSVGITAVWTPPAYKGTSQADVGYGPYDLYDLGEFNQKGTVRTKYGTKGELKSAVNTLHSNGIQVYGDVVMNHKAGADYTENVTAVEVNPSNRYQETSGEYNIQAWTGFNFPGRGTTYSNWKWQWFHFDGTDWDQSRSLSRIFKFDGKAWDWEVSSENGNYDYLMYADYDYDHPDVVNEMKKWGVWYANEVGLDGYRLDAVKHIKFQFLKDWVDNARAATGKEMFTVGEYWQNDLGALNNYLAKVNYNQSLFDAPLHYNFYAASTGGGYYDMRNILNNTLVASNPTKAVTLVENHDTQPGQSLESTVMPWFKPLAYAFILTRSGGYPSVFYGDMYGTKGTTTREIPALKSKIEPLLKARKDYAYGTQRDYIDNPDVIGWTREGDSTKAKSGLATVITDGPGGSKRMYVGTSNAGEIWYDLTGNRTDKITIGSDGYATFPVNGGSVSVWVQQ

SEQ ID NO: 38262 - protein, 480 aa, Cytophaga sp.
NGTMMQYFEWYVPNDGQQWNRLRTDAPYLSSVGITAVWTPPAYKGTSQADVGYGPYDLYDLGEFNQKGTVRTKYGTKGELKSAVNTLHSNGIQVYGDVVMNHKAGADYTENVTAVEVNPSFRYQETSGEYNIQAWTGFNFPGRGTTYSNWKWQWFHFDGTDWDQSRSLSRIFKFDGKAWDWEVSSENGNYDYLMYADYDYDHPDVVNEMKKWGVWYANEVGLDGYRLDAVKHIKFQFLKDWVDNARAATGKEMFTVGEYWQNDLGALNNYLAKVNYNQSLFDAPLHYNFYAASTGGGYYDMRNILNNTLVASNPTKAVTLVENHDTQPGQSLESTVQPWFKPLAYAFILTRSGGYPSVFYGDMYGTKGTTTREIPALKSKIEPLLKARKDYAYGTQRDYIDNPDVIGWTREGDSTKAKSGLATVITDGPGGSKRMYVGTSNAGEIWYDLTGNRTDKITIGSDGYATFPVNGGSVSVWVQQ

SEQ ID NO: 38263 - protein, 480 aa, Cytophaga sp.
NGTMMQYFEWYVPNDGQQWNRLRTDAPYLSSVGITAVWTPPAYKGTSQADVGYGPYDLYDLGEFNQKGTVRTKYGTKGELKSAVNTLHSNGIQVYGDVVMNHKAGADYTENVTAVEVNPSNRYQETSGEYNIQAWTGFNFPGRGTTYSNWKWQWFHFDGTDWDQSRSLSRIFKFDGKAWDWEVSSENGNYDYLMYADYDYDHPDVVNEMKKWGVWYANEVGLDGYRLDAVKHIKFQFLKDWVDNARAATGKEMFTVGEYWQNDLGALNNYLAKVNYNQSLFDAPLHYNFYAASTGGGYYDMRNILNNTLVASNPTKAVTLVENHDTQPGQSLQSTVQPWFKPLAYAFILTRSGGYPSVFYGDMYGTKGTTTREIPALKSKIEPLLKARKDYAYGTQRDYIDNPDVIGWTREGDSTKAKSGLATVITDGPGGSKRMYVGTSNAGEIWYDLTGNRTDKITIGSDGYATFPVNGGSVSVWVQQ

SEQ ID NO: 38264 - protein, 480 aa, Cytophaga sp.
NGTMMQYFEWYVPNDGQQWNRLRTDAPYLSSVGITAVWTPPAYKGTSQADVGYGPYDLYDLGEFNQKGTVRTKYGTKGELKSAVNTLHSNGIQVYGDVVMNHKAGADYTENVTAVEVNPSNRYQETSGEYNIQAWTGFNFPGRGTTYSNWKWQWFHFDGTDWDQSRSLSRIFKFDGKAWDWEVSSENGNYDYLMYADYDYDHPDVVNEMKKWGVWYANEVGLDGYRLDAVKHIKFQFLKDWVDNARAATGKEMFTVGEYWQNDLGALNNYLAKVNYNQSLFDAPLHYNFYAASTGGGYYDMRNILNNTLVASNPTKAVTLVENHDTQPGQSLESTVQPWFKPLAYAFILTRSGGYPSVFYGDMYGTKGTTTREIPALKSKIEPLLKARKDYAYGTQRDYIDNPDVIGWTREGDMTKAKSGLATVITDGPGGSKRMYVGTSNAGEIWYDLTGNRTDKITIGSDGYATFPVNGGSVSVWVQQ

SEQ ID NO: 38265 - protein, 480 aa, Cytophaga sp.
NGTMMQYFEWYVPNDGQQWNRLRTDAPYLSSVGITAVWTPPAYKGTSQADVGYGPYDLYDLGEFNQKGTVRTKYGTKGELKSAVNTLHSNGIQVYGDVVMNHKAGADYTENVTAVEVNPSNRYQETSGEYNIQAWTGFNFPGRGTTYSNWKWQWFHFDGTDWDQSRSLSRIFKFDGKAWDWEVSSENGNYDYLMYADYDYDHPDVVNEMKKWGVWYANEVGLDGYRLDAVKHIKFQFLKDWVDNARAATGKEMFTVGEYWQNDLGALNNYLAKVNYNQSLFDAPLHYNFYAASTGGGYYDMRNILNNTLVASNPTKAVTLVENHDTQPGQSLESTVQPWFKPLAYAFILTRSGGYPSVFYGDMYGTKGTTTREIPALLSKIEPLLKARKDYAYGTQRDYIDNPDVIGWTREGDSTKAKSGLATVITDGPGGSKRMYVGTSNAGEIWYDLTGNRTDKITIGSDGYATFPVNGGSVSVWVQQ

SEQ ID NO: 38266 - protein, 480 aa, Cytophaga sp.
NGTMMQYFEWYVPNDGQQWNRLRTDAPYLSSVGITAVWTPPAYKGTSQADVGYGPYDLYDLGEFNQKGTVRTKYGTKGELKSAVNTLHSNGIQVYGDVVMNHKAGADYTENVTAVEVNPSNRYQETSGEYNIQAWTGFNFPGRGTTYSNWKWQWFHFDGTDWDQSRSLSRIFKFDGKAWDWEVSSENGNYDYLMYADYDYDHPDVVNEMKKWGVWYANEVGLDGYRLDAVKHIKFQFLKDWVDNARAATGKEMFTVGEYWQNDLGALNNYLAKVNYNQSLFDAPLHYNFYAASTGGGYYDMRNILNNTLVASNPTKAVTLVENHDTQPGQSLESTVQPWFKPLAYAFILTRSGGYPSVFYGDMYGTKGTTTREIPALKSKIEPLLKARKDYAYGTQRDYIDNPDVIGWTREGDSTKAKSGLATVITDGPGGSKRMYVGTSNAGEIWYDLTGNRTDKITIGSDGYATFPVNGGSVSVWVHQ

SEQ ID NO: 38267 - protein, 480 aa, Cytophaga sp.
NGTMMQYFEWYVPNDGQQWNRLRTDAPYLSSVGITAVWTPPAYKGTSQADVGYGPYDLYDLGEFNQKGTVRTKYGTKGELKSAVNTLHSNGIQVYGDVVMNHKAGADYTENVTAVEVNPSNRYQETSGEYNIQAWTGFNFPGRGTTYSNWKWQWFHFDGTDWDQSRSLSRIFKFDGKAWDWEVSSENGNYDYLMYADYDYDHPDVVNEMKKWGVWYANEVGLDGYRLDAVKHIKFQFLKDWVDNARAATGKEMFTVGEYWQNDLGALNNYLAKVNYNQSLFDAPLHYNFYAASTGGGYYDMRNILNNTLVASNPTKAVTLVENHDTQPGQSLESTVQPWFKPLAYAFILTRSGGYPSVFYGDMYGTKGTTTREIPALKSKIEPLLKARKDYAYGTQRDYIDNPDVIGWTREGDSTKAKSGLATVCTDGPGGSKRMYVGTSNAGEIWYDLTGNRTDKITIGSDGYATFPVNGGSVSVWVQQ

SEQ ID NO: 38268 - protein, 480 aa, Cytophaga sp.
NGTMMQYFEWYVPNDGQQWNRLRTDAPYLSSVGITAVWTPPAYKGTSQADVGYGPYDLYDLGEFNQKGTVRTKYGTKGELKSAVNTLHSNGIQVYGDVVMNHKAGADYTENVTAVEVNPSNRYQETSGEYNIQAWTGFNFPGRGTTYSNWKWQWFHFDGTDWDQSRSLSRIFKFDGKAWDWEVSSENGNYDYLMYADYDYDHPDVVNEMKKWGVWYANEVGLDGYRLDAVKHIKFQFLKDWVDNARAATGKEMFTVGEYWQNDLGALNNYLAKVNYNQSLFDAPLHYNFYAASTGGGYYDMRNILNNTLVASNPTKAVTLVENHDTQPGQSLESTVQPWFKPLAYAFILTRSGGYPSVFYGDMYGTKGTTTREIPALKSKIEPLLKARKDYAYGTQRDYIDNPDVIGWTREGDSTKAKSGLATVITDGPGGSKRMYVGTSNAGEIWYDLTGNRTDKITIGSDGYATFPVNGGSNSVWVQQ

SEQ ID NO: 38269 - protein, 480 aa, Cytophaga sp.
NGTMMQYFEWYVPNDGQQWNRLRTDAPYLSSVGITAVWTPPAYKGTSQADVGYGPYDLYDLGEFNQKGTVRTKYGTKGELKSAVNTLHSNGIQVYGDVVMNHKAGADYTENVTAVEVNPSNRYQETSGEYNIQAWTGFNFPGRGTTYSNWKWQWFHFDGTDWDQSRSLSRIFKFDGKAWDWEVSSENGNYDYLMYADYDYDHPDRVNEMKKWGVWYANEVGLDGYRLDAVKHIKFQFLKDWVDNARAATGKEMFTVGEYWQNDLGALNNYLAKVNYNQSLFDAPLHYNFYAASTGGGYYDMRNILNNTLVASNPTKAVTLVENHDTQPGQSLESTVQPWFKPLAYAFILTRSGGYPSVFYGDMYGTKGTTTREIPALKSKIEPLLKARKDYAYGTQRDYIDNPDVIGWTREGDSTKAKSGLATVITDGPGGSKRMYVGTSNAGEIWYDLTGNRTDKITIGSDGYATFPVNGGSVSVWVQQ

SEQ ID NO: 38270 - protein, 480 aa, Cytophaga sp.
NGTMMQYFEWYVPNDGQQWNRLRTDAPYLSSVGITAVWTPPAYKGTSQADVGYGPYDLYDLGEFNQKGTVRTKYGTKGELKSAVNTLHSNGIQVYGDVVMNHKAGADYTENVTAVEVNPSNRYQETSGEYNIQAWTGFNFPGRGTTYSNWKWQWFHFDGTDWDQSRSLSRIFKFDGKAWDWEVSSENGNYDYLMYADYDYDHPDVVNEMKKWGVWYANEVGLDGYRLDAVKHIKFQFLKDWVDNARAATGKEMFTVGEYWQNDLGALNNYLAKVNYNQSLFDAPLHYNFYAASTGGGYYDMRNILNNTLVASNPTKAVTLVENHDTQPGQSLESTVQPWFKPLAYAIILTRSGGYPSVFYGDMYGTKGTTTREIPALKSKIEPLLKARKDYAYGTQRDYIDNPDVIGWTREGDSTKAKSGLATVITDGPGGSKRMYVGTSNAGEIWYDLTGNRTDKITIGSDGYATFPVNGGSVSVWVQQ

SEQ ID NO: 38271 - protein, 480 aa, Cytophaga sp.
NGTMMQYFEWYVPNDGQQWNRLRTDAPYLSSVGITAVWTPPAYKGTSQADVGYGPYDLYDLGEFNQKGTVRTKYGTKGELKSAVNTLHSNGIQVYGDVVMNHKAGADYTENVTAVEVNPSNRYQETSGEYNIQAWTGFNFPGRGTTYSNWKWQWFHFDGTDWDQSRSLSRIFKFDGKAWDWEVSSENGNYDYLMYADYDYDHPDVVNEMKKWGVWYANEVGLDGYRLDAVKHIKFQFLKDWVDNARAATGKEMFTVGEYWQNDLGALNNYLAKVNYNQSLFDAPLHYNFYAASTGGGYYDMRNILNNTLVASNPTKAVTLVENHDTQPGQSLESTVQPWFKPLAYAFILTRSGGYPSVFYGDMYGTKGTTTREIPALKSKIEPLLKARKDYAYGTQRDYIDNPDVIGWTREGDSTKAKSGSATVITDGPGGSKRMYVGTSNAGEIWYDLTGNRTDKITIGSDGYATFPVNGGSVSVWVQQ

SEQ ID NO: 38272 - protein, 480 aa, Cytophaga sp.
NGTMMQYFEWYVPNDGQQWNRLRTDAPYLSSVGITAVWTPPAYKGTSQADVGYGPYDLYDLGEFNQKGTVRTKYGTKGELKSAVNTLHSNGIQVYGDVVMNHKAGADYTENVTAVEVNPSNRYQETSGEYNIQAWTGFNFPGRGTTYSNWKWQWFHFDGTDWDQSRSLSRIFKFDGKAWDWVVSSENGNYDYLMYADYDYDHPDVVNEMKKWGVWYANEVGLDGYRLDAVKHIKFQFLKDWVDNARAATGKEMFTVGEYWQNDLGALNNYLAKVNYNQSLFDAPLHYNFYAASTGGGYYDMRNILNNTLVASNPTKAVTLVENHDTQPGQSLESTVQPWFKPLAYAFILTRSGGYPSVFYGDMYGTKGTTTREIPALKSKIEPLLKARKDYAYGTQRDYIDNPDVIGWTREGDSTKAKSGLATVITDGPGGSKRMYVGTSNAGEIWYDLTGNRTDKITIGSDGYATFPVNGGSVSVWVQQ

SEQ ID NO: 38273 - protein, 480 aa, Cytophaga sp.
NGTMMQYFEWYVPNDGQQWNRLRTDAPYLSSVGITAVWTPPAYKGTSQADVGYGHYDLYDLGEFNQKGTVRTKYGTKGELKSAVNTLHSNGIQVYGDVVMNHKAGADYTENVTAVEVNPSNRYQETSGEYNIQAWTGFNFPGRGTTYSNWKWQWFHFDGTDWDQSRSLSRIFKFDGKAWDWEVSSENGNYDYLMYADYDYDHPDVVNEMKKWGVWYANEVGLDGYRLDAVKHIKFQFLKDWVDNARAATGKEMFTVGEYWQNDLGALNNYLAKVNYNQSLFDAPLHYNFYAASTGGGYYDMRNILNNTLVASNPTKAVTLVENHDTQPGQSLESTVQPWFKPLAYAFILTRSGGYPSVFYGDMYGTKGTTTREIPALKSKIEPLLKARKDYAYGTQRDYIDNPDVIGWTREGDSTKAKSGLATVITDGPGGSKRMYVGTSNAGEIWYDLTGNRTDKITIGSDGYATFPVNGGSVSVWVQQ

SEQ ID NO: 38274 - protein, 480 aa, Cytophaga sp.
NGTMMQYFEWYVPNDGQQWNRLRTDAPYLSSVGIDAVWTPPAYKGTSQADVGYGPYDLYDLGEFNQKGTVRTKYGTKGELKSAVNTLHSNGIQVYGDVVMNHKAGADYTENVTAVEVNPSNRYQETSGEYNIQAWTGFNFPGRGTTYSNWKWQWFHFDGTDWDQSRSLSRIFKFDGKAWDWEVSSENGNYDYLMYADYDYDHPDVVNEMKKWGVWYANEVGLDGYRLDAVKHIKFQFLKDWVDNARAATGKEMFTVGEYWQNDLGALNNYLAKVNYNQSLFDAPLHYNFYAASTGGGYYDMRNILNNTLVASNPTKAVTLVENHDTQPGQSLESTVQPWFKPLAYAFILTRSGGYPSVFYGDMYGTKGTTTREIPALKSKIEPLLKARKDYAYGTQRDYIDNPDVIGWTREGDSTKAKSGLATVITDGPGGSKRMYVGTSNAGEIWYDLTGNRTDKITIGSDGYATFPVNGGSVSVWVQQ

SEQ ID NO: 38275 - protein, 480 aa, Cytophaga sp.
NGTMMQYFEWYVPNDGQQWNRLRTDAPYLSSVGITAVWTPPAYKGTSQADVGYGPYDLYDLGEFNQKGTVRTKYGTKGELKSAVNTLHENGIQVYGDVVMNHKAGADYTENVTAVEVNPSNRYQETSGEYNIQAWTGFNFPGRGTTYSNWKWQWFHFDGTDWDQSRSLSRIFKFDGKAWDWEVSSENGNYDYLMYADYDYDHPDVVNEMKKWGVWYANEVGLDGYRLDAVKHIKFQFLKDWVDNARAATGKEMFTVGEYWQNDLGALNNYLAKVNYNQSLFDAPLHYNFYAASTGGGYYDMRNILNNTLVASNPTKAVTLVENHDTQPGQSLESTVQPWFKPLAYAFILTRSGGYPSVFYGDMYGTKGTTTREIPALKSKIEPLLKARKDYAYGTQRDYIDNPDVIGWTREGDSTKAKSGLATVITDGPGGSKRMYVGTSNAGEIWYDLTGNRTDKITIGSDGYATFPVNGGSVSVWVQQ

SEQ ID NO: 38276 - protein, 480 aa, Cytophaga sp.
NGTMMQYFEWYVPNDGQQWNRLRTDAPYLSSVGITAVWTPPAYKGTSQADVGYGPYDLYDLGEFNQKGTVRTKYGTKGELKSAVNTLHSNGIQVYGDVVMNHKAGADYTENVTAVEVNPSNRYQETSGEYNIQAWTGFNFPGRGTTYSNWKWQWFHFDGTDWDQSRSLSRIFKFDGKAWDWEVSSENGNYDYLMYADYDYDHPDVVNEMKKWGVWYANEVGLDGYRLDAVKHIKFQFLKDWVDNARAATGKEMFTVGEYWQNDLGALNNYLAKVNYNQSLFDAPLHYNFYAASTGGGYYDMRNILNNTLVASNPTKAVTLVENHDTQPGQSLESTVQPWFKPLAYAFILTRSGGYPSVFYGDMYGTKGTTTREIPALKSKIEPLLKARKDYKYGTQRDYIDNPDVIGWTREGDSTKAKSGLATVITDGPGGSKRMYVGTSNAGEIWYDLTGNRTDKITIGSDGYATFPVNGGSVSVWVQQ

SEQ ID NO: 38277 - protein, 480 aa, Cytophaga sp.
NGTMMQYFEWYVPNDGQQWNRLRTDAPYLSSVGITAVWTPPAYKGTSQADVGYGPYDLYDLGEFNQKGTVRTKYGTKGELKSAVNTLHSNGIQVYGDVVMNHKAGADYTENVTAVEVNPSNRYQETSGEYNIQAWTGFNFPGRGTTYSNWKWQWFHFDGTDWDQSRSLSRIFKFDGKAWDWEVSSENGNYDYLMYADYDYDHPDVVNEMKKWGVWYANEVGLDGYRLDAVKHIKFQFLKDWVDNARAATGKEMFTVGEYWQNDLGALNNYLAKVNYNQSLFDAPLHYNFYAASTGGGYYDMRNILNNTLVASNPTKAVTLVENHDTQPGQSLESTVQPWFKPLAYAFILTRSGGYPSVFYGDMYGTKGTTTREIPALKSKIEPLLKARKDYAYGTQRDYIDNPDVIGWTREGDSTKAKSGLATVGTDGPGGSKRMYVGTSNAGEIWYDLTGNRTDKITIGSDGYATFPVNGGSVSVWVQQ

SEQ ID NO: 38278 - protein, 480 aa, Cytophaga sp.
NGTMMQYFEWYVPNDGQQWNRLRTDAPYLSSVGITAVWTPPAYKGTSQADVGYGPYDLYDLGEFNQKGTVRTKYGTKGELKSAVNTLHSNGIQVYGDVVMNHKAGADYTENVTAVEVNPSNRYQETSGEYNIQAWTGFNFPGRGTTYSNWKWQWFHFDGTDWDQSRSLSRIFKFDCKAWDWEVSSENGNYDYLMYADYDYDHPDVVNEMKKWGVWYANEVGLDGYRLDAVKHIKFQFLKDWVDNARAATGKEMFTVGEYWQNDLGALNNYLAKVNYNQSLFDAPLHYNFYAASTGGGYYDMRNILNNTLVASNPTKAVTLVENHDTQPGQSLESTVQPWFKPLAYAFILTRSGGYPSVFYGDMYGTKGTTTREIPALKSKIEPLLKARKDYAYGTQRDYIDNPDVIGWTREGDSTKAKSGLATVITDGPGGSKRMYVGTSNAGEIWYDLTGNRTDKITIGSDGYATFPVNGGSVSVWVQQ

SEQ ID NO: 38279 - protein, 480 aa, Cytophaga sp.
NGTMMQYFEWYVPNDGQQWNRLRTDAPYLSSVGITAVWTPPAYKGTSQADVGYGPYDLYDLGEFNQKGTVRTKYGTKGELKSAVNTLHSNGIQVYGDVVMNHKAGADYTENVTAVEVNPSNRYQETSGEYNIQAWTGFNFPGRGTTYSNWKWQWFHFDGTDWDQSRSLSRIFKFDGKAWDWEVSSENGNYDYLMYADYDYDHPDVVNEMKKWGVWYANEVGLDGYRLDAVKHIKFQFLKDWVDNARASTGKEMFTVGEYWQNDLGALNNYLAKVNYNQSLFDAPLHYNFYAASTGGGYYDMRNILNNTLVASNPTKAVTLVENHDTQPGQSLESTVQPWFKPLAYAFILTRSGGYPSVFYGDMYGTKGTTTREIPALKSKIEPLLKARKDYAYGTQRDYIDNPDVIGWTREGDSTKAKSGLATVITDGPGGSKRMYVGTSNAGEIWYDLTGNRTDKITIGSDGYATFPVNGGSVSVWVQQ

SEQ ID NO: 38280 - protein, 480 aa, Cytophaga sp.
NGTMMQYFEWYVPNDGQQWNRLRTDAPYLSSVGITAVWTPPAYKGTSQADVGYGPYDLYDLGEFNQKGTVRTKYGTKGELKSAVNTLHSNGIQVYGDVVMNHKAGADYTENVTAVEVNPSNRYQETSGEYNIQAWTGFNFPGRGTTYSNWKWQWFHFDGTDWDQSRSLSRIFKFDGKAWDWEVSSENGNYDYLMYADYDYDHPDVVNEMKKWGVWYANEVGLDGYRLDAVKHIKFQFLKDWVDNARAATGKEMFTVGEYWQNDLGALNNYLAKVNYNQSLFDAPLHYNFYAASTGGGYYDMRNILNNTLVASNPTKAVTLVENHDTQPGQSLESTVQPWFKPLAYAFILTRSGGYPSVFYGDMYGTKGTTTREIPALKSKIEPLLKARKDYAYGTQRDYIDNPDVIGWTREGDSTKAKSGLATVITDGDGGSKRMYVGTSNAGEIWYDLTGNRTDKITIGSDGYATFPVNGGSVSVWVQQ

SEQ ID NO: 38281 - protein, 480 aa, Cytophaga sp.
NGTMMQYFEWYVPNDGQQWNRLRTDAPYLSSVGITAVWTPPAYKGTSQADVGYGPYDLYDLGEFNQKGTVRTKYGTKGELKSAVNTLHSNGIQVYGDVVMNHKAGADYTENVTAVEVNPSNRYQETSGEYNIQAWTGFNFPGRGTTYSNWTWQWFHFDGTDWDQSRSLSRIFKFDGKAWDWEVSSENGNYDYLMYADYDYDHPDVVNEMKKWGVWYANEVGLDGYRLDAVKHIKFQFLKDWVDNARAATGKEMFTVGEYWQNDLGALNNYLAKVNYNQSLFDAPLHYNFYAASTGGGYYDMRNILNNTLVASNPTKAVTLVENHDTQPGQSLESTVQPWFKPLAYAFILTRSGGYPSVFYGDMYGTKGTTTREIPALKSKIEPLLKARKDYAYGTQRDYIDNPDVIGWTREGDSTKAKSGLATVITDGPGGSKRMYVGTSNAGEIWYDLTGNRTDKITIGSDGYATFPVNGGSVSVWVQQ

SEQ ID NO: 38282 - protein, 480 aa, Cytophaga sp.
NGTMMQYFEWYVPNDGQQWNRLRTDAPYLSSVGITAVWTPPAYKGTSQADVGYGPYDLYDLGEFNQKGTVRTKYGTKGELKSAVNTLHSNGIQVYGDVVMNHKAGADYTENVTAVEVNPSNRYQETSGEYNIQAWTGFNFPGRGTTYSNWKWQWFHFDGTDWDQSRSLSRIFKFDTKAWDWEVSSENGNYDYLMYADYDYDHPDVVNEMKKWGVWYANEVGLDGYRLDAVKHIKFQFLKDWVDNARAATGKEMFTVGEYWQNDLGALNNYLAKVNYNQSLFDAPLHYNFYAASTGGGYYDMRNILNNTLVASNPTKAVTLVENHDTQPGQSLESTVQPWFKPLAYAFILTRSGGYPSVFYGDMYGTKGTTTREIPALKSKIEPLLKARKDYAYGTQRDYIDNPDVIGWTREGDSTKAKSGLATVITDGPGGSKRMYVGTSNAGEIWYDLTGNRTDKITIGSDGYATFPVNGGSVSVWVQQ

SEQ ID NO: 38283 - protein, 480 aa, Cytophaga sp.
NGTMMQYFEWYVPNDGQQWNRLRTDAPYLSSVGITAVWTPPAYKGTSQADVGYGPYDLYDLGEFNQKGTVRTKYGTKGELKSAVNTLHSNGIQVYGDVVMNHKAGADYTENVTAVEVNPSNRYQETSGEYNIQAWTGFNFPGRGTTYSNWKWQWFHFDGTDWDQSRSLSRIFKFDGKAWDWEVSSENGNYDYLMYADYDYDHPDVVNEMKKWGVWYANEVGLDGYRLDAVKHIKFQFLKDWVDNARAATGKEMFTVGEYWQNDLGALNNYLAKVNYNQSLFDAPLHYNFYYASTGGGYYDMRNILNNTLVASNPTKAVTLVENHDTQPGQSLESTVQPWFKPLAYAFILTRSGGYPSVFYGDMYGTKGTTTREIPALKSKIEPLLKARKDYAYGTQRDYIDNPDVIGWTREGDSTKAKSGLATVITDGPGGSKRMYVGTSNAGEIWYDLTGNRTDKITIGSDGYATFPVNGGSVSVWVQQ

SEQ ID NO: 38284 - protein, 480 aa, Cytophaga sp.
NGTMMQYFEWYVPNDGQQWNRLRTDAPYLSSVGITAVWTPPAYKGTSQADVGYGPYDLYDLGEFNQKGTVRTKYGTKGELKSAVNTLHSNGIQVYGDVVMNHKAGADYTENVTAVEVNPSNRYQETSGEYNIQAWTGFNFPGRGTTYSNWKWQWFHFDGTDWDQHRSLSRIFKFDGKAWDWEVSSENGNYDYLMYADYDYDHPDVVNEMKKWGVWYANEVGLDGYRLDAVKHIKFQFLKDWVDNARAATGKEMFTVGEYWQNDLGALNNYLAKVNYNQSLFDAPLHYNFYAASTGGGYYDMRNILNNTLVASNPTKAVTLVENHDTQPGQSLESTVQPWFKPLAYAFILTRSGGYPSVFYGDMYGTKGTTTREIPALKSKIEPLLKARKDYAYGTQRDYIDNPDVIGWTREGDSTKAKSGLATVITDGPGGSKRMYVGTSNAGEIWYDLTGNRTDKITIGSDGYATFPVNGGSVSVWVQQ

SEQ ID NO: 38285 - protein, 480 aa, Cytophaga sp.
NGTMMQYFEWYVPNDGQQWNRLRTDAPYLSSVGITAVWTPPAYKGTSQADVGYGPYDLYDLGEFNQKGTVRTKYGTKGELKSAVNTLHSNGIQVYGDVVMNHKAGADYTENVTAVEVNPSNRYQETSGEYNIQAWTGFNFPGRGTTYSNWKWQWFHFDGTDWDQSRSLSRIFKFDGKAWDWEVSSENGNYDYLMYADYDYDHPDVVNEMKKWGVWYANEVGLDGYRLDAVKHIKFQFLKDWVDNARATTGKEMFTVGEYWQNDLGALNNYLAKVNYNQSLFDAPLHYNFYAASTGGGYYDMRNILNNTLVASNPTKAVTLVENHDTQPGQSLESTVQPWFKPLAYAFILTRSGGYPSVFYGDMYGTKGTTTREIPALKSKIEPLLKARKDYAYGTQRDYIDNPDVIGWTREGDSTKAKSGLATVITDGPGGSKRMYVGTSNAGEIWYDLTGNRTDKITIGSDGYATFPVNGGSVSVWVQQ

SEQ ID NO: 38286 - protein, 480 aa, Cytophaga sp.
NGTMMQYFEWYVPNDGQQWNRLRTDAPYLSSVGITAVWTPPAYKGTSQADVGYGPYDLYDLGEFNQKGTVRTKYGTKGELKSAVNTLHSNGIQVYGDVVMNHKAGADYTNNVTAVEVNPSNRYQETSGEYNIQAWTGFNFPGRGTTYSNWKWQWFHFDGTDWDQSRSLSRIFKFDGKAWDWEVSSENGNYDYLMYADYDYDHPDVVNEMKKWGVWYANEVGLDGYRLDAVKHIKFQFLKDWVDNARAATGKEMFTVGEYWQNDLGALNNYLAKVNYNQSLFDAPLHYNFYAASTGGGYYDMRNILNNTLVASNPTKAVTLVENHDTQPGQSLESTVQPWFKPLAYAFILTRSGGYPSVFYGDMYGTKGTTTREIPALKSKIEPLLKARKDYAYGTQRDYIDNPDVIGWTREGDSTKAKSGLATVITDGPGGSKRMYVGTSNAGEIWYDLTGNRTDKITIGSDGYATFPVNGGSVSVWVQQ

SEQ ID NO: 38287 - protein, 480 aa, Cytophaga sp.
NGTMMQYFEWYVPNDGQQWNRLRTDAPYLSSVGITAVWTPPAYKGTSQADVGYGPYDLYDLGEFNQKGTVRTKYGTKGELKSAVNTLHSNGIQVYGDVVMNHKAGADYTENVTAVEVNPSNRYQETSGEYNIQAWTGFNFPGRGTTYSNWKWQWFHFDGTDWDQSRSLSRIFKFDGKAWDWEVSSENGNYDYLMYADYDYDHPDVVNEMKKWGVWYANEVGLDGYRLDAVKHIKFQFLKDWVDNARAATGKEMFTVGEYWQNDLGALNNYLAKVNYNQSLFDAPLHYNFYFASTGGGYYDMRNILNNTLVASNPTKAVTLVENHDTQPGQSLESTVQPWFKPLAYAFILTRSGGYPSVFYGDMYGTKGTTTREIPALKSKIEPLLKARKDYAYGTQRDYIDNPDVIGWTREGDSTKAKSGLATVITDGPGGSKRMYVGTSNAGEIWYDLTGNRTDKITIGSDGYATFPVNGGSVSVWVQQ

SEQ ID NO: 38288 - protein, 480 aa, Cytophaga sp.
NGTMMQYFEWYVPNDGQQWNRLRTDAPYLSSVGITAVWTPPAYKGTSQADVGYGPYDLYDLGEFNQKGTVRTKYGTKGELKSAVNTLHSNGIQVYGDVVMNHKAGADYTENVTAVEVNPSNRYQETSGEYNIQAWTGFNFPGRGTTYSNWKWQWFHFDGTDWDQSRSLSRIFKFDGKAWDWEVSSENGNYDYLMYADYDYDHPDVVNEMKKWGVWYANEVGLDGYRLDAVKHIKFQFLKDWVDNARAATGKEMFTVGEYWQNDLGALNNYLAKVNYNQSLFDAPLHYNFYAASTGGGYYDMRNILNNTLVASNPTKAVTLVENHDTQPGQSLESTVQPWFKPLAYAFILTRSGGYPSVFYGDMYGTKGTTTREIPALKSKIEPLLKARKDYAYGTQRDYIDNPDVIGWTREGDSTKAKSGLATVITDGPGGSKRMYVGTSNAGEIWYDLAGNRTDKITIGSDGYATFPVNGGSVSVWVQQ

SEQ ID NO: 38289 - protein, 480 aa, Cytophaga sp.
NGTMMQYFEWYVPNDGQQWNRLRTDAPYLSSVGITAVWTPPAYKGTSQADVGYGPYDLYDLGEFNQKGTVRTKYGTKGELKSAVNTLHSNGIQVYGDVVMNHKAGADYTENVTAVEVNPSNRYQETSGEYNIQAWTGFNFPGRGTTYSNWKWQWFHFDGTDWDQSRSLSRIFKFDGKAWDWEVSSENGNYDYLMYADYDYDHPDVVNEMKKWGVWYANEVGLDGYRLDAVKHIKFQFLKDWVDNARAATGKEMFTVGEYWQNDLGALNNYLAKVNYNQSLFDAPLHYNFYSASTGGGYYDMRNILNNTLVASNPTKAVTLVENHDTQPGQSLESTVQPWFKPLAYAFILTRSGGYPSVFYGDMYGTKGTTTREIPALKSKIEPLLKARKDYAYGTQRDYIDNPDVIGWTREGDSTKAKSGLATVITDGPGGSKRMYVGTSNAGEIWYDLTGNRTDKITIGSDGYATFPVNGGSVSVWVQQ

SEQ ID NO: 38290 - protein, 480 aa, Cytophaga sp.
NGTMMQYFEWYVPNDGQQWNRLRTDAPYLSSVGITAVWTPPAYKGTSQADVGYGPYDLYDLGEFNQKGTVRTKYGTKGELKSAVNTLHSNGIQVYGDVVMNHKAGADYTENVTAVEVNPSNRYQETSGEYNIQAWTGFNFPGRGTTYSNWKWQWFHFDGTDWDQSRSLSRIFKFDGKAWDWEVSSENGNYDYLMYADYDYDHPDVVNEMKKWGVWYANEVGLDGYRLDAVKHIKFQFLKDWVDNARAATGKEMFTVGEYWQNDLGALNNYLAKVNYNQSLFDAPLHYNFYAASTGGGYYDMRNILNNTLVASNPTKAVTLVENHDTQPGQSLESTVQPWFKPLAYAFILTRSGGYPSVFYGDMYGTKGTTTREIPALKSKIEPLLKARKDYAYGTQRDYIDNPDVIGWTREGDSTKAKRGLATVITDGPGGSKRMYVGTSNAGEIWYDLTGNRTDKITIGSDGYATFPVNGGSVSVWVQQ

SEQ ID NO: 38291 - protein, 480 aa, Cytophaga sp.
NGTMMQYFEWYVPNDGQQWNRLRTDAPYLSSVGITAVWTPPAYKGTSQADVGYGPYDLYDLGEFNQKGTVRTKYGTKGELKSAVNTLHSNGIQVYGDVVMNHKAGADYTENVTAVEVNPSNRYQETSGEYNIQAWTGFNFPGRGTTYSNWKWQWFHFDGTDWDQSRSLSRIFKFDGKAWDWEVSSENGNYDYLMYADYDYDHPDVVNEMKKWGVWYANEVGLDGYRLDAVKHIKFQFLKDWVDNARAATGKEMFTVGEYWQNDLGALNNYLAKVNYNQSLFDAPLHYNFYAASTGGGYYDMRNIPNNTLVASNPTKAVTLVENHDTQPGQSLESTVQPWFKPLAYAFILTRSGGYPSVFYGDMYGTKGTTTREIPALKSKIEPLLKARKDYAYGTQRDYIDNPDVIGWTREGDSTKAKSGLATVITDGPGGSKRMYVGTSNAGEIWYDLTGNRTDKITIGSDGYATFPVNGGSVSVWVQQ

SEQ ID NO: 38292 - protein, 480 aa, Cytophaga sp.
NGTMMQYFEWYVPNDGQQWNRLRTDAPYLSSVGITAVWTPPAYKGTSQADVGYGPYDLYDLGEFNQKGTVRTKYGTKGELKSAVNTLHSNGIQVYGDVVMNHKAGADYTENVTAVEVNPSNRYQETSGEYNIQAWTGFNFPGRGTTYSNWKWQWFHFDGTDWDQSRSLSRIFKFDGKAWDWEVSSENGNYDYLMYADYDYDHPDVVNEMKKWGVWYANEVGLDGYRLDAVKHIKFQFLKDWVDNARAATGKEMFTVGEYWQNDLGALNNYLAKVNYNQSLFDAPLHYNFYAASTGGGYYDMRNILNNTLVASNPTKAVTLVENHDTQPGQSLESTVQPWFKPLAYAFILTRSGGYPSVFYGDMYGTKGTTTREIPALKSKIEPLLKARKDYAYGTQRDYIDNPDVIGWTREGDSTKAKSGLATVITDGPGGSKYMYVGTSNAGEIWYDLTGNRTDKITIGSDGYATFPVNGGSVSVWVQQ

SEQ ID NO: 38293 - protein, 480 aa, Cytophaga sp.
NGTMMQYFEWAVPNDGQQWNRLRTDAPYLSSVGITAVWTPPAYKGTSQADVGYGPYDLYDLGEFNQKGTVRTKYGTKGELKSAVNTLHSNGIQVYGDVVMNHKAGADYTENVTAVEVNPSNRYQETSGEYNIQAWTGFNFPGRGTTYSNWKWQWFHFDGTDWDQSRSLSRIFKFDGKAWDWEVSSENGNYDYLMYADYDYDHPDVVNEMKKWGVWYANEVGLDGYRLDAVKHIKFQFLKDWVDNARAATGKEMFTVGEYWQNDLGALNNYLAKVNYNQSLFDAPLHYNFYAASTGGGYYDMRNILNNTLVASNPTKAVTLVENHDTQPGQSLESTVQPWFKPLAYAFILTRSGGYPSVFYGDMYGTKGTTTREIPALKSKIEPLLKARKDYAYGTQRDYIDNPDVIGWTREGDSTKAKSGLATVITDGPGGSKRMYVGTSNAGEIWYDLTGNRTDKITIGSDGYATFPVNGGSVSVWVQQ

SEQ ID NO: 38294 - protein, 480 aa, Cytophaga sp.
NGTMMQYFEWYVPNDGQQWNRLRTDAPYLSSVGITAVWTPPAYKGTSQADVGYGPYDLYDLGEFNQKGTVRTKYGTKGELKSAVNTLHSNGIQVYGDVVMNHKAGADYTENVTAVEVNPSNRYQETSGEYNIQAWTGFNFPGRGTTYSNWKWQWFHFDGTDWDQSRSLSRIFKFDGKAWDWEVSSENGNYDYLMYADYDYDHPDVVNEMKKWGVWYANEVGLDGYRLDAVKHIKFQFLKDWVDNARAATGKEMFTVGEYWQNDLGALNNYLAKVNYNQSLFDAPLHYNFYAASTGGGYYDMRNILNNTLVASNPTKAVTLVENHDTQPGQSLHSTVQPWFKPLAYAFILTRSGGYPSVFYGDMYGTKGTTTREIPALKSKIEPLLKARKDYAYGTQRDYIDNPDVIGWTREGDSTKAKSGLATVITDGPGGSKRMYVGTSNAGEIWYDLTGNRTDKITIGSDGYATFPVNGGSVSVWVQQ

SEQ ID NO: 38295 - protein, 480 aa, Cytophaga sp.
NGTMMQYFEWYVPNDGQQWNRLRTDAPYLSSVGITAVWTPPAYKGTSQADVGYGPYDLYDLGEFNQKGTVRTKYGTKGELKSAVNTLHSNGIQVYGDVVMNHKAGADYTENVTAVEVNPSNRYQETSGEYNIQAWTGFNFPGRNTTYSNWKWQWFHFDGTDWDQSRSLSRIFKFDGKAWDWEVSSENGNYDYLMYADYDYDHPDVVNEMKKWGVWYANEVGLDGYRLDAVKHIKFQFLKDWVDNARAATGKEMFTVGEYWQNDLGALNNYLAKVNYNQSLFDAPLHYNFYAASTGGGYYDMRNILNNTLVASNPTKAVTLVENHDTQPGQSLESTVQPWFKPLAYAFILTRSGGYPSVFYGDMYGTKGTTTREIPALKSKIEPLLKARKDYAYGTQRDYIDNPDVIGWTREGDSTKAKSGLATVITDGPGGSKRMYVGTSNAGEIWYDLTGNRTDKITIGSDGYATFPVNGGSVSVWVQQ

SEQ ID NO: 38296 - protein, 480 aa, Cytophaga sp.
NGTMMQYFEWYVPNDGQQWNRLRTDAPYLSSVGITAVWTPPAYKGTSQADVGYGPYDLYDLGEFNQKGTVRTKYGTKGELKSAVNTLHSNGIQVYGDVVMNHKAGADYTENVTAVEVNPSNRYQETSGEYNIQAWTGFNFPGRGTTYSNWKWQWFHFDGTDWDQSRSLTRIFKFDGKAWDWEVSSENGNYDYLMYADYDYDHPDVVNEMKKWGVWYANEVGLDGYRLDAVKHIKFQFLKDWVDNARAATGKEMFTVGEYWQNDLGALNNYLAKVNYNQSLFDAPLHYNFYAASTGGGYYDMRNILNNTLVASNPTKAVTLVENHDTQPGQSLESTVQPWFKPLAYAFILTRSGGYPSVFYGDMYGTKGTTTREIPALKSKIEPLLKARKDYAYGTQRDYIDNPDVIGWTREGDSTKAKSGLATVITDGPGGSKRMYVGTSNAGEIWYDLTGNRTDKITIGSDGYATFPVNGGSVSVWVQQ

SEQ ID NO: 38297 - protein, 480 aa, Cytophaga sp.
NGTMMQYFEWYVPNDGQQWNRLRTDAPYLSSVGITAVWTPPAYKGTSQADVGYGPYDLYDLGEFNQKGTVRTKYGTKGELKSAVNTLHSNGIQVYGDVVMNHKAGADYTENVTAVEVNPSNRYQETSGEKNIQAWTGFNFPGRGTTYSNWKWQWFHFDGTDWDQSRSLSRIFKFDGKAWDWEVSSENGNYDYLMYADYDYDHPDVVNEMKKWGVWYANEVGLDGYRLDAVKHIKFQFLKDWVDNARAATGKEMFTVGEYWQNDLGALNNYLAKVNYNQSLFDAPLHYNFYAASTGGGYYDMRNILNNTLVASNPTKAVTLVENHDTQPGQSLESTVQPWFKPLAYAFILTRSGGYPSVFYGDMYGTKGTTTREIPALKSKIEPLLKARKDYAYGTQRDYIDNPDVIGWTREGDSTKAKSGLATVITDGPGGSKRMYVGTSNAGEIWYDLTGNRTDKITIGSDGYATFPVNGGSVSVWVQQ

SEQ ID NO: 38298 - protein, 480 aa, Cytophaga sp.
NGTMMQYFEWYVPNDGQQWNRLRTDAPYLSSVGITAVWTPPAYKGTSQADVGYGPYDLYDLGEFNQKGTVRTKYGTKGELKSAVNTLHNNGIQVYGDVVMNHKAGADYTENVTAVEVNPSNRYQETSGEYNIQAWTGFNFPGRGTTYSNWKWQWFHFDGTDWDQSRSLSRIFKFDGKAWDWEVSSENGNYDYLMYADYDYDHPDVVNEMKKWGVWYANEVGLDGYRLDAVKHIKFQFLKDWVDNARAATGKEMFTVGEYWQNDLGALNNYLAKVNYNQSLFDAPLHYNFYAASTGGGYYDMRNILNNTLVASNPTKAVTLVENHDTQPGQSLESTVQPWFKPLAYAFILTRSGGYPSVFYGDMYGTKGTTTREIPALKSKIEPLLKARKDYAYGTQRDYIDNPDVIGWTREGDSTKAKSGLATVITDGPGGSKRMYVGTSNAGEIWYDLTGNRTDKITIGSDGYATFPVNGGSVSVWVQQ

SEQ ID NO: 38299 - protein, 480 aa, Cytophaga sp.
NGTMMQYFEWYVPNDGQQWNRLRTDAPYLSSVGITAVWTPPAYKGTSQADVGYGPYDLYDLGEFNQKGTVRTKYGTKGELKSAVNTLHSNGIQVYGDVVMNHKAGADYTENVTAVEVNPSNRYQETSGEYNIQAWTGFNFPGRGTTYSNWKWQWFHFDGTDWDQSRSLSRIFKFDGKAWDWEVSSENGNYDYLMYADYDYDHPDVVNEMKKWGVWYANEVGLDGYRLDAVKHIKFQFLKDWVDNARAATGKEMFTVGEYWQNDLGALNNYLAKVNYNQSLFDAPLHYNFYAASTGGGYYDMRNILNNTLVASNPTKAVTLVENHDTQPGQSLESTVQPWFKPLAYAFILTRSGGYPSVFYGDMYGTKGTTTREIPALKSKIEPLLKARKDYAYGTQRDYIDNPDVIGWTREGDSTKAKSGLATVITDGPGGSKRMYVGTSNAGEIWYDLTGNRTDKITIMSDGYATFPVNGGSVSVWVQQ

SEQ ID NO: 38300 - protein, 480 aa, Cytophaga sp.
NGTMMQYFEWYVPNDGQQWNRLRTDAPYLSSVGITAVWTPPAYKGTSQADVGYGPYDLYDLGEFNQKGTVRTKYGTKGELKSAVNTLHSNGIQVYGDVVMNHKAGADYTENVTAVEVNPSNRYQETSGEYNIQAWTGFNFPGRGTTYSNWKWQWFHFDGTDWDQSRSLSRIFKFDGKAWDWEVSSENGNYDYLMYADYDYDHPDVVNEMKKWGVWYANEVGLDGYRLDAVKHIKFQFLKDWVDNARAATGKEMFTVGEYWQNDLGALNNYLAKVNYNQSLFDAPLHYNFYAASTGGGYYDMRNILNNTLVASNPTKAVTLVENHDTQPGQSLESTVQPWFKPLAYAFILTRSGGYPSVFYGDMYGTKGTTTREIPALKSKIEPLLKARKDYAYGTQRDYIDNPDVIGWTREGDSTKAKSGLATVITDGPGGSKRMYVGTSNAMEIWYDLTGNRTDKITIGSDGYATFPVNGGSVSVWVQQ

SEQ ID NO: 38301 - protein, 480 aa, Cytophaga sp.
NGTMMQYFEWYVPNDGQQWNRLRTDAPYLSSVGITAVWTPPAYKGTSQADVGYGPYDLYDLGEFNQKGTVRTKYGTKGELKSAVNTLHSNGIQVYGDVVMNHKAGADYTENVTAVEVNPSNRYQETSGEYNIQAWTGFNFPGRGTTYSNWKWQWFHFDGTDWDQSRSLSRIFKFDGKAWDWEVSSENGNYDYLMYADYDYDHPDVVNEMKKWGVWYANEVGLDGYRLDAVKHIKFQFLKDWVDNARAATGKEMFTVGEYWQNDLGALNNYLAKVNYNQSLFDAPLHYNFYAASTGGGYYDMRNILNNTLVASNPTKAVTLVENHDTQPGQSLESTVQPWFKPLAYAFILTRSGGYPSVFYGDMYGTKGTTTREIPALKSKIEPLLKARKDYAYGTQRDYIDNPDVIGWTREGDSTKAKSGLATVMTDGPGGSKRMYVGTSNAGEIWYDLTGNRTDKITIGSDGYATFPVNGGSVSVWVQQ

SEQ ID NO: 38302 - protein, 480 aa, Cytophaga sp.
NGTMMQYFEWYVPNDGQQWNRLRTDAPYLSSVGITAVWTPPAYKGTSQADVGYGPYDLYDLGEFNQKGTVRTKYGTKGELKSAVNTLHSNGIQVYGDVVMNHKAGADYTENVTAVEVNPSNRYQETSGEYNIQAWTGFNFPGRGTTYSNWKWQWFHFDGTDWDQSRSLSRIFKFDGKAWDWEVSSENGNYDYLMYADYDYDHPDVVNEMKKWGVWYANEVGLDGYRLDAVKHIKFQFLKDWVDNARAATGKEMFTVGEYWQNDLGALNNYLAKVNYNQSLFDAPLHYNFYAASTGGGYYDMRNILNNTLVASNPTKAVTLVENHDTQPGQSLTSTVQPWFKPLAYAFILTRSGGYPSVFYGDMYGTKGTTTREIPALKSKIEPLLKARKDYAYGTQRDYIDNPDVIGWTREGDSTKAKSGLATVITDGPGGSKRMYVGTSNAGEIWYDLTGNRTDKITIGSDGYATFPVNGGSVSVWVQQ

SEQ ID NO: 38303 - protein, 480 aa, Cytophaga sp.
NGTMMQYFEWYVPNDGQQWNRLRTDAPYLSSVGITAVWTPPAYKGTSQADVGYGPYDLYDLGEFNQKGTVRTKYGTKGELKSAVNTLHSNGIQVYGDVVMNHKAGADYTENVTAVEVNPSNRYQETSGEYNIQAWTGFNFPGRGTTYSNWKWQWFHFDGTDWDQSRSLSRIFKFDGKAWDWEVSSENGNYDYLMYADYDYDHPDVVNEMKKWGVWYANEVGLDGYRLDAVKHIKFQFLKDWVDNARAATGKEMFAVGEYWQNDLGALNNYLAKVNYNQSLFDAPLHYNFYAASTGGGYYDMRNILNNTLVASNPTKAVTLVENHDTQPGQSLESTVQPWFKPLAYAFILTRSGGYPSVFYGDMYGTKGTTTREIPALKSKIEPLLKARKDYAYGTQRDYIDNPDVIGWTREGDSTKAKSGLATVITDGPGGSKRMYVGTSNAGEIWYDLTGNRTDKITIGSDGYATFPVNGGSVSVWVQQ

SEQ ID NO: 38304 - protein, 480 aa, Cytophaga sp.
NGTMMQYFEWYVPNDGQQWNRLRTDAPYLSSVGITAVWTPPAYKGTSQADVGYGPYDLYDLGEFNQKGTVRTKYGTKGELKSAVNTLHSNGIQVYGDVVMNHKAGADYTENVTAVEVNPSNRYQETSGEYNIQAWTGFNFPGRGTTYSNWKWQWFHFDGTDWDQSRSLSRIFKFDGKAWDWEVSSENGNYDYLMYADYDYDHPDVVNEMKFWGVWYANEVGLDGYRLDAVKHIKFQFLKDWVDNARAATGKEMFTVGEYWQNDLGALNNYLAKVNYNQSLFDAPLHYNFYAASTGGGYYDMRNILNNTLVASNPTKAVTLVENHDTQPGQSLESTVQPWFKPLAYAFILTRSGGYPSVFYGDMYGTKGTTTREIPALKSKIEPLLKARKDYAYGTQRDYIDNPDVIGWTREGDSTKAKSGLATVITDGPGGSKRMYVGTSNAGEIWYDLTGNRTDKITIGSDGYATFPVNGGSVSVWVQQ

SEQ ID NO: 38305 - protein, 480 aa, Cytophaga sp.
NGTMMQYFEWYVPNDGQQWNRLRTDAPYLSSVGITAVWTPPAYKGTSQADVGYGPYDLYDLGEFNQKGTVRTKYGTKGELKSAVNTLHSNGIQVYGDVVMNHKAGADYTENVTAVEVNPSNRYQETSGEYNIQAWTGFNFPGRGTTYSNWKWQWFHFDGTDWDQSRSLSRIFKFDGKAWDWEVSSENGNYDYLMYADYDYDHPDVVNEMKKWGVWYANEVGLDGYRLDAVKHIKFQFLKDWVDNARAATGKEMFTVGEYWQNDLGALNNYLAKVNYNQSLFDAPLHYNFYAASTGGGYYDMRNILNNTLVASNPTKAVTLVENHDTQPGQSLESTVQPWFKPLAYAFILTRSGGYPSVFYGDMYGTKGTTTREIPALKSKIEPLLKARKDYAYGTQRDYIDNPDVIGWTREGDSTKAKSGLATVITDGPGGSKRMYVGTSNAGEIWYDLTGNRTDKITIGYDGYATFPVNGGSVSVWVQQ

SEQ ID NO: 38306 - protein, 480 aa, Cytophaga sp.
NGTMMQYFEWYVPNDGQQWNRLRTDAPYLSSVGITAVWTPPAYKGTSQADVGYGPYDLYDLGEFNQKGTVRTKYGTKGELKSAVNTLHSNGIQVYGDVVMNHKAGADYTENVTAVEVNPSNRYVETSGEYNIQAWTGFNFPGRGTTYSNWKWQWFHFDGTDWDQSRSLSRIFKFDGKAWDWEVSSENGNYDYLMYADYDYDHPDVVNEMKKWGVWYANEVGLDGYRLDAVKHIKFQFLKDWVDNARAATGKEMFTVGEYWQNDLGALNNYLAKVNYNQSLFDAPLHYNFYAASTGGGYYDMRNILNNTLVASNPTKAVTLVENHDTQPGQSLESTVQPWFKPLAYAFILTRSGGYPSVFYGDMYGTKGTTTREIPALKSKIEPLLKARKDYAYGTQRDYIDNPDVIGWTREGDSTKAKSGLATVITDGPGGSKRMYVGTSNAGEIWYDLTGNRTDKITIGSDGYATFPVNGGSVSVWVQQ

SEQ ID NO: 38307 - protein, 480 aa, Cytophaga sp.
NGTMMQYFEWYVPNDGQQWNRLRTDAPYLSSVGITAVWTPPAYKGTSQADVGYGPYDLYDLGEFNQKGTVRTKYGTKGELKSAVNTLHSNGIQVYGDVVMNHKAGADYTENVTAVEVNPSNRYQETSGEYNIQAWTGFNFPGRGTTYSNWKWQWFHFDGTDWDQSRSLSRIFKFDGKAWDWPVSSENGNYDYLMYADYDYDHPDVVNEMKKWGVWYANEVGLDGYRLDAVKHIKFSFLKDWVDNARAATGKEMFTVGEYWQNDLGALNNYLAKVNYNQSLFDAPLHYNFYAASTGGGYYDMRNILNNTLVASNPTKAVTLVENHDTQPGQSLESTVQPWFKPLAYAFILTRSGGYPSVFYGDMYGTKGTTTREIPALKSKIEPLLKARKDYAYGTQRDYIDNPDVIGWTREGDSTKAKSGLATVITDGPGGSKRMYVGTSNAGEIWYDLTGNRTDKITIGSDGYATFPVNKESVSVWVQQ

SEQ ID NO: 38308 - protein, 480 aa, Cytophaga sp.
NGTMMQYFEWYVPNDGQQWNRLRTDAPYLSSVGITAVWTPPAYKGTSQADVGYGPYDLYDLGEFNQKGTVRTKYGTKGELKSAVNTLHSNGIQVYGDVVMNHKAGADYTENVTAVEVNPSVRYQETSGEYNIQAWTGFNFPGRGTTYSNWKWQWFHFDGTDWDQSRSLSRIFKFDGKAWDWEVSSENGNYDYLMYADYDYDHPDVVNEMKKWGVWYANEVGLDGYRLDAVKHIKFQFLKDWVDNARAATGKEMFTVGEYWQNDLGALNNYLAKVNYNQSLFDAPLHYNFYAASTGGGYYDMRNILNNTLVASNPTKAVTLVENHDTQPGQSLESTVQPWFKPLAYAFILTRSGGYPSVFYGDMYGTKGTTTREIPALKSKIEPLLKARKDYAYGTQRDYIDNPDVIGWTREGDSTKAKSGLATVITDGPGGSKRMYVGTSNAGEIWYDLTGNRTDKITIGSDGYATFPVNGGSVSVWVQQ

SEQ ID NO: 38309 - protein, 480 aa, Cytophaga sp.
NGTMMQYFEWYVPNDGQQWNRLRTDAPYLSSVGITAVWTPPAYKGTSQADVGYGPYDLYDLGEFNQKGTVRTKYGTKGELKSAVNTLHSNGIQVYGDVVMNHKAGADYTENVTAVEVNPSNRYQETSGEYNIQAWTGFNFCGRGTTYSNWKWQWFHFDGTDWDQSRSLSRIFKFDGKAWDWEVSSENGNYDYLMYADYDYDHPDVVNEMKKWGVWYANEVGLDGYRLDAVKHIKFQFLKDWVDNARAATGKEMFTVGEYWQNDLGALNNYLAKVNYNQSLFDAPLHYNFYAASTGGGYYDMRNILNNTLVASNPTKAVTLVENHDTQPGQSLESTVQPWFKPLAYAFILTRSGGYPSVFYGDMYGTKGTTTREIPALKSKIEPLLKARKDYAYGTQRDYIDNPDVIGWTREGDSTKAKSGLATVITDGPGGSKRMYVGTSNAGEIWYDLTGNRTDKITIGSDGYATFPVNGGSVSVWVQQ

SEQ ID NO: 38310 - protein, 480 aa, Cytophaga sp.
NGTMMQYFEWYVPNDGQQWNRLRTDAPYLSSVGITAVWTPPAYKGTSQADVGYGPYDLYDLGEFNQKGTVRTKYGTKGELKSAVNTLHSNGIQVYGDVVMNHKAGADYTENVTAVEVNPSNRYQETSGEYNIQAWTGFNFPGRGTYYSNWKWQWFHFDGTDWDQSRSLSRIFKFDGKAWDWEVSSENGNYDYLMYADYDYDHPDVVNEMKKWGVWYANEVGLDGYRLDAVKHIKFQFLKDWVDNARAATGKEMFTVGEYWQNDLGALNNYLAKVNYNQSLFDAPLHYNFYAASTGGGYYDMRNILNNTLVASNPTKAVTLVENHDTQPGQSLESTVQPWFKPLAYAFILTRSGGYPSVFYGDMYGTKGTTTREIPALKSKIEPLLKARKDYAYGTQRDYIDNPDVIGWTREGDSTKAKSGLATVITDGPGGSKRMYVGTSNAGEIWYDLTGNRTDKITIGSDGYATFPVNGGSVSVWVQQ

SEQ ID NO: 38311 - protein, 480 aa, Cytophaga sp.
NGTMMQYFEWYVPNDGQQWNRLRTDAPYLSSVGITAVWTPPAYKGTSQADVGYGPYDLYDLGEFNQKGTVRTKYGTKGELKSAVNTLHSNGIQVYGDVVMNHKAGADYTENVTAVEVNPSNRYQETSGEYNIQAWTGFNFPGRGTTYSNWKWQWFHFDGTDWDQSRSLSRIFKFDGKAWDWEVSSENGNYDYLMYADYDYDHPDVVNEMKKWGVWYANEVGLDGYRLDAVKHIKFQFLKDWVDNARAATGKEMFTVGEYWQNDLGALNNYLAKVNYNQSLFDAPLHYNFYAASTGGGYYDMRNILNNTLVASNPTKAVTLVENHDTQPGQSLESTVQPWFKPLAYAFILTRSGGYPSVFYGDMYGTKGTTTREIPALKSKIEPLLKARKDYAYGTQRDWIDNPDVIGWTREGDSTKAKSGLATVITDGPGGSKRMYVGTSNAGEIWYDLTGNRTDKITIGSDGYATFPVNGGSVSVWVQQ

SEQ ID NO: 38312 - protein, 480 aa, Cytophaga sp.
NGTMMQYFEWYVPNDGQQWNRLRTDAPYLSSVGITAVWTPPAYKGTSQADVGYGPYDLYDLGEFNQKGTVRTKYGTKGELKSAVNTLHSNGIQVYGDVVMNHKAGADYTENVTAVEVNPSNRYQETSGEYNIQAWTGFNFPGRGTTYSNWKWQWFHFDGTDWDQSRSLSRIFKFDGKAWDWEVSSENGNYDYLMYADYDYDHPDVVNEMKKWGVWFANEVGLDGYRLDAVKHIKFQFLKDWVDNARAATGKEMFTVGEYWQNDLGALNNYLAKVNYNQSLFDAPLHYNFYAASTGGGYYDMRNILNNTLVASNPTKAVTLVENHDTQPGQSLESTVQPWFKPLAYAFILTRSGGYPSVFYGDMYGTKGTTTREIPALKSKIEPLLKARKDYAYGTQRDYIDNPDVIGWTREGDSTKAKSGLATVITDGPGGSKRMYVGTSNAGEIWYDLTGNRTDKITIGSDGYATFPVNGGSVSVWVQQ

SEQ ID NO: 38313 - protein, 480 aa, Cytophaga sp.
NGTMMQYFEWYVPNDGQQWNRLRTDAPYLSSVGITAVWTPPAYKGTSQADVGYGPYDLYDLGEFNQKGTVRTKYGTKGELKSAVNTLHSNGIQVYGDVVMNHKAGADYTENVTAVEVNPSNRYQETSGEYNIQAWTGFNFPGRGTTYSNWKWQWFHFDGTDWDQSRSLSRIFKFDGKAWDWEVSSENGNYDYLMYADYDYDHPDVVNEMKKWGVWYANEVGLDGYRLDAVKHIKFQFLKDFVDNARAATGKEMFTVGEYWQNDLGALNNYLAKVNYNQSLFDAPLHYNFYAASTGGGYYDMRNILNNTLVASNPTKAVTLVENHDTQPGQSLESTVQPWFKPLAYAFILTRSGGYPSVFYGDMYGTKGTTTREIPALKSKIEPLLKARKDYAYGTQRDYIDNPDVIGWTREGDSTKAKSGLATVITDGPGGSKRMYVGTSNAGEIWYDLTGNRTDKITIGSDGYATFPVNGGSVSVWVQQ

SEQ ID NO: 38314 - protein, 480 aa, Cytophaga sp.
NGTMMQYFEWYVPNDGQQWNRLRTDAPYLSSVGITAVWTPPAYKGTSQADVGYGPYDLYDLGEFNQKGTVRTKYGTKGELKSAVNTLHSNGIQVYGDVVMNHKAGADYTENVTAVEVNPSNRYQETSGEYNIQAWTGFNFPGRGTTYSNWKWQWFHFDGTDWDQSRSLSRIFKFDGKAWDWEVSSENGNYDYLMYADYDYDHPDVVNEMKKWGVWYANEVGLDGYRLDAVKHIKFQFLKDWVDNARAATGKEMFTVGEYWQNDLGALNNYLAKVNYNQSLFDAPLHYNFYAASTGGGYYDMHNILNNTLVASNPTKAVTLVENHDTQPGQSLESTVQPWFKPLAYAFILTRSGGYPSVFYGDMYGTKGTTTREIPALKSKIEPLLKARKDYAYGTQRDYIDNPDVIGWTREGDSTKAKSGLATVITDGPGGSKRMYVGTSNAGEIWYDLTGNRTDKITIGSDGYATFPVNGGSVSVWVQQ

SEQ ID NO: 38315 - protein, 480 aa, Cytophaga sp.
NGTMMQYFEWYVPNDGQQWNRLRTDAPYLSSVGITAVWTPPAYKGTSQADVGYGPYDLYDLGEFNQKGTVRTKYGTKGELKSAVNTLHSNGIQVYGDVVMNHKAGADYTENVTAVEVNPSNRYQETSGEYNIQAWTGFNFPGRGTTYSNWKWQWFHFDGTDWDQSRSLSRIFKFDGKAWDWEVSSENGNYDYLMYADYDYDHPDVVNEMKKWGVWYANEVGLDGYRLDAVKHIKFQFLKDWVDNARAATGKEMFTVGEYWQNDLGALNNYLAKVNYNQSLFDAPLHYNFYAASTGGGYYDMRNILNNTLVASNPTKAVTLVENHDTQPGQSLESTVQPWFKPLAYAFILTRSGGYPSVFYGDMYGTKGTTTREIPALKSKIEPLLKARKDYAYGTMRDYIDNPDVIGWTREGDSTKAKSGLATVITDGPGGSKRMYVGTSNAGEIWYDLTGNRTDKITIGSDGYATFPVNGGSVSVWVQQ

SEQ ID NO: 38316 - protein, 480 aa, Cytophaga sp.
NGTMMQYFEWYVPNDGQQWNRLRTDAPYLSSVGITAVWTPPAYKGTSQADVGYGPYDLYDLGEFNQKGTVRTKYGTKGELKSAVNTLHSNGIQVYGDVVMNHKAGADYTENVTAVEVNPSNRYQETSGEYNIQAWTGFNFPGRGTTYSNWKWQWFHFDGTDWDQSRSLSRIFKFDGKAWDWEVSSENGNYDYLMYADYDYDHPDVVNEMKKWGVWYANEVGLDGYRLDAVKHIKFQFLKDWVDNARAATGKEMFTVGEYWQNDLGALNNYLAKVNYNQSLFDAPLHYNFYAASTGGGYYDMRNILNNTLVASNPTKAVTLVENHDTQPGQSLESTVQPWFKPLAYAFILTRSGGYPSVFYGDMYGTKGTTTREIPALKSKIEPLLKARKDYAYGTQRDYIDNPDVIGWTREGDSTKAKSGLATVITDGPGGSKRMYVGTSNAAEIWYDLTGNRTDKITIGSDGYATFPVNGGSVSVWVQQ

SEQ ID NO: 38317 - protein, 480 aa, Cytophaga sp.
NGTMMQYFEWYVPNDGQQWNRLRTDAPYLSSVGITAVWTPPAYKGTSQADVGYGPYDLYDLGEFNQKGTVRTKYGTKGELKSAVNTLHSNGIQVYGDVVMNHKAGADYTENVTAVEVNPSNRYQETSGEYNIQAWTGFNFPGRGTTYSNWKWQWFHFDGTDWDQSRSLSRIFKFDGKAWDWEVSSENGNYDYLMYADYDYDHPDVVNEMKKWGVWYANEVGLDGYRLDAVKHIKFQFLKDWVDNARAATGKEMFTVGEYWQNDLEALNNYLAKVNYNQSLFDAPLHYNFYAASTGGGYYDMRNILNNTLVASNPTKAVTLVENHDTQPGQSLESTVQPWFKPLAYAFILTRSGGYPSVFYGDMYGTKGTTTREIPALKSKIEPLLKARKDYAYGTQRDYIDNPDVIGWTREGDSTKAKSGLATVITDGPGGSKRMYVGTSNAGEIWYDLTGNRTDKITIGSDGYATFPVNGGSVSVWVQQ

SEQ ID NO: 38318 - protein, 480 aa, Cytophaga sp.
NGTMMQYFEWYVPNDGQQWNRLRTDAPYLSSVGITAVWTPPAYKGTSQADVGYGPYDLYDLGEFNQKGTVRTKYGTKGELKSAVNTLHSNGIQVYGDVVMNHKAGADYTENVTAVEVNPSNRYQETSGEYNIQAWTGFNFPGRGTTYSNWKWQWFHFDGTDWDQSRSLSRIFKFDGKAWDWEVSSENGNYDYLMYADYDYDHPDVVNEMKKWGVWYANEVGLDGYRLDAVKHIKFQFLKDWVDNARAATGKEMFTVGEYWQNDLGALNNYLAKVNYNQSLFDAPLHYNFYAASTGGGYYDMRNILNNTLVASNPTKAVTLVENHDTQPGQSLESTVLPWFKPLAYAFILTRSGGYPSVFYGDMYGTKGTTTREIPALKSKIEPLLKARKDYAYGTQRDYIDNPDVIGWTREGDSTKAKSGLATVITDGPGGSKRMYVGTSNAGEIWYDLTGNRTDKITIGSDGYATFPVNGGSVSVWVQQ

SEQ ID NO: 38319 - protein, 480 aa, Cytophaga sp.
NGTMMQYFEWYVPNDGQQWNRLRTDAPYLSSVGITAVWTPPAYKGTSQADVGYGPYDLYDLGEFNQKGTVRTKYGTKGELKSAVNTLHSNGIQIYGDVVMNHKAGADYTENVTAVEVNPSNRYQETSGEYNIQAWTGFNFPGRGTTYSNWKWQWFHFDGTDWDQSRSLSRIFKFDGKAWDWEVSSENGNYDYLMYADYDYDHPDVVNEMKKWGVWYANEVGLDGYRLDAVKHIKFQFLKDWVDNARAATGKEMFTVGEYWQNDLGALNNYLAKVNYNQSLFDAPLHYNFYAASTGGGYYDMRNILNNTLVASNPTKAVTLVENHDTQPGQSLESTVQPWFKPLAYAFILTRSGGYPSVFYGDMYGTKGTTTREIPALKSKIEPLLKARKDYAYGTQRDYIDNPDVIGWTREGDSTKAKSGLATVITDGPGGSKRMYVGTSNAGEIWYDLTGNRTDKITIGSDGYATFPVNGGSVSVWVQQ

SEQ ID NO: 38320 - protein, 480 aa, Cytophaga sp.
NGTMMQYFEWYVPNDGQQWNRLRTDAPYLSSVGITAQWTPPAYKGTSQADVGYGPYDLYDLGEFNQKGTVRTKYGTKGELKSAVNTLHSNGIQVYGDVVMNHKAGADYTENVTAVEVNPSNRYQETSGEYNIQAWTGFNFPGRGTTYSNWKWQWFHFDGTDWDQSRSLSRIFKFDGKAWDWEVSSENGNYDYLMYADYDYDHPDVVNEMKKWGVWYANEVGLDGYRLDAVKHIKFQFLKDWVDNARAATGKEMFTVGEYWQNDLGALNNYLAKVNYNQSLFDAPLHYNFYAASTGGGYYDMRNILNNTLVASNPTKAVTLVENHDTQPGQSLESTVQPWFKPLAYAFILTRSGGYPSVFYGDMYGTKGTTTREIPALKSKIEPLLKARKDYAYGTQRDYIDNPDVIGWTREGDSTKAKSGLATVITDGPGGSKRMYVGTSNAGEIWYDLTGNRTDKITIGSDGYATFPVNGGSVSVWVQQ

SEQ ID NO: 38321 - protein, 480 aa, Cytophaga sp.
NGTMMQYFEWYVPNDGQQWNRLRTDAPYLSSVGITAVWTPPAYKGTSQADVGYGPYDLYDLGEFNQKGTVRTKYGTKGELKSAVNTLHSNGIQVYGDVVMNHKAGADYTENVTAVEVNPSNRYQETSGEYNIQAWTGFNFPGRGTTYSNWKWQWFHFDGTDWDQSRSLSRIFKFDGKAWDWEVSSENGNYDYLMYADYDYDHPDVVNEMKKWGVWYANEVGLDGYRLDAVKHIKFQFLKDWVDNARAATGKEMFTVGEYWQNDLGALNNYLAKVNYNQSLFDAPLHYNFYAASTGGGYYDMRNILNNTLVASNPTKAVTLVENHDTQPGQSLESTVQPWFKPLAYAFILTRSGGYPSVFYGDMYGTKGTTTREIPALKSKIEPLLKARKDYAYGTQRDYIDNPDVIGWTREGDSTKYKSGLATVITDGPGGSKRMYVGTSNAGEIWYDLTGNRTDKITIGSDGYATFPVNGGSVSVWVQQ

SEQ ID NO: 38322 - protein, 480 aa, Cytophaga sp.
NGTMMQYFEWYVPNDGQQWNRLRTDAPYLSSVGITAVWTPPAYKGTSQADVGYGPYDLYDLGEFNQKGTVRTKYGTKGELKSAVNTLHSNGIQVYGDVVMNHKAGADYTENVTAVEVNPSNRYQETSGEYNIQAWTGFNFPGRGTTYSNWKWQWFHFDGTDWDQSRSLSRIFKFDGKAWDWEVSSENGNYDYLMYADYDYDHPDVVNEMKKWGVWYANEVGLDGYRLDAVKHIKFQFLKDWVDNARAATGKEMFTVGEYWQNDLGALNNYLAKVNYNQSLFDAPLHYNFYAASTGGGYYDMRNILNNTLVASNPTKAVTLVENHDTQPGQSLESTVQPWFKPLAYAFILTRSGGYPSVFYGDMYGTKGTTTREIPALKSKIEPLLKARKDYAYGTQRDYIDNPDVIGWTREGDSTKAKSGLATVITDGPGGSKRMYVGTSNAGEIWYDLTGNRTDKITIGGDGYATFPVNGGSVSVWVQQ

SEQ ID NO: 38323 - protein, 480 aa, Cytophaga sp.
NGTMMQYFEWYVPNDGQQWNRLRTDAPYLSSVGITAVWTPPAYKGTSQADVGYGPYDLYDLGEFNQKGTVRTKYGTKGELKSAVNTLHSNGIQVYGDVVMNHKAGADYTENVTAVEVNPSNRYQETSGEYNIQAWTGFNFPGRGTTYSNWKWQWFHFDGTDWDQSRSLSRIFKFDGKAWDWEVSSENGNYDYLMYADYDYDHPDVVNEMKKWGVWYANEVGLDGYRLDAVKHIKRQFLKDWVDNARAATGKEMFTVGEYWQNDLGALNNYLAKVNYNQSLFDAPLHYNFYAASTGGGYYDMRNILNNTLVASNPTKAVTLVENHDTQPGQSLESTVQPWFKPLAYAFILTRSGGYPSVFYGDMYGTKGTTTREIPALKSKIEPLLKARKDYAYGTQRDYIDNPDVIGWTREGDSTKAKSGLATVITDGPGGSKRMYVGTSNAGEIWYDLTGNRTDKITIGSDGYATFPVNGGSVSVWVQQ

SEQ ID NO: 38324 - protein, 480 aa, Cytophaga sp.
NGTMMQYFEWTVPNDGQQWNRLRTDAPYLSSVGITAVWTPPAYKGTSQADVGYGPYDLYDLGEFNQKGTVRTKYGTKGELKSAVNTLHSNGIQVYGDVVMNHKAGADYTENVTAVEVNPSNRYQETSGEYNIQAWTGFNFPGRGTTYSNWKWQWFHFDGTDWDQSRSLSRIFKFDGKAWDWEVSSENGNYDYLMYADYDYDHPDVVNEMKKWGVWYANEVGLDGYRLDAVKHIKFQFLKDWVDNARAATGKEMFTVGEYWQNDLGALNNYLAKVNYNQSLFDAPLHYNFYAASTGGGYYDMRNILNNTLVASNPTKAVTLVENHDTQPGQSLESTVQPWFKPLAYAFILTRSGGYPSVFYGDMYGTKGTTTREIPALKSKIEPLLKARKDYAYGTQRDYIDNPDVIGWTREGDSTKAKSGLATVITDGPGGSKRMYVGTSNAGEIWYDLTGNRTDKITIGSDGYATFPVNGGSVSVWVQQ

SEQ ID NO: 38325 - protein, 480 aa, Cytophaga sp.
NGTMMQYFEWYVPNDGQQWNRLRTDAPYLSSVGITAVWTPPAYKGTSQADVGYGPYDLYDLGEFNQKGTVRTKYGTKGELKSAVNTLHSNGIQVFGDVVMNHKAGADYTENVTAVEVNPSNRYQETSGEYNIQAWTGFNFPGRGTTYSNWKWQWFHFDGTDWDQSRSLSRIFKFDGKAWDWEVSSENGNYDYLMYADYDYDHPDVVNEMKKWGVWYANEVGLDGYRLDAVKHIKFQFLKDWVDNARAATGKEMFTVGEYWQNDLGALNNYLAKVNYNQSLFDAPLHYNFYAASTGGGYYDMRNILNNTLVASNPTKAVTLVENHDTQPGQSLESTVQPWFKPLAYAFILTRSGGYPSVFYGDMYGTKGTTTREIPALKSKIEPLLKARKDYAYGTQRDYIDNPDVIGWTREGDSTKAKSGLATVITDGPGGSKRMYVGTSNAGEIWYDLTGNRTDKITIGSDGYATFPVNGGSVSVWVQQ

SEQ ID NO: 38326 - protein, 480 aa, Cytophaga sp.
NGTMMQYFEWYVPNDGQQWNRLRTDAPYLSSVGITAVWTPPAYKGTSQADVGYGPYDLYDLGEFNQKGTVRTKYGTKGELKSAVNTLHSNGIQVYGDVVMNHKAGADYTENVTAVEVNPSNRYQETSGEYNIQAWTGFNFPGRGTTYSNWKWQWFHFDGTDWDQSRSLSRIFKFDGKAWDWEVSSENGNYDYLMYADYDYDHPDVVNEMKKWGVWYANEVGLDGYRLDAVKHIKFQFLKDWVDNARAATGKEMFTVGEYWQNDLGALNNYLAKVNYNQSLFDAPLHYNFYAASTGGGYYDMRNILNNTLVASNPTKAVTLVENHDTQPGQSLESTVQPWFKPLAYAFILTRSGGYPSVFYGDMYGTKGTTTREIPALKSKIEPLLKARKDYAYGTQRDYIDNPDVIGWTREGDSTKAKSGLATVITDGPGGSKRMYVGTSNASEIWYDLTGNRTDKITIGSDGYATFPVNGGSVSVWVQQ

SEQ ID NO: 38327 - protein, 480 aa, Cytophaga sp.
NGTMMQYFEWYVPNDGQQWNRLRTDAPYLSSVGITAVWTPPAYKGTSQADVGYGPYDLYDLGEFNQKGTVRTKYGTKGELKSAVNTLHSNGIQVYGDVVMNHKAGADYTENVTAVEVNPSNRYQETSGEYNIQAWTGFNFPGRGTTYSNWAWQWFHFDGTDWDQSRSLSRIFKFDGKAWDWEVSSENGNYDYLMYADYDYDHPDVVNEMKKWGVWYANEVGLDGYRLDAVKHIKFQFLKDWVDNARAATGKEMFTVGEYWQNDLGALNNYLAKVNYNQSLFDAPLHYNFYAASTGGGYYDMRNILNNTLVASNPTKAVTLVENHDTQPGQSLESTVQPWFKPLAYAFILTRSGGYPSVFYGDMYGTKGTTTREIPALKSKIEPLLKARKDYAYGTQRDYIDNPDVIGWTREGDSTKAKSGLATVITDGPGGSKRMYVGTSNAGEIWYDLTGNRTDKITIGSDGYATFPVNGGSVSVWVQQ

SEQ ID NO: 38328 - protein, 480 aa, Cytophaga sp.
NGTMMQYFEWYVPNDGQQWNRLRTDAPYLSSVGITAVWTPPAYKGTSQADVGYGPYDLYDLGEFNQKGTVRTKYGTKGELKSAVNTLHSNGIQVYGDVVMNHKAGADYTENVTAVEVNPSNRYQETSGEYNIQAWTGFNFPGRGTTYSNWKWQWFHFDGTDWDQSRSLSRIFKFDGKAWDWEVSSENGNYDYLMYADYDYDHPDVVNEMKKWGVWYANEVGLDGYRLDAVKHIKFQFLKDWVDNARAATGKEMFTVGEYWQNDLGALNNYLAKVNYNQSLFDAPLHYNFYAASTGGGYYDMRNILNNTLVASNPTKAVTLVENHDTQPGQSLFSTVQPWFKPLAYAFILTRSGGYPSVFYGDMYGTKGTTTREIPALKSKIEPLLKARKDYAYGTQRDYIDNPDVIGWTREGDSTKAKSGLATVITDGPGGSKRMYVGTSNAGEIWYDLTGNRTDKITIGSDGYATFPVNGGSVSVWVQQ

SEQ ID NO: 38329 - protein, 480 aa, Cytophaga sp.
NGTMMQYFEWYVPNDGQQWNRLRTDAPYLSSVGITAVWTPPAYKGTSQADVGYGPYDLYDLGEFNQKGTVRTKYGTKGELKSAVNTLHSNGIQVYGDVVMNHKAGADYTENVTAVEVNPSNRYQETSGEYNIQAWTGFNFPGRGTTYSNWKWQWFHFDGTDWDQSRSLSRIFKFDGKAWDWEVSSENGNYDYLMYADYDYDHPDVVNEMKKWGVWYANEVGLDGYRLDAVKHIKFQFLKDWVDNARAATGKEMFTVGEYWQNDLGALNNYLAKVNYNQSLFDAPLHYNFYAASTGGGYYDMRNILNNTLVASNPTKAVTLVENHDTQPGQSLESTVQPWFKPLAYAFILTRSGGYPSVFYGDMYGTKGTTTREIPALKSKIEPLLKARKDYAYGTQRDYIDNPDVIGWTREGDSTKAKSGLATVITDGPGGSKRMYVGTSNAGEIWYDLTGNRTDKITIGSDGYATFPVNGGSFSVWVQQ

SEQ ID NO: 38330 - protein, 480 aa, Cytophaga sp.
NGTMMQYFEWYVPNDGQQWNRLRTDAPYLSSVGITAVWTPPAYKGTSQADVGYGPYDLYDLGEFNQKGTVRTKYGTKGELKSAVNTLHSNGIQVYGDVVMNHKAGADYTENVTAVEVNPSNRYQETSGEYNIQAWTGFNFKGRGTTYSNWKWQWFHFDGTDWDQSRSLSRIFKFDGKAWDWEVSSENGNYDYLMYADYDYDHPDVVNEMKKWGVWYANEVGLDGYRLDAVKHIKFQFLKDWVDNARAATGKEMFTVGEYWQNDLGALNNYLAKVNYNQSLFDAPLHYNFYAASTGGGYYDMRNILNNTLVASNPTKAVTLVENHDTQPGQSLESTVQPWFKPLAYAFILTRSGGYPSVFYGDMYGTKGTTTREIPALKSKIEPLLKARKDYAYGTQRDYIDNPDVIGWTREGDSTKAKSGLATVITDGPGGSKRMYVGTSNAGEIWYDLTGNRTDKITIGSDGYATFPVNGGSVSVWVQQ

SEQ ID NO: 38331 - protein, 480 aa, Cytophaga sp.
NGTMMQYFEWYVPNDGQQWNRLRTDAPYLSSVGITAVWTPPAYKGTSQADVGYGPYDLYDLGEFNQKGTVRTKYGTKGELKSAVNTLHSNGIQVYGDVVMNHKAGADYTENVTAYEVNPSNRYQETSGEYNIQAWTGFNFPGRGTTYSNWKWQWFHFDGTDWDQSRSLSRIFKFDGKAWDWEVSSENGNYDYLMYADYDYDHPDVVNEMKKWGVWYANEVGLDGYRLDAVKHIKFQFLKDWVDNARAATGKEMFTVGEYWQNDLGALNNYLAKVNYNQSLFDAPLHYNFYAASTGGGYYDMRNILNNTLVASNPTKAVTLVENHDTQPGQSLESTVQPWFKPLAYAFILTRSGGYPSVFYGDMYGTKGTTTREIPALKSKIEPLLKARKDYAYGTQRDYIDNPDVIGWTREGDSTKAKSGLATVITDGPGGSKRMYVGTSNAGEIWYDLTGNRTDKITIGSDGYATFPVNGGSVSVWVQQ

SEQ ID NO: 38332 - protein, 480 aa, Cytophaga sp.
NGTMMQYFEWYVPNDGQQWNRLRTDAPYLSSVGITAVWTPPAYKGTSQADVGYGPYDLYDLGEFNQKGTVRTKYGTKGELKSAVNTLHSNGIQVYGDVVMNHKAGADYTENVTAVEVNPSNRYQETSGEYNIQSWTGFNFPGRGTTYSNWKWQWFHFDGTDWDQSRSLSRIFKFDGKAWDWEVSSENGNYDYLMYADYDYDHPDVVNEMKKWGVWYANEVGLDGYRLDAVKHIKFQFLKDWVDNARAATGKEMFTVGEYWQNDLGALNNYLAKVNYNQSLFDAPLHYNFYAASTGGGYYDMRNILNNTLVASNPTKAVTLVENHDTQPGQSLESTVQPWFKPLAYAFILTRSGGYPSVFYGDMYGTKGTTTREIPALKSKIEPLLKARKDYAYGTQRDYIDNPDVIGWTREGDSTKAKSGLATVITDGPGGSKRMYVGTSNAGEIWYDLTGNRTDKITIGSDGYATFPVNGGSVSVWVQQ

SEQ ID NO: 38333 - protein, 480 aa, Cytophaga sp.
NGTMMQYFEWYVPNDGQQWNRLRTDAPYLSSVGITAVWTPPAYKGTSQADVGYGPYDLYDLGEFNQKGTVRTKYGTKGELKSAVNTLHSNGIQVYGDVVMNHKAGADYTENVTAVEVNPSNRYQETSGEYNIQAWTGFNFPGRGTTYSNWKWQWFHFDGTDWDQSRSLSRIFKFDGKAWDWEVSSENGNYDYLMYADYDYDHPDVVNEMKKWGVWYANEVGLDGYRLDAVKHIKFQFLKDWVDNARAATGKEMFTVGEYWQNDLGALNNYLAKVNYNQSLFDAPLHYNFYAASTGGGYYDMRNILNNTLVASNPTKAVTLVENHDTQPGQSLESTVQPWFKPLAYAFILTRSGGYPSVFYGDMYGTKGTTTREIPALKSKIEPLLKARKDYAYGTQRDYIDNPDVIGWTREGDSTKAKSGLATVITDGPGGSKRMYVGTSNAGEIWYDLTGNRTDKITIGSDGYATFPVNGGSYSVWVQQ

SEQ ID NO: 38334 - protein, 480 aa, Cytophaga sp.
NGTMMQYFEWYVPNDGQQWNRLRTDAPYLSSVGITAVWTPPAYKGTSQADVGYGPYDLYDLGEFNQKGTVRTKYGTKGELKSAVNTLHSNGIQVYGDVVMNHKAGADYTENVTAVEVNPSNRYQETSGEYNIQAWTGFNFPGRGTTYSNWKWQWFHFDGTDWDQSRSLSRIFKFDGKAWDWEVSSENGNYDYLMYADYDYDHPDVVNEMKKWGVWYANEVGLDGYRLDAVKHIKFQFLKDWVDNARAATGKEMFTVGEYWQNDLGALNNYIAKVNYNQSLFDAPLHYNFYAASTGGGYYDMRNILNNTLVASNPTKAVTLVENHDTQPGQSLESTVQPWFKPLAYAFILTRSGGYPSVFYGDMYGTKGTTTREIPALKSKIEPLLKARKDYAYGTQRDYIDNPDVIGWTREGDSTKAKSGLATVITDGPGGSKRMYVGTSNAGEIWYDLTGNRTDKITIGSDGYATFPVNGGSVSVWVQQ

SEQ ID NO: 38335 - protein, 480 aa, Cytophaga sp.
NGTMMQYFEWYVPNDGQQWNRLRTDAPYLSSVGITAVWTPPAYKGTSQADVGYGPYDLYDLGEFNQKGTVRTKYGTKGELKSAVNTLHSNGIQVYGDVVMNHKAGADYTENVTAVEVNPSNRYQETSGEYNIQAWTGFNFPGRGTTYSNWKWQWFHFDGTDWDQSRSLSRIFKFDGKAWDWEVSSENGNYDYLMYADYDYDHPDVVNEMKKWGVWYANEVGLDGYRLDAVKHIKFQFLKDWVDNARAATGKEMFTVGEYWQNDLGALNNYLAKVNYNQSLFDAPLHYNFYAASTGGGYYDMRNILNNTLVASNPTKAVTLVENHDTQPGQSLESTVQPWFKPLAYAFILTRSGGYPSVFYGDMYGTKGTTTREIPALKSKIEPLLKARKDYAYGTFRDYIDNPDVIGWTREGDSTKAKSGLATVITDGPGGSKRMYVGTSNAGEIWYDLTGNRTDKITIGSDGYATFPVNGGSVSVWVQQ

SEQ ID NO: 38336 - protein, 480 aa, Cytophaga sp.
NGTMMQYFEWYVPNDGQQWNRLRTDAPYLSSVGITAVWTPPAYKGTSQADVGYGPYDLYDLGEFNQKGTVRTKYGTKGELKSAVNTLHSNGIQVYGDVVMNHKAGADYTENVTAVEVNPSNRYQETSGEYNIQAWTGFNFPGRGTTYSNWKWQWFHFDGTDWDQSRSLSRIFKFDGKAWDWEVSSENGNYDYLMYADYDYDHPDVVNEMKKWGVWYANEVGLDGYRLDAVKHIKFQFLKDWVDNARAATGKEMFTVGEYWQNDLGALNNYLAKVNYNQSLFDAPLHYNFYAASTGGGYYDMRNILNNTLVASNPTKAVTLVENHDTQPGQSLESTVQPWFKPLAYAFILTRSGGYPSVFYGDMYGTKGTTTREIPALKSKIEPLLKARKDYAYGTQRDYIDNPDVIGWIREGDSTKAKSGLATVITDGPGGSKRMYVGTSNAGEIWYDLTGNRTDKITIGSDGYATFPVNGGSVSVWVQQ

SEQ ID NO: 38337 - protein, 480 aa, Cytophaga sp.
NGTMMQYFEWYVPNDGQQWNRLRTDAPYLSSVGITAVWTPPAYKGTSQADVGYGPYDLYDLGEFNQKGTVRTKYGTKGELKSAVNTLHSNGIQVYGDVVMNHKAGADYTENVTAVEVNPSNRYQETSGEYNIQAWTGFNFPGRGTTYSNWKWQWFHFDGTDWDQSRSLSRIFKFDGKAWDWEVSSENGNYDYLMYADYDYDHPDVVNEMKKWGVWYANEVGLDGYRLDAVKHIKFQFLKDWVDNARAATGKEMFTVGEYWQNDLGALNNYLAKVNYNQSLFDAPLHYNFYAASTGGGYYDMMNILNNTLVASNPTKAVTLVENHDTQPGQSLESTVQPWFKPLAYAFILTRSGGYPSVFYGDMYGTKGTTTREIPALKSKIEPLLKARKDYAYGTQRDYIDNPDVIGWTREGDSTKAKSGLATVITDGPGGSKRMYVGTSNAGEIWYDLTGNRTDKITIGSDGYATFPVNGGSVSVWVQQ

SEQ ID NO: 38338 - protein, 480 aa, Cytophaga sp.
NGTMMQYFEWYVPNDGQQWNRLRTDAPYLSSVGITAVWTPPAYKGTTQADVGYGPYDLYDLGEFNQKGTVRTKYGTKGELKSAVNTLHSNGIQVYGDVVMNHKAGADYTENVTAVEVNPSNRYQETSGEYNIQAWTGFNFPGRGTTYSNWKWQWFHFDGTDWDQSRSLSRIFKFDGKAWDWEVSSENGNYDYLMYADYDYDHPDVVNEMKKWGVWYANEVGLDGYRLDAVKHIKFQFLKDWVDNARAATGKEMFTVGEYWQNDLGALNNYLAKVNYNQSLFDAPLHYNFYAASTGGGYYDMRNILNNTLVASNPTKAVTLVENHDTQPGQSLESTVQPWFKPLAYAFILTRSGGYPSVFYGDMYGTKGTTTREIPALKSKIEPLLKARKDYAYGTQRDYIDNPDVIGWTREGDSTKAKSGLATVITDGPGGSKRMYVGTSNAGEIWYDLTGNRTDKITIGSDGYATFPVNGGSVSVWVQQ

SEQ ID NO: 38339 - protein, 480 aa, Cytophaga sp.
NGTMMQYFEWYVPNDGQQWNRLRTDAPYLSSVGITAVWTPPAYKGTSQADVGYGPYDLYDLGEFNQKGTVRTKYGTKGELKSAVNTLHSNGIQVYGDVVMNHKAGADYTENVTAVEVNPSNRYQETSGEYNIQAWTGFNFPGRGTTYSNWKWQWFHFDGTDWDQSRSLSRIFKFDGKAWDWEVSSENGNYDYLMYADYDYDHPDVVNEMKKWGVWYANEVGLDGYRLDAVKHIKFQFLKDWVDNARAATGKEMFTVGEYWQNDLGALNNYLAKVNYNQSLFDAPLHYNFYNASTGGGYYDMRNILNNTLVASNPTKAVTLVENHDTQPGQSLESTVQPWFKPLAYAFILTRSGGYPSVFYGDMYGTKGTTTREIPALKSKIEPLLKARKDYAYGTQRDYIDNPDVIGWTREGDSTKAKSGLATVITDGPGGSKRMYVGTSNAGEIWYDLTGNRTDKITIGSDGYATFPVNGGSVSVWVQQ

SEQ ID NO: 38340 - protein, 480 aa, Cytophaga sp.
NGTMMQYFEWYVPNDGQQWNRLRTDAPYLSSVGITAVWTPPAYKGTSQADVGYGPYDLYDLGEFNQKGTVRTKYGTKGELKSAVNTLHSNGIQVYGDVVMNHKAGADYTENVTAVEVNPSNRYQETSGEYNIQAWTGFNFPGRGTTYSNWKWQWFHFDGTDWDQSRSLSRIFKFDGKAWDWEVSSENGNYDYLMYADYDYDHPDVVNEMKKWGVWYANEVGLDGYRLDAVKHIKFQFLKDWVDNARAATGKEMFTVGEYWQNDLGALNNYLAKVNYNQSLFDAPLHYNFYAASTGGGYYDMRNILNNTLVASNPTKAVTLVENHDTQPGQSLESTVQPWFKPLAYAFILTRSGGYPSVFYGDMYGTKGTTTREIPALKSKIEPLLKARKDYAYGTQRDYIDNPDVIGWTREGDSTKAKSGLATVITDGPGGSKRMCVGTSNAGEIWYDLTGNRTDKITIGSDGYATFPVNGGSVSVWVQQ

SEQ ID NO: 38341 - protein, 480 aa, Cytophaga sp.
NGTMMQYFEWYVPNDGQQWNRLRTDAPYLSSVGITAVWTPPAYKGTSQADVGYGPYDLYDLGEFNQKGTVRTKYGTKGELKSAVNTLHSNGIQVYGDVVMNHKAGADYTENVTAVEVNPSNRYQETSGEYNIQAWTGFNFPGRGTTYSNWKWQWFHFDGTDWDQSRSLSRIFKFDGKAWDWEVSSENGNYDYLMYADYDYDHPDVVNEMKKWGVWYANEVGLDGYRLDAVKHIKFQFLKDWVDNARAATGKEMFTVGEYWQNDLGALNNYLAKVNYNQSLFDAPLHYNFYAASTGGGYYDMRNILNNTLVASNPTKAVTLVENHDTQPGQSLESTVQPWFKPLAYAFILTRSGGYPSVFYGDMYGTKGTTTREIPALKSKIEPLLKARKDYAYGTQRDYIDNPDVIGWTREGDSTKAKSGLATVITDGPGGSKGMYVGTSNAGEIWYDLTGNRTDKITIGSDGYATFPVNGGSVSVWVQQ

SEQ ID NO: 38342 - protein, 480 aa, Cytophaga sp.
NGTMMQYFEWYVPNDGQQWNRLRTDAPYLSSVGITAVWTPPAYKGTSQADVGYGPYDLYDLGEFNQKGTVRTKYGTKGELKSAVNTLHSNGIQVYGDVVMNHKAGADYTENVTAVEVNPSNRYQETIGEYNIQAWTGFNFPGRGTTYSNWKWQWFHFDGTDWDQSRSLSRIFKFDGKAWDWEVSSENGNYDYLMYADYDYDHPDVVNEMKKWGVWYANEVGLDGYRLDAVKHIKFQFLKDWVDNARAATGKEMFTVGEYWQNDLGALNNYLAKVNYNQSLFDAPLHYNFYAASTGGGYYDMRNILNNTLVASNPTKAVTLVENHDTQPGQSLESTVQPWFKPLAYAFILTRSGGYPSVFYGDMYGTKGTTTREIPALKSKIEPLLKARKDYAYGTQRDYIDNPDVIGWTREGDSTKAKSGLATVITDGPGGSKRMYVGTSNAGEIWYDLTGNRTDKITIGSDGYATFPVNGGSVSVWVQQ

SEQ ID NO: 38343 - protein, 480 aa, Cytophaga sp.
NGTMMQYFEWYVPNDGQQWNRLRTDAPYLSSVGITAVWTPPAYKGTSQADVGYGPYDLYDLGEFNQKGTVRTKYGTKGELKSAVNTLHSNGIQVYGDVVMNHKAGADYTENVTAVEVNPSNRYQETSGEYNIQAWTGFNFPGRGTTYSNWKWQWFHFDGTDWDQQRSLSRIFKFDGKAWDWEVSSENGNYDYLMYADYDYDHPDVVNEMKKWGVWYANEVGLDGYRLDAVKHIKFQFLKDWVDNARAATGKEMFTVGEYWQNDLGALNNYLAKVNYNQSLFDAPLHYNFYAASTGGGYYDMRNILNNTLVASNPTKAVTLVENHDTQPGQSLESTVQPWFKPLAYAFILTRSGGYPSVFYGDMYGTKGTTTREIPALKSKIEPLLKARKDYAYGTQRDYIDNPDVIGWTREGDSTKAKSGLATVITDGPGGSKRMYVGTSNAGEIWYDLTGNRTDKITIGSDGYATFPVNGGSVSVWVQQ

SEQ ID NO: 38344 - protein, 480 aa, Cytophaga sp.
NGTMMQYFEWYVPNDGQQWNRLRTDAPYLSSVGITAVWTPPAYKGTSQADVGYGPYDLYDLGEFNQKGTVRTKYGTKGELKSAVNTLHSNGIQVYGDVVMNHKAGADYTENVTAVEVNPSNRYQETSGEYNIQAWTGFNFPGRGTTYSNWKWQWFHFDGTDWDQSRSLSRIFKFDGKAWDWEVSSENGNYDYLMYADYDYDHPDVVNEMKKWGVWYANEVGLDGYRLDAVKHIKFQFLKDWVDNARAATGKEMFTVGEYWQNDLGALNNYLAKVNYNQSLFDAPLHYNFYAASTGGGYYDMRNILNNTLVASNPTKAVTLVENHDTQPGQSLESTVQPWFKPLAYAFILTRSGGYPSVFYGDMYGTKGTTTREIPALKSKIEPLLKARKDYAYGTQRDYIDNPDVIGWTREGDSTKAKSGLATVITDGPGGSKHMYVGTSNAGEIWYDLTGNRTDKITIGSDGYATFPVNGGSVSVWVQQ

SEQ ID NO: 38345 - protein, 480 aa, Cytophaga sp.
NGTMMQYFEWYVPNDGQQWNRLRTDAPYLSSVGITAVWTPPAYKGTSQADVGYGPYDLYDLGEFNQKGTVRTKYGTKGELKSAVNTLHSNGIQVYGDVVMNHKAGADYTENVTAVEVNPSNRYQETVGEYNIQAWTGFNFPGRGTTYSNWKWQWFHFDGTDWDQSRSLSRIFKFDGKAWDWEVSSENGNYDYLMYADYDYDHPDVVNEMKKWGVWYANEVGLDGYRLDAVKHIKFQFLKDWVDNARAATGKEMFTVGEYWQNDLGALNNYLAKVNYNQSLFDAPLHYNFYAASTGGGYYDMRNILNNTLVASNPTKAVTLVENHDTQPGQSLESTVQPWFKPLAYAFILTRSGGYPSVFYGDMYGTKGTTTREIPALKSKIEPLLKARKDYAYGTQRDYIDNPDVIGWTREGDSTKAKSGLATVITDGPGGSKRMYVGTSNAGEIWYDLTGNRTDKITIGSDGYATFPVNGGSVSVWVQQ

SEQ ID NO: 38346 - protein, 480 aa, Cytophaga sp.
NGTMMQYFEWYVPNDGQQWNRLRTDAPYLSSVGITAVWTPPAYKGTSQADVGYGPYDLYDLGEFNQKGTVRTKYGTKGELKSAVNTLHSNGIQVYGDVVMNHKAGADYTENVTAVEVNPSNRYQETSGEYNIQAWTGFNFPGRGTTYSNWKWQWFHFDGTDWDQSRSLSRIFKFDGKAWDWEVSSENGNYDYLMYADYDYDHPDVENEMKKWGVWYANEVGLDGYRLDAVKHIKFQFLKDWVDNARAATGKEMFTVGEYWQNDLGALNNYLAKVNYNQSLFDAPLHYNFYAASTGGGYYDMRNILNNTLVASNPTKAVTLVENHDTQPGQSLESTVQPWFKPLAYAFILTRSGGYPSVFYGDMYGTKGTTTREIPALKSKIEPLLKARKDYAYGTQRDYIDNPDVIGWTREGDSTKAKSGLATVITDGPGGSKRMYVGTSNAGEIWYDLTGNRTDKITIGSDGYATFPVNGGSVSVWVQQ

SEQ ID NO: 38347 - protein, 480 aa, Cytophaga sp.
NGTMMQYFEWYVPNDGQQWNRLRTDAPYLSSVGITAVWTPPAYKGTSQADVGYGPYDLYDLGEFNQKGTVRTKYGTKGELKSAVNTLHSNGIQVYGDVVMNHKAGADYTENVTAVEVNPSNRYQETSGEYNIQAWTGFNFPGRGTTYSNWKWQWFHFDGTDWDQSRSLSRIFKFDGKAWDWEVSSENANYDYLMYADYDYDHPDVVNEMKKWGVWYANEVGLDGYRLDAVKHIKFQFLKDWVDNARAATGKEMFTVGEYWQNDLGALNNYLAKVNYNQSLFDAPLHYNFYAASTGGGYYDMRNILNNTLVASNPTKAVTLVENHDTQPGQSLESTVQPWFKPLAYAFILTRSGGYPSVFYGDMYGTKGTTTREIPALKSKIEPLLKARKDYAYGTQRDYIDNPDVIGWTREGDSTKAKSGLATVITDGPGGSKRMYVGTSNAGEIWYDLTGNRTDKITIGSDGYATFPVNGGSVSVWVQQ

SEQ ID NO: 38348 - protein, 480 aa, Cytophaga sp.
NGTMMQYFEWYVPNDGQQWNRLRTDAPYLSSVGITAVWTPPAYKGTSQADVGYGPYDLYDLGEFNQKGTVRTKYGTKGELKSAVNTLHSNGIQVYGDVVMNHKAGADYTENVTAVEVNPSNRYQETSGEYNIQAWTGFNFPGRGTTYSNWKWQWFHFDGTDWDQSRSLSRIFKFDGKAWDWEVSSENGNYDYLMYADYDYDHPDVVNEMKKWGVWYANEVGLDGYRLDAVKHIKFQFLKDWVDNARAATGKEMFTVGEYWQNDLGALNNYLAKVNYNQSLFDAPLHYNFYAASTGGGYYDMRNILNNTLVASNPTKAVTLVENHDTQPGQSLESTVQPWFKPLAYAFILTRSGGYPSVFYGDMYGTKGTTTREIPALKSKIEPLLKARKDYAYGTQRDYIDNPDAIGWTREGDSTKAKSGLATVITDGPGGSKRMYVGTSNAGEIWYDLTGNRTDKITIGSDGYATFPVNGGSVSVWVQQ

SEQ ID NO: 38349 - protein, 480 aa, Cytophaga sp.
NGTMMQYFEWYVPNDGQQWNRLRTDAPYLSSVGITAVWTPPAYKGTNQADVGYGPYDLYDLGEFNQKGTVRTKYGTKGELKSAVNTLHSNGIQVYGDVVMNHKAGADYTENVTAVEVNPSNRYQETSGEYNIQAWTGFNFPGRGTTYSNWKWQWFHFDGTDWDQSRSLSRIFKFDGKAWDWEVSSENGNYDYLMYADYDYDHPDVVNEMKKWGVWYANEVGLDGYRLDAVKHIKFQFLKDWVDNARAATGKEMFTVGEYWQNDLGALNNYLAKVNYNQSLFDAPLHYNFYAASTGGGYYDMRNILNNTLVASNPTKAVTLVENHDTQPGQSLESTVQPWFKPLAYAFILTRSGGYPSVFYGDMYGTKGTTTREIPALKSKIEPLLKARKDYAYGTQRDYIDNPDVIGWTREGDSTKAKSGLATVITDGPGGSKRMYVGTSNAGEIWYDLTGNRTDKITIGSDGYATFPVNGGSVSVWVQQ

SEQ ID NO: 38350 - protein, 480 aa, Cytophaga sp.
NGTMMQYFEWYVPNDGQQWNRLRTDAPYLSSVGITAVWTPPAYKGTSQADVGYGPYDLYDLGEFNQKGTVRTKYGTKGELKSAVNTLHSNGIQVYGDVVMNHKAGADYTENVTAVEVNPSNRYQETSGEYNIQAWTGFNFPGRGTTYSNWKWQWFHFDGTDWDQSRSLSRIFKFDGKAWDWEVSSENGNYDYLMYADYDYDHPDVVNEMKKWGVWYANEVGLDGYRLDAVKHIKFQFLKDWVDNARAATGKEMFTVGEYWQNDLGALNNYLAKVNYNQSLFDAPLHYNFYAASTGGGYYDMRNILNNTLVASNPTKAVTLVENHDTQPGQSLESTVQPWFKPLAYAFILTRSGGYPSVFYGDMYGTKGTTTREIPALKSKIEPLLKARKDYAYGTQRDYIDNPDVIGWTREGDSTKAKSGLATVITDGPGGSKRMRVGTSNAGEIWYDLTGNRTDKITIGSDGYATFPVNGGSVSVWVQQ

SEQ ID NO: 38351 - protein, 480 aa, Cytophaga sp.
NGTMMQYFEWYVPNDGQQWNRLRTDAPYLSSVGITARWTPPAYKGTSQADVGYGPYDLYDLGEFNQKGTVRTKYGTKGELKSAVNTLHSNGIQVYGDVVMNHKAGADYTENVTAVEVNPSNRYQETSGEYNIQAWTGFNFPGRGTTYSNWKWQWFHFDGTDWDQSRSLSRIFKFDGKAWDWEVSSENGNYDYLMYADYDYDHPDVVNEMKKWGVWYANEVGLDGYRLDAVKHIKFQFLKDWVDNARAATGKEMFTVGEYWQNDLGALNNYLAKVNYNQSLFDAPLHYNFYAASTGGGYYDMRNILNNTLVASNPTKAVTLVENHDTQPGQSLESTVQPWFKPLAYAFILTRSGGYPSVFYGDMYGTKGTTTREIPALKSKIEPLLKARKDYAYGTQRDYIDNPDVIGWTREGDSTKAKSGLATVITDGPGGSKRMYVGTSNAGEIWYDLTGNRTDKITIGSDGYATFPVNGGSVSVWVQQ

SEQ ID NO: 38352 - protein, 480 aa, Cytophaga sp.
NGTMMQYFEWYVPNDGQQWNRLRTDAPYLSSVGITAVWTPPAYKGTSQADVGYGPYDLYDLGEFNQKGTVRTKYGTKGELKSAVNTLHSNGIQVYGDVVMNHKAGADYTENVTAVEVNPSNRYQETSGEYNIQAWTGFNFPGRGTTYSNWKWQWFHFDGTDWDQSRSLSRIFKFDGKAWDWEVSSENGNYDYLMYADYDYDHPDVVNEMKKWGVWYANEVGLDGYRLDAVKHIKFQFLKDWVDNARAATGKEMFTVGEYWQNDLGALNNYLAKVNYNQSLFDAPLHYNFYAASTGGGYYDMRNILNNTLVASNPTKAVTLVENHDTQPGQSLESTVQPWFKPLAYAFILTRSGGYPSVFYGDMYGTKGTTTREIPALKSKIEPLLKARKDYDYGTQRDYIDNPDVIGWTREGDSTKAKSGLATVITDGPGGSKRMYVGTSNAGEIWYDLTGNRTDKITIGSDGYATFPVNGGSVSVWVQQ

SEQ ID NO: 38353 - protein, 480 aa, Cytophaga sp.
NGTMMQYFEWYVPNDGQQWNRLRTDAPYLSSVGITAVWTPPAYKGTSQADVGYGPYDLYDLGEFNQKGTVRTKYGTKGELKSAVNTLHSNGIQVYGDVVMNHKAGADYTENVTAVEVNPSNRYQETSGEYNIQAWTGFNFPGRGTTYSNWKWQWFHFDGTDWDQSRSLSRIFKFDGKAWDWEVSSENGNYDYLMYADYDYDHPDVVNEMKKWGVWYANEVGLDGYRLDAVKHIKFQFLKDWVDNARAATGKEMFTVGEYWQNDLGALNNYLAKVNYNQSLFDAPLHYNFYAASTGGGYYDMRNILNNTLVASNPTKAVTLVENHDTQPGQSLESTVQPWFKPLAYAFILTRSGGYPSIFYGDMYGTKGTTTREIPALKSKIEPLLKARKDYAYGTQRDYIDNPDVIGWTREGDSTKAKSGLATVITDGPGGSKRMYVGTSNAGEIWYDLTGNRTDKITIGSDGYATFPVNGGSVSVWVQQ

SEQ ID NO: 38354 - protein, 480 aa, Cytophaga sp.
NGTMMQYFEWYVPNDGQQWNRLRTDAPYLSSVGITAVWTPPAYKGTSQADVGYGTYDLYDLGEFNQKGTVRTKYGTKGELKSAVNTLHSNGIQVYGDVVMNHKAGADYTENVTAVEVNPSNRYQETSGEYNIQAWTGFNFPGRGTTYSNWKWQWFHFDGTDWDQSRSLSRIFKFDGKAWDWEVSSENGNYDYLMYADYDYDHPDVVNEMKKWGVWYANEVGLDGYRLDAVKHIKFQFLKDWVDNARAATGKEMFTVGEYWQNDLGALNNYLAKVNYNQSLFDAPLHYNFYAASTGGGYYDMRNILNNTLVASNPTKAVTLVENHDTQPGQSLESTVQPWFKPLAYAFILTRSGGYPSVFYGDMYGTKGTTTREIPALKSKIEPLLKARKDYAYGTQRDYIDNPDVIGWTREGDSTKAKSGLATVITDGPGGSKRMYVGTSNAGEIWYDLTGNRTDKITIGSDGYATFPVNGGSVSVWVQQ

SEQ ID NO: 38355 - protein, 480 aa, Cytophaga sp.
NGTMMQYFEWYVPNDGQQWNRLRTDAPYLSSVGITAVWTPPAYKGTSQADVGYGPYDLYDLGEFNQKGTVRTKYGTKGELKSAVNTLHSNGIQVYGDVVMNHKAGADYTENVTAVEVNPSNRYQETSGEYNIQAWTGFNFPGRGTTYSNWKWQWFHFDGTDWDQSRSLSRIFKFDGKAWDWEVSSENGNYDYLMYADYDYDHPDVVNEMKKWGVWYANEVGLDGYRLDAVKHIKFQFLKDWVDNARAATGKEMFTVGEYWQNDLGALNNYLAKVNYNQSLFDAPLHYNFYAASTGGGYYDMRNILNNTLVASNPTKAVTLVENHDTQPGQSLESTVQPWFKPLAYAFILTRSGGYPSVFYGDMYGTKGTTTREIPALKSKIEPLLKARKDQAYGTQRDYIDNPDVIGWTREGDSTKAKSGLATVITDGPGGSKRMYVGTSNAGEIWYDLTGNRTDKITIGSDGYATFPVNGGSVSVWVQQ

SEQ ID NO: 38356 - protein, 480 aa, Cytophaga sp.
NGTMMQYFEWYVPNDGQQWNRLRTDAPYLSSVGITAVWTPPAYKGTSQADVGYGPYDLYDLGEFNQKGTVRTKYGTKGELKSAVNTLHSNGIQVYGDVVMNHKAGADYTENVTAVEVNPSNRYQETSGEYNIQAWTGFNFPGRGTTYSNWKWQWFHFDGTDWDQSRSLSRIFKFDGKAWDWEVSSENGNYDYLMYADYDYDHPDVVNEMKKWGVWYANEVGLDGYRLDAVKHIKFQFLKDWVDNARAATGKEMFTVGEYWQNDLGALNNYLAKVNYNQSLFDAPLHYNFYAASTGGGYYDMRNILNNTLVASNPTKAVTLVENHDTQPGQSLESTVQPWFKPLAYAFILTRSGGYPSVFYGDMYGTKGTTTREIPALKSKIEPLLKARKDYAYGTQRDYIDNPDVIGWTREGDSTKADSGLATVITDGPGGSKRMYVGTSNAGEIWYDLTGNRTDKITIGSDGYATFPVNGGSVSVWVQQ

SEQ ID NO: 38357 - protein, 480 aa, Cytophaga sp.
NGTMMQYFEWYVPNDGQQWNRLRTDAPYLSSVGITAVWTPPAYKGTSQADVGYGPYDLYDLGEFNQKGTVRTKYGTKGELKSAVNTLHSNGIQVYGDVVMNHKAGADYTENVTAVEVNPSNRYQETSGEYNIQAWTGFNFPGRGTTYSNWKWQWFHFDGTDWDQSRSLSRIFKFDGKAWDWEVSSENGNYDYLMYADYDYDHPDVVNEMKKWGVWYANEVGLDGYRLDAVKHIKFQFLKDWVDNARAATGKEMFTVGEYWQNDLGALNNYLAKVNYNQSLFDAPLHYNFYAASTGGGYYDMRNILNNTLVASNPTKAVTLVENHDTQPGQSLESTVQPWFKPLAYAFILTRSGGYPSVFYGDMYGTKGTTTREIPALKSKIEPLLKARKDYAYGTQRDYIDNPDVIGWTREGDSTKAKSGLATVITDGPGGSKRMYVGTSNAGEIWYDLTGNRTDKITIGSDGYATFPVHGGSVSVWVQQ

SEQ ID NO: 38358 - protein, 480 aa, Cytophaga sp.
NGTMMQYFEWYVPNDGQQWNRLRTDAPYLSSVGITAVWTPPAYKGTSQADVGYGPYDLYDLGEFNQKGTVRTKYGTKGELKSAVNTLHSNGIQVYGDVVMNHKAGADYTENVTAVEVNPSNRYQETSGEYNIQAWTGFNFPGRGTTYSNWKWQWFHFDGTDWDQSRSLSRIFKFDGKAWDWEVSSENGNYDYLMYADYDYDHPDVVNEMKKWGVWYANEVGLDGYRLDAVKHIKFQFLKDWVDNARAATGKEMFTVGEYWQNDLGALNNYLAKVNYNQSLFDAPLHYNFYAASTGGGYYDMRNILNNTLVASNPTKAVTLVENHDTQPGQSLESTVQPWFKPLAYAFILTRSGGYPSVFYGDMYGTKGTTTREIPALKSKIEPLLKARKDYAYGTQRDYIDNPDVIGWTREGDSTKAKSGLATVITDGPGGSKRMYVGTSNAGEIWYDLTGNRTEKITIGSDGYATFPVNGGSVSVWVQQ

SEQ ID NO: 38359 - protein, 480 aa, Cytophaga sp.
NGTMMQYFEWYVPNDGQQWNRLRTDAPYLSSVGITAVWTPPAYKGTSQADVGYGPYDLYDLGEFNQKGTVRTKYGSKGELKSAVNTLHSNGIQVYGDVVMNHKAGADYTENVTAVEVNPSNRYQETSGEYNIQAWTGFNFPGRGTTYSNWKWQWFHFDGTDWDQSRSLSRIFKFDGKAWDWEVSSENGNYDYLMYADYDYDHPDVVNEMKKWGVWYANEVGLDGYRLDAVKHIKFQFLKDWVDNARAATGKEMFTVGEYWQNDLGALNNYLAKVNYNQSLFDAPLHYNFYAASTGGGYYDMRNILNNTLVASNPTKAVTLVENHDTQPGQSLESTVQPWFKPLAYAFILTRSGGYPSVFYGDMYGTKGTTTREIPALKSKIEPLLKARKDYAYGTQRDYIDNPDVIGWTREGDSTKAKSGLATVITDGPGGSKRMYVGTSNAGEIWYDLTGNRTDKITIGSDGYATFPVNGGSVSVWVQQ

SEQ ID NO: 38360 - protein, 480 aa, Cytophaga sp.
NGEMMQYFEWYVPNDGQQWNRLRTDAPYLSSVGITAVWTPPAYKGTSQADVGYGPYDLYDLGEFNQKGTVRTKYGTKGELKSAVNTLHSNGIQVYGDVVMNHKAGADYTENVTAVEVNPSNRYQETSGEYNIQAWTGFNFPGRGTTYSNWKWQWFHFDGTDWDQSRSLSRIFKFDGKAWDWEVSSENGNYDYLMYADYDYDHPDVVNEMKKWGVWYANEVGLDGYRLDAVKHIKFQFLKDWVDNARAATGKEMFTVGEYWQNDLGALNNYLAKVNYNQSLFDAPLHYNFYAASTGGGYYDMRNILNNTLVASNPTKAVTLVENHDTQPGQSLESTVQPWFKPLAYAFILTRSGGYPSVFYGDMYGTKGTTTREIPALKSKIEPLLKARKDYAYGTQRDYIDNPDVIGWTREGDSTKAKSGLATVITDGPGGSKRMYVGTSNAGEIWYDLTGNRTDKITIGSDGYATFPVNGGSVSVWVQQ

SEQ ID NO: 38361 - protein, 480 aa, Cytophaga sp.
NGTMMQYFEWYVPNDGQQWNRLRTDAPYLSSVGITAVWTPPAYKGTSQADVGYGPYDLYDLGEFNQKGTVRTKYGTKGELKSAVNTLHSNGIQVYGDVVMNHKAGADYTENVTAVEVNPSNRYQETSGEYNIQAWTGFNFPGRGTTYSNWKWQWFHFDGTDWDQSRSLSRIFKFDGKAWDWEVSSENGNYDYLMYADYDYDHPDVVNEMKKWGVWYANEVGLDGYRLDAVKHIDFQFLKDWVDNARAATGKEMFTVGEYWQNDLGALNNYLAKVNYNQSLFDAPLHYNFYAASTGGGYYDMRNILNNTLVASNPTKAVTLVENHDTQPGQSLESTVQPWFKPLAYAFILTRSGGYPSVFYGDMYGTKGTTTREIPALKSKIEPLLKARKDYAYGTQRDYIDNPDVIGWTREGDSTKAKSGLATVITDGPGGSKRMYVGTSNAGEIWYDLTGNRTDKITIGSDGYATFPVNGGSVSVWVQQ

SEQ ID NO: 38362 - protein, 480 aa, Cytophaga sp.
NGTMMQYFEWYVPNDGQQWNRLRTDAPYLSSVGITAAWTPPAYKGTSQADVGYGPYDLYDLGEFNQKGTVRTKYGTKGELKSAVNTLHSNGIQVYGDVVMNHKAGADYTENVTAVEVNPSNRYQETSGEYNIQAWTGFNFPGRGTTYSNWKWQWFHFDGTDWDQSRSLSRIFKFDGKAWDWEVSSENGNYDYLMYADYDYDHPDVVNEMKKWGVWYANEVGLDGYRLDAVKHIKFQFLKDWVDNARAATGKEMFTVGEYWQNDLGALNNYLAKVNYNQSLFDAPLHYNFYAASTGGGYYDMRNILNNTLVASNPTKAVTLVENHDTQPGQSLESTVQPWFKPLAYAFILTRSGGYPSVFYGDMYGTKGTTTREIPALKSKIEPLLKARKDYAYGTQRDYIDNPDVIGWTREGDSTKAKSGLATVITDGPGGSKRMYVGTSNAGEIWYDLTGNRTDKITIGSDGYATFPVNGGSVSVWVQQ

SEQ ID NO: 38363 - protein, 480 aa, Cytophaga sp.
NGTMMQYFEWYVPNDGQQWNRLRTDAPYLSSVGITAVWTPPAYKGTSQADVGYGPYDLYDLGEFNQKGTVRTKYGTKGELKSAVNTLHSNGIQVYGDVVMNHKAGADYTENVTAWEVNPSNRYQETSGEYNIQAWTGFNFPGRGTTYSNWKWQWFHFDGTDWDQSRSLSRIFKFDGKAWDWEVSSENGNYDYLMYADYDYDHPDVVNEMKKWGVWYANEVGLDGYRLDAVKHIKFQFLKDWVDNARAATGKEMFTVGEYWQNDLGALNNYLAKVNYNQSLFDAPLHYNFYAASTGGGYYDMRNILNNTLVASNPTKAVTLVENHDTQPGQSLESTVQPWFKPLAYAFILTRSGGYPSVFYGDMYGTKGTTTREIPALKSKIEPLLKARKDYAYGTQRDYIDNPDVIGWTREGDSTKAKSGLATVITDGPGGSKRMYVGTSNAGEIWYDLTGNRTDKITIGSDGYATFPVNGGSVSVWVQQ

SEQ ID NO: 38364 - protein, 480 aa, Cytophaga sp.
NGTMCQYFEWYVPNDGQQWNRLRTDAPYLSSVGITAVWTPPAYKGTSQADVGYGPYDLYDLGEFNQKGTVRTKYGTKGELKSAVNTLHSNGIQVYGDVVMNHKAGADYTENVTAVEVNPSNRYQETSGEYNIQAWTGFNFPGRGTTYSNWKWQWFHFDGTDWDQSRSLSRIFKFDGKAWDWEVSSENGNYDYLMYADYDYDHPDVVNEMKKWGVWYANEVGLDGYRLDAVKHIKFQFLKDWVDNARAATGKEMFTVGEYWQNDLGALNNYLAKVNYNQSLFDAPLHYNFYAASTGGGYYDMRNILNNTLVASNPTKAVTLVENHDTQPGQSLESTVQPWFKPLAYAFILTRSGGYPSVFYGDMYGTKGTTTREIPALKSKIEPLLKARKDYAYGTQRDYIDNPDVIGWTREGDSTKAKSGLATVITDGPGGSKRMYVGTSNAGEIWYDLTGNRTDKITIGSDGYATFPVNGGSVSVWVQQ

SEQ ID NO: 38365 - protein, 480 aa, Cytophaga sp.
NGTMMQYFEWYVPNDGQQWNRLRTDAPYLSSVGITAVWTPPAYKGTSQADVGYGPYDLYDLGEFNQKGTVRTKYGTKGELKSAVNTLHSNGIQVYGDVVMNHKAGADYTENVTAVEVNPSNRYQETSGEYNIQAWTGFNFPGRGTTYSNWKWQWFHFDGTDWDQSRSLSRIFKFDGKAWDWEVSSENGNYDYLMYADYDYDHPDVVNEMKKWGVWYANEVGLDGYRLDAVKHIKFQFLKDWVDNARAATGKEMFTVGEYWQNDLGALNNYLAKVNYNQSLFDAPLHYNFYAASTGGGYYDMRNILNNTLVASNPTKAVTLVENHDTQPGQSLESTVQPWFKPLAYAFILTRSGGYPSVFYGDMYGTKGTTTREIPALKSKIEPLLKARKDYAYGTQRDYIDNPDVIGWTREGDSTKAKSGLATVITDGPGGSKRMYVGTSNAGEIWYDLTGNRTDKITIGSDGYATFPVNGGSVSVWMQQ

SEQ ID NO: 38366 - protein, 480 aa, Cytophaga sp.
NGTMMQYFEWYVPNDGQQWNRLRTDAPYLSSVGITAVWTPPAYKGTSQADVGYGPYDLYDLGEFNQKGTVRTKYGTKGELKSAVNTLHSNGIQVYGDVVMNHKAGADYTENVTAVEVNPSNRYQETSGEYNIQAWTGFNFPGRGTTYSNWKWQWFHFDGTDWDQSRSLSRIFKFDGKAWDWEVSSENGNYDYLMYADYDYDHPDVVNEMKKWGVWYANEVGLDGYRLDAVKHIKFQFLKDWVDNARAATGKEMFTVGEYWQNDLGALNNYLAKVNYNQSLFDAPLHYNFYAASTGGGYYDMRNILNNTLVASNPTKAVTLVENHDTQPGQSLESTVQPWFKPLAYAFILTRSGGYPSVFYGDMYGTKGTTTREIPALKSKIEPLLKARKDYAYGTQRDYIDNPDVIGWTREGDSTKAKSGLATVITDGPGGSKRMYVGTSNAGEIWYDLTGNRTDKITIGSGGYATFPVNGGSVSVWVQQ

SEQ ID NO: 38367 - protein, 480 aa, Cytophaga sp.
NGTMMQYFEWYVPNDGQQWNRLRTDAPYLSSVGITAVWTPPAYKGTSQADVGYGPYDLYDLGEFNQKGTVRTKYGTKGELKSAVNTLHSNGIQVYGDVVMNHKAGADYTENVTAVEVNPSNRYQETSGEYNIQAWTGFNFPGRGTKYSNWKWQWFHFDGTDWDQSRSLSRIFKFDGKAWDWEVSSENGNYDYLMYADYDYDHPDVVNEMKKWGVWYANEVGLDGYRLDAVKHIKFQFLKDWVDNARAATGKEMFTVGEYWQNDLGALNNYLAKVNYNQSLFDAPLHYNFYAASTGGGYYDMRNILNNTLVASNPTKAVTLVENHDTQPGQSLESTVQPWFKPLAYAFILTRSGGYPSVFYGDMYGTKGTTTREIPALKSKIEPLLKARKDYAYGTQRDYIDNPDVIGWTREGDSTKAKSGLATVITDGPGGSKRMYVGTSNAGEIWYDLTGNRTDKITIGSDGYATFPVNGGSVSVWVQQ

SEQ ID NO: 38368 - protein, 480 aa, Cytophaga sp.
NGTMMQYFEWYVPNDGQQWNRLRTDAPYLSSVGITAVWTPPAYKGTSQADVGYGPYDLYDLGEFNQKGTVRTKYGTKGELKSAVNTLHSNGIQVYGDVVMNHKAGADYTENVTAVEVNPSNRYQETSGEYNIQAWTGFNFPGRGTTYSNWKWQWFHFDGTDWDQSRSLSRIFKFDGKAWDWEVSSENGNYDYLMYADYDYDHPDVVNEMKKWGVWYANEVGLDGYRLDAVKHIKFQFLKDWVDNARAATGKEMFTVGEYWQNDLGALNNYLAKVNYNQSLFDAPLHYNFYAASTGGGYYDMRNILNNTLVASNPTKAVTLVENHDTQPGQSLESTVQPWFKPLAYAFILTRSGGYPSVFYGDMYGTKGTTTREIPALKSKIEPLLKARKDAAYGTQRDYIDNPDVIGWTREGDSTKAKSGLATVITDGPGGSKRMYVGTSNAGEIWYDLTGNRTDKITIGSDGYATFPVNGGSVSVWVQQ

SEQ ID NO: 38369 - protein, 480 aa, Cytophaga sp.
NGTMMQYFEWYVPNDGQQWNRLRTDAPYLSSVGITAVWTPPAYKGTSQADVGYGPYDLYDLGEFNQKGTVRTKYGTKGELKSAVNTLHSNGIQVYGDVVMNHKAGADYTENVTAVEVNPSNRYQETSGEYNIQAWTGFNFPGRGTTYSNWKWQWFHFDGTDWDQSRSLSRIFKFDGKAWDWEVSSENMNYDYLMYADYDYDHPDVVNEMKKWGVWYANEVGLDGYRLDAVKHIKFQFLKDWVDNARAATGKEMFTVGEYWQNDLGALNNYLAKVNYNQSLFDAPLHYNFYAASTGGGYYDMRNILNNTLVASNPTKAVTLVENHDTQPGQSLESTVQPWFKPLAYAFILTRSGGYPSVFYGDMYGTKGTTTREIPALKSKIEPLLKARKDYAYGTQRDYIDNPDVIGWTREGDSTKAKSGLATVITDGPGGSKRMYVGTSNAGEIWYDLTGNRTDKITIGSDGYATFPVNGGSVSVWVQQ

SEQ ID NO: 38370 - protein, 480 aa, Cytophaga sp.
NGTMMQYFEWYVPNDGQQWNRLRTDAPYLSSVGITAVWTPPAYKGTSQADVGYGPYDLYDLGEFNQKGTVRTKYGTKGELKSAVNTLHSNGIQVYGDVVMNHKAGADYTENVTAVEVNPSNRYQETSGEYNIQAWTGFNFPGRGTTYSNWKWQWFHFDGTDWDQSRSLSRIFKFDGKAWDWEVSSENGNYDYLMYADYDYRHPDVVNEMKKWGVWYANEVGLDGYRLDAVKHIKFQFLKDWVDNARAATGKEMFTVGEYWQNDLGALNNYLAKVNYNQSLFDAPLHYNFYAASTGGGYYDMRNILNNTLVASNPTKAVTLVENHDTQPGQSLESTVQPWFKPLAYAFILTRSGGYPSVFYGDMYGTKGTTTREIPALKSKIEPLLKARKDYAYGTQRDYIDNPDVIGWTREGDSTKAKSGLATVITDGPGGSKRMYVGTSNAGEIWYDLTGNRTDKITIGSDGYATFPVNGGSVSVWVQQ

SEQ ID NO: 38371 - protein, 480 aa, Cytophaga sp.
NGTMMQYFEWYVPNDGQQWNRLRTDAPYLSSVGITAVWTPPAYKGTSQADVGYGPYDLYDLGEFNQKGTVRTKYGTKGELKSAVNTLHSNGIQVYGDVVMNHKAGADYTENVTAVEVNPSNRYQETSGEYNIQAWTGFNFPGRGTTYSNWKWQWFHFDGTDWDQSRSLSRIFKFDGKAWDWEVSSENGNYDYLMYADYDYDHPDVVNEMKKWGVWYANEVGLDGYRLDAVKHIKFQFLKDWVDNARAATGKEMFTVGEYWQNDLGALNNYLAKVNYNQSLFDAPLHYNFYAASTGGGYYDMRNILNNTLVASNPTKAVTLVENHDTQPGQSLESTVQPWFKPLAYAFILTRSGGYPSVFYGDMYGTKGTTTREIPALKSKIEPLLKARKDYAYGTQRDYIDNPDVIGWTRIGDSTKAKSGLATVITDGPGGSKRMYVGTSNAGEIWYDLTGNRTDKITIGSDGYATFPVNGGSVSVWVQQ

SEQ ID NO: 38372 - protein, 480 aa, Cytophaga sp.
NGTMMQYFEWYVPNDGQQWNRLRTDAPYLSSVGITAVWTPPAYKGTSQADVGYGPYDLYDLGEFNQKGTVRTKYGTKGELKSAVNTLHSNGIQVYGDVVMNHKAGADYTENVTAVEVNPSNRYFETSGEYNIQAWTGFNFPGRGTTYSNWKWQWFHFDGTDWDQSRSLSRIFKFDGKAWDWEVSSENGNYDYLMYADYDYDHPDVVNEMKKWGVWYANEVGLDGYRLDAVKHIKFQFLKDWVDNARAATGKEMFTVGEYWQNDLGALNNYLAKVNYNQSLFDAPLHYNFYAASTGGGYYDMRNILNNTLVASNPTKAVTLVENHDTQPGQSLESTVQPWFKPLAYAFILTRSGGYPSVFYGDMYGTKGTTTREIPALKSKIEPLLKARKDYAYGTQRDYIDNPDVIGWTREGDSTKAKSGLATVITDGPGGSKRMYVGTSNAGEIWYDLTGNRTDKITIGSDGYATFPVNGGSVSVWVQQ

SEQ ID NO: 38373 - protein, 480 aa, Cytophaga sp.
NGTMMQYFEWYVPNDGQQWNRLRTDAPYLSSVGITAVWTPPAYKGTSQADVGYGPYDLYDLGEFNQKGTVRTKYGTKGELKSAVNTLHSNGIQVYGDVVMNHKAGADYTENVTAVEVNPSNRYQETSGEYNIQAWTGFNFPGRGTTYSNWKWQWFHFDGTDWDQSRSLSRIFKFDGKAWDWEVSSENGNYDYLMYADYDYDHPDVVNEMKKWGVWYANEVGLDGYRLDAVKHIKFQFLKDWVDNARAATGKEMFTVGEYWQNDLGALNNYLAKVNYNQSLFDAPLHYNFYAASTGGGYYDMRNILNNTLVASNPTKAVTLVENHDTQPGQSLESTVQPWFKPLAYAFILTRSGGYPSVFYGDMYGTKGTTTREIPALKSKIEPLLKARKDYAYGTQRDYIDNPDVIGWTREGSSTKAKSGLATVITDGPGGSKRMYVGTSNAGEIWYDLTGNRTDKITIGSDGYATFPVNGGSVSVWVQQ

SEQ ID NO: 38374 - protein, 480 aa, Cytophaga sp.
NGTMMQYFEWYVPNDGQQWNRLRTDAPYLSSVGITAVWTPPAYKGTSQADVGYGPYDLYDLGEFNQKGTVRTKYGTKGELKSAVNTLHSNGIQVYGDVVMNHKAGADYTENVTAVEVNPSNRYQETSGEYNIQAWTGFNFPGRGTTYSNWKWQWFHFDGTDWDQSRSLSRIFKFDGKAWDWEVSSENGNYDYLMYADYDYDHPDVVNEMKKWGVWYANEVGLDGYRLDAVKHIKFQFLKDWVDNARAATGKEMFTVGEYWQNDLGALNNYLAKVNYNQSLFDAPLHYNFYAASTGGGYYDMRNILNNTLVASNPTKAVTLVENHDTQPGQSLESTVQPWFKPLAYAFILTRSGGYPSVFYGDMYGTKGTTTREIPALKSKIEPLLKARKDYAYGTIRDYIDNPDVIGWTREGDSTKAKSGLATVITDGPGGSKRMYVGTSNAGEIWYDLTGNRTDKITIGSDGYATFPVNGGSVSVWVQQ

SEQ ID NO: 38375 - protein, 480 aa, Cytophaga sp.
NGTMMQYFEWYVPNDGQQWNRLRTDAPYLSSVGITAVWTPPAYKGTSQADVGYGPYDLYDLGEFNQKGTVRTKYGTKGELKSAVNTLHSNGIQVYGDVVMNHKAGADYTENVTAVEVNPSNRYQETSGEYNIQAWTGFNFPGRGTTYSNWKWQWFHFDGTDWDQSRSLSRIFKFDGKAWDWEVSSENGNYDYLMYADYDYDHPDVVNEMKKWGVWYANEVGLDGYRLDAVKHIKFQFLKDWVDNARAATGKEMFTVGEYWQNDLGALNNYLAKVNYNQSLFDAPLHYNFYAASTGGGYYDMRNILNNTLVASNPTKAVTLVENHDTQPGQSLESTVQPWFKPLAYAFILTRSGGYPSVFYGDMYGTKGTTTREIPALKSKIEPLLKARKDYAYGTQRDYIDNPDVIGWTREGDSTKAKSGLATVITDGPGGSKRMYVGTSNAEEIWYDLTGNRTDKITIGSDGYATFPVNGGSVSVWVQQ

SEQ ID NO: 38376 - protein, 480 aa, Cytophaga sp.
NGTMMQYFEWYVPNDGQQWNRLRTDAPYLSSVGITAVWTPPAYKGTSQADVGYGPYDLYDLGEFNQKGTVRTKYGTKGELKSAVNTLHSNGIQVYGDVVMNHKAGADYTENVTAVEVNPSNRYQETSGEYNIQAWTGFNFPGRGTTYSNWKWQWFHFDGTDLDQSRSLSRIFKFDGKAWDWEVSSENGNYDYLMYADYDYDHPDVVNEMKKWGVWYANEVGLDGYRLDAVKHIKFQFLKDWVDNARAATGKEMFTVGEYWQNDLGALNNYLAKVNYNQSLFDAPLHYNFYAASTGGGYYDMRNILNNTLVASNPTKAVTLVENHDTQPGQSLESTVQPWFKPLAYAFILTRSGGYPSVFYGDMYGTKGTTTREIPALKSKIEPLLKARKDYAYGTQRDYIDNPDVIGWTREGDSTKAKSGLATVITDGPGGSKRMYVGTSNAGEIWYDLTGNRTDKITIGSDGYATFPVNGGSVSVWVQQ

SEQ ID NO: 38377 - protein, 480 aa, Cytophaga sp.
NGTMMQYFEWYVPNDGQQWNRLRTDAPYLSSVGITAVWTPPAYKGTSQADVGYGPYDLYDLGEFNQKGTVRTKYGTKGELKSAVNTLHSNGIQVYGDVVMNHKAGADYTENVTAVEVNPSNRYQETSGEYNIQAWTGFNFPGRGTTYSNWKWQWFHFDGTDWDQSRSLSRIFKFDGKAWDWEVSSENGNYDYLMYADYDYDHPDVVNEMKKWGVWYANEVGLDGYRLDAVKHIKFQFLKDWVDNARAATGKEMFTVGEYWQNDLGALNNYLAKVNYNQSLFDAPLHYNFYAASTGGGYYDMRNILNNTLVASNPTKAVTLVENHDTQPGQSLESTVQPWFKPLAYAFILTRSGGYPSVFYGDMYGTKGTTTREIPALKSKIEPLLKARKDYAYGTQRDYMDNPDVIGWTREGDSTKAKSGLATVITDGPGGSKRMYVGTSNAGEIWYDLTGNRTDKITIGSDGYATFPVNGGSVSVWVQQ

SEQ ID NO: 38378 - protein, 480 aa, Cytophaga sp.
NGTMMQYFEWYVPNDGQQWNRLRTDAPYLSSVGITAVWTPPAYKGTSQADVGYGPYDLYDLGEFNQKGTVRTKYGTKGELKSAVNTLHSNGIQVYGDVVMNHKAGADYTENVTAVEVNPSNRYQETSGEYNIQAWTGFNFPGRGTTYSNWKWQWFHFDGTDWDQSRSLSRIFKFDGKAWDWEVSSENGNYDYLMYADYDYDHPDVVNEMKKWGVWYANEVGLDGYRLDAVKHIKFQFLKDWVDNARAATGKEMFTVGEYWQNDLGALNNYLAKVNYNQSLFDAPLHYNFYAASTGGGYYDMRNILNNTLVASNPTKAVTLVENHDTQPGQSLESTVQPWFKPLAYAFILTRSGGYPSVFYGDMYGTKGTTTREIPALKSKIEPLLKARKDYAYGTQRDYIDNPDVIGWVREGDSTKAKSGLATVITDGPGGSKRMYVGTSNAGEIWYDLTGNRTDKITIGSDGYATFPVNGGSVSVWVQQ

SEQ ID NO: 38379 - protein, 480 aa, Cytophaga sp.
NGTMMQYFEWYVPNDGQQWNRLRTDAPYLSSVGITAVWTPPAFKGTSQADVGYGPYDLYDLGEFNQKGTVRTKYGTKGELKSAVNTLHSNGIQVYGDVVMNHKAGADYTENVTAVEVNPSNRYQETSGEYNIQAWTGFNFPGRGTTYSNWKWQWFHFDGTDWDQSRSLSRIFKFDGKAWDWEVSSENGNYDYLMYADYDYDHPDVVNEMKKWGVWYANEVGLDGYRLDAVKHIKFQFLKDWVDNARAATGKEMFTVGEYWQNDLGALNNYLAKVNYNQSLFDAPLHYNFYAASTGGGYYDMRNILNNTLVASNPTKAVTLVENHDTQPGQSLESTVQPWFKPLAYAFILTRSGGYPSVFYGDMYGTKGTTTREIPALKSKIEPLLKARKDYAYGTQRDYIDNPDVIGWTREGDSTKAKSGLATVITDGPGGSKRMYVGTSNAGEIWYDLTGNRTDKITIGSDGYATFPVNGGSVSVWVQQ

SEQ ID NO: 38380 - protein, 480 aa, Cytophaga sp.
NGTMMQYFEWYVPNDGQQWNRLRTDAPYLSSVGITAVWTPPAYKGTSQADVGYGPYDLYDLGEFNQKGTVRTKYGTKGELKSAVNTLHSNGIQVYGDVVMNHKAGADYTENVTAVEVNPSNRYQETSGEYNIQAWTGFNFPGRGTTYSNWKWQWFHFDGTDWDQSRSLSRIFKFDGKAWDWEVSSENGNYDYLMYADYDYDHPDVVNEMKKWGVWYANEVGLDGYRLDAVKHIKFQFLKDWVDNARAATGKEMFTVGEYWQNDLGALNNYLAKVNYNQSLFDAPLHYNFYAASTGGGYYDMRNILNNTLVASNPTKAVTLVENHDTQPGQSLESTVQPWFKPLAYAFILTRSGGYPSLFYGDMYGTKGTTTREIPALKSKIEPLLKARKDYAYGTQRDYIDNPDVIGWTREGDSTKAKSGLATVITDGPGGSKRMYVGTSNAGEIWYDLTGNRTDKITIGSDGYATFPVNGGSVSVWVQQ

SEQ ID NO: 38381 - protein, 480 aa, Cytophaga sp.
NGTMMQYFEWYVPNDGQQWNRLRTDAPYLSSVGITAVWTPPAYKGTSQADVGYGPYDLYDLGEFNQKGTVRTKYGTKGELKSAVNTLHSNGIQVYGDVVMNHKAGADYTENVTAVEVNPSNRYQETSGEYNIQAWTGFNFPGRGTTYSNWKWQWFHFDGTDWDQSRSLSRIFKFDGKAWDWEVSSENGNYDYLMYADYDYDHPDVVNEMKKWGVWYANEVGLDGYRLDAVKHIEFQFLKDWVDNARAATGKEMFTVGEYWQNDLGALNNYLAKVNYNQSLFDAPLHYNFYAASTGGGYYDMRNILNNTLVASNPTKAVTLVENHDTQPGQSLESTVQPWFKPLAYAFILTRSGGYPSVFYGDMYGTKGTTTREIPALKSKIEPLLKARKDYAYGTQRDYIDNPDVIGWTREGDSTKAKSGLATVITDGPGGSKRMYVGTSNAGEIWYDLTGNRTDKITIGSDGYATFPVNGGSVSVWVQQ

SEQ ID NO: 38382 - protein, 480 aa, Cytophaga sp.
NGTMMQYFEWYVPNDGQQWNRLRTDAPYLSSVGITAVWTPPAYKGTSQADVGYGPYDLYDLGEFNQKGTVRTKYGTKGELKSAVNTLHSNGIQVYGDVVMNHKAGADYTENVTAVEVNPSNRYQETSGEYNIQAWTGFNFPGRGTTYSNWKWQWFHFDGTDWDQSRSLSRIFKFDGKAWDWEVSSENGNYDYLMYADYDYDHPDVVNEMKKWGVWYANEVGLDGYRLDAVKHIKFQFLKDWVDNARAATGKEMFTVGEYWQNDLGALNNYLAKVNYNQSLFDAPLHYNFYRASTGGGYYDMRNILNNTLVASNPTKAVTLVENHDTQPGQSLESTVQPWFKPLAYAFILTRSGGYPSVFYGDMYGTKGTTTREIPALKSKIEPLLKARKDYAYGTQRDYIDNPDVIGWTREGDSTKAKSGLATVITDGPGGSKRMYVGTSNAGEIWYDLTGNRTDKITIGSDGYATFPVNGGSVSVWVQQ

SEQ ID NO: 38383 - protein, 480 aa, Cytophaga sp.
NGTMMQYFEWYVPNDGQQWNRLRTDAPYLSSVGITAVWTPPAYKGTKQADVGYGPYDLYDLGEFNQKGTVRTKYGTKGELKSAVNTLHSNGIQVYGDVVMNHKAGADYTENVTAVEVNPSNRYQETSGEYNIQAWTGFNFPGRGTTYSNWKWQWFHFDGTDWDQSRSLSRIFKFDGKAWDWEVSSENGNYDYLMYADYDYDHPDVVNEMKKWGVWYANEVGLDGYRLDAVKHIKFQFLKDWVDNARAATGKEMFTVGEYWQNDLGALNNYLAKVNYNQSLFDAPLHYNFYAASTGGGYYDMRNILNNTLVASNPTKAVTLVENHDTQPGQSLESTVQPWFKPLAYAFILTRSGGYPSVFYGDMYGTKGTTTREIPALKSKIEPLLKARKDYAYGTQRDYIDNPDVIGWTREGDSTKAKSGLATVITDGPGGSKRMYVGTSNAGEIWYDLTGNRTDKITIGSDGYATFPVNGGSVSVWVQQ

SEQ ID NO: 38384 - protein, 480 aa, Cytophaga sp.
NGTMMQYFEWYVPNDGQQWNRLRTDAPYLSSVGITAVWTPPAYKGTSQADVGYGPYDLYDLGEFNQKGTVRTKYGTKGELKSAVNTLHSNGIQVYGDVVMNHKAGADYTENVTAVEVNPSNRYQETSGEYNIQAWTGFNFPGRGTTYSNWKWQWFHFDGTDWDQSRSLSRIFKFDGKAWDWEVSSENGNYDYLLYADYDYDHPDVVNEMKKWGVWYANEVGLDGYRLDAVKHIKFQFLKDWVDNARAATGKEMFTVGEYWQNDLGALNNYLAKVNYNQSLFDAPLHYNFYAASTGGGYYDMRNILNNTLVASNPTKAVTLVENHDTQPGQSLESTVQPWFKPLAYAFILTRSGGYPSVFYGDMYGTKGTTTREIPALKSKIEPLLKARKDYAYGTQRDYIDNPDVIGWTREGDSTKAKSGLATVITDGPGGSKRMYVGTSNAGEIWYDLTGNRTDKITIGSDGYATFPVNGGSVSVWVQQ

SEQ ID NO: 38385 - protein, 480 aa, Cytophaga sp.
NGTMMQYFEWYVPNDGQQWNRLRTDAPYLSSVGITAVWTPPAYKGTSQADVGYGPYDLYDLGEFNQKGTVRTKYGTKGELKSAVNTLHSNGIQVYGDVVMNHKAGADYTENVTAVEVNPSNRYQETSGEYNIQAWTGFNFPGRGTTYSNWKWQWFHFDGTDWDQSRSLSRIFKFDGKAWDWEVSSENGNYDYLMYADYDYDHPDVVNEMKKWGVWYANEVGLDGYRLDAVKHIKFQFLKDWVDNARAATGKEMFTVGEYWQNDLGALNNYLAKVNYNQSLFDAPLHYNFYAASTGGGYYDMRNILNNTLVASNPTKAVTLVENHDTQPGQSLESTVQPWFKPLAYAFILTRSGGYPSVFYGDMYGTKGTTTREIPALKSKIELLLKARKDYAYGTQRDYIDNPDVIGWTREGDSTKAKSGLATVITDGPGGSKRMYVGTSNAGEIWYDLTGNRTDKITIGSDGYATFPVNGGSVSVWVQQ

SEQ ID NO: 38386 - protein, 480 aa, Cytophaga sp.
NGTMMQYFEWYVPNDGQQWNRLRTDAPYLSSVGITAVWTPPAYKGTSQADVGYGPYDLYDLGEFNQKGTVRTKYGTKGELKSAVNTLHSNGIQVYGDVVMNHKAGADYTENVTAVEVNPSNRYQETSGEYNIQAWTGFNFPGRGTTYSNWKWQWFHFDGTDWDQSRSLSRIFKFDGKAWDWEVSSENGNYDYLMYADYDYDHPDVVNEMKKWGVWYANEVGLDGYRLDAVKHIKFQFLKDWVDNARAATGKEMFTVGEYWQNDLGALNNYLAKVNYNQSLFDAPLHYNFYAASTGGGYYDMRNILNNTLVASNPTKAVTLVENHDTQPGQSLESTVQPWFKPLAYAFILTRSGGYPSVFYGDMYGTKGTTTREIPALKSKIEPLLKARKDYAYGTQRDYIDNPDVIGWTREGDSTKAKSGLATVITDGPGGSKRMYVGTSNAGEIWYDLTGNRTDKITIGSDGYATFPVNGSSVSVWVQQ

SEQ ID NO: 38387 - protein, 480 aa, Cytophaga sp.
NGTMMQYFEWYVPNDGQQWNRLRTDAPYLSSVGITAVWTPPAYKGTSQADVGYGPYDLYDLGEFNQKGTVRTKYGTKGELKSAVNTLHSNGIQVYGDVVMNHKAGADYTENVTAVEVNPSNRYQETSGEYNIQAWTGFNFPGRGTTYSNWKWQWFHFDGTDWDQSRSLSRIFKFDGKAWDWEVSSENGNYDYLMYADYDYDHPDVVNEMKKWGVWYANEVGLDGYRLDAVKHIKFQFLKDWVDNARAATGKEMFTVGEYWQNDLGALNNYLAKVNYNQSLFDAPLHYNFYAASTGGGYYDMRNILNNTLVASNPTKAVTLVENHDTQPGQSLESTVQPWFKPLAYAFILTRSGGYPSVFYGDMYGTKGTTTREIPALKSKIEPLLKARKDYAYGTQRDYIDNPDVIGWTREGDSTKANSGLATVITDGPGGSKRMYVGTSNAGEIWYDLTGNRTDKITIGSDGYATFPVNGGSVSVWVQQ

SEQ ID NO: 38388 - protein, 480 aa, Cytophaga sp.
NGTMMQYFEWYVPNDGQQWNRLRTDAPYLSSVGITAVWTPPAYKGTSQADVGYGPYDLYDLGEFNQKGTVRTKYGTKGELKSAVNTLHSNGIQVYGDVVMNHKAGADYTENVTAVEVNPSNRYQETSGEYNIQAWTGFNFPGRGTTYSNWKWQWFHFDGTDWDQSRSLSRIFKFDGKAWDWEVSSENGNYDYLMYADYDYDHPDVVNEMKKWGVWYANEVGLDGYRLDAVKHIKFQFLKDWVDNARAATGKEMFTVGEYWQNDLGALNNYLAKVNYNQSLFDAPLHYNFYAASTGGGYYDMRNILNNTLVASNPTKAVTLVENHDTQPGQSLESTVQPWFKPLAYAFILTRSGGYPSVFYGDMYGTKGTTTREIPALKSKIEPLLKARKDYAYGTQRDYIDNPDVIGWTREGDSTKAKSGLATVLTDGPGGSKRMYVGTSNAGEIWYDLTGNRTDKITIGSDGYATFPVNGGSVSVWVQQ

SEQ ID NO: 38389 - protein, 480 aa, Cytophaga sp.
NGTMMQYFEWYVPNDGQQWNRLRTDAPYLSSVGITAVWTPPAYKGTSQADVGYGPYDLYDLGEFNQKKTVRTKYGTKGELKSAVNTLHSNGIQVYGDVVMNHKAGADYTENVTAVEVNPSNRYQETSGEYNIQAWTGFNFPGRGTTYSNWKWQWFHFDGTDWDQSRSLSRIFKFDGKAWDWEVSSENGNYDYLMYADYDYDHPDVVNEMKKWGVWYANEVGLDGYRLDAVKHIKFQFLKDWVDNARAATGKEMFTVGEYWQNDLGALNNYLAKVNYNQSLFDAPLHYNFYAASTGGGYYDMRNILNNTLVASNPTKAVTLVENHDTQPGQSLESTVQPWFKPLAYAFILTRSGGYPSVFYGDMYGTKGTTTREIPALKSKIEPLLKARKDYAYGTQRDYIDNPDVIGWTREGDSTKAKSGLATVITDGPGGSKRMYVGTSNAGEIWYDLTGNRTDKITIGSDGYATFPVNGGSVSVWVQQ

SEQ ID NO: 38390 - protein, 480 aa, Cytophaga sp.
NGTMMQYFEWYVPNDGQQWNRLRTDAPYLSSVGITAVWTPPAYKGTSQADVGYGPYDLYDLGEFNQKGTVRTKYGTKGELKSAVNTLHSNGIQVYGDVVMNHKAGADYTENVTAVEVNPSNRYQETSGEYNIQAWTGFNFPGRGTTYSNWKWQWFHFDGTDWDQSRSLSRIFKFDGKAWDWEVSSENGNYDYLMYADYDYDHPDVVNEMKKWGVWYANEVGLDGYRLDAVKHIKFQFLKDWVDNARAATGKEMFTIGEYWQNDLGALNNYLAKVNYNQSLFDAPLHYNFYAASTGGGYYDMRNILNNTLVASNPTKAVTLVENHDTQPGQSLESTVQPWFKPLAYAFILTRSGGYPSVFYGDMYGTKGTTTREIPALKSKIEPLLKARKDYAYGTQRDYIDNPDVIGWTREGDSTKAKSGLATVITDGPGGSKRMYVGTSNAGEIWYDLTGNRTDKITIGSDGYATFPVNGGSVSVWVQQ

SEQ ID NO: 38391 - protein, 480 aa, Cytophaga sp.
NGTMMQYFEWYVPNDGQQWNRLRTDAPYLSSVGITAVWTPPAYKGTSQADVGYGPYDLYDLGEFNQKGTVRTKYGTKGELKSAVNTLHSNGIQVYGDVVMNHKAGADYTENVTAVEVNPSNRYQETSGEYNIQAWTGFNFPGRGTTYSNWKWQWFHFDGTDWDQSRSLSRIFKFDGKAWDWEVSSENGNYDYLMYADYDYDHPDVVNEMKKWGVWYANEVGLDGYRLDAVKHIKFQFLKDWVDNARAATGKEMFTVGEYWQNDLGALNNYLAKVNYNQSLFDAPLHYNFYAASTGGGYYDMRNILNNTLVASNPTKAVTLVENHDTQPGQSLESTVQPWFKPLAYAFILTRSGGYPSVFYGDMYGTKGTTTREIPALKSKIEPLLKARKDYAYGTQRDKIDNPDVIGWTREGDSTKAKSGLATVITDGPGGSKRMYVGTSNAGEIWYDLTGNRTDKITIGSDGYATFPVNGGSVSVWVQQ

SEQ ID NO: 38392 - protein, 480 aa, Cytophaga sp.
NGTMMQYFEWYVPNDGQQWNRLRTDAPYLSSVGITAVWTPPAYKGTSQADVGYGPYDLYDLGEFNQKGTVRTKYGTKGELKSAVNTLHSNGIQVYGDVVMNHKAGADYTENVTAVEVNPSNRYQETSGEYNIQAWTGFNFPGRGTTYSNWKWQWFHFDGTDWDQSRSLSRIFKFDGKAWDWEVSSENGNYDYLMYADYDYDHPDVVNEMKKWGVWYANEVGLDGYRLDAVKHIKFQFLKDWVDNARAATGKEMFTVGEYWQNDLGALNNYLAKVNYNQSLFDAPLHYNFYAASTGGGYYDMRNILNNTLVASNPTKAVTLVENHDTQPGQSLESTVQPWFKPLAYAFILTRSGGYPSVFYGDMYGTKGTTTREIPALKSKIEPLLKARKDYAYGTQRDYIDNPDVIGWTREGDSTKAKGGLATVITDGPGGSKRMYVGTSNAGEIWYDLTGNRTDKITIGSDGYATFPVNGGSVSVWVQQ

SEQ ID NO: 38393 - protein, 480 aa, Cytophaga sp.
NGTMMQYFEWYVPNDGQQWNRLRTDAPYLSSVGITAVWTPPAYKGTSQADVGYGPYDLYDLGEFNQKGTVRTKYGTKGELKSAVNTLHSNGIQVYGDVVMNHKAGADYTENVTAVEVNPSNRYQETSGEYNIQAWTGFNFPGRGTTYSNWKWQWFHFDGTDWDQSRSLSRIFKFDGKAWDWEVSSENGNYDYLMYADYDYDHPDVVNEMKKWGVWYANEVGLDGYRLDAVKHIKFQFLKDWVDNARAATGKEMFTVGEYWQNDLGALNNYLAKVNYNQSLFDAPLHYNFYAASTGGGYYDMRNILNNTLVASNPTKAVTLVENHDTQPGQSLESTVQPWFKPLAYAFILTRSGGYPSVFYGDMYGTKGTTTREIPALKSKIEPLLKARKDYAYGTQRDYIDNPDTIGWTREGDSTKAKSGLATVITDGPGGSKRMYVGTSNAGEIWYDLTGNRTDKITIGSDGYATFPVNGGSVSVWVQQ

SEQ ID NO: 38394 - protein, 480 aa, Cytophaga sp.
NGTMMQYFEWYVPNDGQQWNRLRTDAPYLSSVGITAVWTPPAYKGTSQADVGYGPYDLYDLGEFNQKGTVRTKYGTKGELKSAVNTLHSNGIQVVGDVVMNHKAGADYTENVTAVEVNPSNRYQETSGEYNIQAWTGFNFPGRGTTYSNWKWQWFHFDGTDWDQSRSLSRIFKFDGKAWDWEVSSENGNYDYLMYADYDYDHPDVVNEMKKWGVWYANEVGLDGYRLDAVKHIKFQFLKDWVDNARAATGKEMFTVGEYWQNDLGALNNYLAKVNYNQSLFDAPLHYNFYAASTGGGYYDMRNILNNTLVASNPTKAVTLVENHDTQPGQSLESTVQPWFKPLAYAFILTRSGGYPSVFYGDMYGTKGTTTREIPALKSKIEPLLKARKDYAYGTQRDYIDNPDVIGWTREGDSTKAKSGLATVITDGPGGSKRMYVGTSNAGEIWYDLTGNRTDKITIGSDGYATFPVNGGSVSVWVQQ

SEQ ID NO: 38395 - protein, 480 aa, Cytophaga sp.
NGTMMQYFEWYVPNDGQQWNRLRTDAPYLSSVGITAVWTPPAYKGTSQADVGYGPYDLYDLGEFNQKGTVRTKYGTKGELKSAVNTLHSNGIQVYGDVVMNHKAGADYTENVTAVEVNPSNRYQETSGEYNIQAWTGFNFSGRGTTYSNWKWQWFHFDGTDWDQSRSLSRIFKFDGKAWDWEVSSENGNYDYLMYADYDYDHPDVVNEMKKWGVWYANEVGLDGYRLDAVKHIKFQFLKDWVDNARAATGKEMFTVGEYWQNDLGALNNYLAKVNYNQSLFDAPLHYNFYAASTGGGYYDMRNILNNTLVASNPTKAVTLVENHDTQPGQSLESTVQPWFKPLAYAFILTRSGGYPSVFYGDMYGTKGTTTREIPALKSKIEPLLKARKDYAYGTQRDYIDNPDVIGWTREGDSTKAKSGLATVITDGPGGSKRMYVGTSNAGEIWYDLTGNRTDKITIGSDGYATFPVNGGSVSVWVQQ

SEQ ID NO: 38396 - protein, 480 aa, Cytophaga sp.
NGTMMQYFEWYVPNDGQQWNRLRTDAPYLSSVGITAVWTPPAYKGTSQADVGYGPYDLYDLGEFNQKGTVRTKYGTKGELKSAVNTLHSNGIQVYGDVVMNHKAGADYTENVTAVEVNPSNRYQETSGFYNIQAWTGFNFPGRGTTYSNWKWQWFHFDGTDWDQSRSLSRIFKFDGKAWDWEVSSENGNYDYLMYADYDYDHPDVVNEMKKWGVWYANEVGLDGYRLDAVKHIKFQFLKDWVDNARAATGKEMFTVGEYWQNDLGALNNYLAKVNYNQSLFDAPLHYNFYAASTGGGYYDMRNILNNTLVASNPTKAVTLVENHDTQPGQSLESTVQPWFKPLAYAFILTRSGGYPSVFYGDMYGTKGTTTREIPALKSKIEPLLKARKDYAYGTQRDYIDNPDVIGWTREGDSTKAKSGLATVITDGPGGSKRMYVGTSNAGEIWYDLTGNRTDKITIGSDGYATFPVNGGSVSVWVQQ

SEQ ID NO: 38397 - protein, 480 aa, Cytophaga sp.
NGTMMQYFEWYVPNDGQQWNRLRTDAPYLSSVGITAVWTPPAYKGTSQADVGYGPYDLYDLGEFNQKGTVRTKYGTKGELKSAVNTLHSNGIQVYGDVVMNHKAGADYTENVTAVEVNPSNRYQETSGEYNIQAWTGFNFPGRGTTYSNWKWQWFHFDGTDWDQSRSLSRIFKFDGKAWDWEVSSENNNYDYLMYADYDYDHPDVVNEMKKWGVWYANEVGLDGYRLDAVKHIKFQFLKDWVDNARAATGKEMFTVGEYWQNDLGALNNYLAKVNYNQSLFDAPLHYNFYAASTGGGYYDMRNILNNTLVASNPTKAVTLVENHDTQPGQSLESTVQPWFKPLAYAFILTRSGGYPSVFYGDMYGTKGTTTREIPALKSKIEPLLKARKDYAYGTQRDYIDNPDVIGWTREGDSTKAKSGLATVITDGPGGSKRMYVGTSNAGEIWYDLTGNRTDKITIGSDGYATFPVNGGSVSVWVQQ

SEQ ID NO: 38398 - protein, 480 aa, Cytophaga sp.
NGTMMQYFEWYVPNDGQQWNRLRTDAPYLSSVGITAVWTPPAYKGTSQADVGYGPYDLYDLGEFNQKGTVRTKYGTKGELKSAVNTLHSNGIQVYGDVVMNHKAGADYTENVTAVEVNPSNRYQETSGEYNIQAWTGFNFPGRGTTYSNWKWQWFHFDGTDWDQSRSLSRIFKFDGKAWDWEVSSENGNYDYLMYADYDYDHPDVVNEMKKWGVWYANEVGLDGYRLDAVKHIKFQFLKDWVDNARAATGKEMFTVGEYWQNDLGALNNYLAKVNYNQSLFDAPLHYNFYAASTGGGYYDMRNILNNTLVASNPTKAVTLVENHDTQPGQSLESTVQPWFKPLAYAFILTRSGGYPSVFYGDMYGTKGTTTREIPALKSKIEPLLKARKDYAYGTQRDYIDNPDVIGWTREGDSTKAKSGLATVITDGPGGSKRMYVGTSNANEIWYDLTGNRTDKITIGSDGYATFPVNGGSVSVWVQQ

SEQ ID NO: 38399 - protein, 480 aa, Cytophaga sp.
NGTMMQYFEWYVPNDGQQWNRLRTDAPYLSSVGITAVWTPPAYKGTSQADVGYGPYDLYDLGEFNQKGTVRTKYGTKGELKSAVNTLHSNGIQVYGDVVMNHKAGADYTENVTAVEVNPSNRYQETSGEYNIQAWTGFNFPGRGTTYSNWKWQWFHFDGTDWDQSRSLSRIFKFDGKAWDWEVSSENGNYDYLMYADYDYDHPDVVNEMKKWGVWYANEVGLDGYRLDAVKHIKFQFLKDWVDNARAATGKEMFTVGEYWQNDLGALNNYLAKVNYNQSLFDAPLHYNFYAASTGGGYYDMRNILNNTLVASNPTKAVTLVENHDTQPGQSLESTVQPWFKPLAYAFILTRSGGYPSVFYGDMYGTKGTTTREIPALKSKIEPLLKARKDYAYGTQRDYIDNPDVIGWTREGDSTKAKSGLATVITDGPGGSKRMYVGTSNAGEIWYDLIGNRTDKITIGSDGYATFPVNGGSVSVWVQQ

SEQ ID NO: 38400 - protein, 480 aa, Cytophaga sp.
NGTMMQYFEWYVPNDGQQWNRLRTDAPYLSSVGITAVWTPPAYKGTSQADVGYGPYDLYDLGEFNQKGTVRTKYGTKGELKSAVNTLHSNGIQVYGDVVMNHKAGADYTENVTAVEVNPSNRYQETSGEYNIQAWTGFNFPGRGTTYSNWKWQWFHFDGTDWDQSRSLSRIFKFDGKAWDWEVSSENGNYDYLMYADYDYDHPDVVNEMKKWGVWYANEVGLDGYRLDAVKHIKFQFLKLWVDNARAATGKEMFTVGEYWQNDLGALNNYLAKVNYNQSLFDAPLHYNFYAASTGGGYYDMRNILNNTLVASNPTKAVTLVENHDTQPGQSLESTVQPWFKPLAYAFILTRSGGYPSVFYGDMYGTKGTTTREIPALKSKIEPLLKARKDYAYGTQRDYIDNPDVIGWTREGDSTKAKSGLATVITDGPGGSKRMYVGTSNAGEIWYDLTGNRTDKITIGSDGYATFPVNGGSVSVWVQQ

SEQ ID NO: 38401 - protein, 480 aa, Cytophaga sp.
NGTMMQYFEWYVPNDGQQWNRLRTDAPYLSSVGITAVWTPPAYKGTSQADVGYGPYDLYDLGEFNQKGTVRTKYGTKGELKSAVNTLHSNGIQVYGDVVMNHKAGADYTENVTAVEVNPSNRYQETSGEYNIQAWTGFNFPGRGTTYSNWKWQWFHFDGTDWDQSRSLSRIFKFDGKAWDWEVSSENGNYDYLMYADYDYDHPDVVNEMKKWGVWYAYEVGLDGYRLDAVKHIKFQFLKDWVDNARAATGKEMFTVGEYWQNDLGALNNYLAKVNYNQSLFDAPLHYNFYAASTGGGYYDMRNILNNTLVASNPTKAVTLVENHDTQPGQSLESTVQPWFKPLAYAFILTRSGGYPSVFYGDMYGTKGTTTREIPALKSKIEPLLKARKDYAYGTQRDYIDNPDVIGWTREGDSTKAKSGLATVITDGPGGSKRMYVGTSNAGEIWYDLTGNRTDKITIGSDGYATFPVNGGSVSVWVQQ

SEQ ID NO: 38402 - protein, 480 aa, Cytophaga sp.
NGTMMQYFEWYVPNDGQQWNRLRTDAPYLSSVGITAVWTPPAYKGTSQADVGYGPYDLYDLGEFNQKGTVRTKYGTKGELKSAVNTLHSNGIQVYGDVVMNHKAGADYTENVTAVEVNPSNRYQETSGEYNIQAWTGFNFPGRGTTYSNWKWQWFHFDGTDWDQSRSLSRIFKFDGKAWDWEVSSENGNYDYLMYADYDYDHPDVVNEMKKWGVWYANEVGLDGYRLDAVKHIKFQFLKDWVDNARAATGKEMFTVGEYWQNDLGALNNYLAKVNYNQSLFDAPLHYNFYAASTGGGYYDMRNILNNTLVASNPTKAVTLVENHDTQPGQSLESTVQPWFKPLAYAFILTRSGGYPSVFYGDMYGTKGTTTREIPALKSKIETLLKARKDYAYGTQRDYIDNPDVIGWTREGDSTKAKSGLATVITDGPGGSKRMYVGTSNAGEIWYDLTGNRTDKITIGSDGYATFPVNGGSVSVWVQQ

SEQ ID NO: 38403 - protein, 480 aa, Cytophaga sp.
NGTMMQYFEWYVPNDGQQWNRLRTDAPYLSSVGITAVWTPPAYKGTSQADVGYGPYDLYDLGEFNQKGTVRTKYGTKGELKSAVNTLHSNGIQVYGDVVMNHKAGADYTENVTAVEVNPSNRYQETSGEYNIQAWTGFNFPGRGTTYSNWKWQWFHFDGTDWDQSRSLSRIFKFDGKAWDWEVSSENGNYDYLMYADYDYDHPDVVNEMKKWGVWYANEVGLDGYRLDAVKHIKFQFLKDWVDNARAATGKEMFTVGEYWQNDLGALNNYLAKVNYNQSLFDAPLHYNFYAASTGGGYYDMRNILNNTLVASNPTKAVTLVENHDTQPGQSLESTVQPWFKPLAYAFILTRSGGYPSVFYGDMYGTKGTTTREIPALKSKIEPLLKARKDYAYGTQRDYIDNPDVIGWTREGDSTKAKSGLATVITDGPGGSKRMYVGTSNAGEIWYDLTGNRTDKITIGMDGYATFPVNGGSVSVWVQQ

SEQ ID NO: 38404 - protein, 480 aa, Cytophaga sp.
NGTMMQYFEWYVPNDGQQWNRLRTDAPYLSSVGITAVWTPPAYKGTSQADVGYGPYDLYDLGEFNQKGTVRTKYGTKGELKSAVNTLHSNGIQVYGDVVMNHKAGADYTENVTAVEVNPSNRYQETSGEYNIQAWTGFNFPGRGTTYSNWKWQWFHFDGTDWDQSRSLSRIFKFDHKAWDWEVSSENGNYDYLMYADYDYDHPDVVNEMKKWGVWYANEVGLDGYRLDAVKHIKFQFLKDWVDNARAATGKEMFTVGEYWQNDLGALNNYLAKVNYNQSLFDAPLHYNFYAASTGGGYYDMRNILNNTLVASNPTKAVTLVENHDTQPGQSLESTVQPWFKPLAYAFILTRSGGYPSVFYGDMYGTKGTTTREIPALKSKIEPLLKARKDYAYGTQRDYIDNPDVIGWTREGDSTKAKSGLATVITDGPGGSKRMYVGTSNAGEIWYDLTGNRTDKITIGSDGYATFPVNGGSVSVWVQQ

SEQ ID NO: 38405 - protein, 480 aa, Cytophaga sp.
NGTMMQYFEWYVPNDGQQWNRLRTDAPYLSSVGITAVWTPPAYKGTSQADVGYGPYDLYDLGEFNQKGTVRTKYGTKGELKSAVNTLHSNGIQVYGDVVMNHKAGADYTENVTAVEVNPSNRYQETSGEYNIQAWTGFNFPGRGTTYSNWKWQWFHFDGTDWDQSRSLSRIFKFDGKAWDWEVSSENGNYDYLMYADYDYDHPDVVNEMKKWGVWYANEVGLDGYRLDAVKHIKFQFLKDWVDNARAATGKEMFTVGEYWQNDLGALNNYLAKVNYNQSLFDAPLHYNFYAASTGGGYYDMRNILNNTLVASNPTKAVTLVENHDTQPGQSLESTVQPWFKPLAYAFILTRSGGYPSVFYGDMYGTKGTTTREIPALKSKIEPLLKARGDYAYGTQRDYIDNPDVIGWTREGDSTKAKSGLATVITDGPGGSKRMYVGTSNAGEIWYDLTGNRTDKITIGSDGYATFPVNGGSVSVWVQQ

SEQ ID NO: 38406 - protein, 480 aa, Cytophaga sp.
NGTMMQYFEWYVPNDGQQWNRLRTDAPYLSSVGITAVWTPPAYKGTSQADVGYGPYDLYDLGEFNQKGTVRTKYGTKGELKSAVNTLHSNGIQVYGDVVMNHKAGADYTENVTAVEVNPSNRYQETSGEYNIQAWTGFNFPGRGTTYSNWKWQWFHFDGTDWDQSRSLSRIFKFDGKAWDWEVSSENGNYDYLMYADYDYDHPDVVNEMKKWGVWYANEVGLDGYRLDAVKHIKFQFLKDWVDNARAATGKEMFTVGEYWQNDLGALNNYLAKVNYNQSLFDAPLHYNFYAASTGGGYYDMRNILNNTLVASNPTKAVTLVENHDTQPGQSLESTVQPWFKPLAYAFILTRSGGYPSVFYGDMYGTKGTTTREIPALKSKIEPLLKARKDYAYGTQRDYIDNPDVIGWTREGDSTKAKSGLATVITDGYGGSKRMYVGTSNAGEIWYDLTGNRTDKITIGSDGYATFPVNGGSVSVWVQQ

SEQ ID NO: 38407 - protein, 480 aa, Cytophaga sp.
NGTMMQYFEWYVPNDGQQWNRLRTDAPYLSSVGITAVWTPPAYKGTSQADVGYGPYDLYDLGEFNQKGTVRTKYGTKGELKSAVNTLHSNGIQVYGDVVMNHKAGADYTENVTAMEVNPSNRYQETSGEYNIQAWTGFNFPGRGTTYSNWKWQWFHFDGTDWDQSRSLSRIFKFDGKAWDWEVSSENGNYDYLMYADYDYDHPDVVNEMKKWGVWYANEVGLDGYRLDAVKHIKFQFLKDWVDNARAATGKEMFTVGEYWQNDLGALNNYLAKVNYNQSLFDAPLHYNFYAASTGGGYYDMRNILNNTLVASNPTKAVTLVENHDTQPGQSLESTVQPWFKPLAYAFILTRSGGYPSVFYGDMYGTKGTTTREIPALKSKIEPLLKARKDYAYGTQRDYIDNPDVIGWTREGDSTKAKSGLATVITDGPGGSKRMYVGTSNAGEIWYDLTGNRTDKITIGSDGYATFPVNGGSVSVWVQQ

SEQ ID NO: 38408 - protein, 480 aa, Cytophaga sp.
NGTMMQYFEWYVPNDGQQWNRLRTDAPYLSSVGITAVWTPPAYKGTSQADVGYGPYDLYDLGEFNQKGTVRTKYGTKGELKSAVNTLHSNGIQVYGDVVMNHKAGADYTENVTAVEVNPSNRYQETSGEYNIQAWTGFNFPGRGTTYSNWKWQWFHFDGTDWDQSRSLSRIFKFDGKAWDWEVSSENGNYDYLMYADYDYDHPDVVNEMKKWGVWYANEVGLDGYRLDAVKHIKFQFLKDWVDNARAATGKEMFTVGEYWQNDLGALNNYLAKVNYNQSLFDAPLHYNFYAASTGGGYYDMRNILNNTLVASNPTKAVTLVENHDTQPGQSLESTVQPWFKPLAYAFILTRSGGYPSVFYGDMYGTKGTTTREIPALKSKIEPLLKARTDYAYGTQRDYIDNPDVIGWTREGDSTKAKSGLATVITDGPGGSKRMYVGTSNAGEIWYDLTGNRTDKITIGSDGYATFPVNGGSVSVWVQQ

SEQ ID NO: 38409 - protein, 480 aa, Cytophaga sp.
NGTMMQYFEWYVPNDGQQWNRLRTDAPYLSSVGITAVWTPPAYKGTSQADVGYGPYDLYDLGEFNQKGTVRTKYGTKGELKSAVNTLHSNGIQVYGDVVMNHKAGADYTENVTAVEVNPSNRYQETSGEYNIQAWTGFNFPGRGTTYSNWKWQWFHFDGTDWDQSRSLSRIFKFDGKAWDWEVSSENGNYDYLMYADYDYDHPDVVNEMKKWGVWYANEVGLDGYRLDAVKHIKFQFLKDWVDNARAATGKEMFTVGEYWQNDLGALNNYLAKVNYNQSLFDAPLHYNFYAASTGGGYYDMRNILNNTLVASNPTKAVTLVENHDTQPGQSLESTVQPWFKPLAYAFILTRSGGYPSVFYGDMYGTKGTTTREIPALKSKIEPLLKARKDYAYGTQRDYIDNPDVIGWTREGDSTKAKSGLATVITDGPSGSKRMYVGTSNAGEIWYDLTGNRTDKITIGSDGYATFPVNGGSVSVWVQQ

SEQ ID NO: 38410 - protein, 480 aa, Cytophaga sp.
NGTMMQYFEWYVPNDGQQWNRLRTDAPYLSSVGITAVWTPPAYKGTSQADVGYGPYDLYDLGEFNQKGTVRTKYGTKGELKSAVNTLHSNGIQVYGDVVMNHKAGADYTENVTAVEVNPSNRYQETSGEYNIQAWTGFNFPGRGTTYSNWKWQWFHFDGTDWDQSRSLSRIFKFDGKAWDWEVSSENGNYDYLMYADYDYDHPDVQNEMKKWGVWYANEVGLDGYRLDAVKHIKFQFLKDWVDNARAATGKEMFTVGEYWQNDLGALNNYLAKVNYNQSLFDAPLHYNFYAASTGGGYYDMRNILNNTLVASNPTKAVTLVENHDTQPGQSLESTVQPWFKPLAYAFILTRSGGYPSVFYGDMYGTKGTTTREIPALKSKIEPLLKARKDYAYGTQRDYIDNPDVIGWTREGDSTKAKSGLATVITDGPGGSKRMYVGTSNAGEIWYDLTGNRTDKITIGSDGYATFPVNGGSVSVWVQQ

SEQ ID NO: 38411 - protein, 480 aa, Cytophaga sp.
NGTMMQYFEWYVPNDGQQWNRLRTDAPYLSSVGITAVWTPPAYKGTSQADVGYGPYDLYDLGEFNQKGTVRTKYGTKGELKSAVNTLHSNGIQVYGDVVMNHKAGADYTENVTAVEVNPSNRYQETSGEYNIQAWTGFNFPGRGTTYSNWKWQWFHFDGTDWDQSRSLSRIFKFDGKAWDWEVSSENGNYDYLMYADYDYDHPDVVNEMKKWGVWYANEVGLDGYRLDAVKHIKFQFLKDWVDNARAATGKEMFTVGEYWQNDLGALNNYLAKVNYNQSLFDAPLHYNFYAASTGGGYYDMRNILNNTLVASNPTKAVTLVENHDTQPGQSLESTVQPWFKPLAYAFILTRSGGYPSVFYGDMYGTKGTTTREIPALKSKIEPLLKARKDYAYGTQRDYIDNPDVIGWTREGDSTKAKSGLATVITDGPGGSKRMYVGTSNAGEIWYDLTGNRTDKITIGSDGYATFPVNGGSVCVWVQQ

SEQ ID NO: 38412 - protein, 480 aa, Cytophaga sp.
NGTMMQYFEWYVPNDGQQWNRLRTDAPYLSSVGITAVWTPPAYKGTSQADVGYGPYDLYDLGEFNQKGTVRTKYGTKGELKSAVNTLHSNGIQVYGDVVMNHKAGADYTENVTAVEVNPSNRYQETSGEYNIQAWTGFNFPGRGTTYSNWKWQWFHFDGTDWDQSRSLSRIFKFDGKAWDWEVSSENGNYDYLMYADYDYDHPDVVNEMKKWGVWYANEVGLDGYRLDAVKHIKFQFLKDWVDNARAATGKEMFTVGEYWQNDLGALNNYLAKVNYNQSLFDAPLHYNFYAASTGGGYYDMRNILNNTLVASNPTKAVTLVENHDTQPGQSLESTVQPWFKPLAYAFILTRSGGYPSVFYGDMYGTKGTTTREIPALKSKIEPLLKARKDYNYGTQRDYIDNPDVIGWTREGDSTKAKSGLATVITDGPGGSKRMYVGTSNAGEIWYDLTGNRTDKITIGSDGYATFPVNGGSVSVWVQQ

SEQ ID NO: 38413 - protein, 480 aa, Cytophaga sp.
NGTMMQYFEWYVPNDGQQWNRLRTDAPYLSSVGITAVWTPPAYKGTSQADVGYGPYDLYDLGEFNQKGTVRTKYGTKGELKSAVNTLHSNGIQVYGDVVMNHKAGADYTENVTAVEVNPSNRYQETSGEYNIQAWTGFNFPGRGTTYSNWKWQWFHFDGTDWDQSRSLSRIFKFDGKAWDWEVSSENGNYDYLMYADYDYDHPDVVNEMKKWGVWYANEVGLDGYRLDAVKHIKFQFLKDWVDNARAATGKEMFTVGEYWDNDLGALNNYLAKVNYNQSLFDAPLHYNFYAASTGGGYYDMRNILNNTLVASNPTKAVTLVENHDTQPGQSLESTVQPWFKPLAYAFILTRSGGYPSVFYGDMYGTKGTTTREIPALKSKIEPLLKARKDYAYGTQRDYIDNPDVIGWTREGDSTKAKSGLATVITDGPGGSKRMYVGTSNAGEIWYDLTGNRTDKITIGSDGYATFPVNGGSVSVWVQQ

SEQ ID NO: 38414 - protein, 480 aa, Cytophaga sp.
NGTMMQYFEWYVPNDGQQWNRLRTDAPYLSSVGITAVWTPPAYKGTSQADVGYGPYDLYDLGEFNQKGTVRTKYGTKGELKSAVNTLHSNGIQVYGDVVMNHKAAADYTENVTAVEVNPSNRYQETSGEYNIQAWTGFNFPGRGTTYSNWKWQWFHFDGTDWDQSRSLSRIFKFDGKAWDWEVSSENGNYDYLMYADYDYDHPDVVNEMKKWGVWYANEVGLDGYRLDAVKHIKFQFLKDWVDNARAATGKEMFTVGEYWQNDLGALNNYLAKVNYNQSLFDAPLHYNFYAASTGGGYYDMRNILNNTLVASNPTKAVTLVENHDTQPGQSLESTVQPWFKPLAYAFILTRSGGYPSVFYGDMYGTKGTTTREIPALKSKIEPLLKARKDYAYGTQRDYIDNPDVIGWTREGDSTKAKSGLATVITDGPGGSKRMYVGTSNAGEIWYDLTGNRTDKITIGSDGYATFPVNGGSVSVWVQQ

SEQ ID NO: 38415 - protein, 480 aa, Cytophaga sp.
NGTMMQYFEWYVPNDGQQWNRLRTDAPYLSSVGITASWTPPAYKGTSQADVGYGPYDLYDLGEFNQKGTVRTKYGTKGELKSAVNTLHSNGIQVYGDVVMNHKAGADYTENVTAVEVNPSNRYQETSGEYNIQAWTGFNFPGRGTTYSNWKWQWFHFDGTDWDQSRSLSRIFKFDGKAWDWEVSSENGNYDYLMYADYDYDHPDVVNEMKKWGVWYANEVGLDGYRLDAVKHIKFQFLKDWVDNARAATGKEMFTVGEYWQNDLGALNNYLAKVNYNQSLFDAPLHYNFYAASTGGGYYDMRNILNNTLVASNPTKAVTLVENHDTQPGQSLESTVQPWFKPLAYAFILTRSGGYPSVFYGDMYGTKGTTTREIPALKSKIEPLLKARKDYAYGTQRDYIDNPDVIGWTREGDSTKAKSGLATVITDGPGGSKRMYVGTSNAGEIWYDLTGNRTDKITIGSDGYATFPVNGGSVSVWVQQ

SEQ ID NO: 38416 - protein, 480 aa, Cytophaga sp.
NGTMMQYFEWYVPNDGQQWNRLRTDAPYLSSVGITAVWTPPAYKGTSQADVGYGPYDLYDLGEFNQKGTVRTKYGTKGELKSAVNTLHSNGIQVYGDVVMNHKAGADYTENVTAVEVNPSNRYQETSGEYNIQAWTGFNFPGRGTTYSNWKWQWFHFDGTDWDQSRSLSRIFKFDGKAWDWEVSSRNGNYDYLMYADYDYDHPDVVNEMKKWGVWYANEVGLDGYRLDAVKHIKFQFLKDWVDNARAATGKEMFTVGEYWQNDLGALNNYLAKVNYNQSLFDAPLHYNFYAASTGGGYYDMRNILNNTLVASNPTKAVTLVENHDTQPGQSLESTVQPWFKPLAYAFILTRSGGYPSVFYGDMYGTKGTTTREIPALKSKIEPLLKARKDYAYGTQRDYIDNPDVIGWTREGDSTKAKSGLATVITDGPGGSKRMYVGTSNAGEIWYDLTGNRTDKITIGSDGYATFPVNGGSVSVWVQQ

SEQ ID NO: 38417 - protein, 480 aa, Cytophaga sp.
NGTMMQYFEWYVPNDGQQWNRLRTDAPYLSSVGITAVWTPPAYKGTSQADVGYGPYDLYDLGEFNQKGTVRTKYGTKGELKSAVNTLHSNGIQVYGDVVMNHKAGADYTENVTAVEVNPSNRYQETSGEYNIQAWTGFNFPGRGTTYSNWKWQWFHFDGTDWDQSRSLSRIFKFDGKAWDWEVSSENGNYDYLMYADYDYDHPDVVNEMKKWGVWYANEVGLDGYRLDAVKHIKFQFLKDWVDNARAATGKEMFTVGEYWQNDLGALNNYLAKVNYNQSLFDAPLHYNFYAASTGGGYYDMRNILNNTLVASNPTKAVTLVENHDTQPGQSLRSTVQPWFKPLAYAFILTRSGGYPSVFYGDMYGTKGTTTREIPALKSKIEPLLKARKDYAYGTQRDYIDNPDVIGWTREGDSTKAKSGLATVITDGPGGSKRMYVGTSNAGEIWYDLTGNRTDKITIGSDGYATFPVNGGSVSVWVQQ

SEQ ID NO: 38418 - protein, 480 aa, Cytophaga sp.
NGTMMQYFEWYVPNDGQQWNRLRTCAPYLSSVGITAVWTPPAYKGTSQADVGYGPYDLYDLGEFNQKGTVRTKYGTKGELKSAVNTLHSNGIQVYGDVVMNHKAGADYTENVTAVEVNPSNRYQETSGEYNIQAWTGFNFPGRGTTYSNWKWQWFHFDGTDWDQSRSLSRIFKFDGKAWDWEVSSENGNYDYLMYADYDYDHPDVVNEMKKWGVWYANEVGLDGYRLDAVKHIKFQFLKDWVDNARAATGKEMFTVGEYWQNDLGALNNYLAKVNYNQSLFDAPLHYNFYAASTGGGYYDMRNILNNTLVASNPTKAVTLVENHDTQPGQSLESTVQPWFKPLAYAFILTRSGGYPSVFYGDMYGTKGTTTREIPALKSKIEPLLKARKDYAYGTQRDYIDNPDVIGWTREGDSTKAKSGLATVITDGPGGSKRMYVGTSNAGEIWYDLTGNRTDKITIGSDGYATFPVNGGSVSVWVQQ

SEQ ID NO: 38419 - protein, 480 aa, Cytophaga sp.
NGTMMQYFEWYVPNDGQQWNRLRTDAPYLSSVGITAVWTPPAYKGTSQADVGYGPYDLYDLGEFNQKGTVRTKYGTKGELKSAVNTLHSNGIQVYGDVVMNHKAGADYTENVTAVEVNPSNRYQETSGEYNIQAWTGFNFPGRGTTYSNWKWQWFHFDGTDWDQSRSLSRIFKFDGKAWDWEVSSENGNYDYLMYADYDYDHPDVVNEMKKWGVWYANEVGLDGYRLDAVKHIKMQFLKDWVDNARAATGKEMFTVGEYWQNDLGALNNYLAKVNYNQSLFDAPLHYNFYAASTGGGYYDMRNILNNTLVASNPTKAVTLVENHDTQPGQSLESTVQPWFKPLAYAFILTRSGGYPSVFYGDMYGTKGTTTREIPALKSKIEPLLKARKDYAYGTQRDYIDNPDVIGWTREGDSTKAKSGLATVITDGPGGSKRMYVGTSNAGEIWYDLTGNRTDKITIGSDGYATFPVNGGSVSVWVQQ

SEQ ID NO: 38420 - protein, 480 aa, Cytophaga sp.
NGTMMQYFEWYVPNDGQQWNRLRTDAPYLSSVGITAVWTPPAYKGTSQADVGYGPYDLYDLGEFNQKGTVRTKYGTKGELKSAVNTLHSNGIQVYGDVVMNHKAGADYTENVTAVEVNPSNRYQETSGEYNIQAWTGFNFPGRGTTYSNWKWQWFHFDGTDWDQSRSLSRIFKFDGKAWDWEVSSENGNYDYLMYADYDYDHPDVVNEMKKWGVWYANEVGLDGYRLDAVKHIKFQFLKDWVDNARAATGKEMFTVGEYWQNDLGALNNYLAKVNYNQSLFDAPLHYNFYAASTGGGYYDMRNILNNTLVASNPTKAVTLVENHDTQPGESLESTVQPWFKPLAYAFILTRSGGYPSVFYGDMYGTKGTTTREIPALKSKIEPLLKARKDYAYGTQRDYIDNPDVIGWTREGDSTKAKSGLATVITDGPGGSKRMYVGTSNAGEIWYDLTGNRTDKITIGSDGYATFPVNGGSVSVWVQQ

SEQ ID NO: 38421 - protein, 480 aa, Cytophaga sp.
NGTMMQYFEWYVPNDGQQWNRLRTDAPYLSSVGITAVWTPPAYKGTSQADVGYGPYDLYDLGEFNQKGTVRTKYGTKGELKSAVNTLHTNGIQVYGDVVMNHKAGADYTENVTAVEVNPSNRYQETSGEYNIQAWTGFNFPGRGTTYSNWKWQWFHFDGTDWDQSRSLSRIFKFDGKAWDWEVSSENGNYDYLMYADYDYDHPDVVNEMKKWGVWYANEVGLDGYRLDAVKHIKFQFLKDWVDNARAATGKEMFTVGEYWQNDLGALNNYLAKVNYNQSLFDAPLHYNFYAASTGGGYYDMRNILNNTLVASNPTKAVTLVENHDTQPGQSLESTVQPWFKPLAYAFILTRSGGYPSVFYGDMYGTKGTTTREIPALKSKIEPLLKARKDYAYGTQRDYIDNPDVIGWTREGDSTKAKSGLATVITDGPGGSKRMYVGTSNAGEIWYDLTGNRTDKITIGSDGYATFPVNGGSVSVWVQQ

SEQ ID NO: 38422 - protein, 480 aa, Cytophaga sp.
NGTMMQYFEWYVPNDGQQWNRLRTDAPYLSSVGITAVWTPPAYKGTSQADVGYGPYDLYDLGEFNQKGTVRTKYGTKGELKSAVNTLHSNGIQVYGDVVMNHKAGADYTENVTAVEVNPSNRYQETSGEYNIQAWTGFNFPGRGTTYSNWKWQWFHFDGTDWDQSRSLSRIFKFDGKAWDWEVSSENGNYDYLMYADYDYDHPDVVNEMKKWGVWYANEVGLDGYRLDAVKHIKFQFLKDWVDNARAATGKEMFTVGEYWQNDLGALNNYLAKVNYNQSLFDAPLHYNFYAASTGGGYYDMRNILNNTLVASNPTKAVTLVENHDTQPGQSLESTVQPWFKPLAYAFILTRSGGYPSVFYGDMYGTKGTTTREIPALKSKIEPLLKARKDYAYGTQRDYIDNPDMIGWTREGDSTKAKSGLATVITDGPGGSKRMYVGTSNAGEIWYDLTGNRTDKITIGSDGYATFPVNGGSVSVWVQQ

SEQ ID NO: 38423 - protein, 480 aa, Cytophaga sp.
NGTMMQYFEWYVPNDGQQWNRLRTDAPYLSSVGITAVWTPPAYKGTSQADVGYGPYDLYDLGEFNQKGTVRTKYGTKGELKSAVNTLHSNGIQVYGDVVMNHKAGADYTENVTAVEVNPSNRYQETSGEYNIQAWTGFNFPGRGTTYSNWKWQWFHFDGTDWDQSRSLSRIFKFDGKAWDWEVSSENGNYDYLMYADYDYDHPDVVNEMKKWGVWYANEVGLDGYRLDAVKHIKFQFLKDWVDNARAATGKEMFTVGEYWQNDLGALNNYLAKVNYNQSLFDAPLHYNFYAASTGGGYYDMRNILNNTLVASNPTKAVTLVENHDTQPGQSLESTVQPWFKPLAYAFILTRSGGYPSVFYGDMYGTKGTTTREIPALKSKIEPLLKARKDYAYGTQRDYIDNPDVIGWTREGDSTKAKSGLATVITDGPTGSKRMYVGTSNAGEIWYDLTGNRTDKITIGSDGYATFPVNGGSVSVWVQQ

SEQ ID NO: 38424 - protein, 480 aa, Cytophaga sp.
NGTMMQYFEWYVPNDGQQWNRLRTDAPYLSSVGITAVWTPPAYKGTSQADVGYGPYDLYDLGEFNQKGTVRTKYGTKGELKSAVNTLHSNGIQVYGDVVMNHKAGADYTENVTAVEVNPSNRYQETSGEYNIQAWTGFNFPGRGTTYSNWKWQWFHFDGTDWDQRRSLSRIFKFDGKAWDWEVSSENGNYDYLMYADYDYDHPDVVNEMKKWGVWYANEVGLDGYRLDAVKHIKFQFLKDWVDNARAATGKEMFTVGEYWQNDLGALNNYLAKVNYNQSLFDAPLHYNFYAASTGGGYYDMRNILNNTLVASNPTKAVTLVENHDTQPGQSLESTVQPWFKPLAYAFILTRSGGYPSVFYGDMYGTKGTTTREIPALKSKIEPLLKARKDYAYGTQRDYIDNPDVIGWTREGDSTKAKSGLATVITDGPGGSKRMYVGTSNAGEIWYDLTGNRTDKITIGSDGYATFPVNGGSVSVWVQQ

SEQ ID NO: 38425 - protein, 480 aa, Cytophaga sp.
NGTMMQYFEWYVPNDGQQWNRLRTDAPYLSSVGITAVWTPPAYKGTSQADVGYGPYDLYDLGEFNQKGTVRTKYGTKGELKSAVNTLHSNGIQVYGDVVMNHKAGADYTENVTAVEVNPSNRYQETSGEYNIQAWTGFNFPGRGTTYSNWKWQWFHFDGTDWDQSRSLSRIFKFDGKAWDWEVSSENGNYDYLMYADYDYDHPDVVNEMKKWGVWYANEVGLDGYRLDAVKHIKFQFLKDWVDNARAATGKEMFTVGEYWQNDLGALNNYLAKVNYNQSLFDAPLHYNFYAASTGGGYYDMRNILNNTLVASNPTKAVTLVENHDTQPGQSLESTVQPWFKPLAYAFILTRSGGYPSVFYGDMYGTKGTTTREIPALKSKIEPLLKARKDYAYGTQRDYIDNPDVIGWTREGDSTKAKSGLATVITDGPGGSKRMYVGTSNAGEIWYDLTGNRTDKITIGSDGYATFPCNGGSVSVWVQQ

SEQ ID NO: 38426 - protein, 480 aa, Cytophaga sp.
NGTMMQYFEWYVPNDGDQWNRLRTDAPYLSSVGITAVWTPPAYKGTSQADVGYGPYDLYDLGEFNQKGTVRTKYGTKGELKSAVNTLHSNGIQVYGDVVMNHKAGADYTENVTAVEVNPSNRYQETSGEYNIQAWTGFNFPGRGTTYSNWKWQWFHFDGTDWDQSRSLSRIFKFDGKAWDWEVSSENGNYDYLMYADYDYDHPDVVNEMKKWGVWYANEVGLDGYRLDAVKHIKFQFLKDWVDNARAATGKEMFTVGEYWQNDLGALNNYLAKVNYNQSLFDAPLHYNFYAASTGGGYYDMRNILNNTLVASNPTKAVTLVENHDTQPGQSLESTVQPWFKPLAYAFILTRSGGYPSVFYGDMYGTKGTTTREIPALKSKIEPLLKARKDYAYGTQRDYIDNPDVIGWTREGDSTKAKSGLATVITDGPGGSKRMYVGTSNAGEIWYDLTGNRTDKITIGSDGYATFPVNGGSVSVWVQQ

SEQ ID NO: 38427 - protein, 480 aa, Cytophaga sp.
NGTMMQYFEWYVPNDGQQWNRLRTDAPYLSSVGITAVWTPPAYKGTSQADVGYGPYDLYDLGEFNQKGTVRTKYGTKGELKSAVNTLHSNGIQVYGDVVMNHKAGADYTENVTAVEVNPSNRYQETSGEYNIQAWTGFNFPGRGTTYENWKWQWFHFDGTDWDQSRSLSRIFKFDGKAWDWEVSSENGNYDYLMYADYDYDHPDVVNEMKKWGVWYANEVGLDGYRLDAVKHIKFQFLKDWVDNARAATGKEMFTVGEYWQNDLGALNNYLAKVNYNQSLFDAPLHYNFYAASTGGGYYDMRNILNNTLVASNPTKAVTLVENHDTQPGQSLESTVQPWFKPLAYAFILTRSGGYPSVFYGDMYGTKGTTTREIPALKSKIEPLLKARKDYAYGTQRDYIDNPDVIGWTREGDSTKAKSGLATVITDGPGGSKRMYVGTSNAGEIWYDLTGNRTDKITIGSDGYATFPVNGGSVSVWVQQ

SEQ ID NO: 38428 - protein, 480 aa, Cytophaga sp.
NGTMMQYFEWYVPNDGQQWNRLRTDAPYLSSVGITAVWTPPAYKGTSQADVGYGPYDLYDLGEFNQKGTVRTKYGTKGELKSAVNTLHSNGIQVYGDVVMNHKAGADYTENVTAVEVNPSNRYQETSGEYNIQAWTGFNFPGRGTTYSNWKPQWFHFDGTDWDQSRSLSRIFKFDGKAWDWEVSSENGNYDYLMYADYDYDHPDVVNEMKKWGVWYANEVGLDGYRLDAVKHIKFQFLKDWVDNARAATGKEMFTVGEYWQNDLGALNNYLAKVNYNQSLFDAPLHYNFYAASTGGGYYDMRNILNNTLVASNPTKAVTLVENHDTQPGQSLESTVQPWFKPLAYAFILTRSGGYPSVFYGDMYGTKGTTTREIPALKSKIEPLLKARKDYAYGTQRDYIDNPDVIGWTREGDSTKAKSGLATVITDGPGGSKRMYVGTSNAGEIWYDLTGNRTDKITIGSDGYATFPVNGGSVSVWVQQ

SEQ ID NO: 38429 - protein, 480 aa, Cytophaga sp.
NGTMMQYFEWYVPNDGQQWNRLRTDAPYLSSVGITAVWTPPAYKGTSQADVGYGPYDLYDLGEFNQKGTVRTKYGTKGELKSAVNTLHSNGIQVYGDVVMNHKAGADYTENVTAVEVNPSNRYQETSGEYNIQAWTGFNFPGRGTTYSNWKWQWFHFDGTDWDQSRSLSRIFKFDGKAWDWEVSSENGNYDYLMYADYDYDHPDVVNEMKKWGVWYANEVGLDGYRLDAVKHIKFQFLKDWVDNARAATGKEMFTVGEYWQNDLGALNNYLAKVNYNQSLFDAPLHYNFYAASTGGGYYDMRNILNNTLVASNPTKAVTLVENHDTQPGQSLESTVQPWFKPLAYAFILTRSGGYPSVFYGDMYGTKGTTTREIPALKSKIEPLLKARKDYAYGTQRDYIDNPDVIGWTRWGDSTKAKSGLATVITDGPGGSKRMYVGTSNAGEIWYDLTGNRTDKITIGSDGYATFPVNGGSVSVWVQQ

SEQ ID NO: 38430 - protein, 480 aa, Cytophaga sp.
NGTMMQYFEWYVPNDGQQWNRLRTDAPYLSSVGITAVWTPPAYKGTSQADVGYGPYDLYDLGEFNQKGTVRTKYGTKGELKSAVNTLHSNGIQVYGDVVMNHKAGADYTENVTAVEVNPSNRYQETSGEYNIQAWTGFNFPGRGTTYSNWKWQWFHFDGTDWDQSRSLSRIFKFDGKAWDWEVSSENGNYDYLMYADYDYDHPDVVNEMKKWGVWYANEVGLDGYRLDAVKHIKFQFLKDWVDNARAATGKEMFTVGEYWQNDLGALNNYLAKVNYNQSLFDAPLHYNFYAASTGGGYYDMRNILNNTLVASNPTKAVTLVENHDTQPGQSLESTVQPWFKPLAYAFILTRSGGYPSVFYGDMYGTKGTTTREIPALDSKIEPLLKARKDYAYGTQRDYIDNPDVIGWTREGDSTKAKSGLATVITDGPGGSKRMYVGTSNAGEIWYDLTGNRTDKITIGSDGYATFPVNGGSVSVWVQQ

SEQ ID NO: 38431 - protein, 480 aa, Cytophaga sp.
NGTMMQYFEWYVPNDGQQWNRLRTDAPYLSSVGITAVWTPPAYKGTSQADVGYGPYDLYDLGEFNQKGTVRTKYGTKGELKSAVNTLHSNGIQVYGDVVMNHKAGADYTENVTAVEVNPSNRYQETSGEYNIQAWTGFNFPGRGTTYSNWKWQWFHFDGTDWDQSRSLSRIFKFDGKAWDWEVSSENGNYDYLMYADYDYDHPDVVNEMKKWGVWYANEVGLDGYRLDAVKHIKFQFLKDWVDNARAATGKEMFTVGEYWQNDLGALNNYLAKVNYNQSLFDAPLHYNFYAASTGWGYYDMRNILNNTLVASNPTKAVTLVENHDTQPGQSLESTVQPWFKPLAYAFILTRSGGYPSVFYGDMYGTKGTTTREIPALKSKIEPLLKARKDYAYGTQRDYIDNPDVIGWTREGDSTKAKSGLATVITDGPGGSKRMYVGTSNAGEIWYDLTGNRTDKITIGSDGYATFPVNGGSVSVWVQQ

SEQ ID NO: 38432 - protein, 480 aa, Cytophaga sp.
NGTMMQYFEWYVPNDGQQWNRLRTDAPYLSSVGITAVWTPPAYKGTSQADVGYGPYDLYDLGEFNQKGTVRTKYGTKGELKSAVNTLHSNGIQVYGDVVMNHKAGADYTENVTAVEVNPSNRYQETSGEYNIQAWTGFNFPGRGTTYSNWKWQWFHFDGTDWDQSRSLSRIFKFDGKAWDWEVSSENGNYDYLMYADYDYDHPDVVNEMKKWGVWYANEVGLDGYRLDAVKHIKFQFLKDWVDNARAATGKEMFTVGEYWQNDLGALNNYLAKVNYNQSLFDAPLHYNFYAASTGGGYYDMRNILNNTLVASNPTKAVTLVENHDTQPGQSLESTVQPWFKPLAYAFILTRSGGYPSVFYGDMYGTKGTTTREIPALKSKIEPLLKARKDYAYGTQRDYIDNPDVIGWTREGDSTKAKSGLATVITDGPEGSKRMYVGTSNAGEIWYDLTGNRTDKITIGSDGYATFPVNGGSVSVWVQQ

SEQ ID NO: 38433 - protein, 480 aa, Cytophaga sp.
NGTMMQYFEWYVPNDGQQWNRLRTDAPYLSSVGITAVWTPPAYKGTSQADVGYGPYDLYDLGEFNQKGTVRTKYGTKGELKSAVNTLHSNGIQVYGDVVMNHKAGADYTENVTAVEVNPSNRYQETSGEYNIQAWTGFNFPGRGTTYSNWKWQWFHFDGTDWDQSRSLSRIFKFDGKAWDWEVSSENGNYDYLMYADYDYDHPDVVNEMKKWGVWYANEVGLDGYRLDAVKHIKFQFLKDWVDNARAATGKEMFTVGEYWQNDLGALNNYLAKVNYNQSLFDAPLHYNFYAASTGGGYYDMRNILNNTLVASNPTKAVTLVENHDTQPGQSLESTVQPWFKPLAYAFILTRSGGYPSVFYGDMYGTKGTTTREIPALKSKIEPLLKARKDYAYGTQRDYIDNPDVIGWTREGDSTKAKSGLATVITDGPGGSKRMYVGTSNAGEIWYDLTGNRTDKITIGSDGYATFPVNGHSVSVWVQQ

SEQ ID NO: 38434 - protein, 480 aa, Cytophaga sp.
NGTMMQYFEWVVPNDGQQWNRLRTDAPYLSSVGITAVWTPPAYKGTSQADVGYGPYDLYDLGEFNQKGTVRTKYGTKGELKSAVNTLHSNGIQVYGDVVMNHKAGADYTENVTAVEVNPSNRYQETSGEYNIQAWTGFNFPGRGTTYSNWKWQWFHFDGTDWDQSRSLSRIFKFDGKAWDWEVSSENGNYDYLMYADYDYDHPDVVNEMKKWGVWYANEVGLDGYRLDAVKHIKFQFLKDWVDNARAATGKEMFTVGEYWQNDLGALNNYLAKVNYNQSLFDAPLHYNFYAASTGGGYYDMRNILNNTLVASNPTKAVTLVENHDTQPGQSLESTVQPWFKPLAYAFILTRSGGYPSVFYGDMYGTKGTTTREIPALKSKIEPLLKARKDYAYGTQRDYIDNPDVIGWTREGDSTKAKSGLATVITDGPGGSKRMYVGTSNAGEIWYDLTGNRTDKITIGSDGYATFPVNGGSVSVWVQQ

SEQ ID NO: 38435 - protein, 480 aa, Cytophaga sp.
NGTMMQYFEWYVPNDGQQWNRLRTDAPYLSSVGITAVWTPPAYKGTSQADVGYGPYDLYDLGEFNQKGTVRTKYGTKGELKSAVNTLHSNGIQVYGDVVMNHKAGADYTENVTAVEVNPSNRYQETSGEYNIQAWTGFNFPGRGTTYSNWKWQWFHFDGTDWDQSRSLSRIFKFDGKAWDWEVSSENGNYDYLMYADYDYDHPDVVNEMKKWGVWYANEVGLDGYRLDAVKHIKFQFLKDWVDNARAATGKEMFTVGEYWQNDLGALNNYLAKVNYNQSLFDAPLHYNFYAASTGGGYYDMRNILNNTLVASNPTKAVTLVENHDTQPGQSLESTVQPWFKPLAYAFILTRSGGYPSVFYGDMYGTKGTTTREIPALKSKIEPLLKARKDYAYGTQRDYIDNPDVIGWTREGDSTKAKSGLATVITDGPGGSKRMYVGTSNACEIWYDLTGNRTDKITIGSDGYATFPVNGGSVSVWVQQ

SEQ ID NO: 38436 - protein, 480 aa, Cytophaga sp.
NGTMMQYFEWYVPNDGQQWNRLRTDAPYLSSVGITAVWTPPAYKGTSQADVGYGPYDLYDLGEFNQKGTVRTKYGTKGELKSAVNTLHSNGIQVYGDVVMNHKAGADYTENVTAVEVNPSNRYQETSGEYNIQAWTGFNFPGRGTTYSNWKWQWFHFDGTDWDQSRSLSRIFKFDGKAWDWEVSSENGNYDYLMYADYDYDHPDVVNEMKKWGVWYANEVGLDGYRLDAVKHIKFQFLKDWVDNARAATGKEMFTVGEYWQNDLGALNNYLAKVNYNQSLFDAPLHYNFYAASTGGGYYDMRNILNNTLVASNPTKAVTLVENHDTQPGQSLESTVQPWFKPLAYAFILTRSGGYPSVFYGDMYGTKGTTTREIPALKSKIEPLLKARKDYAYGTQRDYIDNIDVIGWTREGDSTKAKSGLATVITDGPGGSKRMYVGTSNAGEIWYDLTGNRTDKITIGSDGYATFPVNGGSVSVWVQQ

SEQ ID NO: 38437 - protein, 480 aa, Cytophaga sp.
NGTMMQYFEWYVPNDGQQWNRLRTDAPYLSSVGITAVWTPPAYKGTSQADVGYGPYDLYDLGEFNQKGTVRTKYGTKGELKSAVNTLHSNGIQVYGDVVMNHKAGADYTENVTAVEVNPSNRYQETSGEYNIQAWTGFNFPGRGTTYSNWKWQWFHFDGTDWDQSRSLSRIFKFDGKAWDWEVSSENGNYDYLMYADYDYDHPDVVNEMKKWGVWYANEVGLDGYRLDAVKHIKFQFLKDWVDNARAATGKEMFTVGEYWQNDLGALNNYLAKVNYNQSLFDAPLHYNFYAASTGGGYYDMRNILNNTLVASNPTKAVTLVENHDTQPGQSLESTVQPWFKPLAYAFILTRSGGYPSVFYGDMYGTKGTTTREIPALKSKIEPLLKARKDYAYGTQRDYIDNPDVIGWTREGDSTKAKSGLATVITDGPGGSKRMYVGTSNQGEIWYDLTGNRTDKITIGSDGYATFPVNGGSVSVWVQQ

SEQ ID NO: 38438 - protein, 480 aa, Cytophaga sp.
NGTMMQYFEWYVPNDGQQWNRLRTDAPYLSSVGITAVWTPPAYKGTSQADVGYGPYDLYDLGEFNQKGTVRTKYGTKGELKSAVNTLHSNGIQVYGDVVMNHKAGADYTENVTAVEVNPSNRYQEASGEYNIQAWTGFNFPGRGTTYSNWKWQWFHFDGTDWDQSRSLSRIFKFDGKAWDWEVSSENGNYDYLMYADYDYDHPDVVNEMKKWGVWYANEVGLDGYRLDAVKHIKFQFLKDWVDNARAATGKEMFTVGEYWQNDLGALNNYLAKVNYNQSLFDAPLHYNFYAASTGGGYYDMRNILNNTLVASNPTKAVTLVENHDTQPGQSLESTVQPWFKPLAYAFILTRSGGYPSVFYGDMYGTKGTTTREIPALKSKIEPLLKARKDYAYGTQRDYIDNPDVIGWTREGDSTKAKSGLATVITDGPGGSKRMYVGTSNAGEIWYDLTGNRTDKITIGSDGYATFPVNGGSVSVWVQQ

SEQ ID NO: 38439 - protein, 480 aa, Cytophaga sp.
NGTMMQYFEWYVPNDGQQWNRLRTDAPYLSSVGITAVWTPPAYKGTSQADVGYGPYDLYDLGEFNQKGTVRTKYGTKGELKSAVNTLHSNGIQVYGDVVMNHKAGADYTENVTAVEVNPSNRYMETSGEYNIQAWTGFNFPGRGTTYSNWKWQWFHFDGTDWDQSRSLSRIFKFDGKAWDWEVSSENGNYDYLMYADYDYDHPDVVNEMKKWGVWYANEVGLDGYRLDAVKHIKFQFLKDWVDNARAATGKEMFTVGEYWQNDLGALNNYLAKVNYNQSLFDAPLHYNFYAASTGGGYYDMRNILNNTLVASNPTKAVTLVENHDTQPGQSLESTVQPWFKPLAYAFILTRSGGYPSVFYGDMYGTKGTTTREIPALKSKIEPLLKARKDYAYGTQRDYIDNPDVIGWTREGDSTKAKSGLATVITDGPGGSKRMYVGTSNAGEIWYDLTGNRTDKITIGSDGYATFPVNGGSVSVWVQQ

SEQ ID NO: 38440 - protein, 480 aa, Cytophaga sp.
NGTMMQYFEWYVPNDGQQWNRLRTDAPYLSSVGITAVWTPPAYKGTSQADVGYGPYDLYDLGEFNQKGTVRTKYGTKGELKSAVNTLHSNGIQVYGDVVMNHKAGADYTENVTAVEVNPSNRYQESSGEYNIQAWTGFNFPGRGTTYSNWKWQWFHFDGTDWDQSRSLSRIFKFDGKAWDWEVSSENGNYDYLMYADYDYDHPDVVNEMKKWGVWYANEVGLDGYRLDAVKHIKFQFLKDWVDNARAATGKEMFTVGEYWQNDLGALNNYLAKVNYNQSLFDAPLHYNFYAASTGGGYYDMRNILNNTLVASNPTKAVTLVENHDTQPGQSLESTVQPWFKPLAYAFILTRSGGYPSVFYGDMYGTKGTTTREIPALKSKIEPLLKARKDYAYGTQRDYIDNPDVIGWTREGDSTKAKSGLATVITDGPGGSKRMYVGTSNAGEIWYDLTGNRTDKITIGSDGYATFPVNGGSVSVWVQQ

SEQ ID NO: 38441 - protein, 480 aa, Cytophaga sp.
NGTMMQYFEWYVPNDGQQWNRLRTDAPYLSSVGITAVWTPPAYKGTSQADVGYGPYDLYDLGEFNQKGTVRTKYGTKGELKSAVNTLHSNGIHVYGDVVMNHKAGADYTENVTAVEVNPSNRYQETSGEYNIQAWTGFNFPGRGTTYSNWKWQWFHFDGTDWDQSRSLSRIFKFDGKAWDWEVSSENGNYDYLMYADYDYDHPDVVNEMKKWGVWYANEVGLDGYRLDAVKHIKFQFLKDWVDNARAATGKEMFTVGEYWQNDLGALNNYLAKVNYNQSLFDAPLHYNFYAASTGGGYYDMRNILNNTLVASNPTKAVTLVENHDTQPGQSLESTVQPWFKPLAYAFILTRSGGYPSVFYGDMYGTKGTTTREIPALKSKIEPLLKARKDYAYGTQRDYIDNPDVIGWTREGDSTKAKSGLATVITDGPGGSKRMYVGTSNAGEIWYDLTGNRTDKITIGSDGYATFPVNGGSVSVWVQQ

SEQ ID NO: 38442 - protein, 480 aa, Cytophaga sp.
NGTMMQYFEWYVPNDGQQWNRLRTDAPYLSSVGITAVWTPPAYKGTSQADVGYGPYDLYDLGEFNQKGTVRTKYGTKGELKSAVNTLHSNGIQVYGDVVMNHKAGADYTENVTAVEVNPSNRYQETSGEYNIQAWTGFNFPGRGTTYSNWKWQWFHFDGTDWDQSRSLSRIFKFDGKAWDWEVSSENGNYDYLMYADYDYDHPDVVNEMKKWGVWYANEVGLDGYRLDAVKHIKFQFLKDWVDNARAATGKEMFTVGEYWQNDLGALNNYLAKVNYNQSLFDAPLHYNFYAASTGGGYYDMRNILNNTLVASNPTKAVTLVENHDTQPGQSLESTVQPWFKPLAYAFILTRSGGYPSVFYGDMYGTKGTTTREIPALKSKIEPLLKARKDYAYGTQRDYIDNPDVIGWTREGDSTKAKSGLATVITDGPGGSKQMYVGTSNAGEIWYDLTGNRTDKITIGSDGYATFPVNGGSVSVWVQQ

SEQ ID NO: 38443 - protein, 480 aa, Cytophaga sp.
NGTMMQYFEWYVPNDGQQWNRLRTDAPYLSSVGITAVWTPPAYKGTSQADVGYGPYDLYDLGEFNQKGTVRTKYGTKGELKSAVNTLHSNGIQVYGDVVMNHKAGADYTENVTAVEVNPSNRYQETSGEYNIQAWTGFNFPGRQTTYSNWKWQWFHFDGTDWDQSRSLSRIFKFDGKAWDWEVSSENGNYDYLMYADYDYDHPDVVNEMKKWGVWYANEVGLDGYRLDAVKHIKFQFLKDWVDNARAATGKEMFTVGEYWQNDLGALNNYLAKVNYNQSLFDAPLHYNFYAASTGGGYYDMRNILNNTLVASNPTKAVTLVENHDTQPGQSLESTVQPWFKPLAYAFILTRSGGYPSVFYGDMYGTKGTTTREIPALKSKIEPLLKARKDYAYGTQRDYIDNPDVIGWTREGDSTKAKSGLATVITDGPGGSKRMYVGTSNAGEIWYDLTGNRTDKITIGSDGYATFPVNGGSVSVWVQQ

SEQ ID NO: 38444 - protein, 480 aa, Cytophaga sp.
NGTMMQYFEWYVPNDGQQWNRLRTDAPYLSSVGITAVWTPPAYKGTSQADVGYGPYDLYDLGEFNQKGTVRTKYGTKGELKSAVNTLHSNGIQVYGDVVMNHKAGADYTENVTAVEVNPSNRYQETSGEYNIQAWTGFNFPGRGTTYSNWKWQWFHFDGTDWDQSRSLSRIFKFDGKAWDWEVSSENGNYDYLMYADYDYDHPDVVNEMKKWGVWYANEVGLDGYRLDAVKHIKFQFLKDWVDNARAATGKEMFTVGEYWQNDLGALNNYLAKVNYNQSLFDAPLHYNFYAASTGGGYYDMRNILNNTLVASNPTKAVTLVENHDTQPGQSLESTVQPWFKPLAYAFILTRSGGYPSVFYGDMYGTKGTTTREIPALKSKIEPLLKARKDYAYGTQRDYIDNPDVIGWTREGDSTKRKSGLATVITDGPGGSKRMYVGTSNAGEIWYDLTGNRTDKITIGSDGYATFPVNGGSVSVWVQQ

SEQ ID NO: 38445 - protein, 480 aa, Cytophaga sp.
NGTMMQYFEWYVPNDGQQWNRLRTDAPYLSSVGITAVWTPPAYKGTSQADVGYGPYDLYDLGEFNQKGTVRTKYGTKGELKSAVNTLHSNGIQVYGDVVMNHKAGADYIENVTAVEVNPSNRYQETSGEYNIQAWTGFNFPGRGTTYSNWKWQWFHFDGTDWDQSRSLSRIFKFDGKAWDWEVSSENGNYDYLMYADYDYDHPDVVNEMKKWGVWYANEVGLDGYRLDAVKHIKFQFLKDWVDNARAATGKEMFTVGEYWQNDLGALNNYLAKVNYNQSLFDAPLHYNFYAASTGGGYYDMRNILNNTLVASNPTKAVTLVENHDTQPGQSLESTVQPWFKPLAYAFILTRSGGYPSVFYGDMYGTKGTTTREIPALKSKIEPLLKARKDYAYGTQRDYIDNPDVIGWTREGDSTKAKSGLATVITDGPGGSKRMYVGTSNAGEIWYDLTGNRTDKITIGSDGYATFPVNGGSVSVWVQQ

SEQ ID NO: 38446 - protein, 480 aa, Cytophaga sp.
NGTMMQYFEWYVPNDGQQWNRLRTDAPYLSSVGITAVWTPPAYKGTSQADVGYGPYDLYDLGEFNQKGTVRTKYGTKGELKSAVNTLHSNGIQVYGDVVMNHKAGADYTENVTAVEVNPSNRYQETSGEYNIQAWTGFNFPGRGTTYSNWKWQWFHFDGTDWDQSRSLSRIFKFDGKAWDWEVSSENGNYDYLMYADYDYDHPDVVNEMKKWGVWYANEVGLDGYRLDAVKHIKFQFLKDWVDNARAATGKEMFTVGEYWQNDLGALNNYLAKVNYNQSLFDAPLHYNFYWASTGGGYYDMRNILNNTLVASNPTKAVTLVENHDTQPGQSLESTVQPWFKPLAYAFILTRSGGYPSVFYGDMYGTKGTTTREIPALKSKIEPLLKARKDYAYGTQRDYIDNPDVIGWTREGDSTKAKSGLATVITDGPGGSKRMYVGTSNAGEIWYDLTGNRTDKITIGSDGYATFPVNGGSVSVWVQQ

SEQ ID NO: 38447 - protein, 480 aa, Cytophaga sp.
NGTMMQYFEWYVPNDGQQWNRLRTDAPYLSSVGITAVWTPPAYKGTSQADVGYGPYDLYDLGEFNQKGTVRTKYGTKGELKSAVNTLHSNGIQVYGDVVMNHKAGADYTENVTAVEVNPSNRYQETSGEYNIQAWTGFNFPGRGTTYSNWKWQWFHFDGTDWDQSRSLSRIFKFDGKAWDWEVSSENGNYDYLMYADYDYDHPDVVNEMKKWGVWYANEVGLDGYRLDAVKHIKFQFLKDWVDNARAATGKEMFTVGEYWQNDLGALNNYLAKVNYNQSLFDAPLHYNFYAASTGGGYYDMRNILNNTLVASNPTKAVTLVENHDTQPGQSLESTVQPWFKPLAYAFILTRSGGYPSVFYGDMYGTKGTTTREIPALKSKIEPLLKARKDYAYGTQRDYIDNPDVIGWTREGDSTKAKSGLATVITDGPGGSKRMYVGTSNAGEIWYDLTGNRTDKITIESDGYATFPVNGGSVSVWVQQ

SEQ ID NO: 38448 - protein, 480 aa, Cytophaga sp.
NGTMMQYFEWYVPNDGQQWNRLRTDAPYLSSVGITAVWTPPAYKGTSQADVGYGPYDLYDLGEFNQKGTVRTKYGTKGELKSAVNTLHSNGIQVYGDVVMNHKAGADYTENVTAVEVNPSNRYQETSGEYNIQAWTGFNFPGRGTTYSNWKWQWFHFDGTDWDQSRSLSRIFKFDGKAWDWEVSSENGNYDYLMYADYDYDHPDVVNEMKKWGVWYANEVGLDGYRLDAVKHIKFQFLKDWVDNARAATGKEMFTVGEYWQNDLGALNNYLAKVNYNQSLFDAPLHYNFYAASTGGGYYDMRNILNNTLVASNPTKAVTLVENHDTQPGQSLESTVQPWFKPLAYAFILTRSGGYPSVFYGDMYGTKGTTTREIPALKSKIEPLLKARKDYAYGTQRDYIDNPDVIGWTREGDSTKAKSGLATVITDGVGGSKRMYVGTSNAGEIWYDLTGNRTDKITIGSDGYATFPVNGGSVSVWVQQ

SEQ ID NO: 38449 - protein, 480 aa, Cytophaga sp.
NGTMMQYFEWYVPNDGYQWNRLRTDAPYLSSVGITAVWTPPAYKGTSQADVGYGPYDLYDLGEFNQKGTVRTKYGTKGELKSAVNTLHSNGIQVYGDVVMNHKAGADYTENVTAVEVNPSNRYQETSGEYNIQAWTGFNFPGRGTTYSNWKWQWFHFDGTDWDQSRSLSRIFKFDGKAWDWEVSSENGNYDYLMYADYDYDHPDVVNEMKKWGVWYANEVGLDGYRLDAVKHIKFQFLKDWVDNARAATGKEMFTVGEYWQNDLGALNNYLAKVNYNQSLFDAPLHYNFYAASTGGGYYDMRNILNNTLVASNPTKAVTLVENHDTQPGQSLESTVQPWFKPLAYAFILTRSGGYPSVFYGDMYGTKGTTTREIPALKSKIEPLLKARKDYAYGTQRDYIDNPDVIGWTREGDSTKAKSGLATVITDGPGGSKRMYVGTSNAGEIWYDLTGNRTDKITIGSDGYATFPVNGGSVSVWVQQ

SEQ ID NO: 38450 - protein, 480 aa, Cytophaga sp.
NGTMMQYFEWYVPNDGQQWNRLRTDAPYLSSVGITAVWTPPAYKGTSQADVGYGPYDLYDLGEFNQKGTVRTKYGTKGELKSAVNTLHSNGIQVYGDVVMNHKAGADYTENVTAVEVNPSNRYQETSGEYNIQAWTGFNFPGRGTTYSNWKWQWFHFDGTDWDQSRSLSRIFKFDGKAWDWEVSSENGNYDYLMYADYDYDHPDVVNEMKKWGVWYANEVGLDGYRLDAVKHIKFQFLKDWVDNARAATGKEMFTWGEYWQNDLGALNNYLAKVNYNQSLFDAPLHYNFYAASTGGGYYDMRNILNNTLVASNPTKAVTLVENHDTQPGQSLESTVQPWFKPLAYAFILTRSGGYPSVFYGDMYGTKGTTTREIPALKSKIEPLLKARKDYAYGTQRDYIDNPDVIGWTREGDSTKAKSGLATVITDGPGGSKRMYVGTSNAGEIWYDLTGNRTDKITIGSDGYATFPVNGGSVSVWVQQ

SEQ ID NO: 38451 - protein, 480 aa, Cytophaga sp.
NGGMMQYFEWYVPNDGQQWNRLRTDAPYLSSVGITAVWTPPAYKGTSQADVGYGPYDLYDLGEFNQKGTVRTKYGTKGELKSAVNTLHSNGIQVYGDVVMNHKAGADYTENVTAVEVNPSNRYQETSGEYNIQAWTGFNFPGRGTTYSNWKWQWFHFDGTDWDQSRSLSRIFKFDGKAWDWEVSSENGNYDYLMYADYDYDHPDVVNEMKKWGVWYANEVGLDGYRLDAVKHIKFQFLKDWVDNARAATGKEMFTVGEYWQNDLGALNNYLAKVNYNQSLFDAPLHYNFYAASTGGGYYDMRNILNNTLVASNPTKAVTLVENHDTQPGQSLESTVQPWFKPLAYAFILTRSGGYPSVFYGDMYGTKGTTTREIPALKSKIEPLLKARKDYAYGTQRDYIDNPDVIGWTREGDSTKAKSGLATVITDGPGGSKRMYVGTSNAGEIWYDLTGNRTDKITIGSDGYATFPVNGGSVSVWVQQ

SEQ ID NO: 38452 - protein, 480 aa, Cytophaga sp.
NGTMMQYFEWYVPNDGQQWNRLRTDAPYLSSVGITAVWTPPAYKGTSQADVGYGPYDLYDLGEFNQKGTVRTKYGTKGELKSAVNTLHSNGIQVYGDVVMNHKAGADYTENVTAVEVNPSNRYQETSGEYNIQAWTGFNFPGRGTTYSNWKWQWFHFDGTDWDQSRSLSRIFKFDGKAWDWEVSSENGNYDYLMYADYDYDHPDVVNEMKKWGVWYANEVGLDGYRLDAVKHIKFQFLKDWVDNARAATGMEMFTVGEYWQNDLGALNNYLAKVNYNQSLFDAPLHYNFYAASTGGGYYDMRNILNNTLVASNPTKAVTLVENHDTQPGQSLESTVQPWFKPLAYAFILTRSGGYPSVFYGDMYGTKGTTTREIPALKSKIEPLLKARKDYAYGTQRDYIDNPDVIGWTREGDSTKAKSGLATVITDGPGGSKRMYVGTSNAGEIWYDLTGNRTDKITIGSDGYATFPVNGGSVSVWVQQ

SEQ ID NO: 38453 - protein, 480 aa, Cytophaga sp.
NGTMMQYFEWYVPNDGQQWNRLRTDAPYLSSVGITAVWTPPAYKGTSQADVGYGPYDLYDLGEFNQKGTVRTKYGTKGELKSAVNTLHSNGIQVYGDVVMNHKAGADYTENVTAVEVNPSNRYQETSGEYNIQAWTGFNFPGRGTTYSNWKWQWFHFDGTDWDQSRSLSRIFKFDGKAWDWEVSSENGNYDYLMYADYDYDHPDVVNEMKKWGVWYANEVGLDGYRLDAVKHIKFQFLKDWVDNARAATGKEMFTVGEYWQNDLGALNNYLAKVNYNQSLFDAPLHYNFYAASTGGGYYDMRNILNNTLVASNPTKAVTLVENHDTQPGQSLESTVQPWFKPLAYAFILTRSGGYPSVFYGDMYGTKGTTTREIPALKSKIEPLLKARKDYAYGTQRDYIDNPDVIGWTREGDSTKAKSGLATVITDGPGGSKRMYVGTSNFGEIWYDLTGNRTDKITIGSDGYATFPVNGGSVSVWVQQ

SEQ ID NO: 38454 - protein, 480 aa, Cytophaga sp.
NGTMMQYFEWYVPNDGQQWNRLRTDAPYLSSVGITAVWTPPAYKGTSQADVGYGPYDLYDLGEFNQKGTVRTKYGTKGELKSAVNTLHSNGIQVYGDVVMNHKAGADYTENVTAVEVNPSNRYQETSGEYNIQAWTGFNFPGRGTTYMNWKWQWFHFDGTDWDQSRSLSRIFKFDGKAWDWEVSSENGNYDYLMYADYDYDHPDVVNEMKKWGVWYANEVGLDGYRLDAVKHIKFQFLKDWVDNARAATGKEMFTVGEYWQNDLGALNNYLAKVNYNQSLFDAPLHYNFYAASTGGGYYDMRNILNNTLVASNPTKAVTLVENHDTQPGQSLESTVQPWFKPLAYAFILTRSGGYPSVFYGDMYGTKGTTTREIPALKSKIEPLLKARKDYAYGTQRDYIDNPDVIGWTREGDSTKAKSGLATVITDGPGGSKRMYVGTSNAGEIWYDLTGNRTDKITIGSDGYATFPVNGGSVSVWVQQ

SEQ ID NO: 38455 - protein, 480 aa, Cytophaga sp.
NGTMMQYFEWYVPNDGQQWNRLRTDAPYLSSVGITAVWTPPAYKGTSQADVGYGPYDLYDLGEFNQKGTVRTKYGTKGELKSAVNTLHSNGIQVYGDVVMNHKAGADYTENVTAVEVNPSNRYKETSGEYNIQAWTGFNFPGRGTTYSNWKWQWFHFDGTDWDQSRSLSRIFKFDGKAWDWEVSSENGNYDYLMYADYDYDHPDVVNEMKKWGVWYANEVGLDGYRLDAVKHIKFQFLKDWVDNARAATGKEMFTVGEYWQNDLGALNNYLAKVNYNQSLFDAPLHYNFYAASTGGGYYDMRNILNNTLVASNPTKAVTLVENHDTQPGQSLESTVQPWFKPLAYAFILTRSGGYPSVFYGDMYGTKGTTTREIPALKSKIEPLLKARKDYAYGTQRDYIDNPDVIGWTREGDSTKAKSGLATVITDGPGGSKRMYVGTSNAGEIWYDLTGNRTDKITIGSDGYATFPVNGGSVSVWVQQ

SEQ ID NO: 38456 - protein, 480 aa, Cytophaga sp.
NGTMMQYFEWYVPNDGNQWNRLRTDAPYLSSVGITAVWTPPAYKGTSQADVGYGPYDLYDLGEFNQKGTVRTKYGTKGELKSAVNTLHSNGIQVYGDVVMNHKAGADYTENVTAVEVNPSNRYQETSGEYNIQAWTGFNFPGRGTTYSNWKWQWFHFDGTDWDQSRSLSRIFKFDGKAWDWEVSSENGNYDYLMYADYDYDHPDVVNEMKKWGVWYANEVGLDGYRLDAVKHIKFQFLKDWVDNARAATGKEMFTVGEYWQNDLGALNNYLAKVNYNQSLFDAPLHYNFYAASTGGGYYDMRNILNNTLVASNPTKAVTLVENHDTQPGQSLESTVQPWFKPLAYAFILTRSGGYPSVFYGDMYGTKGTTTREIPALKSKIEPLLKARKDYAYGTQRDYIDNPDVIGWTREGDSTKAKSGLATVITDGPGGSKRMYVGTSNAGEIWYDLTGNRTDKITIGSDGYATFPVNGGSVSVWVQQ

SEQ ID NO: 38457 - protein, 480 aa, Cytophaga sp.
NGTMMQYFEWYVPNDGQQWNRLRTDAPYLSSVGITAVWTPPAYKGTSQADVGYGPYDLYDLGEFNQKGTVRTKYGTKGELKSAVNTLHSNGIQVYGDVVMNHKAGADYTENVTAVECNPSNRYQETSGEYNIQAWTGFNFPGRGTTYSNWKWQWFHFDGTDWDQSRSLSRIFKFDGKAWDWEVSSENGNYDYLMYADYDYDHPDVVNEMKKWGVWYANEVGLDGYRLDAVKHIKFQFLKDWVDNARAATGKEMFTVGEYWQNDLGALNNYLAKVNYNQSLFDAPLHYNFYAASTGGGYYDMRNILNNTLVASNPTKAVTLVENHDTQPGQSLESTVQPWFKPLAYAFILTRSGGYPSVFYGDMYGTKGTTTREIPALKSKIEPLLKARKDYAYGTQRDYIDNPDVIGWTREGDSTKAKSGLATVITDGPGGSKRMYVGTSNAGEIWYDLTGNRTDKITIGSDGYATFPVNGGSVSVWVQQ

SEQ ID NO: 38458 - protein, 480 aa, Cytophaga sp.
NGTMMQYFEWYVPNDGQQWNRLRTDAPYLSSVGITAVWTPPAYKGTSQADVGYGPYDLYDLGEFNQKGTVRTKYGTKGELKSAVNTLHSNGIQVYGDVVMNHKAGADYTENVTAVEVNPSNRYQETSGEYNIQAWTGFNFPGRGTTYSNWKWQWFHFDGTDWDQSRSLSRIFKFDGKAWDWEVSSENGNYDYLMYADYDYDHPDVVNEMKKWGVWYANEVGLDGYRLDAVKHIKFQFLKDWVDNARAATGKEMFTVGEYWQNDLGALNNYLAKVNYNQSLFDAPLHYNFYAASTGMGYYDMRNILNNTLVASNPTKAVTLVENHDTQPGQSLESTVQPWFKPLAYAFILTRSGGYPSVFYGDMYGTKGTTTREIPALKSKIEPLLKARKDYAYGTQRDYIDNPDVIGWTREGDSTKAKSGLATVITDGPGGSKRMYVGTSNAGEIWYDLTGNRTDKITIGSDGYATFPVNGGSVSVWVQQ

SEQ ID NO: 38459 - protein, 480 aa, Cytophaga sp.
NGTMMQYFEWYVPNDGQQWNRLRTDAPYLSSVGITAVWTPPAYKGTSQADVGYGPYDLYDLGEFNQKGTVRTKYGTKGELKSAVNTLHSNGIQVYGDVVMNHKAGADYTENVTAVEVNPSNRYQETSGCYNIQAWTGFNFPGRGTTYSNWKWQWFHFDGTDWDQSRSLSRIFKFDGKAWDWEVSSENGNYDYLMYADYDYDHPDVVNEMKKWGVWYANEVGLDGYRLDAVKHIKFQFLKDWVDNARAATGKEMFTVGEYWQNDLGALNNYLAKVNYNQSLFDAPLHYNFYAASTGGGYYDMRNILNNTLVASNPTKAVTLVENHDTQPGQSLESTVQPWFKPLAYAFILTRSGGYPSVFYGDMYGTKGTTTREIPALKSKIEPLLKARKDYAYGTQRDYIDNPDVIGWTREGDSTKAKSGLATVITDGPGGSKRMYVGTSNAGEIWYDLTGNRTDKITIGSDGYATFPVNGGSVSVWVQQ

SEQ ID NO: 38460 - protein, 480 aa, Cytophaga sp.
NGTMMQYFEWYVPNDGQQWNRLRTDAPYLSSVGITAVWTPPAYKGTSQADVGYGPYDLYDLGEFNQKGTVRTKYGTKGELKSAVNTLHSNGIQVYGDVVMNHKAGADYTENVTAVEVNPSNRYQETSGEYNIQAWTGFNFPGRGTTYSNWKWQWFHFDGTDWDQSRSLSRIFKFDGKAWDWEVSSENGNYDYLMYADYDYDHPDVVNEMKKWGVWYANEVGLDGYRLDAVKHIKFQFLKDWVDNARAATGKEMFTVGEYWENDLGALNNYLAKVNYNQSLFDAPLHYNFYAASTGGGYYDMRNILNNTLVASNPTKAVTLVENHDTQPGQSLESTVQPWFKPLAYAFILTRSGGYPSVFYGDMYGTKGTTTREIPALKSKIEPLLKARKDYAYGTQRDYIDNPDVIGWTREGDSTKAKSGLATVITDGPGGSKRMYVGTSNAGEIWYDLTGNRTDKITIGSDGYATFPVNGGSVSVWVQQ

SEQ ID NO: 38461 - protein, 480 aa, Cytophaga sp.
NGTMMQYFEWYVPNDGQQWNRLRTDAPYLSSVGITAVWTPPAYKGTSQADVGYGPYDLYDLGEFNQKGTVRTKYGTKGELKSAVNTLHSNGIQVYGDVVMNHKAGADYTENVTAVEVNPSNRYQETSGEYNIQAWTGFNFPGRGTTYSNWKWQWFHFDGTDMDQSRSLSRIFKFDGKAWDWEVSSENGNYDYLMYADYDYDHPDVVNEMKKWGVWYANEVGLDGYRLDAVKHIKFQFLKDWVDNARAATGKEMFTVGEYWQNDLGALNNYLAKVNYNQSLFDAPLHYNFYAASTGGGYYDMRNILNNTLVASNPTKAVTLVENHDTQPGQSLESTVQPWFKPLAYAFILTRSGGYPSVFYGDMYGTKGTTTREIPALKSKIEPLLKARKDYAYGTQRDYIDNPDVIGWTREGDSTKAKSGLATVITDGPGGSKRMYVGTSNAGEIWYDLTGNRTDKITIGSDGYATFPVNGGSVSVWVQQ

SEQ ID NO: 38462 - protein, 480 aa, Cytophaga sp.
NGTMMQYFEWYVPNDGQQWNRLRTDAPYLSSVGITAVWTPPAYKGTSQADVGYGPYDLYDLGEFNQKGTVRTKYGTKGELKSAVNTLHSNGIQVYGDVVMNHKAGADYTENVTAVEVNPSNRYQETSGEYNIQAWTGFNFPGRGTTYSNWKWQWFHFDGTDWDQSRSLRRIFKFDGKAWDWEVSSENGNYDYLMYADYDYDHPDVVNEMKKWGVWYANEVGLDGYRLDAVKHIKFQFLKDWVDNARAATGKEMFTVGEYWQNDLGALNNYLAKVNYNQSLFDAPLHYNFYAASTGGGYYDMRNILNNTLVASNPTKAVTLVENHDTQPGQSLESTVQPWFKPLAYAFILTRSGGYPSVFYGDMYGTKGTTTREIPALKSKIEPLLKARKDYAYGTQRDYIDNPDVIGWTREGDSTKAKSGLATVITDGPGGSKRMYVGTSNAGEIWYDLTGNRTDKITIGSDGYATFPVNGGSVSVWVQQ

SEQ ID NO: 38463 - protein, 480 aa, Cytophaga sp.
NGTMMQYFEWYVPNDGQQWNRLRTDAPYLSSVGITAVWTPPAYKGTSQADVGYGPYDLYDLGEFNQKGTVRTKYGTKGELKSAVNTLHSNGIQVYGDVVMNHKAGADYTENVTAVEVNPSNRYQETSGEYNIQAWTGFNFPGRGTTYSNWKWQWFHFDGTDWDQSRSLSRIFKFDGKAWDWEVSSENGNYDYLMYADYDYDHPDVVNEMKKWGVWYANEVGLDGYRLDAVKHIKFQFLKDWVDNARAATGKEMFTVGEYWQNDLGALNNYLAKVNYNQSLFDAPLHYNFYAASTGGGYYDMRNILNNTLVASNPTKAVTLVENHDTQPGQSLESTVQPWFKPLAYAFILTRSGGYPSVFYGDMYGTKGTTTREIPALKSKIEPLLKARKDYAYGTQRDYIDNPDVIGWTREGDSTKPKSGLATVITDGPGGSKRMYVGTSNAGEIWYDLTGNRTDKITIGSDGYATFPVNGGSVSVWVQQ

SEQ ID NO: 38464 - protein, 480 aa, Cytophaga sp.
NGTMMQYFEWYVPNDGQQWNRLRTDAPYLSSVGITAVWTPPAYKGTSQADVGYGPYDLYDLGEFNQKGTVRTKYGTKGELKSAVNTLHSNGIQVYGDVVMNHKAGADYTENVTAVEVNPSNRYQETSGEYNIQAWTGFNFPGRGTTYSNWKWQWFHFDGTDWDQSRSLSRIFKFDGKAWDWEVSSENGNYDYLMYADYDYDHPDVVNEMKKWGVWYANEVGLDGYRLDAVKHIKFQFYKDWVDNARAATGKEMFTVGEYWQNDLGALNNYLAKVNYNQSLFDAPLHYNFYAASTGGGYYDMRNILNNTLVASNPTKAVTLVENHDTQPGQSLESTVQPWFKPLAYAFILTRSGGYPSVFYGDMYGTKGTTTREIPALKSKIEPLLKARKDYAYGTQRDYIDNPDVIGWTREGDSTKAKSGLATVITDGPGGSKRMYVGTSNAGEIWYDLTGNRTDKITIGSDGYATFPVNGGSVSVWVQQ

SEQ ID NO: 38465 - protein, 480 aa, Cytophaga sp.
NGTMMQYFEWYVPNDGQQWNRLRTDAPYLSSVGITAVWTPPAYKGTSQADVGYGPYDLYDLGEFNQKGTVRTKYGTYGELKSAVNTLHSNGIQVYGDVVMNHKAGADYTENVTAVEVNPSNRYQETSGEYNIQAWTGFNFPGRGTTYSNWKWQWFHFDGTDWDQSRSLSRIFKFDGKAWDWEVSSENGNYDYLMYADYDYDHPDVVNEMKKWGVWYANEVGLDGYRLDAVKHIKFQFLKDWVDNARAATGKEMFTVGEYWQNDLGALNNYLAKVNYNQSLFDAPLHYNFYAASTGGGYYDMRNILNNTLVASNPTKAVTLVENHDTQPGQSLESTVQPWFKPLAYAFILTRSGGYPSVFYGDMYGTKGTTTREIPALKSKIEPLLKARKDYAYGTQRDYIDNPDVIGWTREGDSTKAKSGLATVITDGPGGSKRMYVGTSNAGEIWYDLTGNRTDKITIGSDGYATFPVNGGSVSVWVQQ

SEQ ID NO: 38466 - protein, 480 aa, Cytophaga sp.
NGTMMQYFEWYVPNDGQQWNRLRTDAPYLSSVGITAVWTPPAYKGTSQADVGYGPYDLYDLGEFNQKGTVRTKYGTKGELKSAVNTLHSNGIQVYGDVVMNHKAGADYTENVTAVEVNPSNRYQETSGEYNIQAWTGFNFPGRGTTYSNWKWQWFHFDGTDWDQSRSLSRIFKFDGKAWDWEVSSENGNYDYLMYADYDYDHPDVVNEMKKWGVWYANEVGLDGYRLDAVKHIKFQFLKDWVDNARAATGKEMFTVGEYWQNDLGALNNYLAKVNYNQSLFDAPLHYNFYAASTGGGYYDMRNILNNTLVASNPTKAVTLVENHDTQPGQSLISTVQPWFKPLAYAFILTRSGGYPSVFYGDMYGTKGTTTREIPALKSKIEPLLKARKDYAYGTQRDYIDNPDVIGWTREGDSTKAKSGLATVITDGPGGSKRMYVGTSNAGEIWYDLTGNRTDKITIGSDGYATFPVNGGSVSVWVQQ

SEQ ID NO: 38467 - protein, 480 aa, Cytophaga sp.
NGTMMQYFEWYVPNDGQQWNRLRTDAPYLSSVGITAVWTPPAYKGTSQADVGYGPYDLYDLGEFNQKGTVRTKYGTKGELKSAVNTLHSNGIQVYGDVVMNHKAGADYTENVTAVEVNPSNRYQETSGEYNIQAWTGFNFLGRGTTYSNWKWQWFHFDGTDWDQSRSLSRIFKFDGKAWDWEVSSENGNYDYLMYADYDYDHPDVVNEMKKWGVWYANEVGLDGYRLDAVKHIKFQFLKDWVDNARAATGKEMFTVGEYWQNDLGALNNYLAKVNYNQSLFDAPLHYNFYAASTGGGYYDMRNILNNTLVASNPTKAVTLVENHDTQPGQSLESTVQPWFKPLAYAFILTRSGGYPSVFYGDMYGTKGTTTREIPALKSKIEPLLKARKDYAYGTQRDYIDNPDVIGWTREGDSTKAKSGLATVITDGPGGSKRMYVGTSNAGEIWYDLTGNRTDKITIGSDGYATFPVNGGSVSVWVQQ

SEQ ID NO: 38468 - protein, 480 aa, Cytophaga sp.
NGTMMQYFEWYVPNDGQQWNRLRTDAPYLSSVGITAVWTPPAYKGTSQADVGYGPYDLYDLGEFNQKGTVRTKYGTKGELKSAVNTLHSNGIQVYGDVVMNHKAGADYTENVTAVEVNPSDRYQETSGEYNIQAWTGFNFPGRGTTYSNWKWQWFHFDGTDWDQSRSLSRIFKFDGKAWDWEVSSENGNYDYLMYADYDYDHPDVVNEMKKWGVWYANEVGLDGYRLDAVKHIKFQFLKDWVDNARAATGKEMFTVGEYWQNDLGALNNYLAKVNYNQSLFDAPLHYNFYAASTGGGYYDMRNILNNTLVASNPTKAVTLVENHDTQPGQSLESTVQPWFKPLAYAFILTRSGGYPSVFYGDMYGTKGTTTREIPALKSKIEPLLKARKDYAYGTQRDYIDNPDVIGWTREGDSTKAKSGLATVITDGPGGSKRMYVGTSNAGEIWYDLTGNRTDKITIGSDGYATFPVNGGSVSVWVQQ

SEQ ID NO: 38469 - protein, 480 aa, Cytophaga sp.
NGTMMQYFEWYVPNDGQQWNRLRTDAPYLSSVGITAVWTPPAYKGTSQADVGYGPYDLYDLGEFNQKGTVRTKYGTKGELKSAVNTLHSNGIQVYGDVVMNHKAGADYTENVTAVEVNPSNRYQETSGEYNIQAWTGFNFPGRATTYSNWKWQWFHFDGTDWDQSRSLSRIFKFDGKAWDWEVSSENGNYDYLMYADYDYDHPDVVNEMKKWGVWYANEVGLDGYRLDAVKHIKFQFLKDWVDNARAATGKEMFTVGEYWQNDLGALNNYLAKVNYNQSLFDAPLHYNFYAASTGGGYYDMRNILNNTLVASNPTKAVTLVENHDTQPGQSLESTVQPWFKPLAYAFILTRSGGYPSVFYGDMYGTKGTTTREIPALKSKIEPLLKARKDYAYGTQRDYIDNPDVIGWTREGDSTKAKSGLATVITDGPGGSKRMYVGTSNAGEIWYDLTGNRTDKITIGSDGYATFPVNGGSVSVWVQQ

SEQ ID NO: 38470 - protein, 480 aa, Cytophaga sp.
NGTMMQYFEWYVPNDGQQWNRLRTDAPYLSSVGITAVWTPPAYKGTSQADVGYGPYDLYDLGEFNQKGTVRTKYGTKGELKSAVNTLHRNGIQVYGDVVMNHKAGADYTENVTAVEVNPSNRYQETSGEYNIQAWTGFNFPGRGTTYSNWKWQWFHFDGTDWDQSRSLSRIFKFDGKAWDWEVSSENGNYDYLMYADYDYDHPDVVNEMKKWGVWYANEVGLDGYRLDAVKHIKFQFLKDWVDNARAATGKEMFTVGEYWQNDLGALNNYLAKVNYNQSLFDAPLHYNFYAASTGGGYYDMRNILNNTLVASNPTKAVTLVENHDTQPGQSLESTVQPWFKPLAYAFILTRSGGYPSVFYGDMYGTKGTTTREIPALKSKIEPLLKARKDYAYGTQRDYIDNPDVIGWTREGDSTKAKSGLATVITDGPGGSKRMYVGTSNAGEIWYDLTGNRTDKITIGSDGYATFPVNGGSVSVWVQQ

SEQ ID NO: 38471 - protein, 480 aa, Cytophaga sp.
NGTMMQYFEWYVPNDGQQWNRLRTDAPYLSSVGITAVWTPPAYKGTSQADVGYGPYDLYDLGEFNQKGTVRTKYGTKGELKSAVNTLHSNGIQVYGDVVMNHKAGADYTENVTAVEVNPSNRYQETSGEYNIQAWTGFNFPGRGTTYSNWKWQWFHFDGTDWDQSRSLSRIFKFDGKAWDWEVSSENGNYDYLMFADYDYDHPDVVNEMKKWGVWYANEVGLDGYRLDAVKHIKFQFLKDWVDNARAATGKEMFTVGEYWQNDLGALNNYLAKVNYNQSLFDAPLHYNFYAASTGGGYYDMRNILNNTLVASNPTKAVTLVENHDTQPGQSLESTVQPWFKPLAYAFILTRSGGYPSVFYGDMYGTKGTTTREIPALKSKIEPLLKARKDYAYGTQRDYIDNPDVIGWTREGDSTKAKSGLATVITDGPGGSKRMYVGTSNAGEIWYDLTGNRTDKITIGSDGYATFPVNGGSVSVWVQQ

SEQ ID NO: 38472 - protein, 480 aa, Cytophaga sp.
NGTMMQYFEWYVPNDGQQWNRLRTDAPYLSSVGITAVWTPPAYKGTSQADVGYGPYDLYDLGEFNQKGTVRTKYGTKGELKSAVNTLHSNGIQVYGDVVMNHKAGADYTENVTAVEVNPSNRYQETSGEYNIQAWTGFNFPGRGTTYSNWKWQWFHFDGTDWDQSRSLSRIFKFDGKAWDWEVSSENGNYDYLMYADYDYDHPDVVNEMKKWGVWYANEVGLDGYRLDAVKHIKFQFLKDWVDNARAATGKEMFTVGEYWQNDLGALNNYLAKVNYNQSLFDAPLHYNFYAASTGGGYYDMRNILNNTLVASNPTKAVTLVENHDTQPGQSLESTVQPWFKPLAYAFILTRSGGYPSVFYGDMYGTKGTTTREIPALKSKIEPLLKARKDYAYGTQRDYIDNPDVIGWTREGDSTKQKSGLATVITDGPGGSKRMYVGTSNAGEIWYDLTGNRTDKITIGSDGYATFPVNGGSVSVWVQQ

SEQ ID NO: 38473 - protein, 480 aa, Cytophaga sp.
NGTMMQYFEWYVPNDGQQWNRLRTDAPYLSSVGITAVWTPPAYKGTSQADVGYGPYDLYDLGEFNQKGTVRTKYGTKGELKSAVNTLHSNGIQVYGDVVMNHKAGADYTENVTAVEVNPSNRYQETSGEYNIQAWTGFNFPGRGTTYSNWKWQWFHFDGTDWDQKRSLSRIFKFDGKAWDWEVSSENGNYDYLMYADYDYDHPDVVNEMKKWGVWYANEVGLDGYRLDAVKHIKFQFLKDWVDNARAATGKEMFTVGEYWQNDLGALNNYLAKVNYNQSLFDAPLHYNFYAASTGGGYYDMRNILNNTLVASNPTKAVTLVENHDTQPGQSLESTVQPWFKPLAYAFILTRSGGYPSVFYGDMYGTKGTTTREIPALKSKIEPLLKARKDYAYGTQRDYIDNPDVIGWTREGDSTKAKSGLATVITDGPGGSKRMYVGTSNAGEIWYDLTGNRTDKITIGSDGYATFPVNGGSVSVWVQQ

SEQ ID NO: 38474 - protein, 480 aa, Cytophaga sp.
NGTMMQYFEWYVPNDGQQWNRLRTDAPYLSSVGITAVWTPPAYKGTSQADVGYGPYDLYDLGEFNQKGTVRTKYGTKGELKSAVNTLHSNGIQVYGDVVMNHKAGADYTENVTAVEVNPSNRYQETSGEYNIQAWTGFNFPGRGTTYSNWKWQWFHFDGTDWDQSRSLSRIFKFDGKAWDWEVSSENGNYDYLMYADYDYDHPDVVNEMKKWGVWYANEVGLDGYRLDAVKHIKFQFLKDWVDNARAATGKEMFTVGEYWQNDLGALNNYLAKVNYNQSLFDAPLHYNFYAASTGGGYYDMRNILNNTLVASNPTKAVTLVENHDTQPGQSLESTVQPWFKPHAYAFILTRSGGYPSVFYGDMYGTKGTTTREIPALKSKIEPLLKARKDYAYGTQRDYIDNPDVIGWTREGDSTKAKSGLATVITDGPGGSKRMYVGTSNAGEIWYDLTGNRTDKITIGSDGYATFPVNGGSVSVWVQQ

SEQ ID NO: 38475 - protein, 480 aa, Cytophaga sp.
NGTMMQYFEWYVPNDGQQWNRLRTDAPYLSSVGITAVWTPPAYKGTSQADVGYGPYDLYDLGEFNQKGTVRTKYGTKGELKSAVNTLHSNGIQVYGDVVMNHKAGADYTENVTAVEVNPSNRYQETSGEYNIQAWTGFNFPGRGTTYSNWKWQWFHFDGTDWDQSRSLSRIFKFDGKAWDWEVSSENGNYDYLMYADYDYDHPDVVNEMKKWGVWYANEVGLDGYRLDAVKHIKFQFLKDWVDNARAATGKEMFTVGEYWQNDLGALNNYLAKVNYNQSLFDAPLHYNFYAASTGGGYYDMRNILNNTLVASNPTKAVTLVENHDTQPGQSLESTVQPWFKPLAYAFILTRSGGYPSVFYGDMYGTKGTTTREIPALKSKIEPLLKARKDYAYGTQRDYIDNPDDIGWTREGDSTKAKSGLATVITDGPGGSKRMYVGTSNAGEIWYDLTGNRTDKITIGSDGYATFPVNGGSVSVWVQQ

SEQ ID NO: 38476 - protein, 480 aa, Cytophaga sp.
NGTMMQYFEWYVPNDGQQWNRLRTDAPYLSSVGITAVWTPPAYKGTSQADVGYGPYDLYDLGEFNQKGTVRTKYGTKGELKSAVNTLHSNGIQVYGDVVMNHKAGADYTENVTAVEVNPSNRYQETSGEYNIQAWTGFNFPGRGTTYSNWKWQWFHFDGTDWDQSRSLSRIFKFDGKAWDWEVSSENGNYDYLMYADYDYDHPDVVNEMKKWGVWYANEVGLDGYRLDAVKHIKFQFLKDWVDNARAATGKEMFTVGEYWQNDLGALNNYLAKVNYNQSLFDAPLHYNFYAASTGGGYYDMRNILNNTLVASNPTKAVTLVENHDTQPGQSLESTVQPWFKPLAYAFILTRSGGYPSVFYGDYYGTKGTTTREIPALKSKIEPLLKARKDYAYGTQRDYIDNPDVIGWTREGDSTKAKSGLATVITDGPGGSKRMYVGTSNAGEIWYDLTGNRTDKITIGSDGYATFPVNGGSVSVWVQQ

SEQ ID NO: 38477 - protein, 480 aa, Cytophaga sp.
NGTMMQYFEWYVPNDGQQWNRLRTDAPYLSSVGITAVWTPPAYKGTSQADVGYGPYDLYDLGEFNQKGTVRTKYGTKGELKSAVNTLHSNGIQVYGDVVMNHKAGADYTENVTAVEVNPSNRYQETSGEYNIQAWTGFNFPGRGTTYSNWKWQWFHFDGTDWDQVRSLSRIFKFDGKAWDWEVSSENGNYDYLMYADYDYDHPDVVNEMKKWGVWYANEVGLDGYRLDAVKHIKFQFLKDWVDNARAATGKEMFTVGEYWQNDLGALNNYLAKVNYNQSLFDAPLHYNFYAASTGGGYYDMRNILNNTLVASNPTKAVTLVENHDTQPGQSLESTVQPWFKPLAYAFILTRSGGYPSVFYGDMYGTKGTTTREIPALKSKIEPLLKARKDYAYGTQRDYIDNPDVIGWTREGDSTKAKSGLATVITDGPGGSKRMYVGTSNAGEIWYDLTGNRTDKITIGSDGYATFPVNGGSVSVWVQQ

SEQ ID NO: 38478 - protein, 480 aa, Cytophaga sp.
NGTMMQYFEWYVPNDGQQWNRLRTDAPYLSSVGITAVWTPPAYKGTSQADVGYGPYDLYDLGEFNQKGTVRTKYGTKGELKSAVNTLHSNGIQVYGDVVMNHKAGADYTENVTAVEVNPSNRYQETSGEYNIQAWTGFNFPGRGTTYSNWKWQWFHFDGTDWDQSRSLSRIFKFDGKAWDWEVSSENGNYDYLMYADYDYDHPDVVNEMKKWGVWYANEVGLDGYRLDAVKHIKFQFLKDWVDNARAATGKEMFTVGEYWQNDLGALNNYLAKVNYNQSLFDAPLHYNFYAASTGGGYYDMRNILNNTLVASNPTKAVTLVENHDTQPGQSLESTVQPWFKPLAYAFILTRSGGYPSVFYGDMYGTKGTTTREIPALHSKIEPLLKARKDYAYGTQRDYIDNPDVIGWTREGDSTKAKSGLATVITDGPGGSKRMYVGTSNAGEIWYDLTGNRTDKITIGSDGYATFPVNGGSVSVWVQQ

SEQ ID NO: 38479 - protein, 480 aa, Cytophaga sp.
NGTMMQYFEWYVPNDGQQWNRLRTDAPYLSSVGITAVWTPPAYKGTSQADVGYGPYDLYDLGEFNQKGTVRTKYGTKGELKSAVNTLHSNGIQVYGDVVMNHKAGADYTENVTAVEVNPSNRYQEESGEYNIQAWTGFNFPGRGTTYSNWKWQWFHFDGTDWDQSRSLSRIFKFDGKAWDWEVSSENGNYDYLMYADYDYDHPDVVNEMKKWGVWYANEVGLDGYRLDAVKHIKFQFLKDWVDNARAATGKEMFTVGEYWQNDLGALNNYLAKVNYNQSLFDAPLHYNFYAASTGGGYYDMRNILNNTLVASNPTKAVTLVENHDTQPGQSLESTVQPWFKPLAYAFILTRSGGYPSVFYGDMYGTKGTTTREIPALKSKIEPLLKARKDYAYGTQRDYIDNPDVIGWTREGDSTKAKSGLATVITDGPGGSKRMYVGTSNAGEIWYDLTGNRTDKITIGSDGYATFPVNGGSVSVWVQQ

SEQ ID NO: 38480 - protein, 480 aa, Cytophaga sp.
NGTMMQYFEWYVPNDGQQWNRLRTDAPYLSSVGITAVWTPPAYKGTSQADVGYGPYDLYDLGEFNQKGTVRTKYGTKGELKSAVNTLHSNGIQVYGDVVMNHKAGADYTENVTAVEVNPSNRYQETSGEYNIQAWTGFNFPGRGTTYSNWKWQWFHFDGTDWDQSRSLSRIFKFDGKAWDWEVSSENGNYDYLMYADYDYDHPDVVNEMKKWGVWYANEVGLDGYRLDAVKHIKFQFLKDWVDNARAATGKEMFTVGEYWQNDLGALNNYLAKVNYNQSLFDAPLHYNFYLASTGGGYYDMRNILNNTLVASNPTKAVTLVENHDTQPGQSLESTVQPWFKPLAYAFILTRSGGYPSVFYGDMYGTKGTTTREIPALKSKIEPLLKARKDYAYGTQRDYIDNPDVIGWTREGDSTKAKSGLATVITDGPGGSKRMYVGTSNAGEIWYDLTGNRTDKITIGSDGYATFPVNGGSVSVWVQQ

SEQ ID NO: 38481 - protein, 480 aa, Cytophaga sp.
NGTMMQYFEWYVPNDGQQWNRLRTDAPYLSSVGITAVWTPPAYKGTSQADVGYGPYDLYDLGEFNQKGTVRTKYGTKGELKSAVNTLHSNGIQVYGDVVMNHKAGADYTENVTAVEVNPSNRYQETSGEYNIQAWTGFNFPGRGTTYSNWKWQWFHFDGTDEDQSRSLSRIFKFDGKAWDWEVSSENGNYDYLMYADYDYDHPDVVNEMKKWGVWYANEVGLDGYRLDAVKHIKFQFLKDWVDNARAATGKEMFTVGEYWQNDLGALNNYLAKVNYNQSLFDAPLHYNFYAASTGGGYYDMRNILNNTLVASNPTKAVTLVENHDTQPGQSLESTVQPWFKPLAYAFILTRSGGYPSVFYGDMYGTKGTTTREIPALKSKIEPLLKARKDYAYGTQRDYIDNPDVIGWTREGDSTKAKSGLATVITDGPGGSKRMYVGTSNAGEIWYDLTGNRTDKITIGSDGYATFPVNGGSVSVWVQQ

SEQ ID NO: 38482 - protein, 480 aa, Cytophaga sp.
NGTMMQYFEWYVPNDGQQWNRLRTDAPYLSSVGITAVWTPPAYKGTSQADVGYGPYDLYDLGEFNQKGTVRTKYGTKGELKSAVNTLHSNGIQVYGDVVMNHKAGADYTENVTAVEVNPSNRYQETSGEYNIQAWTGFNFPGRGTTYANWKWQWFHFDGTDWDQSRSLSRIFKFDGKAWDWEVSSENGNYDYLMYADYDYDHPDVVNEMKKWGVWYANEVGLDGYRLDAVKHIKFQFLKDWVDNARAATGKEMFTVGEYWQNDLGALNNYLAKVNYNQSLFDAPLHYNFYAASTGGGYYDMRNILNNTLVASNPTKAVTLVENHDTQPGQSLESTVQPWFKPLAYAFILTRSGGYPSVFYGDMYGTKGTTTREIPALKSKIEPLLKARKDYAYGTQRDYIDNPDVIGWTREGDSTKAKSGLATVITDGPGGSKRMYVGTSNAGEIWYDLTGNRTDKITIGSDGYATFPVNGGSVSVWVQQ

SEQ ID NO: 38483 - protein, 480 aa, Cytophaga sp.
NGTMMQYFEWYVPNDGQQWNRLRTDAPYLSSVGITAVWTPPAYKGTSQADVGYGPYDLYDLGEFNQKGTVRTKYGTKGELKSAVNTLHFNGIQVYGDVVMNHKAGADYTENVTAVEVNPSNRYQETSGEYNIQAWTGFNFPGRGTTYSNWKWQWFHFDGTDWDQSRSLSRIFKFDGKAWDWEVSSENGNYDYLMYADYDYDHPDVVNEMKKWGVWYANEVGLDGYRLDAVKHIKFQFLKDWVDNARAATGKEMFTVGEYWQNDLGALNNYLAKVNYNQSLFDAPLHYNFYAASTGGGYYDMRNILNNTLVASNPTKAVTLVENHDTQPGQSLESTVQPWFKPLAYAFILTRSGGYPSVFYGDMYGTKGTTTREIPALKSKIEPLLKARKDYAYGTQRDYIDNPDVIGWTREGDSTKAKSGLATVITDGPGGSKRMYVGTSNAGEIWYDLTGNRTDKITIGSDGYATFPVNGGSVSVWVQQ

SEQ ID NO: 38484 - protein, 480 aa, Cytophaga sp.
NGTMMQYFEWYVPNDGQQWNRLRTDAPYLSSVGITAVWTPPAYKGTSQADVGYGPYDLYDLGEFNQKGTVRTKYGTKGELKSAVNTLHSNGIQVYGDVVMNHKAGADYTENVTAVEVNPSNRYQETSGEYNIQAWTGFNFPGRGTTYSNWKWQWFHFDGTDWDQSRSLSRIFKFDGKAWDWEVSSENGNYDYLMYADYDYDHPDVVNEMKKWGVWYANEVGLDGYRLDAVKHIKFQFLKDWVDNARAATGKEMFTVGEYWQNDLGALNNYLAKVNYNQSLFDAPLHYNFYAASTGGGYYDMRNILNNTLVASNPTKAVTLVENHDTQPGQSLESTVQPWFKPLAYAVILTRSGGYPSVFYGDMYGTKGTTTREIPALKSKIEPLLKARKDYAYGTQRDYIDNPDVIGWTREGDSTKAKSGLATVITDGPGGSKRMYVGTSNAGEIWYDLTGNRTDKITIGSDGYATFPVNGGSVSVWVQQ

SEQ ID NO: 38485 - protein, 480 aa, Cytophaga sp.
NGTMMQYFEWYVPNDGQQWNRLRTDAPYLSSVGITAVWTPPAYKGTSQADVGYGPYDLYDLGEFNQKGTVRTKYGTKGELKSAVNTLHSNGIQVYGDVVMNHKAGADYTENVTAVEVNPSNRYQETSGEYNIQAWTGFNFPGRGTTYSNWKWQWFHFDGTDWDQSRSLSRIFKFDGKAWDWEVSSENGNYDYLMYADYDYDHPDVVNEMKKWGVWYANEVGLDGYRLDAVKHIKFQFLKDWVDNARAATGKEMFTVGEYWQNDLGALNNYLAKVNYNQSLFDAPLHYNFYAASTGGGYYDMGNILNNTLVASNPTKAVTLVENHDTQPGQSLESTVQPWFKPLAYAFILTRSGGYPSVFYGDMYGTKGTTTREIPALKSKIEPLLKARKDYAYGTQRDYIDNPDVIGWTREGDSTKAKSGLATVITDGPGGSKRMYVGTSNAGEIWYDLTGNRTDKITIGSDGYATFPVNGGSVSVWVQQ

SEQ ID NO: 38486 - protein, 480 aa, Cytophaga sp.
NGTMMQYFEWYVPNDGQQWNRLRTDAPYLSSVGITAVWTPPAYKGTSQADVGYGPYDLYDLGEFNQKGTVRTKYGTKGELKSAVNTLHSNGIQVYGDVVMNHKAGADYTENVTAVEVNPSNRYQETSGEYNIQAWTGFNFPGRGTTYSNWKWQWFHFDGTDWDQSRSLSRIFKFDGKAWDWEVSSENGNYDYLMYADYDYDHPDVVNEMKKWGVWYANEVGLDGYRLDAVKHIKFQFLKDWVDNARAATGKEMFTVGEYWQNDLGALNNYLAKVNYNQSLFDAPLHYNFYAASTGTGYYDMRNILNNTLVASNPTKAVTLVENHDTQPGQSLESTVQPWFKPLAYAFILTRSGGYPSVFYGDMYGTKGTTTREIPALKSKIEPLLKARKDYAYGTQRDYIDNPDVIGWTREGDSTKAKSGLATVITDGPGGSKRMYVGTSNAGEIWYDLTGNRTDKITIGSDGYATFPVNGGSVSVWVQQ

SEQ ID NO: 38487 - protein, 480 aa, Cytophaga sp.
NGTMMQYFEWYVPNDGQQWNRLRTDAPYLSSVGITAVWTPPAYKGTSQADVGYGPYDLYDLGEFNQKGTVRTKYGTKGELKSAVNTLHSNGIQVYGDVVMNHKAGADYTENVTAVEVNPSNRYQETSGEYNIQAWTGFNFPGRGTTYSNWKWQWFHFDGTDWDQSRSLSRIFKFDGKAWDWEVSSENGNYDYLMYADYDYDHPDVVNEMKKWGVWYANEVGLDGYRLDAVKHIKFQFLKDWVDNARAATGKEMFTVGEYWQNDLGALNNYLAKVNYNQSLFDAPLHYNFYAASTGKGYYDMRNILNNTLVASNPTKAVTLVENHDTQPGQSLESTVQPWFKPLAYAFILTRSGGYPSVFYGDMYGTKGTTTREIPALKSKIEPLLKARKDYAYGTQRDYIDNPDVIGWTREGDSTKAKSGLATVITDGPGGSKRMYVGTSNAGEIWYDLTGNRTDKITIGSDGYATFPVNGGSVSVWVQQ

SEQ ID NO: 38488 - protein, 480 aa, Cytophaga sp.
NGTMMQYFEWYVPNDGQQWNRLRTDAPYLSSVGITAVWTPPAYKGTSQADVGYGPYDLYDLGEFNQKGTVRTKYGTKGELKSAVNTLHSNGIQVYGDVVMNHKAGADYTENVTAVEVNPSNRYQETSGEYNIQAWTGFNFPGRGTTYSNWKWQWFHFDGTDWDQSRSLSRIFKFDGKAWDWEVSSENGNYDYLMYADYDYDHPDVVNEMKKWGVWYANEVGLDGYRLDAVKHIKFQFLKDWVDNARAATGKEMFTVGEYWQNDLGALNNYLAKVNYNQSLFDAPLHYNFYAASTGGGYYDMRNILNNTLVASNPTKAVTLVENHDTQPGQSLESTVQPWFKPLAYAFILTRSGGYPSVFYGDMYGTKGTTTREIPALKSKIEPLLKARKDYAYGTQRDYIDNPDVIGWTREGDSTKEKSGLATVITDGPGGSKRMYVGTSNAGEIWYDLTGNRTDKITIGSDGYATFPVNGGSVSVWVQQ

SEQ ID NO: 38489 - protein, 480 aa, Cytophaga sp.
NGTMMQYFEWYVPNDGQQWNRLRTDAPYLSSVGITAVWTPPAYKGTMQADVGYGPYDLYDLGEFNQKGTVRTKYGTKGELKSAVNTLHSNGIQVYGDVVMNHKAGADYTENVTAVEVNPSNRYQETSGEYNIQAWTGFNFPGRGTTYSNWKWQWFHFDGTDWDQSRSLSRIFKFDGKAWDWEVSSENGNYDYLMYADYDYDHPDVVNEMKKWGVWYANEVGLDGYRLDAVKHIKFQFLKDWVDNARAATGKEMFTVGEYWQNDLGALNNYLAKVNYNQSLFDAPLHYNFYAASTGGGYYDMRNILNNTLVASNPTKAVTLVENHDTQPGQSLESTVQPWFKPLAYAFILTRSGGYPSVFYGDMYGTKGTTTREIPALKSKIEPLLKARKDYAYGTQRDYIDNPDVIGWTREGDSTKAKSGLATVITDGPGGSKRMYVGTSNAGEIWYDLTGNRTDKITIGSDGYATFPVNGGSVSVWVQQ

SEQ ID NO: 38490 - protein, 480 aa, Cytophaga sp.
NGTMMQYFEWYVPNDGQQWNRLRTDAPYLSSVGITAVWTPPAYKGTSQADVGYGPYDLYDLGEFNQKGTVRTKYGTKGELKSAVNTLHSNGIQVYGDVVMNHKAGADYTENVTAVEVNPSNRYQETSGEYNIQAWTGFNFPGRGTTYSNWRWQWFHFDGTDWDQSRSLSRIFKFDGKAWDWEVSSENGNYDYLMYADYDYDHPDVVNEMKKWGVWYANEVGLDGYRLDAVKHIKFQFLKDWVDNARAATGKEMFTVGEYWQNDLGALNNYLAKVNYNQSLFDAPLHYNFYAASTGGGYYDMRNILNNTLVASNPTKAVTLVENHDTQPGQSLESTVQPWFKPLAYAFILTRSGGYPSVFYGDMYGTKGTTTREIPALKSKIEPLLKARKDYAYGTQRDYIDNPDVIGWTREGDSTKAKSGLATVITDGPGGSKRMYVGTSNAGEIWYDLTGNRTDKITIGSDGYATFPVNGGSVSVWVQQ

SEQ ID NO: 38491 - protein, 480 aa, Cytophaga sp.
NGTMMQYFEWYVPNDGQQWNRLRTDAPYLSSVGITAVWTPPAYKGTSQADVGYGPYDLYDLGEFNQKGTVRTKYGTKGELKSAVNTLHSNGIQVYGDVVMNHKAGADYTENVTAVEVNPSNRYQETSGEYNIQAWTGFNFPGRGTTYSNWKWQWFHFDGTDWDQSRSLSRIFKFDGKAWDWEVSSENGNYDYLMYADYDYDHPDVVNEMKKWGVWYANEVGLDGYRLDAVKHIKFQFLKDWVDNARAATGKEMFTVGEYWQNDLGALNNYLAKVNYNQSLFDAPLHYNFYAASTGGGYYDMRNILNNTLVASNPTKAVTLVENHDTQPGQSLESTVQPWFKPLAYAFILTRSGGYPSVFYGDIYGTKGTTTREIPALKSKIEPLLKARKDYAYGTQRDYIDNPDVIGWTREGDSTKAKSGLATVITDGPGGSKRMYVGTSNAGEIWYDLTGNRTDKITIGSDGYATFPVNGGSVSVWVQQ

SEQ ID NO: 38492 - protein, 480 aa, Cytophaga sp.
NGTMMQYFEWYVPNDGQQWNRLRTDAPYLSSVGITAVWTPPAYKGTSQADVGYGPYDLYDLGEFNQKGTVRTKYGTKGELKSAVNTLHSNGIQVYGDVVMNHKAGADYTENVTAVEVNPSNRYQETSGEYNIQAWTGFNFPGRGTVYSNWKWQWFHFDGTDWDQSRSLSRIFKFDGKAWDWEVSSENGNYDYLMYADYDYDHPDVVNEMKKWGVWYANEVGLDGYRLDAVKHIKFQFLKDWVDNARAATGKEMFTVGEYWQNDLGALNNYLAKVNYNQSLFDAPLHYNFYAASTGGGYYDMRNILNNTLVASNPTKAVTLVENHDTQPGQSLESTVQPWFKPLAYAFILTRSGGYPSVFYGDMYGTKGTTTREIPALKSKIEPLLKARKDYAYGTQRDYIDNPDVIGWTREGDSTKAKSGLATVITDGPGGSKRMYVGTSNAGEIWYDLTGNRTDKITIGSDGYATFPVNGGSVSVWVQQ

SEQ ID NO: 38493 - protein, 480 aa, Cytophaga sp.
NGTMMQYFEWYVPNDGQQWNRLRTDAPYLSSVGITAVWTPPAYKGTSQADVGYGPYDLYDLGEFNQKGTVRTKYGTKGELKSAVNTLHSNGIQVYGDVVMNHKAGADYTENVTAVEVNPSNRYQETSGEYNIQAWTGFNFPGRGTTYSNWKWQWFHFDGTDWDQSRSLSRIFKFDGKAWDWEVSSENGNYDYLMYADYDYDHPDVVNEMKKWGVWYANEVGLDGYRLDAVKHIKFQFLKDWVDNARAATGKEMFTVGEYWQNDLGALNNYLAKVNYNQSLFDAPLHYNFYCASTGGGYYDMRNILNNTLVASNPTKAVTLVENHDTQPGQSLESTVQPWFKPLAYAFILTRSGGYPSVFYGDMYGTKGTTTREIPALKSKIEPLLKARKDYAYGTQRDYIDNPDVIGWTREGDSTKAKSGLATVITDGPGGSKRMYVGTSNAGEIWYDLTGNRTDKITIGSDGYATFPVNGGSVSVWVQQ

SEQ ID NO: 38494 - protein, 480 aa, Cytophaga sp.
NGTMMQYFEWYVPNDGQQWNRLRTDAPYLSSVGITAVWTPPAYKGTSQADVGYGPYDLYDLGEFNQKGTVRTKYGTKGELKSAVNTLHSNGIQVYGDVVMNHKAGADYTENVTAVEVNPSNRYEETSGEYNIQAWTGFNFPGRGTTYSNWKWQWFHFDGTDWDQSRSLSRIFKFDGKAWDWEVSSENGNYDYLMYADYDYDHPDVVNEMKKWGVWYANEVGLDGYRLDAVKHIKFQFLKDWVDNARAATGKEMFTVGEYWQNDLGALNNYLAKVNYNQSLFDAPLHYNFYAASTGGGYYDMRNILNNTLVASNPTKAVTLVENHDTQPGQSLESTVQPWFKPLAYAFILTRSGGYPSVFYGDMYGTKGTTTREIPALKSKIEPLLKARKDYAYGTQRDYIDNPDVIGWTREGDSTKAKSGLATVITDGPGGSKRMYVGTSNAGEIWYDLTGNRTDKITIGSDGYATFPVNGGSVSVWVQQ

SEQ ID NO: 38495 - protein, 480 aa, Cytophaga sp.
NGTMMQYFEWYVPNDGQQWNRLRTDAPYLSSVGITAVWTPPAYKGTSQADVGYGPYDLYDLGEFNQKGTVRTKYGTKGELKSAVNTLHSNGIQVYGDVVMNHKAGADYTENVTAVEVNPSNRYQETSGEYNIQAWTGFNFPGRGTTYSNWKWQWFHFDGTDWDQSRSLSRIFKFDGKAWDWEVSSENENYDYLMYADYDYDHPDVVNEMKKWGVWYANEVGLDGYRLDAVKHIKFQFLKDWVDNARAATGKEMFTVGEYWQNDLGALNNYLAKVNYNQSLFDAPLHYNFYAASTGGGYYDMRNILNNTLVASNPTKAVTLVENHDTQPGQSLESTVQPWFKPLAYAFILTRSGGYPSVFYGDMYGTKGTTTREIPALKSKIEPLLKARKDYAYGTQRDYIDNPDVIGWTREGDSTKAKSGLATVITDGPGGSKRMYVGTSNAGEIWYDLTGNRTDKITIGSDGYATFPVNGGSVSVWVQQ

SEQ ID NO: 38496 - protein, 480 aa, Cytophaga sp.
NGTMMQYFEWYVPNDGQQWNRLRTDAPYLSSVGITAVWTPPAYKGTSQADVGYGPYDLYDLGEFNQKGTVRTKYGTKGELKSAVNTLHSNGIQVYGDVVMNHKAGADYTENVTAVEVNPSNRYQETSGEYNIQAWTGFNFPGRGTTYSNWKWQWFHFDGTDWDQSRSLSRIFKFDGKAWDWEVSLENGNYDYLMYADYDYDHPDVVNEMKKWGVWYANEVGLDGYRLDAVKHIKFQFLKDWVDNARAATGKEMFTVGEYWQNDLGALNNYLAKVNYNQSLFDAPLHYNFYAASTGGGYYDMRNILNNTLVASNPTKAVTLVENHDTQPGQSLESTVQPWFKPLAYAFILTRSGGYPSVFYGDMYGTKGTTTREIPALKSKIEPLLKARKDYAYGTQRDYIDNPDVIGWTREGDSTKAKSGLATVITDGPGGSKRMYVGTSNAGEIWYDLTGNRTDKITIGSDGYATFPVNGGSVSVWVQQ

SEQ ID NO: 38497 - protein, 480 aa, Cytophaga sp.
NGTMMQYFEWYVPNDGQQWNRLRTDAPYLSSVGITAVWTPPAYKGTSQADVGYGPYDLYDLGEFNQKGTVRTKYGTKGELKSAVNTLHSNGIQVYGDVVMNHKAGADYTENVTAVEVNPSNRYQETSGEYNIQAWTGFNFPGRGTTYSNWKWQWFHFDGTDWDQSRSLSRIFKFDGKAWDWEVSSENGNYDYLMYADYDYDHPDVVNEMKKWGVWYANEVGLDGYRLDAVKHIKFQFLKDWVDNARAATGKEMFTVGEYWQNDLGALNNYLAKVNYNQSLFDAPLHYNFYAASTGGGYYDMRNILNNTLVASNPTKAVTLVENHDTQPGQSLESTVQPWFKPLAYAFILTRSGGYPSVFYGDMYGTKGTTTREIPALKSKIEPLLKARKDYAYGTQRDYIDNPDVIGWTREGDSTKATSGLATVITDGPGGSKRMYVGTSNAGEIWYDLTGNRTDKITIGSDGYATFPVNGGSVSVWVQQ

SEQ ID NO: 38498 - protein, 480 aa, Cytophaga sp.
NGTMMQYFEWYVPNDGQQWNRLRTDAPYLSSVGITAVWTPPAYKGTSQADVGYGPYDLYDLGEFNQKGTVRTKYGTKGELKSAVNTLHSNGIQVYGDVVMNHKAGADYTENVTAVEVNPSNRYQETSGEYNIQAWTGFNFPGRGTTYSNWKWQWFHFDGTDWDQSRSLSRIFKFDGKAWDWEVSSENGNYDYLMYADYDYDHPDVVNEMKKWGVWYANEVGLDGYRLDAVKHIKFQFLKDWVDNARAATGKEMFTVGEYWQNDLGALNNYLAKVNYNQSLFDAPLHYNFYAASTGGGYYDMRNILNNTLVASNPTKAVTLVENHDTQPGQSLESTVQPWFKPLAYAFILTRSGGYPSVFYGDMYGTKGTTTREIPALKSKIEPLLKARKDYAYGTQRDYIDNPDVIGWTREGDSTKAKSGLATVITDGPPGSKRMYVGTSNAGEIWYDLTGNRTDKITIGSDGYATFPVNGGSVSVWVQQ

SEQ ID NO: 38499 - protein, 480 aa, Cytophaga sp.
NGTMMQYFEWYVPNDGQQWNRLRTDAPYLSSVGITAVWTPPAYKGTSQADVGYGPYDLYDLGEFNQKGTVRTKYGTKGELKSAVNTLHSNGIQVYGDVVMNHKAGADYTENVTAVEVNPSNRYQETSGEYNIQAWTGFNFPGRGTTYSNWKWQWFHFDGTDWDQSRSLSRIFKFDGKAWDWEVSSENGNYDYLMYADYDYDHPDVVNEMKKWGVWYANEVGLDGYRLDAVKHIKFQFLKDWVDNARAATGKEMFTVGEYWQNDLGALNNYLAKVNYNQTLFDAPLHYNFYAASTGGGYYDMRNILNNTLVASNPTKAVTLVENHDTQPGQSLESTVQPWFKPLAYAFILTRSGGYPSVFYGDMYGTKGTTTREIPALKSKIEPLLKARKDYAYGTQRDYIDNPDVIGWTREGDSTKAKSGLATVITDGPGGSKRMYVGTSNAGEIWYDLTGNRTDKITIGSDGYATFPVNGGSVSVWVQQ

SEQ ID NO: 38500 - protein, 480 aa, Cytophaga sp.
NGTMMQYFEWYVPNDGQQWNRLRTDAPYLSSVGITAVWTPPAYKGTSQADVGYGPYDLYDLGEFNQKGTVRTKYGTKGELKSAVNTLHSNGIQVYGDVVMNHKAGADYTENVTAVEVNPSNRYQETSGEYNIQAWTGFNFPGRGTTYSNWKWQWFHFDGTDWDQSRSLSRIFKFDGKAWDWEVSSENGNYDYLMYADYDYDHPDVVNEMKKWGVWYANEVGLDGYRLDAVKHIKFQFLKDWVDNARAATGKEMFTVGEYWQNDLGALNNYLAKVNYNQSLFDAPLHYNFYAASTGGGYYDMQNILNNTLVASNPTKAVTLVENHDTQPGQSLESTVQPWFKPLAYAFILTRSGGYPSVFYGDMYGTKGTTTREIPALKSKIEPLLKARKDYAYGTQRDYIDNPDVIGWTREGDSTKAKSGLATVITDGPGGSKRMYVGTSNAGEIWYDLTGNRTDKITIGSDGYATFPVNGGSVSVWVQQ

SEQ ID NO: 38501 - protein, 480 aa, Cytophaga sp.
NGTMMQYFEWYVPNDGQQWNRLRTDAPYLSSVGITAVWTPPAYKGTSQADVGYGPYDLYDLGEFNQKGTVRTKYGTKGELKSAVNTLHSNGIQVYGDVVMNHKAGADYTENVTAVEVNPSNRYSETSGEYNIQAWTGFNFPGRGTTYSNWKWQWFHFDGTDWDQSRSLSRIFKFDGKAWDWEVSSENGNYDYLMYADYDYDHPDVVNEMKKWGVWYANEVGLDGYRLDAVKHIKFQFLKDWVDNARAATGKEMFTVGEYWQNDLGALNNYLAKVNYNQSLFDAPLHYNFYAASTGGGYYDMRNILNNTLVASNPTKAVTLVENHDTQPGQSLESTVQPWFKPLAYAFILTRSGGYPSVFYGDMYGTKGTTTREIPALKSKIEPLLKARKDYAYGTQRDYIDNPDVIGWTREGDSTKAKSGLATVITDGPGGSKRMYVGTSNAGEIWYDLTGNRTDKITIGSDGYATFPVNGGSVSVWVQQ

SEQ ID NO: 38502 - protein, 480 aa, Cytophaga sp.
NGTMMQYFEWYVPNDGQQWNRLRTDAPYLSSVGITAVWTPPAYKGTSQADVGYGPYDLYDLGEFNQKGTVRTKYGTKGELKSAVNTLHSNGIQVYGDVVMNHKAGADYTENVTAVEVNPSNRYQETSGEYNIQAWTGFNFPGRGTTYSNWKWQWFHFDGTDWDQSRSLSRIFKFDGKAWDWEVSSENGNYDYLMYADYDYDHPDVVNEMKKWGVWYANEVGLDGYRLDAVKHIKFQFLKDWVDNARAATGKEMFTVGEYWQNDLGALNNYLAKVNYNQSLFDAPLHYNFYAASTGQGYYDMRNILNNTLVASNPTKAVTLVENHDTQPGQSLESTVQPWFKPLAYAFILTRSGGYPSVFYGDMYGTKGTTTREIPALKSKIEPLLKARKDYAYGTQRDYIDNPDVIGWTREGDSTKAKSGLATVITDGPGGSKRMYVGTSNAGEIWYDLTGNRTDKITIGSDGYATFPVNGGSVSVWVQQ

SEQ ID NO: 38503 - protein, 480 aa, Cytophaga sp.
NGTMMQYFEWYVPNDGQQWNRLRTDAPYLSSVGITAVWTPPAYKGTSQADVGYGPYDLYDLGEFNQKGTVRTKYGTKGELKSAVNTLHSNGIQVYGDVVMNHKAGADYTENVTAVEVNPSNRYQETSGEYNIQAWTGFNFPGRGTTYSNWKWQWFHFDGTDWDQSRSLSRIFKFDGKAWDWEVSSENGNYDYLMYADYDYDHPDVVNEMKKWGVWYANEVGLDGYRLDAVKHIKFQFLKDWVDNARAATGKEMFTVGEYWQNDLGALNNYLAKVNYNQSLFDAPLHYNFYAASTGGGYYDMRNILNNTLVASNPTKAVTLVENHDTQPGQSLESTVQPWFKPLAYAFILTRSGGYPSVFYGDMYGTKGTTTREIPALKSKIEPLLKARKDYAYGTQRDYIDNPDVIGWTREGDSTKAKSGLATVITDGPGGSKRMYVGTSNHGEIWYDLTGNRTDKITIGSDGYATFPVNGGSVSVWVQQ

SEQ ID NO: 38504 - protein, 480 aa, Cytophaga sp.
NGTMMQYFEWYVPNDGQQWNRLRTDAPYLSSVGITAVWTPPAYKGTSQADVGYGPYDLYDLGEFNQKGTVRTKYGTKGELKSAVNTLHSNGIQVYGDVVMNHKAGADYTENVTAVEVNPSNRYQETSGEYNIQAWTGFNFPGRGTTYSNWKWQWFHFDGTDWDQSRSLSRIFKFDGKAWDWEVSSENGNYDYLMYADYDYDHPDVVNEMKKWGVWYANEVGLDGYRLDAVKHIKFQFLKDWVDNARAATGKEMFTVGEYWQNDLGALNNYLAKVNYNQSLFDAPLHYNFYAASTGGGYYDMRNILNNTLVASNPTKAVTLVENHDTQPGQSLESTVQPWFKPLAYAFILTRSGGYPSVFYGDMYGTKGTTTREIPALKSKIEPLLKARKDYAYGTQRDYIDNPDVIGWTREGDSTKAKSGLATVITDGPGGSKRMYVGTSNAGEIWYDLTGNRTDKITIGSDGYATFPVMGGSVSVWVQQ

SEQ ID NO: 38505 - protein, 480 aa, Cytophaga sp.
NGTMMQYFEWYVPNDGQQWNRLRTDAPYLSSVGITAVWTPPAYKGTSQADVGYGPYDLKDLGEFNQKGTVRTKYGTKGELKSAVNTLHSNGIQVYGDVVMNHKAGADYTENVTAVEVNPSNRYQETSGEYNIQAWTGFNFPGRGTTYSNWKWQWFHFDGTDWDQSRSLSRIFKFDGKAWDWEVSSENGNYDYLMYADYDYDHPDVVNEMKKWGVWYANEVGLDGYRLDAVKHIKFQFLKDWVDNARAATGKEMFTVGEYWQNDLGALNNYLAKVNYNQSLFDAPLHYNFYAASTGGGYYDMRNILNNTLVASNPTKAVTLVENHDTQPGQSLESTVQPWFKPLAYAFILTRSGGYPSVFYGDMYGTKGTTTREIPALKSKIEPLLKARKDYAYGTQRDYIDNPDVIGWTREGDSTKAKSGLATVITDGPGGSKRMYVGTSNAGEIWYDLTGNRTDKITIGSDGYATFPVNGGSVSVWVQQ

SEQ ID NO: 38506 - protein, 480 aa, Cytophaga sp.
NGTMMQYFEWYVPNDGQQWNRLRTDAPYLSSVGITAVWTPPAYKGTSQADVGYGPYDLYDLGEFNQKGTVRTKYGTKGELKSAVNTLHSNGIQVYGDVVMNHKAGADYTENVTAVEVNPSNRYQETSGEYNIQAWTGFNFPGRGTTYSNWKWQWFHFDGTDWDQSRSLSRIFKFDGKAWDWEVSSENGNYDYLMYADYDYDHPDVVNEMKKWGVWYANEVGLDGYRLDAVKHIKFQFLKDWVDNARAATGKEMFTVGEYWQNDLGALNNYLAKVNYNQSLFDAPLHYNFYAASTGGGYYDMRNILNNTLVASNPTKAVTLVENHDTQPGQSLESTVQPWFKPLAYAFILTRSGGYPSVFYGDMYGTKGTTTREIPALKSKIEPLLKARKDTAYGTQRDYIDNPDVIGWTREGDSTKAKSGLATVITDGPGGSKRMYVGTSNAGEIWYDLTGNRTDKITIGSDGYATFPVNGGSVSVWVQQ

SEQ ID NO: 38507 - protein, 480 aa, Cytophaga sp.
NGTMMQYFEWYVPNDGQQWNRLRTDAPYLSSVGITAVWTPPAYKGTSQADVGYGPYDLYDLGEFNQKGTVRTKYGTKGELKSAVNTLHSNGIQVYGDVVMNHKAGADYTENVTAVEVNTSNRYQETSGEYNIQAWTGFNFPGRGTTYSNWKWQWFHFDGTDWDQSRSLSRIFKFDGKAWDWEVSSENGNYDYLMYADYDYDHPDVVNEMKKWGVWYANEVGLDGYRLDAVKHIKFQFLKDWVDNARAATGKEMFTVGEYWQNDLGALNNYLAKVNYNQSLFDAPLHYNFYAASTGGGYYDMRNILNNTLVASNPTKAVTLVENHDTQPGQSLESTVQPWFKPLAYAFILTRSGGYPSVFYGDMYGTKGTTTREIPALKSKIEPLLKARKDYAYGTQRDYIDNPDVIGWTREGDSTKAKSGLATVITDGPGGSKRMYVGTSNAGEIWYDLTGNRTDKITIGSDGYATFPVNGGSVSVWVQQ

SEQ ID NO: 38508 - protein, 480 aa, Cytophaga sp.
NGTMMQYFEWYVPNDGQQWNRLRTDAPYLSSVGITAVWTPPAYKGTSQADVGYGPYDLYDLGEFNQKGTVRTKYGTKGELKSAVNTLHGNGIQVYGDVVMNHKAGADYTENVTAVEVNPSNRYQETSGEYNIQAWTGFNFPGRGTTYSNWKWQWFHFDGTDWDQSRSLSRIFKFDGKAWDWEVSSENGNYDYLMYADYDYDHPDVVNEMKKWGVWYANEVGLDGYRLDAVKHIKFQFLKDWVDNARAATGKEMFTVGEYWQNDLGALNNYLAKVNYNQSLFDAPLHYNFYAASTGGGYYDMRNILNNTLVASNPTKAVTLVENHDTQPGQSLESTVQPWFKPLAYAFILTRSGGYPSVFYGDMYGTKGTTTREIPALKSKIEPLLKARKDYAYGTQRDYIDNPDVIGWTREGDSTKAKSGLATVITDGPGGSKRMYVGTSNAGEIWYDLTGNRTDKITIGSDGYATFPVNGGSVSVWVQQ

SEQ ID NO: 38509 - protein, 480 aa, Cytophaga sp.
NGTMMQYFEWYVPNDGQQWNRLRTDAPYLSSVGITAVWTPPAYKGTSQADVGYGPYDLYDLGEFNQKGTVRTKYGTKGELKSAVNTLHSNGIQVYGDVVMNHKAGADYTENVTAVEVNPSNRYQETSGEYNIQAWTGFNFPGRGTCYSNWKWQWFHFDGTDWDQSRSLSRIFKFDGKAWDWEVSSENGNYDYLMYADYDYDHPDVVNEMKKWGVWYANEVGLDGYRLDAVKHIKFQFLKDWVDNARAATGKEMFTVGEYWQNDLGALNNYLAKVNYNQSLFDAPLHYNFYAASTGGGYYDMRNILNNTLVASNPTKAVTLVENHDTQPGQSLESTVQPWFKPLAYAFILTRSGGYPSVFYGDMYGTKGTTTREIPALKSKIEPLLKARKDYAYGTQRDYIDNPDVIGWTREGDSTKAKSGLATVITDGPGGSKRMYVGTSNAGEIWYDLTGNRTDKITIGSDGYATFPVNGGSVSVWVQQ

SEQ ID NO: 38510 - protein, 480 aa, Cytophaga sp.
NGTMMQYFEWYVPNDGQQWNRLRTDAPYLSSVGITAVWTPPAYKGTSQADVGYGPYDLYDLGEFNQKGTVRTKYGTKGELKSAVNTLHSNGIQVYGDVVMNHKAGADYTENVTAVEVNPSNRYQETSGEYNIQAWTGFNFPGRGTTYSNWKWQWFHFDGTDWDQSRSLSRIFKFDGKAWDWEVSSENGNYDYLMYADYDYDHPDVVNEMKKWGVWYANEVGLDGYRLDAVKHIKFQFLKDWVDNARAATGKEMFTVGEYWQNDLGALNNYLAKVNYNQSLFDAPLHYNFYAASTGGGYYDMRNILNNTLVASNPTKAVTLVENHDTQPGQSLESTVQPWFKPLAYAFILTRSGGYPSVFYGDMYGTKGTTTREIPALKSKIEPLLKARKDYAYGTQRDYIDNPDVIGWTREGDSTKAKSGLATVITDGAGGSKRMYVGTSNAGEIWYDLTGNRTDKITIGSDGYATFPVNGGSVSVWVQQ

SEQ ID NO: 38511 - protein, 480 aa, Cytophaga sp.
NGTMMQYFEWYVPNDGQQWNRLRTDAPYLSSVGITAVWTPPAYKGTSQADVGYGPYDLYDLGEFNQKGTVRTKYGTKGELKSAVNTLHSNGIQVYGDVVMNHKAGADYTENVTAVEVNPSNRYQETSGEYNIQAWTGFNFPGRGTTYSNWKWQWFHFDGTDWDQSRSLSRIFKFDGKAWDWEVSSENGNYDYLMYADYDYDHPDVVNEMKKWGVWYANEVGLDGYRLDAVKHIKFQFLKDWVDNARAATGKEMFTVGEYWQNDLGALNNYLAKVNYNQSLFDAPLHYNFYAASTGGGYYDMRNILNNTLVASNPTKAVTLVENHDTQPGQSLESTVQPWFKPLAYAFILTRSGGYPSVFYGDMYGTKGTTTREIPALKSKIEPLLKARWDYAYGTQRDYIDNPDVIGWTREGDSTKAKSGLATVITDGPGGSKRMYVGTSNAGEIWYDLTGNRTDKITIGSDGYATFPVNGGSVSVWVQQ

SEQ ID NO: 38512 - protein, 480 aa, Cytophaga sp.
NGTMMQYFEWYVPNDGQQWNRLRTDAPYLSSVGITAVWTPPAYKGTSQADVGYGPYDLYDLGEFNQKGTVRTKYGTKGELKSAVNTLHSNGIQVYGDVVMNHKAGADYTENVTAVEVNPSNRYQETSGEYNIQAWTGFNFPGRGTTYSNWKWQWFHFDGTDWDQSRSLSRIFKFDGKAWDWEVSSENGNYDYLMYADYDYDHPDVVNEMKKWGVWYANEVGLDGYRLDAVKHIKFQFLKDWVDNARAATGKEMFTVGEYWQNDLGALNNYLAKVNYNQSLFDAPLHYNFYAASTGGGYYDMRNILNNTLVASNPTKAVTLVENHDTQPGQSLESTVQPWFKPLAYAFILTRSGGYPSVFYGDMYGTKGTTTREIPALKSKIEPLLKARKDYAYGTQRDYIDNPDVIGWTREGDSTKAKSGLATVITDGPGGSKRMYVGTSNAGEIWYDLTGNRTDKITIGSDGYATFPVNGGSVSVWKQQ

SEQ ID NO: 38513 - protein, 480 aa, Cytophaga sp.
NGTMMQYFEWYVPNDGQQWNRLRTDAPYLSSVGITAVWTPPAYKGTSQADVGYGPYDLYDLGEFNQKGTVRTKYGTKGELKSAVNTLHSNGIQVYGDVVMNHKAGADYTENVTAVEVNPSNRYQETSGEYNIQAWTGFNFPGRGTTYSNWKWQWFHFDGTDWDQSRSLSRIFKFDGKAWDWEVSSENGNYDYLMYADYDYDHPDVVNEMKKWGVWYANEVGLDGYRLDAVKHIKFQFLKDWVDNARAATGKEMFTVGEYWQNDLGALNNYLAKVNYNQSLFDAPLHYNFYAASTGGGYYDMRNILNNTLVASNPTKAVTLVENHDTQPGQSLESTVQPWFKPLAYAFILTRSGGYPSVFYGDLYGTKGTTTREIPALKSKIEPLLKARKDYAYGTQRDYIDNPDVIGWTREGDSTKAKSGLATVITDGPGGSKRMYVGTSNAGEIWYDLTGNRTDKITIGSDGYATFPVNGGSVSVWVQQ

SEQ ID NO: 38514 - protein, 480 aa, Cytophaga sp.
NGTMMQYFEWYVPNDGQQWNRLRTDAPYLSSVGITAVWTPPAYKGTSQADVGYGPYDLYDLGEFNQKGTVRTKYGTKGELKSAVNTLHSNGIQVYGDVVMNHKAGADYTENVTAVEVNPSNRYQETSGEYNIQAWTGFNFPGRGTTYSNWKWQWFHFDGTDWDQSRSLSRIFKFDGKAWDWEVSSENGNYDYLMYADYDYDHPDVVNEMKKWGVWYANEVGLDGYRLDAVKHIKFQFLKDWVDNARAATGKEMFTVGEYWNNDLGALNNYLAKVNYNQSLFDAPLHYNFYAASTGGGYYDMRNILNNTLVASNPTKAVTLVENHDTQPGQSLESTVQPWFKPLAYAFILTRSGGYPSVFYGDMYGTKGTTTREIPALKSKIEPLLKARKDYAYGTQRDYIDNPDVIGWTREGDSTKAKSGLATVITDGPGGSKRMYVGTSNAGEIWYDLTGNRTDKITIGSDGYATFPVNGGSVSVWVQQ

SEQ ID NO: 38515 - protein, 480 aa, Cytophaga sp.
NGTMMQYFEWYVPNDGQQWNRLRTDAPYLSSVGITAVWTPPAYKGTSQADVGYGPYDLYDLGEFNQKGTVRTKYGTKGELKSAVNTLHSNGIQVYGDVVMNHKAGADYTENVTAVEVNPSNRYQEVSGEYNIQAWTGFNFPGRGTTYSNWKWQWFHFDGTDWDQSRSLSRIFKFDGKAWDWEVSSENGNYDYLMYADYDYDHPDVVNEMKKWGVWYANEVGLDGYRLDAVKHIKFQFLKDWVDNARAATGKEMFTVGEYWQNDLGALNNYLAKVNYNQSLFDAPLHYNFYAASTGGGYYDMRNILNNTLVASNPTKAVTLVENHDTQPGQSLESTVQPWFKPLAYAFILTRSGGYPSVFYGDMYGTKGTTTREIPALKSKIEPLLKARKDYAYGTQRDYIDNPDVIGWTREGDSTKAKSGLATVITDGPGGSKRMYVGTSNAGEIWYDLTGNRTDKITIGSDGYATFPVNGGSVSVWVQQ

SEQ ID NO: 38516 - protein, 480 aa, Cytophaga sp.
NGTMMQYFEWYVPNDGQQWNRLRTDAPYLSSVGITAVWTPPAYKGTSQADVGYGPYDLYDLGEFNQKGTVRTKYGTKGELKSAVNTLHSNGIQVYGDVVMNHKAGADYTENVTAVEVNPSNRYLETSGEYNIQAWTGFNFPGRGTTYSNWKWQWFHFDGTDWDQSRSLSRIFKFDGKAWDWEVSSENGNYDYLMYADYDYDHPDVVNEMKKWGVWYANEVGLDGYRLDAVKHIKFQFLKDWVDNARAATGKEMFTVGEYWQNDLGALNNYLAKVNYNQSLFDAPLHYNFYAASTGGGYYDMRNILNNTLVASNPTKAVTLVENHDTQPGQSLESTVQPWFKPLAYAFILTRSGGYPSVFYGDMYGTKGTTTREIPALKSKIEPLLKARKDYAYGTQRDYIDNPDVIGWTREGDSTKAKSGLATVITDGPGGSKRMYVGTSNAGEIWYDLTGNRTDKITIGSDGYATFPVNGGSVSVWVQQ

SEQ ID NO: 38517 - protein, 480 aa, Cytophaga sp.
NGTMMQYFEWYVPNDGQQWNRLRTDAPYLSSVGITAVWTPPAYKGTSQADVGYGPYDLYDLGEFNQKGTVRTKYGTKGELKSAVNTLHSNGIQVYGDVVMNHKAGADYWENVTAVEVNPSNRYQETSGEYNIQAWTGFNFPGRGTTYSNWKWQWFHFDGTDWDQSRSLSRIFKFDGKAWDWEVSSENGNYDYLMYADYDYDHPDVVNEMKKWGVWYANEVGLDGYRLDAVKHIKFQFLKDWVDNARAATGKEMFTVGEYWQNDLGALNNYLAKVNYNQSLFDAPLHYNFYAASTGGGYYDMRNILNNTLVASNPTKAVTLVENHDTQPGQSLESTVQPWFKPLAYAFILTRSGGYPSVFYGDMYGTKGTTTREIPALKSKIEPLLKARKDYAYGTQRDYIDNPDVIGWTREGDSTKAKSGLATVITDGPGGSKRMYVGTSNAGEIWYDLTGNRTDKITIGSDGYATFPVNGGSVSVWVQQ

SEQ ID NO: 38518 - protein, 480 aa, Cytophaga sp.
NGTMMQYFEWYVPNDGQQWNRLRTDAPYLSSVGITAVWTPPAYKGTSQADVGYGPYDLYDLGEFNQKGTVRTKYGTKGELKSAVNTLHSNGIQVYGDVVMNHKAGADYTENVTAVEVNPSNRYQETSGEYNIQAWTGFNFPGRGTTYSNWKWQWFHFDGTDWDQSRSLSRIFKFDGKAWDWEVSSENGNYDYLMYADYDYDHPDVVNEMKKWGVWYANEVGLDGYRLDAVKHIKFQFLKDWVDNARAATGKEMFTVGEYWQNDLGALNNYLAKVNYNQSLFDAPLHYNFYAASTGGGYYDMRNILNNTLVASNPTKAVTLVENHDTQPGQSLESTVQPWFKPLAYAFILTRSGGYPSVFYGDMYGTKGTTTREIPALKSKIEPLLKARKDYAYGTQRDYIDNPDVIGWTREGDSTKAKSGLATVITDGPGGSKRMYVGTSNADEIWYDLTGNRTDKITIGSDGYATFPVNGGSVSVWVQQ

SEQ ID NO: 38519 - protein, 480 aa, Cytophaga sp.
NGTMMQYFEWYVPNDGQQWNRLRTDAPYLSSVGITAVWTPPAYKGTSQADVGYGPYDLYDLGEFNQKGTVRTKYGTKGELKSAVNTLHSNGIQVYGDVVMNHKAGADYTENVTAVEVNPSNRYQETSGEYNIQAWTGFNFPGRGTTYSNWKWQWFHFDGTDWDQSRSLSRIFKFDGKAWDWEVSSENGNYDYLMYADYDYDHPDVVNEMKKWGVWYANEVGLDGYRLDAVKHIKFQFLKDWVDNARAATGKEMFTVGEYWQNDLGALNNYLAKVNYNQSLFDAPLHYNFYAASTGGGYYDMRNILNNTLVASNPTKAVTLVENHDTQPGQSLESTVQPWFKPLAYAFILTRSGGYPSVFYGDMYGTKGTTTREIPALKSKIEPLLKARKDYAYGTQRDYIDNPDVIGWTREGDSTKAKSGLATVITDGPGQSKRMYVGTSNAGEIWYDLTGNRTDKITIGSDGYATFPVNGGSVSVWVQQ

SEQ ID NO: 38520 - protein, 480 aa, Cytophaga sp.
NGTMMQYFEWYVPNDGQQWNRLRTDAPYLSSVGITAVWTPPAYKGTSQADVGYGPYDLYDLGEFNQKGSVRTKYGTKGELKSAVNTLHSNGIQVYGDVVMNHKAGADYTENVTAVEVNPSNRYQETSGEYNIQAWTGFNFPGRGTTYSNWKWQWFHFDGTDWDQSRSLSRIFKFDGKAWDWEVSSENGNYDYLMYADYDYDHPDVVNEMKKWGVWYANEVGLDGYRLDAVKHIKFQFLKDWVDNARAATGKEMFTVGEYWQNDLGALNNYLAKVNYNQSLFDAPLHYNFYAASTGGGYYDMRNILNNTLVASNPTKAVTLVENHDTQPGQSLESTVQPWFKPLAYAFILTRSGGYPSVFYGDMYGTKGTTTREIPALKSKIEPLLKARKDYAYGTQRDYIDNPDVIGWTREGDSTKAKSGLATVITDGPGGSKRMYVGTSNAGEIWYDLTGNRTDKITIGSDGYATFPVNGGSVSVWVQQ

SEQ ID NO: 38521 - protein, 480 aa, Cytophaga sp.
NGTMMQYFEWYVPNDGQQWNRLRTDAPYLSSVGITAVWTPPAYKGTSQADVGYGPYDLYDLGEFNQKGTVRTKYGTKGELKSAVNTLHSNGIQVYGDVVMNHKAGADYTENVTAVEVNPSNRYQETSGEYNIQAWTGFNFPGRGTTYSNWKWQWFHFDGTDWDQSRSLSRIFKFDGKAWDWEVSSENGNYDYLMYADYDYDHPDVVNEMKKWGVWYANEVGLDGYRLDAVKHIKFQFLKDWVDNARAATGKEMFTVGEYWQNDLGALNNYLAKVNYNQSLFDAPLHYNFYAASTGGGYYDMRNILNNTLVASNPTKAVTLVENHDTQPGQSLESTVQPWFKPLAYAFILTRSGGYPSVFYGDMYGTKGTTTREIPALKSKIEPLLKARKDYAYGTQRDYIDNPDVIGWTREGDGTKAKSGLATVITDGPGGSKRMYVGTSNAGEIWYDLTGNRTDKITIGSDGYATFPVNGGSVSVWVQQ

SEQ ID NO: 38522 - protein, 480 aa, Cytophaga sp.
NGTMMQYFEWYVPNDGQQWNRLRTDAPYLSSVGITAVWTPPAYKGTSQADVGYGPYDLYDLGEFNQKGTVRTKYGTKGELKSAVNTLHSNGIQVYGDVVMNHKAGADYTENVTAVEVNPSNRYQETSGEYNIQAWTGFNFPGRGTTYSNWKWQWFHFDGTDWDQSRSLSRIFKFDGKAWDWEVSSENGNYDYLMYADYDYDHPDVVNEMKKWGVWYANEVGLDGYRLDAVKHIKFQFLKDWVDNARAATGKEMFTVGEYWQNDLGALNNYLAKVNYNQSLFDAPLHYNFYAASTGGGYYDMRNILNNTLVASNPTKAVTLVENHDTQPGQSLESTVQPWFKPLAYAFILTRSGGYPSVFYGDMYGTKGTTTREIPALKSKIEPLLKARKDYAYGTQRDYIDNPDVIGWTREGDSTKAKSGLATVITDGPGNSKRMYVGTSNAGEIWYDLTGNRTDKITIGSDGYATFPVNGGSVSVWVQQ

SEQ ID NO: 38523 - protein, 480 aa, Cytophaga sp.
NGTMMQYFEWYVPNDGQQWNRLRTDAPYLSSVGITAVWTPPAYKGTSQADVGYGPYDLYDLGEFNQKGTVRTKYGTKGELKSAVNTLHSNGIQVYGDVVMNHKAGADYTENVTAVEVNPSNRYQETSGEYNIQAWTGFNFPGRGTTYSNWKWQWFHFDGTDWDQSRSLSRIFKFDGKAWDWEVSSENGNYDYLMYADYDYDHPDVVNEMKKWGVWYANEVGLDGYRLDAVKHIKFQFLKDWVDNARAATGKEMFTVGEYWQNDLGALNNYLAKVNYNQSLFDAPLHYNFYAASTGGGYYDMRNILNNTLVASNPTKAVTLVENHDTQPGQSLESTVAPWFKPLAYAFILTRSGGYPSVFYGDMYGTKGTTTREIPALKSKIEPLLKARKDYAYGTQRDYIDNPDVIGWTREGDSTKAKSGLATVITDGPGGSKRMYVGTSNAGEIWYDLTGNRTDKITIGSDGYATFPVNGGSVSVWVQQ

SEQ ID NO: 38524 - protein, 480 aa, Cytophaga sp.
NGTMMQYFEWYVPNDGQQWNRLRTDAPYLSSVGITAVWTPPAYKGTSQADVGYGPYDLYDLGEFNQKGTVRTKYGTKGELKSAVNTLHSNGIQVYGDVVMNHKAGADYTENVTAVEVNPSNRYQETSGEYNIQAWTGFNFPGRGTTYSNWKWQWFHFDGTDWDQSRSLSRIFKFDGKAWDWEVSSENGNYDYLMYADYDYDHPDVVNEMKKWGVWYANEVGLDGYRLDAVKHIKFQFLKDWVDNARAATGKEMFTVGEYWQNDLGALNNYLAKVNYNQSLFDAPLHYNFYIASTGGGYYDMRNILNNTLVASNPTKAVTLVENHDTQPGQSLESTVQPWFKPLAYAFILTRSGGYPSVFYGDMYGTKGTTTREIPALKSKIEPLLKARKDYAYGTQRDYIDNPDVIGWTREGDSTKAKSGLATVITDGPGGSKRMYVGTSNAGEIWYDLTGNRTDKITIGSDGYATFPVNGGSVSVWVQQ

SEQ ID NO: 38525 - protein, 480 aa, Cytophaga sp.
NGTMMQYFEWYVPNDGQQWNRLRTDAPYLSSVGITAVWTPPAYKGTSQADVGYGPYDLYDLGEFNQKGTVRTKYGTKGELKSAVNTLHSNGIQVYGDVVMNHKAGADYTENVTAVEVNPSNRYQETSGEYNIQAWTGFNFPGRGTTYSNWKWQWFHFDGTDWDQSRSLSRIFKFDGKAWDWEVSSENGNYDYLMYADYDYDHPDVVNEMKKWGVWYANEVGLDGYRLDAVKHIKFQFLKDWVDNARAATGKEMFTVGEYWQNDLGALNNYLAKVNYNQSLFDAPLHYNFYAASTGGGYYDMRNILNNTLVASNPTKAVTLVENHDTQPGQSLESTVQPWFKPLAYAFILTRSGGYPSVFYGDMYGTKGTTTREIPALKSKIEPLLKARKDYAYGTQRDYFDNPDVIGWTREGDSTKAKSGLATVITDGPGGSKRMYVGTSNAGEIWYDLTGNRTDKITIGSDGYATFPVNGGSVSVWVQQ

SEQ ID NO: 38526 - protein, 480 aa, Cytophaga sp.
NGTMMQYFEWYVPNDGQQWNRLRTDAPYLSSVGITAVWTPPAYKGTSQADVGYGPYDLYDLGEFNQKGTVRTKYGTKGELKSAVNTLHSNGIQVYGDVVMNHKAGADYTENVTAVEVNPSNRYQETSGEYNIQAWTGFNFPGRGTTYSNWKWQWFHFDGTDWDQSRSLSRIFKFDGKAWDWEVSSENGNYDYLMYADYDYDHPDVVNEMKKWGVWYANEVGLDGYRLDAVKHIKFQFLKDWVDNARAATGKEMFTVGEYWQHDLGALNNYLAKVNYNQSLFDAPLHYNFYAASTGGGYYDMRNILNNTLVASNPTKAVTLVENHDTQPGQSLESTVQPWFKPLAYAFILTRSGGYPSVFYGDMYGTKGTTTREIPALKSKIEPLLKARKDYAYGTQRDYIDNPDVIGWTREGDSTKAKSGLATVITDGPGGSKRMYVGTSNAGEIWYDLTGNRTDKITIGSDGYATFPVNGGSVSVWVQQ

SEQ ID NO: 38527 - protein, 480 aa, Cytophaga sp.
NGTMMQYFEWYVPNDGQQWNRLRTDAPYLSSVGITAVWTPPAYKGTSQADVGYGPYDLYDLGEFNQKGTVRTKYGTKGELKSAVNTLHSNGIQVYGDVVMNHKAGADYTENVTAVEVNPSNRYQETSGEYNIQAWTGFNFPGRGTTYSNWKWQWFHFDGTDWDQSRSLSRIFKFDGKAWDWEVSSENGNYDYLMYADYDYDHPDVVNEMKKWGVWYANEVGLDGYRLDAVKHIKFQFLKDWVDNARAATGKEMFTVGEYWQNDLGALNNYLAKVNYNQSLFDAPLHYNFYAASTGGGYYDMRNILNNTLVASNPTKAVTLVENHDTQPGQSLESTVQPWFKPLAYAFILTRSGGYPSVFYGDMYGTKGTTTREIPALKSKIEPLLKARKDYAYGTQRDYIDNPDFIGWTREGDSTKAKSGLATVITDGPGGSKRMYVGTSNAGEIWYDLTGNRTDKITIGSDGYATFPVNGGSVSVWVQQ

SEQ ID NO: 38528 - protein, 480 aa, Cytophaga sp.
NGTMMQYFEWYVPNDGQQWNRLRTDAPYLSSVGITAVWTPPAYKGTSQADVGYGPYDLYDLGEFNQKGTVRTKYGTKGELKSAVNTLHSNGIQVYGDVVMNHKAGADYTENVTAVEVNPSNRYQETSGEYNIQAWTGFNFPGRGTTYSNWKWQWFHFDGTDWDQSRSLSRIFKFDGKAWDWEVSSENGNYDYLMYADYDYDHPDVVNEMKKWGVWYANEVGLDGYRLDAVKHIKFQFLKDWVDNARAATGKEMFTVGEYWQNDLGALNNYLAKVNYNQSLFDAPLHYNFYAASTGGGYYDMRNILNNTLVASNPTKAVTLVENHDTQPGQSLESTVQPWFKPLAYAFILTRSGGYPSVFYGDMYGTKGTTTREIPALKSKIEPLLKARKDYAYGTQRDYIDNPDVIGWTREGKSTKAKSGLATVITDGPGGSKRMYVGTSNAGEIWYDLTGNRTDKITIGSDGYATFPVNGGSVSVWVQQ

SEQ ID NO: 38529 - protein, 480 aa, Cytophaga sp.
NGTMMQYFEWYVPNDGQQWNRLRTDAPYLSSVGITAVWTPPAYKGTSQADVGYGPYDLYDLGEFNQKGTVRTKYGTKGELKSAVNTLHSNGIQVYGDVVMNHKAGADYTENVTAVEVNPSNRYQETSGEYNIQAWTGFNFPGRGTTYSNWKWQWFHFDGTDWDQTRSLSRIFKFDGKAWDWEVSSENGNYDYLMYADYDYDHPDVVNEMKKWGVWYANEVGLDGYRLDAVKHIKFQFLKDWVDNARAATGKEMFTVGEYWQNDLGALNNYLAKVNYNQSLFDAPLHYNFYAASTGGGYYDMRNILNNTLVASNPTKAVTLVENHDTQPGQSLESTVQPWFKPLAYAFILTRSGGYPSVFYGDMYGTKGTTTREIPALKSKIEPLLKARKDYAYGTQRDYIDNPDVIGWTREGDSTKAKSGLATVITDGPGGSKRMYVGTSNAGEIWYDLTGNRTDKITIGSDGYATFPVNGGSVSVWVQQ

SEQ ID NO: 38530 - protein, 480 aa, Cytophaga sp.
NGTMMQYFEWYVPNDGQQWNRLRTDAPYLSSVGITAVWTPPAYKGTSQADVGYGVYDLYDLGEFNQKGTVRTKYGTKGELKSAVNTLHSNGIQVYGDVVMNHKAGADYTENVTAVEVNPSNRYQETSGEYNIQAWTGFNFPGRGTTYSNWKWQWFHFDGTDWDQSRSLSRIFKFDGKAWDWEVSSENGNYDYLMYADYDYDHPDVVNEMKKWGVWYANEVGLDGYRLDAVKHIKFQFLKDWVDNARAATGKEMFTVGEYWQNDLGALNNYLAKVNYNQSLFDAPLHYNFYAASTGGGYYDMRNILNNTLVASNPTKAVTLVENHDTQPGQSLESTVQPWFKPLAYAFILTRSGGYPSVFYGDMYGTKGTTTREIPALKSKIEPLLKARKDYAYGTQRDYIDNPDVIGWTREGDSTKAKSGLATVITDGPGGSKRMYVGTSNAGEIWYDLTGNRTDKITIGSDGYATFPVNGGSVSVWVQQ

SEQ ID NO: 38531 - protein, 480 aa, Cytophaga sp.
NGTMMQYFEWYVPNDGQQWNRLRTDAPYLSSVGITAVWTPPAYKGTSQADVGYGPYDLYDLGEFNQKGTVRTKYGTKGELKSAVNTLHSNGIQVYGDVVMNHKAGADYTENVTAVEVNPSNRYQETSGEYNIQAWTGFNFPGRGTTYSNWKWQWFHFDGTDWDQSRSLSRIFKFDGKAWDWEVSSENGNYDYLMYADYDYDHPDVVNEMKKWGVWYANEVGLDGYRLDAVKHIKFQFLKDWVDNARAATGKEMFTVGEYWQNDLGALNNYLAKVNYNQSLFDAPLHYNFYAASTGGGYYDMRNILNNTLVASNPTKAVTLVENHDTQPGQSLESTVQPWFKPLAYAFILTRSGGYPSVFYGDMYGTKGTTTREIPALKSKIEPLLKARKDYAYGTQRDYIDNPDVIGWTREGDSTKAKSGLATVITDGPGGSKRMAVGTSNAGEIWYDLTGNRTDKITIGSDGYATFPVNGGSVSVWVQQ

SEQ ID NO: 38532 - protein, 480 aa, Cytophaga sp.
NGTMMQYFEWYVPNDGQQWNRLRTDAPYLSSVGITAVWTPPAYKGTSQADVGYGPYDLYDLGEFNQKGTVRTKYGTKGELKSAVNTLHSNGIQVYGDVVMNHKAGADYTENVTAVEVNPSNRYQETSGEYNIQAWTGFNFPGRGTTYSNWKWQWFHFDGTDWDQSRSLSRIFKFDGKAWDWEVSSENGNYDYLMYADYDYDHPDVVNEMKKWGVWYANEVGLDGYRLDAVKHIKFQFLKDWVDNARAATGKEMFTVGEYWQNDLGALNNYLAKVNYNQSLFDAPLHYNFYAASTGGGYYDMRNILNNTLVASNPTKAVTLVENHDTQPGQSLESTVQPWFKPLAYAFILTRSGGYPSVFYGDMYGTKGTTTREIPALKSKIEPLLKARKDYACGTQRDYIDNPDVIGWTREGDSTKAKSGLATVITDGPGGSKRMYVGTSNAGEIWYDLTGNRTDKITIGSDGYATFPVNGGSVSVWVQQ

SEQ ID NO: 38533 - protein, 480 aa, Cytophaga sp.
NGTMMQYFEWYVPNDGQQWNRLRTDAPYLSSVGITAVWTPPAYKGTSQADVGYGPYDLYDLGEFNQKGTVRTKYGTKGELKSAVNTLHSNGIQVYGDVVMNHKAGADYTENVTAVEVNPSNRYQERSGEYNIQAWTGFNFPGRGTTYSNWKWQWFHFDGTDWDQSRSLSRIFKFDGKAWDWEVSSENGNYDYLMYADYDYDHPDVVNEMKKWGVWYANEVGLDGYRLDAVKHIKFQFLKDWVDNARAATGKEMFTVGEYWQNDLGALNNYLAKVNYNQSLFDAPLHYNFYAASTGGGYYDMRNILNNTLVASNPTKAVTLVENHDTQPGQSLESTVQPWFKPLAYAFILTRSGGYPSVFYGDMYGTKGTTTREIPALKSKIEPLLKARKDYAYGTQRDYIDNPDVIGWTREGDSTKAKSGLATVITDGPGGSKRMYVGTSNAGEIWYDLTGNRTDKITIGSDGYATFPVNGGSVSVWVQQ

SEQ ID NO: 38534 - protein, 480 aa, Cytophaga sp.
NGTMMQYFEWYVPNDGQQWNRLRTDAPYLSSVGITAVWTPPAYKGTSQADVGYGPYDLYDLGEFNQKGTVRTKYGTKGELKSAVNTLHSNGIQVYGDVVMNHKAGADYTENVTAVEVNPSNRYQETSGEYNIQAWTGFNFPGRGTTYSNWKWQWFHFDGTDWDQSRSLSRIFKFDGKAWDWEVSSENGNYDYLMYADYDYDHPDVVNEMKKWGVWYANEVGLDGYRLDAVKHIKFQFLKDWVDNARAATGKEMFTVGEYWQNDLGALNNYLAKVNYNQSLFDAPLHYNFYAASTGGGYYDMRNILNNTLVASNPTKAVTLVENHDTQPGQSLESTVQPWFKPLAYAFILTRSGGYPSVFYGDMYGTKGTTTREIPALKSKIEPLLKARKDYAYGTQRDYIDNPDVIGWTREGDSTKAKSGLATVITDGPGGSKRMYVGTSNAGEIWYDLTGNRTDKITILSDGYATFPVNGGSVSVWVQQ

SEQ ID NO: 38535 - protein, 480 aa, Cytophaga sp.
NGTMMQYFEWYVPNDGQQWNRLRTDAPYLSSVGITAVWTPPAYKGTSQADVGYGPYDLYDLGEFNQKGTVRTKYGTKGELKSAVNTLHSNGIQVYGDVVMNHKAGADYTENVTAVEVNNSNRYQETSGEYNIQAWTGFNFPGRGTTYSNWKWQWFHFDGTDWDQSRSLSRIFKFDGKAWDWEVSSENGNYDYLMYADYDYDHPDVVNEMKKWGVWYANEVGLDGYRLDAVKHIKFQFLKDWVDNARAATGKEMFTVGEYWQNDLGALNNYLAKVNYNQSLFDAPLHYNFYAASTGGGYYDMRNILNNTLVASNPTKAVTLVENHDTQPGQSLESTVQPWFKPLAYAFILTRSGGYPSVFYGDMYGTKGTTTREIPALKSKIEPLLKARKDYAYGTQRDYIDNPDVIGWTREGDSTKAKSGLATVITDGPGGSKRMYVGTSNAGEIWYDLTGNRTDKITIGSDGYATFPVNGGSVSVWVQQ

SEQ ID NO: 38536 - protein, 480 aa, Cytophaga sp.
NGTMMQYFEWYVPNDGQQWNRLRTDAPYLSSVGITAVWTPPAYKGTSQADVGYGPYDLYDLGEFNQKGTVRTKYGTKGELKSAVNTLHSNGIQVYGDVVMNHKAGADYTENVTAVEVNPSNRYQETSGEYNIQAWTGFNFPGRGTTYSNWKWQWFHFDGTDWDQSRSLSRIFKFDGKAWDWIVSSENGNYDYLMYADYDYDHPDVVNEMKKWGVWYANEVGLDGYRLDAVKHIKFQFLKDWVDNARAATGKEMFTVGEYWQNDLGALNNYLAKVNYNQSLFDAPLHYNFYAASTGGGYYDMRNILNNTLVASNPTKAVTLVENHDTQPGQSLESTVQPWFKPLAYAFILTRSGGYPSVFYGDMYGTKGTTTREIPALKSKIEPLLKARKDYAYGTQRDYIDNPDVIGWTREGDSTKAKSGLATVITDGPGGSKRMYVGTSNAGEIWYDLTGNRTDKITIGSDGYATFPVNGGSVSVWVQQ

SEQ ID NO: 38537 - protein, 480 aa, Cytophaga sp.
NGTMMQYFEWYVPNDGQQWNRLRTDAPYLSSVGITAVWTPPAYKGTSQADVGYGPYDLYDLGEFNQKGTVRTKYGTKGELKSAVNTLHSNGIQVYGDVVMNHKAGADYTENVTAVEVNPSNRYQETSGEYNIQAWTGFNFPGRGTTYSNWKWQWFHFDGTDWDQSRSLSRIFKFDGKAWDWEVSSENGNYDYLMYADYDYDHPDVVNEMKKWGVWYANEVGLDGYRLDAVKHIKFQFLKDWVDNARAATGKEMFTVGEYWQNDLGALNNYLAKVNYNQSLFDAPLHYNFYAASTGGGYYDMRNILNNTLVASNPTKAVTLVENHDTQPGQSLESTVQPWFKPLAYAFILTRSGGYPSVFYGDMYGTKGTTTREIPALKSKIEPLLKARKDYAYGTQRDYLDNPDVIGWTREGDSTKAKSGLATVITDGPGGSKRMYVGTSNAGEIWYDLTGNRTDKITIGSDGYATFPVNGGSVSVWVQQ

SEQ ID NO: 38538 - protein, 480 aa, Cytophaga sp.
NGTMMQYFEWYVPNDGQQWNRLRTDAPYLSSVGITAVWTPPAYKGTSQADVGYGPYDLYDLGEFNQKGTVRTKYGTKGELKSAVNTLHSNGIQVYGDVVMNHKAGADYTENVTAVEVNPSNRYQETSGEYNIQAWTGFNFPGRGTTYSNWKWQWFHFDGTDWDQSRSLSRIFKFDGKAWDWEVSSENGNYDYLMYADYDYDHPDVVNEMKKWGVWYACEVGLDGYRLDAVKHIKFQFLKDWVDNARAATGKEMFTVGEYWQNDLGALNNYLAKVNYNQSLFDAPLHYNFYAASTGGGYYDMRNILNNTLVASNPTKAVTLVENHDTQPGQSLESTVQPWFKPLAYAFILTRSGGYPSVFYGDMYGTKGTTTREIPALKSKIEPLLKARKDYAYGTQRDYIDNPDVIGWTREGDSTKAKSGLATVITDGPGGSKRMYVGTSNAGEIWYDLTGNRTDKITIGSDGYATFPVNGGSVSVWVQQ

SEQ ID NO: 38539 - protein, 480 aa, Cytophaga sp.
NGTMMQYFEWYVPNDGQQWNRLRTDAPYLSSVGITAVWTPPAYKGTSQADVGYGPYDLYDLGEFNQKGTVRTKYGTKGELKSAVNTLHSNGIQVYGDVVMNHKAGADYTENVTAVEVNPSNRYQETSGEYNIQAWTGFNFPGRGTTYSNWKWQWFHFDGTDWDQSRSLSRIFKFDGKAWDWEVSSENGNYDYLMYADYDYDHPDVVNEMKKWGVWYANEVGLDGYRLDAVKHIKFQFLKDWVDNARAATGKEMFTVGEYWQNDLGALNNYLAKVNYNQSLFDAPLHYNFYAASTGGGYYDMRNILNNTLVASNPTKAVTLVENHDTQPGQSLESTVQPWFKPLAYAFILTRSGGYPSVFYGDMYGTKGTTTREIPALKSKIEPLLKARKDMAYGTQRDYIDNPDVIGWTREGDSTKAKSGLATVITDGPGGSKRMYVGTSNAGEIWYDLTGNRTDKITIGSDGYATFPVNGGSVSVWVQQ

SEQ ID NO: 38540 - protein, 480 aa, Cytophaga sp.
NGTMMQYFEWYVPNDGQQWNRLRTDAPYLSSVGITAVWTPPAYKGTSQADVGYGPYDLYDLGEFNQKGTVRTKYGTKGELKSAVNTLHSNGIQVYGDVVMNHKAGADYTENVTAVEVNPSNRYQETSGEYNIQAWTGFNFPGRGTTYSNWKWQWFHFDGTDWDQSRSLSRIFKFDGKAWDWEVSSENGNYDYLMYADYDYDHPDVVNEMKKWGVWYANEVGLDGYRLDAVKHIKFQFLKDWVDNARAATGKEMFTVGEYWQNDLGALNNYLAKVNYNQSLFDAPLHYNFYAASTGGGYYDMRNILNNTLVASNPTKAVTLVENHDTQPGQSLESTVQPWFKPCAYAFILTRSGGYPSVFYGDMYGTKGTTTREIPALKSKIEPLLKARKDYAYGTQRDYIDNPDVIGWTREGDSTKAKSGLATVITDGPGGSKRMYVGTSNAGEIWYDLTGNRTDKITIGSDGYATFPVNGGSVSVWVQQ

SEQ ID NO: 38541 - protein, 480 aa, Cytophaga sp.
NGTMMQYFEWYVPNDGQQWNRLRTDAPYLSSVGITAVWTPPAYKGTSQADVGYGPYDLYDLGEFNQKGTVRTKYGNKGELKSAVNTLHSNGIQVYGDVVMNHKAGADYTENVTAVEVNPSNRYQETSGEYNIQAWTGFNFPGRGTTYSNWKWQWFHFDGTDWDQSRSLSRIFKFDGKAWDWEVSSENGNYDYLMYADYDYDHPDVVNEMKKWGVWYANEVGLDGYRLDAVKHIKFQFLKDWVDNARAATGKEMFTVGEYWQNDLGALNNYLAKVNYNQSLFDAPLHYNFYAASTGGGYYDMRNILNNTLVASNPTKAVTLVENHDTQPGQSLESTVQPWFKPLAYAFILTRSGGYPSVFYGDMYGTKGTTTREIPALKSKIEPLLKARKDYAYGTQRDYIDNPDVIGWTREGDSTKAKSGLATVITDGPGGSKRMYVGTSNAGEIWYDLTGNRTDKITIGSDGYATFPVNGGSVSVWVQQ

SEQ ID NO: 38542 - protein, 480 aa, Cytophaga sp.
NGTMMQYFEWYVPNDGQQWNRLRTDAPYLSSVGITAVWTPPAYKGTSQADVGYGPYDLYDLGEFNQKGTVRTKYGTKGELKSAVNTLHWNGIQVYGDVVMNHKAGADYTENVTAVEVNPSNRYQETSGEYNIQAWTGFNFPGRGTTYSNWKWQWFHFDGTDWDQSRSLSRIFKFDGKAWDWEVSSENGNYDYLMYADYDYDHPDVVNEMKKWGVWYANEVGLDGYRLDAVKHIKFQFLKDWVDNARAATGKEMFTVGEYWQNDLGALNNYLAKVNYNQSLFDAPLHYNFYAASTGGGYYDMRNILNNTLVASNPTKAVTLVENHDTQPGQSLESTVQPWFKPLAYAFILTRSGGYPSVFYGDMYGTKGTTTREIPALKSKIEPLLKARKDYAYGTQRDYIDNPDVIGWTREGDSTKAKSGLATVITDGPGGSKRMYVGTSNAGEIWYDLTGNRTDKITIGSDGYATFPVNGGSVSVWVQQ

SEQ ID NO: 38543 - protein, 480 aa, Cytophaga sp.
NGTMMQYFEWYVPNDGQQWNRLRTDAPYLSSVGITAVWTPPAYKGTSQADVGYGPYDLYDLGEFNQKGTVRTKYGTKGELKSAVNTLHSNGIQVYGDVVMNHKAGADYTENVTAVEVNPSNRYQETSGEYNIQAWTGFNFPGRGTTYSNWKWQWFHFDGTDWDQSRSLSRIFKFDGKAWDWEVSSENGNYDYLMYADYDYDHPDVVNEMKKWGVWYANEVGLDGYRLDAVKHIKFQFLKDWVDNARAATGKEMFTVGEYWQNDLGALNNYLAKVNYNQSLFDAPLHYNFYAASTGGGYYDMRNILNNTLVASNPTKAVTLVENHDTQPGQSLESTVQPWFKPLAYAFILTRSGGYPSVFYGDMYGTKGTTTREIPALKSKIEPLLKARKDYAYGTQRDYIDNPDVIGWTREGDSTKAKSGLATVITDGPGGSKRMYVGTSNAGEIWYDLTGNRTDKITPGSDGYATFPVNGGSVSVWVQQ

SEQ ID NO: 38544 - protein, 480 aa, Cytophaga sp.
NGTMMQYFEWYVPNDGQQWNRLRTDAPYLSSVGITAVWTPPAYKGTYQADVGYGPYDLYDLGEFNQKGTVRTKYGTKGELKSAVNTLHSNGIQVYGDVVMNHKAGADYTENVTAVEVNPSNRYQETSGEYNIQAWTGFNFPGRGTTYSNWKWQWFHFDGTDWDQSRSLSRIFKFDGKAWDWEVSSENGNYDYLMYADYDYDHPDVVNEMKKWGVWYANEVGLDGYRLDAVKHIKFQFLKDWVDNARAATGKEMFTVGEYWQNDLGALNNYLAKVNYNQSLFDAPLHYNFYAASTGGGYYDMRNILNNTLVASNPTKAVTLVENHDTQPGQSLESTVQPWFKPLAYAFILTRSGGYPSVFYGDMYGTKGTTTREIPALKSKIEPLLKARKDYAYGTQRDYIDNPDVIGWTREGDSTKAKSGLATVITDGPGGSKRMYVGTSNAGEIWYDLTGNRTDKITIGSDGYATFPVNGGSVSVWVQQ

SEQ ID NO: 38545 - protein, 480 aa, Cytophaga sp.
NGTMMQYFEWYVPNDGQQWNRLRTDAPYLSSVGITAVWTPPAYKGTSQADVGYGPYDLYDLGEFNQKGTVRTKYGTKGELKSAVNTLHSNGIQVYGDVVMNHKAGADYTENVTAVEVNPSNRYQETSGEYNIQAWTGFNFPGRGTTYSNWKWQWFHFDGTDWDQSRSLSRIFKFDGKAWDWEVSSENGNYDYLMYADYDYDHPDVVNEMKKWGVWYANEVGLDGYRLDAVKHIKFQFLKDWVDNARAATGKEMFTVGEYWQNDLGALNNYLAKVNYNQSLFDAPLHYNFYAASTGGGYYDMRNILNNTLVASNPTKAVTLVENHDTQPGQSLESTVQPWFKPLAYAFILTRSGGYPSVFYGDMYGTKGTTTREIPALKSKIEPLLKARHDYAYGTQRDYIDNPDVIGWTREGDSTKAKSGLATVITDGPGGSKRMYVGTSNAGEIWYDLTGNRTDKITIGSDGYATFPVNGGSVSVWVQQ

SEQ ID NO: 38546 - protein, 480 aa, Cytophaga sp.
NGTMMQYFEWYVPNDGQQWNRLRTDAPYLSSVGITAVWTPPAYKGTSQADVGYGPYDLYDLGEFNQKGTVRTKYGTKGELKSAVNTLHSNGIQVYGDVVMNHKAGADYTENVTAVEVNPSNRYQETSGEYNIQAWTGFNFPGRGTTYSNWKWQWFHFDGTDWDQSRSLSRIFKFDGKAWDWEVSSENGNYDYLMYADYDYDHPDVVNEMKKWGVWYANEVGLDGYRLDAVKHIKFQFLKDWVDNARAATGKEMFTVGEYWQNDLGALNNYLAKVNYNQSLFDAPLHYNFYAASTGGSYYDMRNILNNTLVASNPTKAVTLVENHDTQPGQSLESTVQPWFKPLAYAFILTRSGGYPSVFYGDMYGTKGTTTREIPALKSKIEPLLKARKDYAYGTQRDYIDNPDVIGWTREGDSTKAKSGLATVITDGPGGSKRMYVGTSNAGEIWYDLTGNRTDKITIGSDGYATFPVNGGSVSVWVQQ

SEQ ID NO: 38547 - protein, 480 aa, Cytophaga sp.
NGTMMQYFEWYVPNDGQQWNRLRTDAPYLSSVGITAVWTPPAYKGTSQADVGYGPYDLYDLGEFNQKGTVRTKYGTKGELKSAVNTLHSNGIQVYGDVVMNHKAGADYTENVTAVEVNPSNRYQETSGEYNIQAWTGFNFPGRGTTYSNWKWQWFHFDGTDWDQSRSLSRIFKFDGKAWDWEVSSENGNYDYLMYADYDYDHPDVVNEMKKWGVWYANEVGLDGYRLDAVKHIKFQFLKDWVDNARAATGKEMFTVGEYWQNDLGALNNYLAKVNYNQSLFDAPLHYNFYAASTGGGYYDMRNILNNTLVASNPTKAVTLVENHDTQPGQSLKSTVQPWFKPLAYAFILTRSGGYPSVFYGDMYGTKGTTTREIPALKSKIEPLLKARKDYAYGTQRDYIDNPDVIGWTREGDSTKAKSGLATVITDGPGGSKRMYVGTSNAGEIWYDLTGNRTDKITIGSDGYATFPVNGGSVSVWVQQ

SEQ ID NO: 38548 - protein, 480 aa, Cytophaga sp.
NGTMMQYFEWYVPNDGQQWNRLRTDAPYLSSVGITAVWTPPAYKGTSQADVGYGPYDLYDLGEFNQKGTVRTKYGTKGELKSAVNTLHSNGIQVYGDVVMNHKAGADYTENVTAVEVNPSNRYQETSGEYNIQAWTGFNFPGRGTTYSNWKWQWFHFDGTDWDQSRSLSRIFKFDGKAWDWEVSSENGNYDYLMYADYDYDHPDVVNEMKKWGVWYANEVGLDGYRLDAVKHIKFQFLKDWVDNARAATGKEMFTVGEYWQNDLGALNNYLAKVNYNQSLFDAPLHYNFYAASTGGGYYDMRNILNNTLVASNPTKAVTLVENHDTQPGQSLESTVQPWFKPLAYAFILTRSGGYPSVFYGDMYGTKGTTTREIPALKSKIEPLLKARKDYAYGTQRDYIDNPDVIGWTREGDSTKAKSGLATVITDGPGGSKRMYVGTSNAGEIWYDLTGNRTDKITIGADGYATFPVNGGSVSVWVQQ

SEQ ID NO: 38549 - protein, 480 aa, Cytophaga sp.
NGTMMQYFEWYVPNDGQQWNRLRTDAPYLSSVGITAVWTPPAYKGTSQADVGYGPYDLYDLGEFNQKGTVRTKYGTKGELKSAVNTLHSNGIQVYGDVVMNHKAGADYTENVTAVEVNPSNRYQETSGEYNIQAWTGFNFPGRGTTYSNWKWQWFHFDGTDWDQSRSLSRIFKFDGKAWDWEVSSENGNYDYLMYADYDYDHPDVVNEMKKWGVWYANEVGLDGYRLDAVKHIKFQFLKDWVDNARAATGKEMFTVGEYWQNDLGALNNYLAKVNYNQSLFDAPLHYNFYAASTGGGYYDMRNILNNTLVASNPTKAVTLVENHDTQPGQSLESTVQPWFKPLAYAFILTRSGGYPSVFYGDMYGTKGTTTREIPALNSKIEPLLKARKDYAYGTQRDYIDNPDVIGWTREGDSTKAKSGLATVITDGPGGSKRMYVGTSNAGEIWYDLTGNRTDKITIGSDGYATFPVNGGSVSVWVQQ

SEQ ID NO: 38550 - protein, 480 aa, Cytophaga sp.
NGTMMQYFEWYVPNDGQQWNRLRTDAPYLSSVGITAVWTPPAYKGTSQADVGYGPYDLYDLGEFNQKGTVRTKYGTKGELKSAVNTLHSNGIQVYGDVVMNHKAGADYTENVTAVEVNPSNRYQETSGEYNIQAWTGFNFPGRGTTYSNWKWQWFHFDGTDWDQSRSLSRIFKFDGKAWDWEVSSENGNYDYLMYADYDYDHPDVVNEMKKWGVWYANEVGLDGYRLDAVKHIKFQFLKDWVDNARAATGKEMFTVGEYWQNDLGALNNYLAKVNYNQSLFDAPLHYNFYAASTGGGYYDMRNILNNTLVASNPTKAVTLVENHDTQPGQSLESTVQPWFKPLAYAFILTRSGGYPSVFYGDMYGTKGTTTREIPALKSKIEPLLKARKDYAYGTQRDYIDNPDVIGWTREGDSTKAKSGLATVITDGPGGSKRMYVGTSNAGEIWYDLTGNRTDKITIGSDGYATFPVNGYSVSVWVQQ

SEQ ID NO: 38551 - protein, 480 aa, Cytophaga sp.
NGTMMQYFEWYVPNDGQQWNRLRTDAPYLSSVGITAVWTPPAYKGTSQADVGYGPYDLYDLGEFNQKGTVRTKYGTKGELKSAVNTLHSNGIQVYGDVVMNHKAGADYTENVTAVEVNPSNRYQETSGEYNIQAWTGFNFPGRGTTYSNWKWQWFHFDGTDWDQSRSLSRIFKFDGKAWDWEVSSENGNYDYLMYADYDYDHPDVVNEMKKWGVWYANEVGLDGYRLDAVKHIKFQFLKDWVDNARAATGKEMFTVGEYWQNDLGALNNYLAKVNYNQSLFDAPLHYNFYAASTGGGYYDMRNILNNTLVASNPTKAVTLVENHDTQPGQSLESTVQPWFKPLAYAFILTRSGGVPSVFYGDMYGTKGTTTREIPALKSKIEPLLKARKDYAYGTQRDYIDNPDVIGWTREGDSTKAKSGLATVITDGPGGSKRMYVGTSNAGEIWYDLTGNRTDKITIGSDGYATFPVNGGSVSVWVQQ

SEQ ID NO: 38552 - protein, 480 aa, Cytophaga sp.
NGTMMQYFEWYVPNDGQQWNRLRTDAPYLSSVGITAVWTPPAYKGTSQADVGYGPYDLYDLGEFNQKGTVRTKYGTKGELKSAVNTLHSNGIQVYGDVVMNHKAGADYTENVTAVEVNPSNRYQETSGEYNIQAWTGFNFPGRGTTYSNWKWQWFHFDGTDWDQSRSLSRIFKFDGKAWDWEVSSENGNYDYLMYADYDYDHPDVVNEMKKWGVWYANEVGLDGYRLDAVKHIKFQFLKDWVDNARAATGKEMFTVGEYWQNDLGALNNYLAKVNYNQSLFDAPLHYNFYAASTGGGYYDMRNILNNTLVASNPTKAVTLVENHDTQPGQSLESTVQPWFKPLAYAFILTRSGGYPSVFYGDMYGTKGTTTREIPALKSKIEPLLKARKDYAYGTQRDYIDNPDLIGWTREGDSTKAKSGLATVITDGPGGSKRMYVGTSNAGEIWYDLTGNRTDKITIGSDGYATFPVNGGSVSVWVQQ

SEQ ID NO: 38553 - protein, 480 aa, Cytophaga sp.
NGTMMQYFEWYVPNDGQQWNRLRTDAPYLSSVGITAVWTPPAYKGTSQADVGYGPYDLYDLGEFNQKGTVRTKYGTKGELKSAVNTLHSNGIRVYGDVVMNHKAGADYTENVTAVEVNPSNRYQETSGEYNIQAWTGFNFPGRGTTYSNWKWQWFHFDGTDWDQSRSLSRIFKFDGKAWDWEVSSENGNYDYLMYADYDYDHPDVVNEMKKWGVWYANEVGLDGYRLDAVKHIKFQFLKDWVDNARAATGKEMFTVGEYWQNDLGALNNYLAKVNYNQSLFDAPLHYNFYAASTGGGYYDMRNILNNTLVASNPTKAVTLVENHDTQPGQSLESTVQPWFKPLAYAFILTRSGGYPSVFYGDMYGTKGTTTREIPALKSKIEPLLKARKDYAYGTQRDYIDNPDVIGWTREGDSTKAKSGLATVITDGPGGSKRMYVGTSNAGEIWYDLTGNRTDKITIGSDGYATFPVNGGSVSVWVQQ

SEQ ID NO: 38554 - protein, 480 aa, Cytophaga sp.
NGTMMQYFEWYVPNDGQQWNRLRTDAPYLSSVGITAVWTPPGYKGTSQADVGYGPYDLYDLGEFNQKGTVRTKYGTKGELKSAVNTLHSNGIQVYGDVVMNHKAGADYTENVTAVEVNPSNRYQETSGEYNIQAWTGFNFPGRGTTYSNWKWQWFHFDGTDWDQSRSLSRIFKFDGKAWDWEVSSENGNYDYLMYADYDYDHPDVVNEMKKWGVWYANEVGLDGYRLDAVKHIKFQFLKDWVDNARAATGKEMFTVGEYWQNDLGALNNYLAKVNYNQSLFDAPLHYNFYAASTGGGYYDMRNILNNTLVASNPTKAVTLVENHDTQPGQSLESTVQPWFKPLAYAFILTRSGGYPSVFYGDMYGTKGTTTREIPALKSKIEPLLKARKDYAYGTQRDYIDNPDVIGWTREGDSTKAKSGLATVITDGPGGSKRMYVGTSNAGEIWYDLTGNRTDKITIGSDGYATFPVNGGSVSVWVQQ

SEQ ID NO: 38555 - protein, 480 aa, Cytophaga sp.
NGTMMQYFEWYVPNDGQQWNRLRTDAPYLSSVGITAVWTPPAYKGTSQADVGYGPYDLYDLGEFNQKGTVRTKYGTKGELKSAVNTLHSNGIQVYGDVVMNHKAGADYTENVTAVEVNPSNRYQETSGEYNIQAWTGFNFPGRGTTYSNWKWQWFHFDGTDWDQSRSLSRIFKFDGKAWDWEVSSENGNYDYLMYADYDYDHPDVVNEMKKWGVWYANEVGLDGYRLDAVKHIKFQFLKDWVDNARAATGKEMFTVGEYWQNDLGALNNYLAKVNYNQSLFDAPLHYNFYAASTGGGYYDMRNILNNTLVASNPTKAVTLVENHDTQPGQSLESTVQPWFKPLAYAFILTRSGGYPSVFYGDMYGTKGTTTREIPALKSKIEPLLKARKDYAYGTQRDYIDNPDVIGWTREGDSTKAKSGLATVITDGPGGSKRMYVGTSNAGEIWYDLTGVRTDKITIGSDGYATFPVNGGSVSVWVQQ

SEQ ID NO: 38556 - protein, 480 aa, Cytophaga sp.
NGTMMQYFEWYVPNDGQQWNRLRTDAPYLSSVGITAVWTPPAYKGTSQADVGYGPYDLYDLGEFNQKGTVRTKYGTKGELKSAVNTLHSNGIQVYGDVVMNHKAGADYTENVTAVEVNPSNRYQETSGEYNIQAWTGFNFPGRGTTYSNWKWQWFHFDGTDWDQSRSLSRIFKFDGKAWDWEVSSENGNYDYLMYADYDYDHPDVVNEMKKWGVWYANEVGLDGYRLDAVKHIKFQFLKDWVDNARAATGKEMFTVGEYWQNDLGALNNYLAKVNYNQSLFDAPLHYNFYAASTGGGYYDMRNILNNTLVASNPTKAVTLVENHDTQPGQSLESTVTPWFKPLAYAFILTRSGGYPSVFYGDMYGTKGTTTREIPALKSKIEPLLKARKDYAYGTQRDYIDNPDVIGWTREGDSTKAKSGLATVITDGPGGSKRMYVGTSNAGEIWYDLTGNRTDKITIGSDGYATFPVNGGSVSVWVQQ

SEQ ID NO: 38557 - protein, 480 aa, Cytophaga sp.
NGTMMQYFEWYVPNDGQQWNRLRTDAPYLSSVGITAVWTPPAYKGTSQADVGYGPYDLYDLGEFNQKGTVRTKYGTKGELKSAVNTLHSNGIQVYGDVVMNHKAGADYTENVTAVEVNPSNRYQETSGEYNIQAWTGFNFPGRGTTYSNWKWQWFHFDGTDWDQYRSLSRIFKFDGKAWDWEVSSENGNYDYLMYADYDYDHPDVVNEMKKWGVWYANEVGLDGYRLDAVKHIKFQFLKDWVDNARAATGKEMFTVGEYWQNDLGALNNYLAKVNYNQSLFDAPLHYNFYAASTGGGYYDMRNILNNTLVASNPTKAVTLVENHDTQPGQSLESTVQPWFKPLAYAFILTRSGGYPSVFYGDMYGTKGTTTREIPALKSKIEPLLKARKDYAYGTQRDYIDNPDVIGWTREGDSTKAKSGLATVITDGPGGSKRMYVGTSNAGEIWYDLTGNRTDKITIGSDGYATFPVNGGSVSVWVQQ

SEQ ID NO: 38558 - protein, 480 aa, Cytophaga sp.
NGTMMQYFEWYVPNDGQQWNRLRTDAPYLSSVGITAVWTPPAYKGTSQADVGYGPYDLYDLGEFNQKGTVRTKYGTKGELKSAVNTLHSNGIQVYGDVVMNHKAGADYTENVTAVEVNPSNRYQETSGEYNIQAWTGFNFPGRGTTYSNWKWQWFHFDGTDWDQSRSLSRIFKFDGKAWDWEVSSENGNYDYLMYADYDYDHPDVVNEMKKWGVWYANEVGLDGYRLDAVKHIKFQFLKDWVDNARAKTGKEMFTVGEYWQNDLGALNNYLAKVNYNQSLFDAPLHYNFYAASTGGGYYDMRNILNNTLVASNPTKAVTLVENHDTQPGQSLESTVQPWFKPLAYAFILTRSGGYPSVFYGDMYGTKGTTTREIPALKSKIEPLLKARKDYAYGTQRDYIDNPDVIGWTREGDSTKAKSGLATVITDGPGGSKRMYVGTSNAGEIWYDLTGNRTDKITIGSDGYATFPVNGGSVSVWVQQ

SEQ ID NO: 38559 - protein, 480 aa, Cytophaga sp.
NGTMMQYFEWYVPNDGQQWNRLRTDAPYLSSVGITAVWTPPAYKGTSQADVGYGPYDLYDLGEFNQKGTVRTKYGTKGELKSAVNTLHSNGIQVYGDVVMNHKAGADYTENVTAVEVNPSNRYQETSGEYNIQAWTGFNFPGRGTTYSNWKWQWFHFDGTDWDQSRSLSRIFKFDGKAWDWEVSSENGNYDYLMYADYDYDHPDVVNEMKKWGVWYANEVGLDGYRLDAVKHIKFQFLKDWVDNARAETGKEMFTVGEYWQNDLGALNNYLAKVNYNQSLFDAPLHYNFYAASTGGGYYDMRNILNNTLVASNPTKAVTLVENHDTQPGQSLESTVQPWFKPLAYAFILTRSGGYPSVFYGDMYGTKGTTTREIPALKSKIEPLLKARKDYAYGTQRDYIDNPDVIGWTREGDSTKAKSGLATVITDGPGGSKRMYVGTSNAGEIWYDLTGNRTDKITIGSDGYATFPVNGGSVSVWVQQ

SEQ ID NO: 38560 - protein, 480 aa, Cytophaga sp.
NGTMMQYFEWYVPNDGQQWNRLRTDAPYLSSVGITAVWTPPAYKGTSQADVGYGPYDLYDLGEFNQKGTVRTKYGTKGELKSAVNTLHSNGIQVYGDVVMNHKAGADYTENVTAVEVNPSNRYQETSGEYNIQAWTGFNFPGRGTTYSNWKWQWFHFDGTDWDQSRSLSRIFKFDGKAWDWEVSSENGNYDYLMYADYDYDHPDVVNEMKKWGVWYANEVGLDGYRLDAVKHIKFQFLKDWVDNARAATGKEMFTVGEYWQNDLGALNNYLAKVNYNQSLFDAPLHYNFYAASTGGGYYDMRNILNNTLVASNPTKAVTLVENHDTQPGQSLESTVQPWFKPLAYAFILTRSGGYPSVFYGDMYGTKGTTTREIPALKSKIEPLLKARKDYAYGTQRDYIDNPDVIGWTREGDSTKAKSGLATVITDGPGGSKRMYVGTSNLGEIWYDLTGNRTDKITIGSDGYATFPVNGGSVSVWVQQ

SEQ ID NO: 38561 - protein, 480 aa, Cytophaga sp.
NGTMMQYFEWYVPNDGQQWNRLRTDAPYLSSVGITAVWTPPAYKGTSQADVGYGPYDLYDLGEFNQKGTVRTKYGTKGELKSAVNTLHSNGIQVYGDVVMNHKAGADYTENVTAVEVNPSNRYQETSGEYNIQAWTGFNFPGRGTTYSNWKWQWFHFDGTDWDQSRSLSRIFKFDGKAWDWEVSSNNGNYDYLMYADYDYDHPDVVNEMKKWGVWYANEVGLDGYRLDAVKHIKFQFLKDWVDNARAATGKEMFTVGEYWQNDLGALNNYLAKVNYNQSLFDAPLHYNFYAASTGGGYYDMRNILNNTLVASNPTKAVTLVENHDTQPGQSLESTVQPWFKPLAYAFILTRSGGYPSVFYGDMYGTKGTTTREIPALKSKIEPLLKARKDYAYGTQRDYIDNPDVIGWTREGDSTKAKSGLATVITDGPGGSKRMYVGTSNAGEIWYDLTGNRTDKITIGSDGYATFPVNGGSVSVWVQQ

SEQ ID NO: 38562 - protein, 480 aa, Cytophaga sp.
NGTMMQYFEWYVPNDGQQWNRLRTDAPYLSSVGITAVWTPPAYKGTSQADVGYGPYDLYDLGEFNQKGTVRTKYGTKGELKSAVNTLHSNGIQVYGDVVMNHKAGADYTENVTAVEVNPSNRYQETSGEYNIQAWTGFNFPGRGTTYSNWKWQWFHFDGTDWDQSRSLSRIFKFDGKAWDWEVSSENGNYDYLMYADYDYDHPDVVNEMKKWGVWYANEVGLDGYRLDAVKHIKFQFLKDWVDNARAATGKEMFTVGEYWSNDLGALNNYLAKVNYNQSLFDAPLHYNFYAASTGGGYYDMRNILNNTLVASNPTKAVTLVENHDTQPGQSLESTVQPWFKPLAYAFILTRSGGYPSVFYGDMYGTKGTTTREIPALKSKIEPLLKARKDYAYGTQRDYIDNPDVIGWTREGDSTKAKSGLATVITDGPGGSKRMYVGTSNAGEIWYDLTGNRTDKITIGSDGYATFPVNGGSVSVWVQQ

SEQ ID NO: 38563 - protein, 480 aa, Cytophaga sp.
NGTMMQYFEWYVPNDGQQWNRLRTDAPYLSSVGITAVWTPPAYKGTSQADVGYGPYDLYDLGEFNQKGTVRTKYGTKGELKSAVNTLHSNGIQVYGDVVMNHKAGADYTENVTAVEVNPSNRYQETSGEYNIQAWTGFNFPGRGTTYSNWKWQWFHFDGTDWDQSRSLSRIFKFDGKAWDWEVSSENGNYDYLMYADYDYDHPDQVNEMKKWGVWYANEVGLDGYRLDAVKHIKFQFLKDWVDNARAATGKEMFTVGEYWQNDLGALNNYLAKVNYNQSLFDAPLHYNFYAASTGGGYYDMRNILNNTLVASNPTKAVTLVENHDTQPGQSLESTVQPWFKPLAYAFILTRSGGYPSVFYGDMYGTKGTTTREIPALKSKIEPLLKARKDYAYGTQRDYIDNPDVIGWTREGDSTKAKSGLATVITDGPGGSKRMYVGTSNAGEIWYDLTGNRTDKITIGSDGYATFPVNGGSVSVWVQQ

SEQ ID NO: 38564 - protein, 480 aa, Cytophaga sp.
NGTMMQYFEWYVPNDGQQWNRLRTDAPYLSSVGITAVWTPPAYKGTSQADVGYGPYDLYDLGEFNQKGTVRTKYGTKGELKSAVNTLHSNGIQVYGDVVMNHKAGADYTENVTAVEVNPSNRYQETSGEYNIQAWTGFNHPGRGTTYSNWKWQWFHFDGTDWDQSRSLSRIFKFDGKAWDWEVSSENGNYDYLMYADYDYDHPDVVNEMKKWGVWYANEVGLDGYRLDAVKHIKFQFLKDWVDNARAATGKEMFTVGEYWQNDLGALNNYLAKVNYNQSLFDAPLHYNFYAASTGGGYYDMRNILNNTLVASNPTKAVTLVENHDTQPGQSLESTVQPWFKPLAYAFILTRSGGYPSVFYGDMYGTKGTTTREIPALKSKIEPLLKARKDYAYGTQRDYIDNPDVIGWTREGDSTKAKSGLATVITDGPGGSKRMYVGTSNAGEIWYDLTGNRTDKITIGSDGYATFPVNGGSVSVWVQQ

SEQ ID NO: 38565 - protein, 480 aa, Cytophaga sp.
NGTMMQYFEWYVPNDGQQWNRLRTDAPYLSSVGITAVWTPPAYKGTSQADVGYGPYDLYDLGEFNQKGTVRTKYGTKGELKSAVNTLHSNGIQVYGDVVMNHKAGADYTENVTAVEVNPSNRYQETSGEYNIQAWTGFNFPGRGTTYSNWKWQWFHFDGTDWDQSRSLSRIFKFDGKAWDWEVSSENGNYDYLMYADYDYDHPDVVNEMKKWGVWYANEVGLDGYRLDAVKHIKFQFLKDWVDNARAATGKEMFTVGEYWQNDLGALNNYLAKVNYNQSLFDAPLHYNFYAASTGGGYYDMRNILNNTLVASNPTKAVTLVENHDTQPGQSLESTVQPWFKPLAYAFILTRSGGYPSVFYGDMYGTKGTTTREIPALKSKIEPLLKARKDYAYGTQRDYIDNPDVIGWTREGDSTKAKSGLATVITDGPGGSKRMYVGTSNAGEIWYDLTGNRTMKITIGSDGYATFPVNGGSVSVWVQQ

SEQ ID NO: 38566 - protein, 480 aa, Cytophaga sp.
NGTMMQYFEWYVPNDGQQWNRLRTDAPYLSSVGITAVWTPPAYKGTSQADVGYGPYDLYDLGEFNQKGTVRTKYGTKGELKSAVNTLHSNGIQVYGDVVMNHKAGADYTENVTAVEVNPSNRYQETSGEYNIQAWTGFNFPGRGTTYSNWKWQWFHFDGTDWDQSRSLSRIFKFDGKAWDWEVSSENGNYDYLMYADYDYDHPDVVNEMKKWGVWYANEVGLDGYRLDAVKHIKFQFLKDWVDNARAATGKEMFTVGEYWQNDLGALNNYLAKVNYNQSLFDAPLHYNFYAASTGGGYYDMRNILNNTLVASNPTKAVTLVENHDTQPGQSLESTVQPWFKPLAYALILTRSGGYPSVFYGDMYGTKGTTTREIPALKSKIEPLLKARKDYAYGTQRDYIDNPDVIGWTREGDSTKAKSGLATVITDGPGGSKRMYVGTSNAGEIWYDLTGNRTDKITIGSDGYATFPVNGGSVSVWVQQ

SEQ ID NO: 38567 - protein, 480 aa, Cytophaga sp.
NGTMMQYFEWYVPNDGQQWNRLRTDAPYLSSVGITAVWTPPAYKGTSQADVGYGPYDLYDLGEFNQKGTVRTKYGTKGELKSAVNTLHSNGIQVYGDVVMNHKAGADYTENVTAVEVNPSNRYQETSGEYNIQAWTGFNFPGRGTTYSNWKWQWFHFDGTDWDQSRSLSRIFKFDGKAWDWEVSSENGNYDYLMYADYDYDHPDVVNEMKKWGVWYANEVGLDGYRLDAVKHIKFQFLKDWVDNARAATGKEMFTVGEYWQNDLGALNNYLAKVNYNQSLFDAPLHYNFYAASTGGGYYDMRNILNNTLVASNPTKAVTLVENHDTQPGQSLESTVQPWFKPLAYAFILTRSGGYPSVFYGDMYGTKGTTTREIPALKSKIEPLLKARKDYAYGTQRDYIDNPDVIGWTREGDSTKAKSGLATVITDGPGGSKRMPVGTSNAGEIWYDLTGNRTDKITIGSDGYATFPVNGGSVSVWVQQ

SEQ ID NO: 38568 - protein, 480 aa, Cytophaga sp.
NGTMMQYFEWYVPNDGQQWNRLRTDAPYLSSVGITAVWTPPAYKGTSQADVGYGPYDLYDLGEFNQKGTVRTKYGTKGELKSAVNTLHSNGIQVYGDVVMNHKAGADYTENVTAVEVNPSNRYQEGSGEYNIQAWTGFNFPGRGTTYSNWKWQWFHFDGTDWDQSRSLSRIFKFDGKAWDWEVSSENGNYDYLMYADYDYDHPDVVNEMKKWGVWYANEVGLDGYRLDAVKHIKFQFLKDWVDNARAATGKEMFTVGEYWQNDLGALNNYLAKVNYNQSLFDAPLHYNFYAASTGGGYYDMRNILNNTLVASNPTKAVTLVENHDTQPGQSLESTVQPWFKPLAYAFILTRSGGYPSVFYGDMYGTKGTTTREIPALKSKIEPLLKARKDYAYGTQRDYIDNPDVIGWTREGDSTKAKSGLATVITDGPGGSKRMYVGTSNAGEIWYDLTGNRTDKITIGSDGYATFPVNGGSVSVWVQQ

SEQ ID NO: 38569 - protein, 480 aa, Cytophaga sp.
NGTMMQYFEWYVPNDGQQWNRLRTDAPYLSSVGITAVWTPPAYKGTSQADVGYGPYDLYDLGEFNQKGTVRTKYGTKGELKSAVNTLHSNGIQVYGDVVMNHKAGADYTENVTAVEVNPSNRYQETSGEYNIQAWTGFNFPGRGTTYSNWKWQWFHFDGTDWDQSRSLSRIFKFDGKAWDWEVSSENGNYDYLMYADYDYDHPDVVNEMKKWGVWYANEVGLDGYRLDAVKHIKFQFLKDWVDNARAATGKEMFTVGEYWQNDLGALNNYLAKVNYNQSLFDAPLHYNFYAASTGGGYYDMRNILNNTLVASNPTKAVTLVENHDTQPGQSLESTVQPWFKPLAYAFILTRSGGYPSVFYGDMYGTKGTTTREIPALKSKIEPLLKARKDYAYGTQRDYIDNPDVIGWTREGDSTKAKSGLATVISDGPGGSKRMYVGTSNAGEIWYDLTGNRTDKITIGSDGYATFPVNGGSVSVWVQQ

SEQ ID NO: 38570 - protein, 480 aa, Cytophaga sp.
NGTMMQYFEWYVPNDGQQWNRLRTDAPYLSSVGITAVWTPPAYKGTSQADVGYGPYDLYDLGEFNQKGTVRTKYGTKGELKSAVNTLHSNGIQVYGDVVMNHKAGADYTENVTAVEVNPSNRYQETSGEMNIQAWTGFNFPGRGTTYSNWKWQWFHFDGTDWDQSRSLSRIFKFDGKAWDWEVSSENGNYDYLMYADYDYDHPDVVNEMKKWGVWYANEVGLDGYRLDAVKHIKFQFLKDWVDNARAATGKEMFTVGEYWQNDLGALNNYLAKVNYNQSLFDAPLHYNFYAASTGGGYYDMRNILNNTLVASNPTKAVTLVENHDTQPGQSLESTVQPWFKPLAYAFILTRSGGYPSVFYGDMYGTKGTTTREIPALKSKIEPLLKARKDYAYGTQRDYIDNPDVIGWTREGDSTKAKSGLATVITDGPGGSKRMYVGTSNAGEIWYDLTGNRTDKITIGSDGYATFPVNGGSVSVWVQQ

SEQ ID NO: 38571 - protein, 480 aa, Cytophaga sp.
NGTMMQYFEWYVPNDGQQWNRLRTDAPYLSSVGITAVWTPPAYKGTSQADVGYGPYDLYDLGEFNQKGTVRTKYGTKGELKSAVNTLHSNGIQVYGDVVMNHKAGADYTENVHAVEVNPSNRYQETSGEYNIQAWTGFNFPGRGTTYSNWKWQWFHFDGTDWDQSRSLSRIFKFDGKAWDWEVSSENGNYDYLMYADYDYDHPDVVNEMKKWGVWYANEVGLDGYRLDAVKHIKFQFLKDWVDNARAATGKEMFTVGEYWQNDLGALNNYLAKVNYNQSLFDAPLHYNFYAASTGGGYYDMRNILNNTLVASNPTKAVTLVENHDTQPGQSLESTVQPWFKPLAYAFILTRSGGYPSVFYGDMYGTKGTTTREIPALKSKIEPLLKARKDYAYGTQRDYIDNPDVIGWTREGDSTKAKSGLATVITDGPGGSKRMYVGTSNAGEIWYDLTGNRTDKITIGSDGYATFPVNGGSVSVWVQQ

SEQ ID NO: 38572 - protein, 480 aa, Cytophaga sp.
NGTMMQYFEWYVPNDGQQWNRLRTDAPYLSSVGITAVWTPPAYKGTSQADVGYGPYDLYDLGEFNQKGTVRTKYGTKGELKSAVNTLHSNGIQVYGDVVMNHKAGADYTENVTAVEVNPSNRYQETSGEYNIQAWTGFNFPGRGTTYSNWKWQWFHFDGTDWDQSRSLSRIFKFDGKAWDWEVSCENGNYDYLMYADYDYDHPDVVNEMKKWGVWYANEVGLDGYRLDAVKHIKFQFLKDWVDNARAATGKEMFTVGEYWQNDLGALNNYLAKVNYNQSLFDAPLHYNFYAASTGGGYYDMRNILNNTLVASNPTKAVTLVENHDTQPGQSLESTVQPWFKPLAYAFILTRSGGYPSVFYGDMYGTKGTTTREIPALKSKIEPLLKARKDYAYGTQRDYIDNPDVIGWTREGDSTKAKSGLATVITDGPGGSKRMYVGTSNAGEIWYDLTGNRTDKITIGSDGYATFPVNGGSVSVWVQQ

SEQ ID NO: 38573 - protein, 480 aa, Cytophaga sp.
NGTMMQYFEWYVPNDGQQWNRLRTDAPYLSSVGITAVWTPPAYKGTSQADVGYGPYDLYDLGEFNQKGTVRTKYGTKGELKSAVNTLHSNGIQVYGDVVMNHKAGADYTENVTAVEVNPSNRYQETSGEYNIQAWTGFNFPGRGTTYSNWKWQWFHFDGTDWDQSRSLSRIFKFDGKAWDWEVSSENGNYDYLMYADYDYDHPDVVNEMKKWGVWYANEVGLDGYRLDAVKHIKFQFLKDWVDNARAATGKEMFTVGEYWQNDLGALNNYLAKVNYNQSLFDAPLHYNFYAASTGGGYYDMRNICNNTLVASNPTKAVTLVENHDTQPGQSLESTVQPWFKPLAYAFILTRSGGYPSVFYGDMYGTKGTTTREIPALKSKIEPLLKARKDYAYGTQRDYIDNPDVIGWTREGDSTKAKSGLATVITDGPGGSKRMYVGTSNAGEIWYDLTGNRTDKITIGSDGYATFPVNGGSVSVWVQQ

SEQ ID NO: 38574 - protein, 480 aa, Cytophaga sp.
NGTMMQYFEWYVPNDGQQWNRLRTDAPYLSSVGITAVWTPPAYKGTSQADVGYGPYDLYDLGEFNQKGTVRTKYGTKGELKSAVNTLHSNGIQVYGDVVMNHKAGADYTENVTAVEVNPSNRYQETSGEYNIQAWTGFNFPGRGTTYSNWKWQWFHFDGTDWDQSRSLSRIFKFDGKAWDWEVSSENGNYDYLMYADYDYDHPDVVNEMKKWGVWYANEVGLDGYRLDAVKHIKFQFLKDWVDNARAATGKEMFTVGEYWQNDLGALNNYLAKVNYNQSLFDAPLHYNFYAASTGGGYYDMRNILNNTLVASNPTKAVTLVENHDTQPGQSLESTVQPWFKPLAYAFILTRSGGYPSVFYGDMYGTKGTTTREIPALKSKIEPLLKARKDDAYGTQRDYIDNPDVIGWTREGDSTKAKSGLATVITDGPGGSKRMYVGTSNAGEIWYDLTGNRTDKITIGSDGYATFPVNGGSVSVWVQQ

SEQ ID NO: 38575 - protein, 480 aa, Cytophaga sp.
NGTMMQYFEWYVPNDGQQWNRLRTDAPYLSSVGITAVWTPPAYKGTSQADVGYGPYDLYDLGEFNQKGTVRTKYGTKGELKSAVNTLHSNGIQVYGDVVMNHKAGADYTENVTAVEVNPSNRYQETSGEYNIQAWTGFNFPGRGTTYSNWKWQWFHFDGTDWDQSRSLSRIFKFDGKAWDWEVSSENGNYDYLMYADYDYDHPDVVNEMKKWGVWYANEVGLDGYRLDAVKHIKFQFLKDWVDNARAATGKEMFTVGEYWQNDLQALNNYLAKVNYNQSLFDAPLHYNFYAASTGGGYYDMRNILNNTLVASNPTKAVTLVENHDTQPGQSLESTVQPWFKPLAYAFILTRSGGYPSVFYGDMYGTKGTTTREIPALKSKIEPLLKARKDYAYGTQRDYIDNPDVIGWTREGDSTKAKSGLATVITDGPGGSKRMYVGTSNAGEIWYDLTGNRTDKITIGSDGYATFPVNGGSVSVWVQQ

SEQ ID NO: 38576 - protein, 480 aa, Cytophaga sp.
NGTMMQYFEWYVPNDGQQWNRLRTDAPYLSSVGITAVWTPPAYKGTSQADVGYGPYDLYDLGEFNQKGTVRTKYGTKGELKSAVNTLHSNGIQVYGDVVMNHKAGADYTENVTAVEVNPSNRYQETSGEYNIQAWTGFNFPGRGTTYSNWKWQWFHFDGTDWDQSRSLSRIFKFDGKAWDWEVSSENGNYDYLMYADYDYDHPDVVNEMKKWGVWYANEVGLDGYRLDAVKHIKFQFLKDWVDNARAATGKEMFTVGEYWQNDLGALNNYLAKVNYNQSLFDAPLHYNFYAASTGGGYYDMRNILNNTLVASNPTKAVTLVENHDTQPGQSLESTVQPWFKPLAYAFILTRSGGYPSVFYGDMYGTKGTTTREIPALKSKIEPLLKARKDYAYGTQRDYIDNPDVIGWTREGDSTKAKSGLATVITDGPGGSKRMYVGTSNAGEIWYDLTGNRTDKITIQSDGYATFPVNGGSVSVWVQQ

SEQ ID NO: 38577 - protein, 480 aa, Cytophaga sp.
NGTMMQYFEWYVPNDGQQWNRLRTDAPYLSSVGITAVWTPPAYKGTSQADVGYGPYDLYDLGEFNQKGTVRTKYGTKGELKSAVNTLHSNGIQVYGDVVMNHKAGADYTENVTAVEVNPSNRYQETSGEYNIQAWTGFNFPGRGTTYSNWKWQWFHFDGTDWDQSRSLSRIFKFDGKAWDWEVSSENGNYDYLMYADYDYDHPDVVNEMKKWGVWYANEVGLDGYRLDAVKHIKFQFLKDWVDNARAATGKEMFTVGEYWQNDLGALNNYLAKVNYNQSLFDAPLHYNFYAASTGGGYYDMRNILNNTLVASNPTKAVTLVENHDTQPGQSLESTVQPWFKPLAYAFILTRSGGYPSVFYGDMYGTKGTTTREIPALKSKIEPLLKARKDYAYGTQRDYIDNPDVIGWTREGDSTKAKSGLATVITDGPGSSKRMYVGTSNAGEIWYDLTGNRTDKITIGSDGYATFPVNGGSVSVWVQQ

SEQ ID NO: 38578 - protein, 480 aa, Cytophaga sp.
NGTMMQYFEWYVPNDGQQWNRLRTDAPYLSSVGITAVWTPPAYKGTSQADVGYGPYDMYDLGEFNQKGTVRTKYGTKGELKSAVNTLHSNGIQVYGDVVMNHKAGADYTENVTAVEVNPSNRYQETSGEYNIQAWTGFNFPGRGTTYSNWKWQWFHFDGTDWDQSRSLSRIFKFDGKAWDWEVSSENGNYDYLMYADYDYDHPDVVNEMKKWGVWYANEVGLDGYRLDAVKHIKFQFLKDWVDNARAATGKEMFTVGEYWQNDLGALNNYLAKVNYNQSLFDAPLHYNFYAASTGGGYYDMRNILNNTLVASNPTKAVTLVENHDTQPGQSLESTVQPWFKPLAYAFILTRSGGYPSVFYGDMYGTKGTTTREIPALKSKIEPLLKARKDYAYGTQRDYIDNPDVIGWTREGDSTKAKSGLATVITDGPGGSKRMYVGTSNAGEIWYDLTGNRTDKITIGSDGYATFPVNGGSVSVWVQQ

SEQ ID NO: 38579 - protein, 480 aa, Cytophaga sp.
NGTMMQYFEWYVPNDGQQWNRLRTDAPYLSSVGITAVWTPPAYKGTSQADVGYGPYDLYDLGEFNQKGTVRTKYGTKGELKSAVNTLHSNGIQVYGDVVMNHKAGADYTENVTAVEVNPSNRYQETSGEYNIQAWTGFNFPGRGTTYSNWKWQWFHFDGTDWDQSRSLSRIFKFDGKAWDWEVSSENGNYDYLMYADYDYDHPDVVNEMKKWGVWYANEVGLDGYRLDAVKHIKFQFLKDWVDNARAATGKEMFTVGEYWQNDLGALNNYLAKVNYNQSLFDAPLHYNFYAASTGGGYYDMRNILNNTLVASNPTKAVTLVENHDTQPGQSLESTVQPWFKPLAYAFILTRSGGYPSVFYGDMYGTKGTTTREIPALKSKIEPLLKARKDYAYGTQRDYIDNPDEIGWTREGDSTKAKSGLATVITDGPGGSKRMYVGTSNAGEIWYDLTGNRTDKITIGSDGYATFPVNGGSVSVWVQQ

SEQ ID NO: 38580 - protein, 480 aa, Cytophaga sp.
NGTMMQYFEWYVPNDGQQWNRLRTDAPYLSSVGITAVWTPPAYKGTSQADVGYGPYDLYDLGEFNQKGTVRTKYGTKGELKSAVNTLHSNGIQVYGDVVMNHKAGADYTENVTAVEVNPSNRYQETSGEYNIQAWTGFNFPGRGTTYSNWKWQWFHFDGTDWDQSRSLSRIFKFDGKAWDWEVSSENGNYDYLMYADYDYDHPDVVNEMKKWGVWYANEVGLDGYRLDAVKHIKFQFLKDWVDNARAATGKEMFTVGEYWQNDLGALNNYLAKVNYNQSLFDAPLHYNFYAASTGGGYYDMRNILNNTLVASNPTKAVTLVENHDTQPGQSLESTVQPWFKPLAYAFILTRSGGYPSVFYGDMYGTKGTTTREIPALKSKIEPLLKARKDYAYGTQRDYIDNPDVIGWTREGDSTKAKSGLATVITDGPGGSKRMYVGTSNAGEIWYDLTGNRTQKITIGSDGYATFPVNGGSVSVWVQQ

SEQ ID NO: 38581 - protein, 480 aa, Cytophaga sp.
NGTMMQYFEWYVPNDGQQWNRLRTDAPYLSSVGITAVWTPPAYKGTSQADVGYGPYDLYDLGEFNQKGTVRTKYGTKGELKSAVNTLHSNGIQVYGDVVMNHKAGADYTENVTAVEVNPSNRYQETSGEYNIQAWTGFNFPGRGTTYSNWKWQWFHFDGTDWDQSRSLSRIFKFDGKAWDWEVSSENGNYDYLMYADYDYDHPDVVNEMKKWGVWYANEVGLDGYRLDAVKHIKFQFLKDWVDNARAATGKEMFTVGEYWQNDLGALNNYLAKVNYNQSLFDAPLHYNFYAASTGGGYYDMRNILNNTLVASNPTKAVTLVENHDTQPGQSLESTVQPWFKPLAYAFILTRSGGYPSVFYGDMYGTKGTTTREIPALKSKIEPLLKSRKDYAYGTQRDYIDNPDVIGWTREGDSTKAKSGLATVITDGPGGSKRMYVGTSNAGEIWYDLTGNRTDKITIGSDGYATFPVNGGSVSVWVQQ

SEQ ID NO: 38582 - protein, 480 aa, Cytophaga sp.
NGTMMQYFEWYVPNDGQQWNRLRTDAPYLSSVGITAVWTPPAYKGTSQADVGYGPYDLYDLGEFNQKGTVRTKYGTKGELKSAVNTLHSNGIQVYGDVVMNHKAGADYTENVTAVEVNPSNRYQETSGEYNIQAWTGFNFPGRGTTYSNWKWQWFHFDGTDWDQSRSLSRIFKFDGKAWDWEVSSENGNYDYLMYADYDYDHPDVVNEMKKWGVWYANEVGLDGYRLDAVKHIKFQFLKDWVDNARAATGKEMFTVGEYWQNDLGALNNYLAKVNYNQSLFDAPLHYNFYAASTGGGYYDMRNILNNTLVASNPTKAVTLVDNHDTQPGQSLESTVQPWFKPLAYAFILTRSGGYPSVFYGDMYGTKGTTTREIPALKSKIEPLLKARKDYAYGTQRDYIDNPDVIGWTREGDSTKAKSGLATVITDGPGGSKRMYVGTSNAGEIWYDLTGNRTDKITIGSDGYATFPVNGGSVSVWVQQ

SEQ ID NO: 38583 - protein, 480 aa, Cytophaga sp.
NGTMMQYFEWYVPNDGQQWNRLRTDAPYLSSVGITAVWTPPAYKGTSQADVGYGPYDLQDLGEFNQKGTVRTKYGTKGELKSAVNTLHSNGIQVYGDVVMNHKAGADYTENVTAVEVNPSNRYQETSGEYNIQAWTGFNFPGRGTTYSNWKWQWFHFDGTDWDQSRSLSRIFKFDGKAWDWEVSSENGNYDYLMYADYDYDHPDVVNEMKKWGVWYANEVGLDGYRLDAVKHIKFQFLKDWVDNARAATGKEMFTVGEYWQNDLGALNNYLAKVNYNQSLFDAPLHYNFYAASTGGGYYDMRNILNNTLVASNPTKAVTLVENHDTQPGQSLESTVQPWFKPLAYAFILTRSGGYPSVFYGDMYGTKGTTTREIPALKSKIEPLLKARKDYAYGTQRDYIDNPDVIGWTREGDSTKAKSGLATVITDGPGGSKRMYVGTSNAGEIWYDLTGNRTDKITIGSDGYATFPVNGGSVSVWVQQ

SEQ ID NO: 38584 - protein, 480 aa, Cytophaga sp.
NGTMMQYFEWYVPNDGQQWNRLRTDAPYLSSVGITAVWTPPAYKGTSQADVGYGPYDLYDLGEFNQKGTVRTKYGTKGELKSAVNTLHSNGIQVYGDVVMNHKAGADYTENVTAVEVNPSNRYQETSGEYNIQAWTGFNFPGRGTTYSNWKWQWFHFDGTDWDQSRSLSRIFKFDGKAWDWEVSSENGNYDYLMYADYDYDHPDVVNEMKKWGVWYANEVGLDGYRLDAVKHIKFQFLKDWVDNARAATGKEMFTVGEYWQNDLGALNNYLAKVNYNQSLFDAPLHYNFYAASTGGGYYDMRNILNNTLVASNPTKAVTLVENHDTQPGQSLESTVQPWFKPLAYAFILTRSGGYPSVFYGDMYGTKGTTTREIPALKSKIEPLLKARKDYAYGTQRDYIDNPDVIGWTREGDSTKAKSGLATVITDGPGGSKRMYVGTSNAKEIWYDLTGNRTDKITIGSDGYATFPVNGGSVSVWVQQ

SEQ ID NO: 38585 - protein, 480 aa, Cytophaga sp.
NGTMMQYFEWYVPNDGQQWNRLRTDAPYLSSVGITAVWTPPAYKGTSQADVGYGPYDLYDLGEFNQKGTVRTKYGTKGELKSAVNTLHSNGIQVYGDVVMNHKAGADYTENVTAVEVNPSNRYQETSGEYNIQAWTGFNFPGRGTTYSNWKWQWFHFDGTDWDQSRSLSRIFKFDGKAWDWEVSSENGNYDYLMYADYDYDHPDVVNEMKKWGVWYANEVGLDGYRLDAVKHIKFQFLKDWVDNARAATGKEMFTVGEYWQNDLGALNNYLAKVNYNQSLFDAPLHYNFYAASTGGGYYDMRNILNNTLVASNPTKAVTLVENHDTQPGQSLESTVQPWFKPLAYAFILTRSGGYPSVFYGDMYGTKGTTTREIPALKSKIEPLLKARKDYAYGTQRDYIDNPDVIGWTREGDSTKARSGLATVITDGPGGSKRMYVGTSNAGEIWYDLTGNRTDKITIGSDGYATFPVNGGSVSVWVQQ

SEQ ID NO: 38586 - protein, 480 aa, Cytophaga sp.
NGTMMQYFEWYVPNDGQQWNRLRTDAPYLSSVGITAVWTPPAYKGTSQADVGYGPYDLYDLGEFNQKGTVRTKYGTKGELKSAVNTLHSNGIQVYGDVVMNHKAGADYTENVTAVEVNPSNRYIETSGEYNIQAWTGFNFPGRGTTYSNWKWQWFHFDGTDWDQSRSLSRIFKFDGKAWDWEVSSENGNYDYLMYADYDYDHPDVVNEMKKWGVWYANEVGLDGYRLDAVKHIKFQFLKDWVDNARAATGKEMFTVGEYWQNDLGALNNYLAKVNYNQSLFDAPLHYNFYAASTGGGYYDMRNILNNTLVASNPTKAVTLVENHDTQPGQSLESTVQPWFKPLAYAFILTRSGGYPSVFYGDMYGTKGTTTREIPALKSKIEPLLKARKDYAYGTQRDYIDNPDVIGWTREGDSTKAKSGLATVITDGPGGSKRMYVGTSNAGEIWYDLTGNRTDKITIGSDGYATFPVNGGSVSVWVQQ

SEQ ID NO: 38587 - protein, 480 aa, Cytophaga sp.
NGTMMQYFEWYVPNDGQQWNRLRTDAPYLSSVGITAVWTPPAYKGTSQADVGYGPYDLYDLGEFNQKGTVRTKYGTKGELKSAVNTLHSNGIQVYGDVVMNHKAGADYTENVTAHEVNPSNRYQETSGEYNIQAWTGFNFPGRGTTYSNWKWQWFHFDGTDWDQSRSLSRIFKFDGKAWDWEVSSENGNYDYLMYADYDYDHPDVVNEMKKWGVWYANEVGLDGYRLDAVKHIKFQFLKDWVDNARAATGKEMFTVGEYWQNDLGALNNYLAKVNYNQSLFDAPLHYNFYAASTGGGYYDMRNILNNTLVASNPTKAVTLVENHDTQPGQSLESTVQPWFKPLAYAFILTRSGGYPSVFYGDMYGTKGTTTREIPALKSKIEPLLKARKDYAYGTQRDYIDNPDVIGWTREGDSTKAKSGLATVITDGPGGSKRMYVGTSNAGEIWYDLTGNRTDKITIGSDGYATFPVNGGSVSVWVQQ

SEQ ID NO: 38588 - protein, 480 aa, Cytophaga sp.
NGTMMQYFEWYVPNDGQQWNRLRTDAPYLSSVGITAVWTPPAYKGTSQADVGYGPYDLYDLGEFNQKGTVRTKYGTKGELKSAVNTLHSNGIQVYGDVVMNHKAGADYTENVTAVEVNPSNRYQETSGEYNIQAWTGFNFPGRGTTYSNWKWQWFHFDGTDWDQSRSLSRIFKFDGKAWDWEVSSFNGNYDYLMYADYDYDHPDVVNEMKKWGVWYANEVGLDGYRLDAVKHIKFQFLKDWVDNARAATGKEMFTVGEYWQNDLGALNNYLAKVNYNQSLFDAPLHYNFYAASTGGGYYDMRNILNNTLVASNPTKAVTLVENHDTQPGQSLESTVQPWFKPLAYAFILTRSGGYPSVFYGDMYGTKGTTTREIPALKSKIEPLLKARKDYAYGTQRDYIDNPDVIGWTREGDSTKAKSGLATVITDGPGGSKRMYVGTSNAGEIWYDLTGNRTDKITIGSDGYATFPVNGGSVSVWVQQ

SEQ ID NO: 38589 - protein, 480 aa, Cytophaga sp.
NGTMMQYFEWYVPNDGQQWNRLRTDAPYLSSVGITAVWTPPAYKGTSQADVGYGPYDLYDLGEFNQKGTVRTKYGTKGELKSAVNTLHSNGIQVYGDVVMNHKAGADYTENVTAVEVNPSNRYQETSGEYNIQAWTGFNFPGRGTTYSNWKWQWFHFDGTDWDQSRSLSRIFKFDGKAWDWEVSSENGNYDYLMYADYDYDHPDVVNEMKKWGVWYANEVGLDGYRLDAVKHIKFQFLKDWVDNARAATGKEMFTVGEYWQNDLGALNNYLAKVNYNQSLFDAPLHYNFYAASTGGGYYDMRNILNNTLVASNPTKAVTLVENHDTQPGQSLESTVQPWFKPLAYAFILTRSGGYPSVFYGDMYGTKGTTTREIPALKSKIEPLLKARKDYAYGTQRDYIDNPDVIGWTREGDSTKAKSGLATVITDGPGGSKRMTVGTSNAGEIWYDLTGNRTDKITIGSDGYATFPVNGGSVSVWVQQ

SEQ ID NO: 38590 - protein, 480 aa, Cytophaga sp.
NGTMMQYFEWYVPNDGQQWNRLRTDAPYLSSVGITAVWTPPAYKGTSQADVGYGPYDLYDLGEFNQKGTVRTKYGLKGELKSAVNTLHSNGIQVYGDVVMNHKAGADYTENVTAVEVNPSNRYQETSGEYNIQAWTGFNFPGRGTTYSNWKWQWFHFDGTDWDQSRSLSRIFKFDGKAWDWEVSSENGNYDYLMYADYDYDHPDVVNEMKKWGVWYANEVGLDGYRLDAVKHIKFQFLKDWVDNARAATGKEMFTVGEYWQNDLGALNNYLAKVNYNQSLFDAPLHYNFYAASTGGGYYDMRNILNNTLVASNPTKAVTLVENHDTQPGQSLESTVQPWFKPLAYAFILTRSGGYPSVFYGDMYGTKGTTTREIPALKSKIEPLLKARKDYAYGTQRDYIDNPDVIGWTREGDSTKAKSGLATVITDGPGGSKRMYVGTSNAGEIWYDLTGNRTDKITIGSDGYATFPVNGGSVSVWVQQ

SEQ ID NO: 38591 - protein, 480 aa, Cytophaga sp.
NGTMMQYFEWYVPNDGQQWNRLRTDAPYLSSVGITAVWTPPAYKGTSQADVGYGPYDLYDLGEFNQKGTVRTKYGTKGELKSAVNTLHSNGIQVYGDVVMNHKAGADYTENVTAVEVNPSNRYQETSGEYNIQAWTGFNFPGRGTTYSNWKWQWFHFDGTDWDQSRSLSRIFKFDGKAWDWEVSSENGNYDYLMYADYDYDHPDVVNEMKKWGVWYANEVGLDGYRLDAVKHIKFQFLKDWVDNARAATGKEMFTVGEYWQNDLGALNNYLAKVNYNQSLFDAPLHYNFYAASTGGGYYDMRNILNNTLVASNPTKAVTLVENHDTQPGQSLESTVQPWFKPLAYAFILTRSGGYPSVFYGDMYGTKGTTTREIPALKSKIEPLLKARKDYAYGTHRDYIDNPDVIGWTREGDSTKAKSGLATVITDGPGGSKRMYVGTSNAGEIWYDLTGNRTDKITIGSDGYATFPVNGGSVSVWVQQ

SEQ ID NO: 38592 - protein, 480 aa, Cytophaga sp.
NGTMMQYFEWYVPNDGQQWNRLRTDAPYLSSVGITAVWTPPAYKGTSQADVGYGPYDLYDLGEFNQKGTVRTKYGTKGELKSAVNTLHSNGIQVYGDVVMNHKAGADYTENVTAVEVNPSNRYQETSGEYNIQAWTGFNFPGRGTTYSNWKWQWFHFDGTDWDQSRSLSRIFKFDGKAWDWEVSSENGNYDYLMYADYDYDHPDVVNEMKKWGVWYANEVGLDGYRLDAVKHIKFQFLKDWVDNARAATGKEMFTVGEYWQNDLGALNNYLAKVNYNQSLFDAPLHYNFYAASTGGGYYDMRNILNNTLVASNPTKAVTLVENHDTQPGQSLESTVQPWFKPLAYAFILTRSGGYPSVFYGDMYGTKGTTTREIPALKSKIEPLLKARKDYAYGTQRDYIDNPDVIGWTREGDSTKAKSGLATVITDGPGGSKRMYVGTSNAGEIWYDLTGNRTNKITIGSDGYATFPVNGGSVSVWVQQ

SEQ ID NO: 38593 - protein, 480 aa, Cytophaga sp.
NGTMMQYFEWYVPNDGQQWNRLRTDAPYLSSVGITAVWTPPAYKGTSQADVGYGPYDLYDLGEFNQKGTVRTKYGTKGELKSAVNTLHSNGIQVYGDVVMNHKAGADYTENVTAVEVNPSNRYQETSGEYNIQAWTGFNFPGRGTTYSNWKWQWFHFDGTDWDQSRSLSRIFKFDGKAWDWEVSSENGNYDYLMYADYDYDHPDVVNEMKKWGVWYANEVGLDGYRLDAVKHIKFQFLKDWVDNARAATGKEMFTVGEYWQNDLGALNNYLAKVNYNQSLFDAPLHYNFYAASTGGGYYDMRNILNNTLVASNPTKAVTLVENHDTQPGQSLESTVSPWFKPLAYAFILTRSGGYPSVFYGDMYGTKGTTTREIPALKSKIEPLLKARKDYAYGTQRDYIDNPDVIGWTREGDSTKAKSGLATVITDGPGGSKRMYVGTSNAGEIWYDLTGNRTDKITIGSDGYATFPVNGGSVSVWVQQ

SEQ ID NO: 38594 - protein, 480 aa, Cytophaga sp.
NGTMMQYFEWYVPNDGQQWNRLRTDAPYLSSVGITAVWTPPAYKGTSQADVGYGPYDLYDLGEFNQKGTVRTKYGTKGELKSAVNTLHSNGIQVYGDVVMNHKAGADYTENVTAVEVNPSNRYQETSGEYNIQAWTGFNFPGRGTTYSNWKWQWFHFDGTDWDQSRSLSRIFKFDDKAWDWEVSSENGNYDYLMYADYDYDHPDVVNEMKKWGVWYANEVGLDGYRLDAVKHIKFQFLKDWVDNARAATGKEMFTVGEYWQNDLGALNNYLAKVNYNQSLFDAPLHYNFYAASTGGGYYDMRNILNNTLVASNPTKAVTLVENHDTQPGQSLESTVQPWFKPLAYAFILTRSGGYPSVFYGDMYGTKGTTTREIPALKSKIEPLLKARKDYAYGTQRDYIDNPDVIGWTREGDSTKAKSGLATVITDGPGGSKRMYVGTSNAGEIWYDLTGNRTDKITIGSDGYATFPVNGGSVSVWVQQ

SEQ ID NO: 38595 - protein, 480 aa, Cytophaga sp.
NGTMMQYFEWYVPNDGQQWNRLRTDAPYLSSVGITAVWTPPAYKGTSQADVGYGPYDLYDLGEFNQKGTVRTKYGTKGELKSAVNTLHSNGIQVYGDVVMNHKAGADYTENVTAVEVNPSNRYQETSGEYNIQAWTGFNFPGRGTTYSNWKWQWFHFDGTDWDQSRSLSRIFKFDGKAWDWEVSSENGNYDYLMYADYDYDHPDVVNEMKKWGVWYANEVGLDGYRLDAVKHIKFQFLKDWVDNARAATGKEMFTVGEYWQNDLGALNNYLAKVNYNQSLFDAPLHYNFYAASTGGGYYDMRNILNNTLVASNPTKAVTLVENHDTQPGQSLESTVQPWFKPLAYAFILTRSGGYPSVFYGDMYGTKGTTTREIPALKSKIEPLLKARKDYAYGTQRDYIDNPDVIGWTREGDWTKAKSGLATVITDGPGGSKRMYVGTSNAGEIWYDLTGNRTDKITIGSDGYATFPVNGGSVSVWVQQ

SEQ ID NO: 38596 - protein, 480 aa, Cytophaga sp.
NGTMMQYFEWYVPNDGQQWNRLRTDAPYLSSVGITAVWTPPAYKGTSQADVGYGPYDLYDLGEFNQKGTVRTKYGTKGELKSAVNTLHSNGIQVYGDVVMNHKAGADYTENVTAVEVNPSNRYQETSGEYNIQAWTGFNFPGRGTTYSNWKWQWFHFDGTDWDQSRSLSRIFKFDGKAWDWEVSSENGNYDYLMYADYDYDHPDVVNEMKKWGVWYANEVGLDGYRLDAVKHIKFQFLKDWVDNARAAFGKEMFTVGEYWQNDLGALNNYLAKVNYNQSLFDAPLHYNFYAASTGGGYYDMRNILNNTLVASNPTKAVTLVENHDTQPGQSLESTVQPWFKPLAYAFILTRSGGYPSVFYGDMYGTKGTTTREIPALKSKIEPLLKARKDYAYGTQRDYIDNPDVIGWTREGDSTKAKSGLATVITDGPGGSKRMYVGTSNAGEIWYDLTGNRTDKITIGSDGYATFPVNGGSVSVWVQQ

SEQ ID NO: 38597 - protein, 480 aa, Cytophaga sp.
NGTMMQYFEWYVPNDGQQWNRLRTDAPYLSSVGITAVWTPPAYKGTSQADVGYGPYDLYDLGEFNQKGTVRTKYGTKGELKSAVNTLHSNGIQVYGDVVMNHKAGADYTENVTAVEVNPSNRYQETSGEYNIQAWTGFNFPGRGTTYSNWKWQWFHFDGTDWDQSRSLSRIFKFDGKAWDWEVSSENGNYDYLMYADYDYDHPDVVNEMKKWGVWYANEVGLDGYRLDAVKHIKFQFLKDWVDNARAATGKEMFTVGEYWQNDLGALNNYLAKVNYNQSLFDAPLHYNFYAASTGGGYYDMRNILNNTLVASNPTKAVTLVENHDTQPGQSLESTVQPWFKPLAYAFILTRSGGYPSVFYGDMYGTKGTTTREIPALKSKIEPLLKARKDYAYGTQRDYIDNPDVIGWTREGDSTKAKSGLATVITDGPGGSKRMYVGTSNAGEIWYDLTGNRTGKITIGSDGYATFPVNGGSVSVWVQQ

SEQ ID NO: 38598 - protein, 480 aa, Cytophaga sp.
NGTMMQYFEWYVPNDGQQWNRLRTDAPYLSSVGITAVWTPPAYKGTSQADVGYGPYDLYDLGEFNQKGTVRTKYGTKGELKSAVNTLHSNGIQVYGDVVMNHKAGADYTENVTAVEVNPSNRYQETSGEYNIQAWTGFNFPGRGTTYSNWKWQWFHFDGTDWDQSRSLSRIFKFDGKAWDWEVSSENGNYDYLMYADYDYDHPDVVNEMKKWGVWYANEVGLDGYRLDAVKHIKFQFLKDWVDNARAATGKEMFTVGEYWQNDLGALNNYLAKVNYNQSLFDAPLHYNFYAASTGGGYYDMRNILNNTLVASNPTKAVTLVENHDTQPGQSLESTVQPWFKPLAYAFILTRSGGYPSVFYGDMYGTKGTTTREIPALKSKIEPLLKARKDYAYGTQRDYIDNPDVIGWTREGDSTKAKSGLATVITDGPGGSKAMYVGTSNAGEIWYDLTGNRTDKITIGSDGYATFPVNGGSVSVWVQQ

SEQ ID NO: 38599 - protein, 480 aa, Cytophaga sp.
NGTMMQYFEWYVPNDGQQWNRLRTDAPYLSSVGITAVWTPPAYKGTSQADVGYGPYDLYDLGEFNQKGTVRTKYGTKGELKSAVNTLHSNGIQVYGDVVMNHKAGADYTENVTALEVNPSNRYQETSGEYNIQAWTGFNFPGRGTTYSNWKWQWFHFDGTDWDQSRSLSRIFKFDGKAWDWEVSSENGNYDYLMYADYDYDHPDVVNEMKKWGVWYANEVGLDGYRLDAVKHIKFQFLKDWVDNARAATGKEMFTVGEYWQNDLGALNNYLAKVNYNQSLFDAPLHYNFYAASTGGGYYDMRNILNNTLVASNPTKAVTLVENHDTQPGQSLESTVQPWFKPLAYAFILTRSGGYPSVFYGDMYGTKGTTTREIPALKSKIEPLLKARKDYAYGTQRDYIDNPDVIGWTREGDSTKAKSGLATVITDGPGGSKRMYVGTSNAGEIWYDLTGNRTDKITIGSDGYATFPVNGGSVSVWVQQ

SEQ ID NO: 38600 - protein, 480 aa, Cytophaga sp.
NGTMMQYFEWYVPNDGQQWNRLRTDAPYLSSVGITAVWTPPAYKGTSQADVGYGPYDLYDLGEFNQKGTVRTKYGTKGELKSAVNTLHSNGIQVYGDVVMNHKAGADYTENVTAVEVNPSNRYQETSGEYNIQAWTGFNFPGRGTTYSNWKWQWFHFDGTDWDQSRSLSRIFKFDGKAWDWEVSSENGNYDYLMYADYDYSHPDVVNEMKKWGVWYANEVGLDGYRLDAVKHIKFQFLKDWVDNARAATGKEMFTVGEYWQNDLGALNNYLAKVNYNQSLFDAPLHYNFYAASTGGGYYDMRNILNNTLVASNPTKAVTLVENHDTQPGQSLESTVQPWFKPLAYAFILTRSGGYPSVFYGDMYGTKGTTTREIPALKSKIEPLLKARKDYAYGTQRDYIDNPDVIGWTREGDSTKAKSGLATVITDGPGGSKRMYVGTSNAGEIWYDLTGNRTDKITIGSDGYATFPVNGGSVSVWVQQ

SEQ ID NO: 38601 - protein, 480 aa, Cytophaga sp.
NGTMMQYFEWYVPNDGQQWNRLRTDAPYLSSVGITAVWTPPAYKGTSQADVGYGPYDLYDLGEFNQKGTVRTKYGTKGELKSAVNTLHSNGIQVYGDVVMNHKAGADYTENVTAVEVNPSNRYQETSGEYNIQAWTGFNFPGRGTTYSNWKWQWFHFDGTDWDQSRSLSRIFKFDGKAWDWEVSSENGNYDYLMYADYDYDHPDVVNEMKKWGVWYANEVGLDGYRLDAVKHIKFQFLKDWVDNARAATGKEMFTVGEYWQNDLGALNNYLAKVNYNQSLFDAPLHYNFYAASTGGGYYDMRNILNNTLVASNPTKAVTLVENHDTQPGQSLESTVQPWFKPLAYAFILTRSGGYPSVFYGDMYGTKGTTTREIPALKSKIEPLLKARKDYAYGTQRDYIDNPDVIGWTREGDSTKAKSGLATVITDGPGGSKPMYVGTSNAGEIWYDLTGNRTDKITIGSDGYATFPVNGGSVSVWVQQ

SEQ ID NO: 38602 - protein, 480 aa, Cytophaga sp.
NGTMMQYFEWYVPNDGQQWNRLRTDAPYLSSVGITAVWTPPAYKGTSQADVGYGPYDLYDLGEFNQKGTVRTKYGTKGELKSAVNTLHSNGIQVYGDVVMNHKAGADYTENVTAVEVNPSNRYQETSGEYNIQAWTGFNFPGRGTTYSNWKWQWFHFDGTDWDQSRSLSRIFKFDGKAWDWEVSSENGNYDYLMYADYDYDHPDVVNEMKKWGVWYAQEVGLDGYRLDAVKHIKFQFLKDWVDNARAATGKEMFTVGEYWQNDLGALNNYLAKVNYNQSLFDAPLHYNFYAASTGGGYYDMRNILNNTLVASNPTKAVTLVENHDTQPGQSLESTVQPWFKPLAYAFILTRSGGYPSVFYGDMYGTKGTTTREIPALKSKIEPLLKARKDYAYGTQRDYIDNPDVIGWTREGDSTKAKSGLATVITDGPGGSKRMYVGTSNAGEIWYDLTGNRTDKITIGSDGYATFPVNGGSVSVWVQQ

SEQ ID NO: 38603 - protein, 480 aa, Cytophaga sp.
NGTMMQYFEWYVPNDGQQWNRLRTDAPYLSSVGITAVWTPPAYKGTSQADVGYGPYDLYDLGEFNQKGTVRTKYGTKGELKSAVNTLHSNGIQVYGDVVMNHKAGADYTENVTAVEVNPSNRYQETSGEYNIQAWTGFNFPGRGTTYSNWKWQWFHFDGTDWDQSRSLSRIFKFDGKAWDWEVSSENGNYDYLMYADYDYDHPDVVNEMKKWGVWYANEVGLDGYRLDAVKHIKFQFLKDWVDNARAATGKEMFTVGEYWQNDLGALNNYLAKVNYNQSLFDAPLHYNFYAASTGGGYYDMRNILNNTLVASNPTKAVTLVENHDTQPGQSLESTVQPWFKPLAYAFILTRSGGYPSVFYGDMYGTKGTTTREIPALKSKIEPLLKARKDYAYGTQRDYIDNPDVIGWTREGDSTKAYSGLATVITDGPGGSKRMYVGTSNAGEIWYDLTGNRTDKITIGSDGYATFPVNGGSVSVWVQQ

SEQ ID NO: 38604 - protein, 480 aa, Cytophaga sp.
NGTMFQYFEWYVPNDGQQWNRLRTDAPYLSSVGITAVWTPPAYKGTSQADVGYGPYDLYDLGEFNQKGTVRTKYGTKGELKSAVNTLHSNGIQVYGDVVMNHKAGADYTENVTAVEVNPSNRYQETSGEYNIQAWTGFNFPGRGTTYSNWKWQWFHFDGTDWDQSRSLSRIFKFDGKAWDWEVSSENGNYDYLMYADYDYDHPDVVNEMKKWGVWYANEVGLDGYRLDAVKHIKFQFLKDWVDNARAATGKEMFTVGEYWQNDLGALNNYLAKVNYNQSLFDAPLHYNFYAASTGGGYYDMRNILNNTLVASNPTKAVTLVENHDTQPGQSLESTVQPWFKPLAYAFILTRSGGYPSVFYGDMYGTKGTTTREIPALKSKIEPLLKARKDYAYGTQRDYIDNPDVIGWTREGDSTKAKSGLATVITDGPGGSKRMYVGTSNAGEIWYDLTGNRTDKITIGSDGYATFPVNGGSVSVWVQQ

SEQ ID NO: 38605 - protein, 480 aa, Cytophaga sp.
NGTMMQYFEWYVPNDGQQWNRLRTDAPYLSSVGITAVWTPPAYKGTSQADVGYGPYDLYDLGEFNQKGTVRTKYGTKGELKSAVNTLHSNGIQVYGDVVMNHKAGADYTENVTAVEVNPSNRYQETSGEYNIQAWTGFNFPGRGTTYSNWKWQWFHFDGTDWDQSRSLSRIFKFDGKAWDWEVSSENGNYDYLMYADYDYDHPDVVNEMKKWGVWYANEVGLDGYRLDAVKHIKFQFLKDWVDNARAATGKEMFTVGEYWQNDLGALNNYLAKVNYNQSLFDAPLHYNFYAASTGGGYYDMRNILNNTLVASNPTKAVTLVENHDTQPGQSLESTVQPWFKPLAYAFILTRSGGYPSVFYGDMYGTKGTTTREIPALKSKIEPLLKARKDYAYGTQRDYIDNPDVIGWTREGDSTKAKSGLATVITDGPGGSKRMYVGTSNALEIWYDLTGNRTDKITIGSDGYATFPVNGGSVSVWVQQ

SEQ ID NO: 38606 - protein, 480 aa, Cytophaga sp.
NGTMMQYFEWYVPNDGQQWNRLRTDAPYLSSVGITAVWTPPAYKGTSQADVGYGPYDLYDLGEFNQKGTVRTKYGTKGELKSAVNTLHSNGIQVYGDVVMNHKAGADYTENVTAVEVNPSNRYQETSGEYNIQAWTGFNFPGRGTTYSNWKWQWFHFDGTDWDQSRSLSRIFKFDGKAWDWEVSSENGNYDYLMYADYDYDHPDVVNEMKKWGVWYANEVGLDGYRLDAVKHIKFQFLKDWVDNARAATGKEMFTVGEYWQNDLGALNNYLAKVNYNQSLFDAPLHYNFYAASTGYGYYDMRNILNNTLVASNPTKAVTLVENHDTQPGQSLESTVQPWFKPLAYAFILTRSGGYPSVFYGDMYGTKGTTTREIPALKSKIEPLLKARKDYAYGTQRDYIDNPDVIGWTREGDSTKAKSGLATVITDGPGGSKRMYVGTSNAGEIWYDLTGNRTDKITIGSDGYATFPVNGGSVSVWVQQ

SEQ ID NO: 38607 - protein, 480 aa, Cytophaga sp.
NGTMMQYFEWYVPNDGQQWNRLRTDAPYLSSVGITAVWTPPAYKGTSQADVGYGPYDLYDLGEFNQKGTVRTKYGTKGELKSAVNTLHSNGIQVYGDVVMNHKAGADYTENVTAVEVNPSNRYQETSGEYNIQAWTGFNFPGRGTTYSNWKWQWFHFDGTDWDQSRSLSRIFKFDGKAWDWEVSSENGNYDYLMYADYDYDHPDVVNEMKKWGVWYANEVGLDGYRLDAVKHIKFQFLKDWVDNARAATGKEMFTVGEYWQNDLGALNNYLAKVNYNQSLFDAPLHYNFYAASTGGGYYDMRNILNNTLVASNPTKAVTLVENHDTQPGCSLESTVQPWFKPLAYAFILTRSGGYPSVFYGDMYGTKGTTTREIPALKSKIEPLLKARKDYAYGTQRDYIDNPDVIGWTREGDSTKAKSGLATVITDGPGGSKRMYVGTSNAGEIWYDLTGNRTDKITIGSDGYATFPVNGGSVSVWVQQ

SEQ ID NO: 38608 - protein, 480 aa, Cytophaga sp.
NGTMMQYFEWYVPNDGQQWNRLRTDAPYLSSVGITAVWTPPAYKGTSQADVGYGPYDLYDLGEFNQKGTVRTKYGTKGELKSAVNTLHSNGIQVYGDVVMNHKAGADYTENVTAVEVNPSNRYQETSGEYNIQAWTGFNFPGRGTTYSNWKWQWFHFDGTDWDQSRSLSRIFKFDGKAWDWEVSSENGNYDYLMYADYDYDHPDVVNEMKKWGVWYANEVGLDGYRLDAVKHIKFQFLKDWVDNARAATGKEMFTVGEYWQNDLGALNNYLAKVNYNQSLFDAPLHYNFYAASTGGGYYDMRNILNNTLVASNPTKAVTLVENHDTQPGQSLESTVQPWFKPLAYAFILTRSGGYPSVFYGDMYGTKGTTTREIPALKSKIEPLLKARKDYAIGTQRDYIDNPDVIGWTREGDSTKAKSGLATVITDGPGGSKRMYVGTSNAGEIWYDLTGNRTDKITIGSDGYATFPVNGGSVSVWVQQ

SEQ ID NO: 38609 - protein, 480 aa, Cytophaga sp.
NGTMMQYFEWYVPNDGQQWNRLRTDAPYLSSVGITAVWTPPAYKGTSQADVGYGPYDLYDLGEFNQKGTVRTKYGTKGELKSAVNTLHSNGIQVYGDVVMNHKAGADYTENVTAVEVNPSNRYQETSGEYNIQAWTGFNFPGRGTTYSNWKWQWFHFDGTDWDQSRSLSRIFKFDGKAWDWEVSSENGNYDYLMYADYDYDHPDVVNEMKKWGVWYANEVGLDGYRLDAVKHIKFQFLKDWVDNARAATGKEMFTVGEYWQNDLGALNNYLAKVNYNQSLFDAPLHYNFYAASTGGGYYDMRNILNNTLVASNPTKAVTLVENHDTQPGQSLESTVQPWFKPLAYAFILTRSGGYPSVFYGDMYGTKGTTTREIPALKSKIEALLKARKDYAYGTQRDYIDNPDVIGWTREGDSTKAKSGLATVITDGPGGSKRMYVGTSNAGEIWYDLTGNRTDKITIGSDGYATFPVNGGSVSVWVQQ

SEQ ID NO: 38610 - protein, 480 aa, Cytophaga sp.
NGTMMQYFEWYVPNDGQQWNRLRTDAPYLSSVGITAVWTPPAYKGTSQADVGYGPYDLYDLGEFNQKGTVRTKYGTKGELKSAVNTLHSNGIQVYGDVVMNHKAGADYTENVTAVEVNPSNRYQETSGEYNIQAWTGFNFPGRGTTYSNWKWQWFHFDGTDWDQSRSLSRIFKFDGKAWDWEVSSENGNYDYLMYADYDYDHPDVHNEMKKWGVWYANEVGLDGYRLDAVKHIKFQFLKDWVDNARAATGKEMFTVGEYWQNDLGALNNYLAKVNYNQSLFDAPLHYNFYAASTGGGYYDMRNILNNTLVASNPTKAVTLVENHDTQPGQSLESTVQPWFKPLAYAFILTRSGGYPSVFYGDMYGTKGTTTREIPALKSKIEPLLKARKDYAYGTQRDYIDNPDVIGWTREGDSTKAKSGLATVITDGPGGSKRMYVGTSNAGEIWYDLTGNRTDKITIGSDGYATFPVNGGSVSVWVQQ

SEQ ID NO: 38611 - protein, 480 aa, Cytophaga sp.
NGTMMQYFEWYVPNDGQQWNRLRTDAPYLSSVGITAVWTPPAYKGTSQADVGYGPYDLYDLGEFNQKGTVRTKYGTKGALKSAVNTLHSNGIQVYGDVVMNHKAGADYTENVTAVEVNPSNRYQETSGEYNIQAWTGFNFPGRGTTYSNWKWQWFHFDGTDWDQSRSLSRIFKFDGKAWDWEVSSENGNYDYLMYADYDYDHPDVVNEMKKWGVWYANEVGLDGYRLDAVKHIKFQFLKDWVDNARAATGKEMFTVGEYWQNDLGALNNYLAKVNYNQSLFDAPLHYNFYAASTGGGYYDMRNILNNTLVASNPTKAVTLVENHDTQPGQSLESTVQPWFKPLAYAFILTRSGGYPSVFYGDMYGTKGTTTREIPALKSKIEPLLKARKDYAYGTQRDYIDNPDVIGWTREGDSTKAKSGLATVITDGPGGSKRMYVGTSNAGEIWYDLTGNRTDKITIGSDGYATFPVNGGSVSVWVQQ

SEQ ID NO: 38612 - protein, 480 aa, Cytophaga sp.
NGTMMQYFEWYVPNDGQQWNRLRTDAPYLSSVGITAVWTPPAYKGTSQADVGYGPYDLYDLGEFNQKGTVRTKYGTKGELKSAVNTLHSNGIQVYGDVVMNHKAGADYTENVTAVEVNPSNRYQETSGEYNIQAWTGFNFPGRGTTYSNWMWQWFHFDGTDWDQSRSLSRIFKFDGKAWDWEVSSENGNYDYLMYADYDYDHPDVVNEMKKWGVWYANEVGLDGYRLDAVKHIKFQFLKDWVDNARAATGKEMFTVGEYWQNDLGALNNYLAKVNYNQSLFDAPLHYNFYAASTGGGYYDMRNILNNTLVASNPTKAVTLVENHDTQPGQSLESTVQPWFKPLAYAFILTRSGGYPSVFYGDMYGTKGTTTREIPALKSKIEPLLKARKDYAYGTQRDYIDNPDVIGWTREGDSTKAKSGLATVITDGPGGSKRMYVGTSNAGEIWYDLTGNRTDKITIGSDGYATFPVNGGSVSVWVQQ

SEQ ID NO: 38613 - protein, 480 aa, Cytophaga sp.
NGTMMQYFEWYVPNDGQQWNRLRTDAPYLSSVGITAVWTPPAYKGTSQADVGYGPYDLYDLGEFNQKGTVRTKYGTKGDLKSAVNTLHSNGIQVYGDVVMNHKAGADYTENVTAVEVNPSNRYQETSGEYNIQAWTGFNFPGRGTTYSNWKWQWFHFDGTDWDQSRSLSRIFKFDGKAWDWEVSSENGNYDYLMYADYDYDHPDVVNEMKKWGVWYANEVGLDGYRLDAVKHIKFQFLKDWVDNARAATGKEMFTVGEYWQNDLGALNNYLAKVNYNQSLFDAPLHYNFYAASTGGGYYDMRNILNNTLVASNPTKAVTLVENHDTQPGQSLESTVQPWFKPLAYAFILTRSGGYPSVFYGDMYGTKGTTTREIPALKSKIEPLLKARKDYAYGTQRDYIDNPDVIGWTREGDSTKAKSGLATVITDGPGGSKRMYVGTSNAGEIWYDLTGNRTDKITIGSDGYATFPVNGGSVSVWVQQ

SEQ ID NO: 38614 - protein, 480 aa, Cytophaga sp.
NGTMMQYFEWYVPNDGQQWNRLRTDAPYLSSVGITAVWTPPAYKGTSQADVGYGPYDLYDLGEFNQKGTVRTKYGTKGELKSAVNTLHSNGIQVYGDVVMNHKAGADYTENVTAVEVNDSNRYQETSGEYNIQAWTGFNFPGRGTTYSNWKWQWFHFDGTDWDQSRSLSRIFKFDGKAWDWEVSSENGNYDYLMYADYDYDHPDVVNEMKKWGVWYANEVGLDGYRLDAVKHIKFQFLKDWVDNARAATGKEMFTVGEYWQNDLGALNNYLAKVNYNQSLFDAPLHYNFYAASTGGGYYDMRNILNNTLVASNPTKAVTLVENHDTQPGQSLESTVQPWFKPLAYAFILTRSGGYPSVFYGDMYGTKGTTTREIPALKSKIEPLLKARKDYAYGTQRDYIDNPDVIGWTREGDSTKAKSGLATVITDGPGGSKRMYVGTSNAGEIWYDLTGNRTDKITIGSDGYATFPVNGGSVSVWVQQ

SEQ ID NO: 38615 - protein, 480 aa, Cytophaga sp.
NGTMMQYFEWYVPNDGQQWNRLRTDAPYLSSVGITAVWTPPAYKGTSQADVGYGPYDLYDLGEFNQKGTVRTKYGTKGELKSAVNTLHSNGIEVYGDVVMNHKAGADYTENVTAVEVNPSNRYQETSGEYNIQAWTGFNFPGRGTTYSNWKWQWFHFDGTDWDQSRSLSRIFKFDGKAWDWEVSSENGNYDYLMYADYDYDHPDVVNEMKKWGVWYANEVGLDGYRLDAVKHIKFQFLKDWVDNARAATGKEMFTVGEYWQNDLGALNNYLAKVNYNQSLFDAPLHYNFYAASTGGGYYDMRNILNNTLVASNPTKAVTLVENHDTQPGQSLESTVQPWFKPLAYAFILTRSGGYPSVFYGDMYGTKGTTTREIPALKSKIEPLLKARKDYAYGTQRDYIDNPDVIGWTREGDSTKAKSGLATVITDGPGGSKRMYVGTSNAGEIWYDLTGNRTDKITIGSDGYATFPVNGGSVSVWVQQ

SEQ ID NO: 38616 - protein, 480 aa, Cytophaga sp.
NGTMMQYFEWYVPNDGQQWNRLRTDAPYLSSVGITAVWTPPAYKGTSQADVGYGPYDLYDLGEFNQKCTVRTKYGTKGELKSAVNTLHSNGIQVYGDVVMNHKAGADYTENVTAVEVNPSNRYQETSGEYNIQAWTGFNFPGRGTTYSNWKWQWFHFDGTDWDQSRSLSRIFKFDGKAWDWEVSSENGNYDYLMYADYDYDHPDVVNEMKKWGVWYANEVGLDGYRLDAVKHIKFQFLKDWVDNARAATGKEMFTVGEYWQNDLGALNNYLAKVNYNQSLFDAPLHYNFYAASTGGGYYDMRNILNNTLVASNPTKAVTLVENHDTQPGQSLESTVQPWFKPLAYAFILTRSGGYPSVFYGDMYGTKGTTTREIPALKSKIEPLLKARKDYAYGTQRDYIDNPDVIGWTREGDSTKAKSGLATVITDGPGGSKRMYVGTSNAGEIWYDLTGNRTDKITIGSDGYATFPVNGGSVSVWVQQ

SEQ ID NO: 38617 - protein, 480 aa, Cytophaga sp.
NGTMMQYFEWYVPNDGQQWNRLRTDAPYLSSVGITAVWTPPAYKGTSQADVGYGPYDLYDLGEFNQKGTVRTKYGTKGELKSAVNTLHSNGIQVYGDVVMNHKAGADYTENVTAVEVNPSNRYQETSGEYNIQAWTGFNFPGRGTTYSNWKWQWFHFDGTDWDQSRSLSRIFKFDGKAWDWEVSSENGNYDYLMYADYDYDHPDVVNEMKKWGVWYANEVGLDGYRLDAVKHIKFQFLKDWVDNARAATGKEMFTVGEYWQNDLGALNNYLAKVNYNQSLFDAPLHYNFYAASTGRGYYDMRNILNNTLVASNPTKAVTLVENHDTQPGQSLESTVQPWFKPLAYAFILTRSGGYPSVFYGDMYGTKGTTTREIPALKSKIEPLLKARKDYAYGTQRDYIDNPDVIGWTREGDSTKAKSGLATVITDGPGGSKRMYVGTSNAGEIWYDLTGNRTDKITIGSDGYATFPVNGGSVSVWVQQ

SEQ ID NO: 38618 - protein, 480 aa, Cytophaga sp.
NGTMMQYFEWYVPNDGQQWNRLRTDAPYLSSVGITAVWTPPAYKGTSQADVGYGPYDLYDLGEFNQKGTVRTKYGTKGELKSAVNTLHSNGIQVYGDVVMNHKAGADYTENVTAVEVNPSNRYQETSGEYNIQAWTGFNFPGRGTTYSNWKWQWFHFDGTDWDQSRSLSRIFIFDGKAWDWEVSSENGNYDYLMYADYDYDHPDVVNEMKKWGVWYANEVGLDGYRLDAVKHIKFQFLKDWVDNARAATGKEMFTVGEYWQNDLGALNNYLAKVNYNQSLFDAPLHYNFYAASTGGGYYDMRNILNNTLVASNPTKAVTLVENHDTQPGQSLESTVQPWFKPLAYAFILTRSGGYPSVFYGDMYGTKGTTTREIPALKSKIEPLLKARKDYAYGTQRDYIDNPDVIGWTREGDSTKAKSGLATVITDGPGGSKRMYVGTSNAGEIWYDLTGNRTDKITIGSDGYATFPVNGGSVSVWVQQ

SEQ ID NO: 38619 - protein, 480 aa, Cytophaga sp.
NGTMMQYFEWYVPNDGQQWNRLRTDAPYLSSVGITAVWTPPAYKGTSQADVGYGPYDLYDLGEFNQKGTVRTKYGTKGELKSAVNTLHSNGIQVYGDVVMNHKAGADYTENVTAVEVNPSNRYQETSGEYNIQAWTGFNFPGRGTTYSNWKWQWFHFDGTDWDQSRSLSRIFKFDGKAWDWEVSSENGNYDYLMYADYDYDHPDVVNEMKKWGVWYANEVGLDGYRLDAVKHIKFQFLKDWVDNARAATGKEMFTVGEYWQNDLGALNNYLAKVNYNQSLFDAPLHYNFYAASTGGGYYDMRNILNNTLVASNPTKAVTLVENHDTQPGQSLESTVQPWFKPLAYAFILTRSGGYPSVFYGDMYGTKGTTTREIPALKSKIEPLLKARKDYAYGTQRDYIDNPDVIGWTRHGDSTKAKSGLATVITDGPGGSKRMYVGTSNAGEIWYDLTGNRTDKITIGSDGYATFPVNGGSVSVWVQQ

SEQ ID NO: 38620 - protein, 480 aa, Cytophaga sp.
NGTMMQYFEWYVPNDGQQWNRLRTDAPYLSSVGITAVWTPPAYKGTSQADVGYGPYDLYDLGEFNQKGTVRTKYGTKGELKSAVNTLHSNGIQVYGDVVMNHKAGADYTENVTAVEVNPSNRYQETSGEYNIQAWTGFNFPGRGTLYSNWKWQWFHFDGTDWDQSRSLSRIFKFDGKAWDWEVSSENGNYDYLMYADYDYDHPDVVNEMKKWGVWYANEVGLDGYRLDAVKHIKFQFLKDWVDNARAATGKEMFTVGEYWQNDLGALNNYLAKVNYNQSLFDAPLHYNFYAASTGGGYYDMRNILNNTLVASNPTKAVTLVENHDTQPGQSLESTVQPWFKPLAYAFILTRSGGYPSVFYGDMYGTKGTTTREIPALKSKIEPLLKARKDYAYGTQRDYIDNPDVIGWTREGDSTKAKSGLATVITDGPGGSKRMYVGTSNAGEIWYDLTGNRTDKITIGSDGYATFPVNGGSVSVWVQQ

SEQ ID NO: 38621 - protein, 480 aa, Cytophaga sp.
NGTMMQYFEWYVPNDGQQWNRLRTDAPYLSSVGITAVWTPPAYKGTSQADVGYGPYDLYDLGEFNQKGTVRTKYGTKGELKSAVNTLHSNGIQVYGDVVMNHKAGADYTENVTAVEVNPSNRYQETSGEYNIQAWTGFNFPGRGTTYSNWKWQWFHFDGTDWDQSRSLSRIFKFDGKAWDWEVSSENGNYDYLMYADYDYDHPDVVNEMKKWGVWYANEVGLDGYRLDAVKHIKFQFLKDWVDNARAATGKEMFTVGEYWQNDLGALNNYLAKVNYNQSLFDAPLHYNFYAASTGGGYYDMRNILNNTLVASNPTKAVTLVENHDTQPGQSLESTVQPWFKPLAYAFILTRSGGYPSVFYGDMYGTKGTTTREIPAHKSKIEPLLKARKDYAYGTQRDYIDNPDVIGWTREGDSTKAKSGLATVITDGPGGSKRMYVGTSNAGEIWYDLTGNRTDKITIGSDGYATFPVNGGSVSVWVQQ

SEQ ID NO: 38622 - protein, 480 aa, Cytophaga sp.
NGTMMQYFEWYVPNDGQQWNRLRTDAPYLSSVGITAVWTPPAYKGTSQADVGYGPYDLYDLGEFNQKGTVRTKYGTKGELKSAVNTLHSNGIQVYGDVVMNHKAGADYTENVTAVEVNPSNRYQETSGEYNIQAWTGFNFPGRGTTYSNWKWQWFHFDGTDWDQSRSLSRIFKFDGKAWDWEVSSENGNYDYLMYADYDYDHPDVVNEMKKWGVWYANEVGLDGYRLDAVKHIKFQFLKDWVDNARAATGKEMFTVGEYWQNDLGALNNYLAKVNYNQSLFDAPLHYNFYAASTGGGYYDMRNILNNTLVASNPTKAVTLVENHDTQPGQSLESTVQPWFKPLAYAFILTRSGGYPSVFYGDMYGTKGTTTREIPALKSKIEPLLKARKDYAYGTQRDYIDNPDNIGWTREGDSTKAKSGLATVITDGPGGSKRMYVGTSNAGEIWYDLTGNRTDKITIGSDGYATFPVNGGSVSVWVQQ

SEQ ID NO: 38623 - protein, 480 aa, Cytophaga sp.
NGTMMQYFEWYVPNDGQQWNRLRTDAPYLSSVGITAVWTPPAYKGTSQADVGYGPYDLYDLGEFNQKGTVRTKYGTKGELKSAVNTLHSNGIQVYGDTVMNHKAGADYTENVTAVEVNPSNRYQETSGEYNIQAWTGFNFPGRGTTYSNWKWQWFHFDGTDWDQSRSLSRIFKFDGKAWDWEVSSENGNYDYLMYADYDYDHPDVVNEMKKWGVWYANEVGLDGYRLDAVKHIKFQFLKDWVDNARAATGKEMFTVGEYWQNDLGALNNYLAKVNYNQSLFDAPLHYNFYAASTGGGYYDMRNILNNTLVASNPTKAVTLVENHDTQPGQSLESTVQPWFKPLAYAFILTRSGGYPSVFYGDMYGTKGTTTREIPALKSKIEPLLKARKDYAYGTQRDYIDNPDVIGWTREGDSTKAKSGLATVITDGPGGSKRMYVGTSNAGEIWYDLTGNRTDKITIGSDGYATFPVNGGSVSVWVQQ

SEQ ID NO: 38624 - protein, 480 aa, Cytophaga sp.
NGTMMQYFEWYVPNDGQQWNRLRTDAPYLSSVGITAVWTPPAYKGTSQADVGYGPYDLYDLGEFNQKGTVRTKYGTKGELKSAVNTLHSNGIQVYGDVVMNHKAGADYTENVTAVEVNPSNRYQETSGEYNIQAWTGFNFPGRGTTYSNWLWQWFHFDGTDWDQSRSLSRIFKFDGKAWDWEVSSENGNYDYLMYADYDYDHPDVVNEMKKWGVWYANEVGLDGYRLDAVKHIKFQFLKDWVDNARAATGKEMFTVGEYWQNDLGALNNYLAKVNYNQSLFDAPLHYNFYAASTGGGYYDMRNILNNTLVASNPTKAVTLVENHDTQPGQSLESTVQPWFKPLAYAFILTRSGGYPSVFYGDMYGTKGTTTREIPALKSKIEPLLKARKDYAYGTQRDYIDNPDVIGWTREGDSTKAKSGLATVITDGPGGSKRMYVGTSNAGEIWYDLTGNRTDKITIGSDGYATFPVNGGSVSVWVQQ

SEQ ID NO: 38625 - protein, 480 aa, Cytophaga sp.
NGTMMQYFEWYVPNDGQQWNRLRTDAPYLSSVGITAVWTPPAYKGTSQADVGYGPYDLYDLGEFNQKGTVRTKYGTKGELKSAVNTLHSNGIQVYGDVVMNHKAGADYTENVTAVEVNPSNRYQETSGEYNIQAWTGFNFPGRGTTYSNWKWQWFHFDGTDWDQSRSLSRIFKFDGKAWDWEVSSENGNYDYLMYADYDYDHPDVVNEMKKWGVWYANEVGLDGYRLDAVKHIKFQFLKDWVDNARAATGKEMFTVGEYWQNDLDALNNYLAKVNYNQSLFDAPLHYNFYAASTGGGYYDMRNILNNTLVASNPTKAVTLVENHDTQPGQSLESTVQPWFKPLAYAFILTRSGGYPSVFYGDMYGTKGTTTREIPALKSKIEPLLKARKDYAYGTQRDYIDNPDVIGWTREGDSTKAKSGLATVITDGPGGSKRMYVGTSNAGEIWYDLTGNRTDKITIGSDGYATFPVNGGSVSVWVQQ

SEQ ID NO: 38626 - protein, 480 aa, Cytophaga sp.
NGTMMQYFEWYVPNDGQQWNRLRTDAPYLSSVGITAVWTPPAYKGTSQADVGYGPYDLYDLGEFNQKGTVRTKYGTKGELKSAVNTLHSNGIQVYGDVVMNHKAGADYTENVTAVEVNPSNRYQELSGEYNIQAWTGFNFPGRGTTYSNWKWQWFHFDGTDWDQSRSLSRIFKFDGKAWDWEVSSENGNYDYLMYADYDYDHPDVVNEMKKWGVWYANEVGLDGYRLDAVKHIKFQFLKDWVDNARAATGKEMFTVGEYWQNDLGALNNYLAKVNYNQSLFDAPLHYNFYAASTGGGYYDMRNILNNTLVASNPTKAVTLVENHDTQPGQSLESTVQPWFKPLAYAFILTRSGGYPSVFYGDMYGTKGTTTREIPALKSKIEPLLKARKDYAYGTQRDYIDNPDVIGWTREGDSTKAKSGLATVITDGPGGSKRMYVGTSNAGEIWYDLTGNRTDKITIGSDGYATFPVNGGSVSVWVQQ

SEQ ID NO: 38627 - protein, 480 aa, Cytophaga sp.
NGKMMQYFEWYVPNDGQQWNRLRTDAPYLSSVGITAVWTPPAYKGTSQADVGYGPYDLYDLGEFNQKGTVRTKYGTKGELKSAVNTLHSNGIQVYGDVVMNHKAGADYTENVTAVEVNPSNRYQETSGEYNIQAWTGFNFPGRGTTYSNWKWQWFHFDGTDWDQSRSLSRIFKFDGKAWDWEVSSENGNYDYLMYADYDYDHPDVVNEMKKWGVWYANEVGLDGYRLDAVKHIKFQFLKDWVDNARAATGKEMFTVGEYWQNDLGALNNYLAKVNYNQSLFDAPLHYNFYAASTGGGYYDMRNILNNTLVASNPTKAVTLVENHDTQPGQSLESTVQPWFKPLAYAFILTRSGGYPSVFYGDMYGTKGTTTREIPALKSKIEPLLKARKDYAYGTQRDYIDNPDVIGWTREGDSTKAKSGLATVITDGPGGSKRMYVGTSNAGEIWYDLTGNRTDKITIGSDGYATFPVNGGSVSVWVQQ

SEQ ID NO: 38628 - protein, 480 aa, Cytophaga sp.
NGTMMQYFEWYVPNDGQQWNRLRTDAPYLSSVGITAVWTPPAYKGTSQADVGYGPYDLYDLGEFNQKGTVRTKYGTKGELKSAVNTLHSNGIQVYGDVVMNHKAGADYTENVTAVEVNPSNRYQETSGEYNIQAWTGFNFPGRGTTYSNWKWQWFHFDGTDWDQSRSLSRIFKFDGKAWDWEVSSENGNYDYLMYADYDYDHPDVVNEMKKWGVWYANEVGLDGYRLDAVKHIKFQFLKDWVDNARAATGKEMFTVGEYWQNDLGALNNYLAKVNYNQSLFDAPLHYNFYAASTGGGYYDMRNILNNTLVASNPTKAVTLVENHDTQPGQSLESTVQPWFKPLAYAFILTRSGGYPSVFYGDMYGTKGTTTREIPALKSKIEPLMKARKDYAYGTQRDYIDNPDVIGWTREGDSTKAKSGLATVITDGPGGSKRMYVGTSNAGEIWYDLTGNRTDKITIGSDGYATFPVNGGSVSVWVQQ

SEQ ID NO: 38629 - protein, 480 aa, Cytophaga sp.
NGTMMQYFEWYVPNDGQQWNRLRTDAPYLSSVGITAVWTPPAYKGTSQADVGYGPYDLYDLGEFNQKGTVRTKYGTKGELKSAVNTLHSNGIQVYGDVVMNHKAGADYTENVTAVEVNPSNRYQETSGEYNIQAWTGFNFPGRGTTYSNWKWQWFHFDGTDWDQSRSLSRIFKFDGKAWDWEVSSENGNYDYLMYADYDYDHPDVVNEMKKWGVWYANEVGLDGYRLDAVKHIKFQFLKDWVDNARAATGKEMFTVGEYWQNDLGALNNYLAKVNYNQSLFDAPLHYNFYAASTGGGYYDMRNILNNTLVASNPTKAVTLVENHDTQPGQSLESTVQPWFKPLAYAFILTRSGGYPSVFYGDMYGTKGTTTREIPALKSKIEPLLKARKDYAYGTQRDYIDNPDVIGWTREGDSTKAKSGLATVITDGPGGSKRMYVGTSNAGEIWYDLTGNRTDKITIGSDGYATFPVNGFSVSVWVQQ

SEQ ID NO: 38630 - protein, 480 aa, Cytophaga sp.
NGTMMQYFEWYVPNDGQQWNRLRTDAPYLSSVGITAVWTPPAYKGTSQADVGYGPYDLYDLGEFNQKGTVRTKYGTKGELKSAVNTLHSNGIQVYGDVVMNHKAGADYTENVTAVEVNPSNRYQETSGEYNIQAWTGFNFPGRGTTYSNWKWQWFHFDGTDWDQSRSLSRIFKFDGKAWDWEVSSENGNYDYLMYADYDYDHPDVVNEMKKWGVWYANEVGLDGYRLDAVKHIKQQFLKDWVDNARAATGKEMFTVGEYWQNDLGALNNYLAKVNYNQSLFDAPLHYNFYAASTGGGYYDMRNILNNTLVASNPTKAVTLVENHDTQPGQSLESTVQPWFKPLAYAFILTRSGGYPSVFYGDMYGTKGTTTREIPALKSKIEPLLKARKDYAYGTQRDYIDNPDVIGWTREGDSTKAKSGLATVITDGPGGSKRMYVGTSNAGEIWYDLTGNRTDKITIGSDGYATFPVNGGSVSVWVQQ

SEQ ID NO: 38631 - protein, 480 aa, Cytophaga sp.
NGTMMQYFEWYVPNDGQQWNRLRTDAPYLSSVGITAVWTPPAYKGTSQADVGYGPYDLYDLGEFNQKGTVRTKYGTKGELKSAVNTLHSNGIQVYGDVVMNHKAGADYTENVTAVEVNPSNRYQETSGEYNIQAWTGFNFPGRGTTYSNWKWQWFHFDGTDWDQSRSLSRIFKFDGKAWDWEVSSENGNYDYLMYADYDYDHPDVVNEMKKWGVWYANEVGLDGYRLDAVKHIKFQFLKDWVDNARAATGKEMFTVGEYWQNDLGALNNYLAKVNYNQSLFDAPLHYNFYAASTGGGYYDMRNILNNTLVASNPTKAVTLVENHDTQPGQSLESTVQPWFKPLAYAFILTRSGGYPSVFYGDMYGTKGTTTREIPALKSKIEPLLKARKDYAYGTQRDYIDNPDVIGWTREGDSTKAKSGLATVITDGPGGSKRMYVGTSNAGEIWYDLTGNRTDKITIGTDGYATFPVNGGSVSVWVQQ

SEQ ID NO: 38632 - protein, 480 aa, Cytophaga sp.
NGTMMQYFEWQVPNDGQQWNRLRTDAPYLSSVGITAVWTPPAYKGTSQADVGYGPYDLYDLGEFNQKGTVRTKYGTKGELKSAVNTLHSNGIQVYGDVVMNHKAGADYTENVTAVEVNPSNRYQETSGEYNIQAWTGFNFPGRGTTYSNWKWQWFHFDGTDWDQSRSLSRIFKFDGKAWDWEVSSENGNYDYLMYADYDYDHPDVVNEMKKWGVWYANEVGLDGYRLDAVKHIKFQFLKDWVDNARAATGKEMFTVGEYWQNDLGALNNYLAKVNYNQSLFDAPLHYNFYAASTGGGYYDMRNILNNTLVASNPTKAVTLVENHDTQPGQSLESTVQPWFKPLAYAFILTRSGGYPSVFYGDMYGTKGTTTREIPALKSKIEPLLKARKDYAYGTQRDYIDNPDVIGWTREGDSTKAKSGLATVITDGPGGSKRMYVGTSNAGEIWYDLTGNRTDKITIGSDGYATFPVNGGSVSVWVQQ

SEQ ID NO: 38633 - protein, 480 aa, Cytophaga sp.
NGTMMQYFEWYVPNDGQQWNRLRTDAPYLSSVGITAVWTPPAYKGTSQADVGYGPYDLYDLGEFNQKGTVRTKYGTKGELKSAVNTLHSNGIQVYGDVVMNHKAGADYTENVTAVEVNPSNRYQETSGEYNIQAWTGFNFPGRGTTYSNWKWQWFHFDGTDWDQSRSLSRIFKFDGKAWDWEVSSENGNYDYLMYADYDYDHPDVVNEMKKWGVWYANEVGLDGYRLDAVKHIKFQFLKDWVDNARAATGKEMFTVGEYWQNDLGALNNYLAKVNYNQSLFDAPLHYNFYAASTGGGYYDMRNILNNTLVASNPTKAVTLVENHDTQPGQSLESTVQPWFKPLAYAFILTRSGGYPSVFYGDMYGTKGTTTREIPALKSKIEPLLKARKDYAYGTQRDYIDNPDVIGWTREGDSTKAKSGLATVITDGPMGSKRMYVGTSNAGEIWYDLTGNRTDKITIGSDGYATFPVNGGSVSVWVQQ

SEQ ID NO: 38634 - protein, 480 aa, Cytophaga sp.
NGTMMQYFEWYVPNDGQQWNRLRTDAPYLSSVGITAVWTPPAYKGTSQADVGYGPYDLYDLGEFNQKGTVRTKYGTKGELKSAVNTLHSNGIQVYGDVVMNHKAGADYTENVTAVEVNPSNRYQETSGEYNIQAWTGFNFPGRGTTYSNWKWQWFHFDGTDWDQSRSLSRIFKFDGKAWDWEVSSENGNYDYLMYADYDYDHPDVVNEMKKWGVWYANEVGLDGYRLDAVKHIKFQFLKDWVDNARAATGKEMFTVGEYWQNDLGALNNYLAKVNYNQSLFDAPLHYNFYAASTGGGYYDMRNILNNTLVASNPTKAVTLVENHDTQPGQSLESTVQPWFKPLAYAFILTRSGGYPSVFYGDMYGTKGTTTREIPALKSKIEPLLKARKDYAYGTQRDYIDNPDVIGWTREGDSTKAWSGLATVITDGPGGSKRMYVGTSNAGEIWYDLTGNRTDKITIGSDGYATFPVNGGSVSVWVQQ

SEQ ID NO: 38635 - protein, 480 aa, Cytophaga sp.
NGTMMQYFEWYVPNDGQQWNRLRTDAPYLSSVGITADWTPPAYKGTSQADVGYGPYDLYDLGEFNQKGTVRTKYGTKGELKSAVNTLHSNGIQVYGDVVMNHKAGADYTENVTAVEVNPSNRYQETSGEYNIQAWTGFNFPGRGTTYSNWKWQWFHFDGTDWDQSRSLSRIFKFDGKAWDWEVSSENGNYDYLMYADYDYDHPDVVNEMKKWGVWYANEVGLDGYRLDAVKHIKFQFLKDWVDNARAATGKEMFTVGEYWQNDLGALNNYLAKVNYNQSLFDAPLHYNFYAASTGGGYYDMRNILNNTLVASNPTKAVTLVENHDTQPGQSLESTVQPWFKPLAYAFILTRSGGYPSVFYGDMYGTKGTTTREIPALKSKIEPLLKARKDYAYGTQRDYIDNPDVIGWTREGDSTKAKSGLATVITDGPGGSKRMYVGTSNAGEIWYDLTGNRTDKITIGSDGYATFPVNGGSVSVWVQQ

SEQ ID NO: 38636 - protein, 480 aa, Cytophaga sp.
NGTMMQYFEWYVPNDGQQWNRLRTDAPYLSSVGITAVWTPPAYKGTSQADVGYGPYDLYDLGEFNQKGTVRTKYGTKGELKSAVNTLHSNGIQVYGDVVMNHKAGADYTENVTAVEVNPSNRYQETSGEYNIQAWTGFNFPGRGTTYSNWKWQWFHFDGTDWDQSRSLSRIFKFDGKAWDWEVSSENGNYDYLMYADYDYDHPDVVNEMKKWGVWYANEVGLDGYRLDAVKHIKFQFLKDWVDNARAATGKEMFTVGEYWQNDLGALNNYLAKVNYNQSLFDAPLHYNFYAASTGGGYYDMRNILNNTLVASNPTKAVTLVENHDTQPGQSLESTVQPWFKPLAYAFILTRSGGYPSVFYGDMYGTKGTTTREIPALKSKIEPLLKARKDYAYGTQRDYIDNPDVIGWTREGDSTKAKSGLATVITDGPGGSKRMYVGTSNAGEIWYDLTGNRTDKITIGSDGYATFPVNGMSVSVWVQQ

SEQ ID NO: 38637 - protein, 480 aa, Cytophaga sp.
NGTMMQYFEWYVPNDGQQWNRLRTDAPYLSSVGITAVWTPPAYKGTSQADVGYGPYDLYDLGEFNQKGTVRTKYGTKGELKSAVNTLHRNGIQVYGDVVMNHKAGADYTENVTAVEVNPSNRYQETSGEYNIQAWTGFNFPGRGTTYSNWKWQWFHFDGTDWDQSRSLSRIFKFHGKAWDWPVSSENGNYDYLMYADYDYDHPDVVNEMKKWGVWYANEVGLDGYRLDAVKHIKFSFLKDWVDNARAATGKEMFTVGEYWQNDLGALNNYLAKVNYNQSLFDAPLHYNFYAASTGGGYYDMRNILNNTLVASNPTKAVTLVENHDTQPGQSLESTVQPWFKPLAYAFILTRSGGYPAVFYGDMYGTKGTTTYEIPALKSKIEPLLKARKDYAYGTQRDYIDNPDVIGWTREGDSTKAKSGLATVITDGPGGSKRMYVGTSNAGEIWYDLTGNRTDKITIGSDGYATFPVNGGSVSVWVQQ

SEQ ID NO: 38638 - protein, 480 aa, Cytophaga sp.
NGTMMQYFEWYVPNDGQQWNRLRTDAPYLSSVGITAVWTPPAYKGTSQADVGYGPYDLYDLGEFNQKGTVRTKYGTKGELKSAVNTLHSNGIQVYGDVVMNHKAGADYTENVTAVEVNPSNRYQETSGEYNIQAWTGFNFPGRGTTYSNWKWQWFHFDGTDWDQSRSLSRIFKFDGKAWDWEVSSENGNYDYLMYADYDYDHPDVVNEMKKWGVWYANEVGLDGYRLDAVKHIKFQFLKDWVDNARAATGKEMFTVGEYWQNDLGALNNYLAKVNYNQSLFDAPLHYNFYAASTGGGYYDMRNILNNTLVASNPTKAVTLVENHDTQPGQSLESTVQPWFKPLAYAFILTRSGGYPSVFYGDMYGTKGTTTREIPALKSKIEPLLKARKDYAYGTQRDYIDNPDVIGWTREGDSTKAKSGLATVITDGPGGSKRMMVGTSNAGEIWYDLTGNRTDKITIGSDGYATFPVNGGSVSVWVQQ

SEQ ID NO: 38639 - protein, 480 aa, Cytophaga sp.
NGTMMQYFEWYVPNDGQQWNRLRTDAPYLSSVGITAVWTPPAYKGTSQADVGYGPYDLYDLGEFNQKGTVRTKYGTKGELKSAVNTLHSNGIQVYGDVVMNHKAGADYTENVTAFEVNPSNRYQETSGEYNIQAWTGFNFPGRGTTYSNWKWQWFHFDGTDWDQSRSLSRIFKFDGKAWDWEVSSENGNYDYLMYADYDYDHPDVVNEMKKWGVWYANEVGLDGYRLDAVKHIKFQFLKDWVDNARAATGKEMFTVGEYWQNDLGALNNYLAKVNYNQSLFDAPLHYNFYAASTGGGYYDMRNILNNTLVASNPTKAVTLVENHDTQPGQSLESTVQPWFKPLAYAFILTRSGGYPSVFYGDMYGTKGTTTREIPALKSKIEPLLKARKDYAYGTQRDYIDNPDVIGWTREGDSTKAKSGLATVITDGPGGSKRMYVGTSNAGEIWYDLTGNRTDKITIGSDGYATFPVNGGSVSVWVQQ

SEQ ID NO: 38640 - protein, 480 aa, Cytophaga sp.
NGTMMQYFEWYVPNDGQQWNRLRTDAPYLSSVGITAVWTPPAYKGTSQADVGYGPYDLYDLGEFNQKGTVRTKYGTKGELKSAVNTLHSNGIQVYGDVVMNHKAGADYTENVTAVEVNPSNRYQETSGEYNIQAWTGFNFPGRGTTYSNWKWQWFHFDGTDWDQSRSLSRIFKFDGKAWDWEVSSENGNYDYLMYADYDYDHPDVVNEMKKWGVWYANEVGLDGYRLDAVKHIKFQFLKDWVDNARAATGKEMFTVGEYWQNDLGALNNYLAKVNYNQSLFDAPLHYNFYAASTGGGYYDMRNILNNTLVASNPTKAVTLVENHDTQPGQSLESTVQPWFKPLAYAFILTRSGGYPSVFYGDMYGTKGTTTREIPALKSKIEPLLKARKDWAYGTQRDYIDNPDVIGWTREGDSTKAKSGLATVITDGPGGSKRMYVGTSNAGEIWYDLTGNRTDKITIGSDGYATFPVNGGSVSVWVQQ

SEQ ID NO: 38641 - protein, 480 aa, Cytophaga sp.
NGTMMQYFEWYVPNDGQQWNRLRTDAPYLSSVGITAVWTPPAYKGTSQADVGYGPYDLYDLGEFNQKGTVRTKYGTKGELKSAVNTLHSNGIQVYGDVVMNHKAGADYTENVTAVEVNPSNRYQETSGEYNIQAWTGFNFPGRGTTYSNWKWQWFHFDGTDWDQSRSLSRIFKFDGKAWDWEVSSENGNYDYLMYADYDYDHPDVVNEMKKWGVWYANEVGLDGYRLDAVKHIKFQFLKDWVDNARAATGKEMFTVGEYWQNDLGALNNYLAKVNYNQSLFDAPLHYNFYAASTGGGYYDMRNILNNTLVASNPTKAVTLVENHDTQPGQSLESTVQPWFKPLAYAFILTRSGGYPSVFYGDMYGTKGTTTREIPALKSKIEPLLKARKDYAYGTQRDYIDNPDVIGWTREGDSTKASSGLATVITDGPGGSKRMYVGTSNAGEIWYDLTGNRTDKITIGSDGYATFPVNGGSVSVWVQQ

SEQ ID NO: 38642 - protein, 480 aa, Cytophaga sp.
NGTMMQYFEWYVPNDGQQWNRLRTDAPYLSSVGITAVWTPPAYKGTSQADVGYGPYDLYDLGEFNQKGTVRTKYGTKGELKSAVNTLHSNGIQVYGDVVMNHKAGADYTENVTAVEVNPSNRYQETSGEYNIQAWTGFNFPGRGTTYSNWKWQWFHFDGTDWDQSRSLSRIFKFDGKAWDWEVSSENGNYDYLMYADYDYDHPDVVNEMKKWGVWYANEVGLDGYRLDAVKHIKFQFLKDWVDNARAATGKEMFTVGEYWQNDLGALNNYLAKVNYNQSLFDAPLHYNFYAASTGGGYYDMRNILNNTLVASNPTKAVTLVENHDTQPGQSLESTVQPWFKPLAYAFILTRSGGYPSVFYGDMYGTKGTTTREIPALKSKIEPLLKARKDYMYGTQRDYIDNPDVIGWTREGDSTKAKSGLATVITDGPGGSKRMYVGTSNAGEIWYDLTGNRTDKITIGSDGYATFPVNGGSVSVWVQQ

SEQ ID NO: 38643 - protein, 480 aa, Cytophaga sp.
NGTMMQYFEWYVPNDGQQWNRLRTDAPYLSSVGITAVWTPPAYKGTSQADVGYGPYDLYDLGEFNQKGTVRTKYGTKGELKSAVNTLHSNGIQVYGDVVMNHKAGADYTENVTAVEVNPSNRYQETSGEYNIQAWTGFNFPGRGTTYSNWKWQWFHFDGTDWDQSRSLSRIFKFDGKAWDWEVSSENGNYDYLMYADYDYEHPDVVNEMKKWGVWYANEVGLDGYRLDAVKHIKFQFLKDWVDNARAATGKEMFTVGEYWQNDLGALNNYLAKVNYNQSLFDAPLHYNFYAASTGGGYYDMRNILNNTLVASNPTKAVTLVENHDTQPGQSLESTVQPWFKPLAYAFILTRSGGYPSVFYGDMYGTKGTTTREIPALKSKIEPLLKARKDYAYGTQRDYIDNPDVIGWTREGDSTKAKSGLATVITDGPGGSKRMYVGTSNAGEIWYDLTGNRTDKITIGSDGYATFPVNGGSVSVWVQQ

SEQ ID NO: 38644 - protein, 480 aa, Cytophaga sp.
NGTMMQYFEWYVPNDGQQWNRLRTDAPYLSSVGITAVWTPPAYKGTSQADVGYGPYDLYDLGEFNQKGTVRTKYGTKGELKSAVNTLHSNGIQVYGDVVMNHKAGADYTENVTAIEVNPSNRYQETSGEYNIQAWTGFNFPGRGTTYSNWKWQWFHFDGTDWDQSRSLSRIFKFDGKAWDWEVSSENGNYDYLMYADYDYDHPDVVNEMKKWGVWYANEVGLDGYRLDAVKHIKFQFLKDWVDNARAATGKEMFTVGEYWQNDLGALNNYLAKVNYNQSLFDAPLHYNFYAASTGGGYYDMRNILNNTLVASNPTKAVTLVENHDTQPGQSLESTVQPWFKPLAYAFILTRSGGYPSVFYGDMYGTKGTTTREIPALKSKIEPLLKARKDYAYGTQRDYIDNPDVIGWTREGDSTKAKSGLATVITDGPGGSKRMYVGTSNAGEIWYDLTGNRTDKITIGSDGYATFPVNGGSVSVWVQQ

SEQ ID NO: 38645 - protein, 480 aa, Cytophaga sp.
NGTMMQYFEWYVPNDGQQWNRLRTDAPYLSSVGITAVWTPPAYKGTSQADVGYGPYDLYDLGEFNQKGTVRTKYGTKGELKSAVNTLHSNGIQVYGDVVMNHKAGADYPENVTAVEVNPSNRYQETSGEYNIQAWTGFNFPGRGTTYSNWKWQWFHFDGTDWDQSRSLSRIFKFDGKAWDWEVSSENGNYDYLMYADYDYDHPDVVNEMKKWGVWYANEVGLDGYRLDAVKHIKFQFLKDWVDNARAATGKEMFTVGEYWQNDLGALNNYLAKVNYNQSLFDAPLHYNFYAASTGGGYYDMRNILNNTLVASNPTKAVTLVENHDTQPGQSLESTVQPWFKPLAYAFILTRSGGYPSVFYGDMYGTKGTTTREIPALKSKIEPLLKARKDYAYGTQRDYIDNPDVIGWTREGDSTKAKSGLATVITDGPGGSKRMYVGTSNAGEIWYDLTGNRTDKITIGSDGYATFPVNGGSVSVWVQQ

SEQ ID NO: 38646 - protein, 480 aa, Cytophaga sp.
NGTMMQYFEWYVPNDGQQWNRLRTDAPYLSSVGITAVWTPPAYKGTSQADVGYGPYDLYDLGEFNQKGTVRTKYGTKGELKSAVNTLHSNGIQVYGDVVMNHKAGADYTENVTAVEVNPSNRYQETSGEYNIQAWTGFNFPGRGTTYSNWKWQWFHFDGTDWDQSRSLSRIFKFDGKAWDWEVSSENGNYDYLMYADYDYDHPDVVNEMKKWGVWYANEVGLDGYRLDAVKHIKFQFLKDWVDNARAATGKEMFTVGEYWQNDLGALNNYLAKVNYNQSLFDAPLHYNFYAASTGGGYYDMRNILNNTLVASNPTKAVTLVENHDTQPGQSLESTVQPWFKPLAYAFILTRSGGYPSVFYGDMYGTKGTTTREIPALKSKIEPLLKARKDYAYGTQRDYIDNPDVIGWTREGTSTKAKSGLATVITDGPGGSKRMYVGTSNAGEIWYDLTGNRTDKITIGSDGYATFPVNGGSVSVWVQQ

SEQ ID NO: 38647 - protein, 480 aa, Cytophaga sp.
NGTMMQYFEWYVPNDGQQWNRLRTDAPYLSSVGITAVWTPPAYKGTSQADVGYGPYDLYDLGEFNQKGTVRTKYGTKGELKSAVNTLHSNGIQVYGDVVMNHKAGADYTENVTAVEVNPSNRYQETSGEYNIQAWTGFNFPGRGTTYSNWKWQWFHFDGTDWDQSRSLSRIFKFDGKAWDWEVSSENGNYDYLMYADYDYDHPDVVNEMKKWGVWYANEVGLDGYRLDAVKHIKFQFLKDWVDNARAATGKEMFTVGEYWQNDLGALNNYLAKVNYNQSLFDAPLHYNFYAASTGGGYYDMRNILNNTLVASNPTKAVTLVENHDTQPGQSLESTVQPWFKPLAYAFILTRSGGYPSVFYGDMYGTKGTTTREIPALKSKIEPLLKARKDYAYGTQRDYIDNPDVIGWTREGDSTKAKSGLATVITDGNGGSKRMYVGTSNAGEIWYDLTGNRTDKITIGSDGYATFPVNGGSVSVWVQQ

SEQ ID NO: 38648 - protein, 480 aa, Cytophaga sp.
NGTMMQYFEWYVPNDGQQWNRLRTDAPYLSSVGITAVWTPPAYKGTSQADVGYGPYDLYDLGEFNQKGTVRTKYGTKGELKSAVNTLHSNGIQVYGDVVMNHKAGADYTENVTAVEVNPSNRYQETSGEYNIQAWTGFNFPGRGTTYSNWKWQWFHFDGTDWDQSRSLSRIFKFDGKAWDWEVSSENGNYDYLMYADYDYDHPDVVNEMKKWGVWYANEVGLDGYRLDAVKHIKFQFLKDWVDNARAATGKEMFTVGEYWQNDLGALNNYLAKVNYNQSLFDAPLHYNFYAASTGGGYYDMRNILNNTLVASNPTKAVTLVENHDTQPGQSLESTVQPWFKPLAYAFILTRSGGYPSVFYGDMYGTKGTTTREIPALKSKIEPLLKARKDYVYGTQRDYIDNPDVIGWTREGDSTKAKSGLATVITDGPGGSKRMYVGTSNAGEIWYDLTGNRTDKITIGSDGYATFPVNGGSVSVWVQQ

SEQ ID NO: 38649 - protein, 480 aa, Cytophaga sp.
NGTMMQYFEWYVPNDGQQWNRLRTDAPYLSSVGITAVWTPPAYKGTSQADVGYGPYDLYDLGEFNQKGTVRTKYGTKGELKSAVNTLHSNGIQVYGDVVMNHKAGADYTENVTAVEVNPSNRYQETSGEYNIQAWTGFNFPGRGTTYSNWKWQWFHFDGTDWDQSRSLSRIFKFDGKAWDWEVSNENGNYDYLMYADYDYDHPDVVNEMKKWGVWYANEVGLDGYRLDAVKHIKFQFLKDWVDNARAATGKEMFTVGEYWQNDLGALNNYLAKVNYNQSLFDAPLHYNFYAASTGGGYYDMRNILNNTLVASNPTKAVTLVENHDTQPGQSLESTVQPWFKPLAYAFILTRSGGYPSVFYGDMYGTKGTTTREIPALKSKIEPLLKARKDYAYGTQRDYIDNPDVIGWTREGDSTKAKSGLATVITDGPGGSKRMYVGTSNAGEIWYDLTGNRTDKITIGSDGYATFPVNGGSVSVWVQQ

SEQ ID NO: 38650 - protein, 480 aa, Cytophaga sp.
NGTMMQYFEWYVPNDGQQWNRLRTDAPYLSSVGITAVWTPPAYKGTSQADVGYGPYDLYDLGEFNQKGTVRTKYGTKGELKSAVNTLHSNGIQVYGDVVMNHKAGADYTENVTAVEVNPSNRYQETSGEYNIQAWTGFNFPGRGTTYSNWKWQWFHFDGTDWDQSRSLSRIFKFDGKAWDWEVSSENGNYDYLMYADYDYDHPDVVNEMKKWGVWYANEVGLDGYRLDAVKHIKFQFLKDWVDNARAATGKEMFTVGEYWQNDLGALNNYLAKVNYNQSLFDAPLHYNFYAASTGGGYYDMRNILNNTLVASNPTKAVTLVENHDTQPGQSLESTVQPWFKPLAYAFILTRSGGYPSVFYGDMYGTKGTTTREIPALKSKIEPLLKARRDYAYGTQRDYIDNPDVIGWTREGDSTKAKSGLATVITDGPGGSKRMYVGTSNAGEIWYDLTGNRTDKITIGSDGYATFPVNGGSVSVWVQQ

SEQ ID NO: 38651 - protein, 480 aa, Cytophaga sp.
NGTMMQYFEWYVPNDGQQWNRLRTDAPYLSSVGITAVWTPPAYKGTSQADVGYGPYDLYDLGEFNQKGTVRTKYGTKGELKSAVNTLHSNGIQVYGDVVMNHKAGADYTENVTAVEVNPSNRYQETSGEYNIQAWTGFNFPGRGTTYSNWKWQWFHFDGTDWDQSRSLSRIFKFDGKAWDWEVSSENGNYDYLMYADYDYDHPDVVNEMKKWGVWYANEVGLDGYRLDAVKHIKFQFLKDWVDNARAATGKEMFTVGEYWQNDLGALNNYLAKVNYNQSLFDAPLHYNFYAASTGGGYYDMRNILNNTLVASNPTKAVTLVENHDTQPGQSLPSTVQPWFKPLAYAFILTRSGGYPSVFYGDMYGTKGTTTREIPALKSKIEPLLKARKDYAYGTQRDYIDNPDVIGWTREGDSTKAKSGLATVITDGPGGSKRMYVGTSNAGEIWYDLTGNRTDKITIGSDGYATFPVNGGSVSVWVQQ

SEQ ID NO: 38652 - protein, 480 aa, Cytophaga sp.
NGTMMQYFEWYVPNDGQQWNRLRTDAPYLSSVGITAVWTPPAYKGTSQADVGYGPYDLYDLGEFNQKGTVRTKYGTKGELKSAVNTLHSNGIQVYGDVVMNHKAGADYTENVTAVEVNPSNRYQETSGEYNIQAWTGFNFPGRGTTYSNWKWQWFHFDGTDWDQSRSLSRIFTFDGKAWDWEVSSENGNYDYLMYADYDYDHPDVVNEMKKWGVWYANEVGLDGYRLDAVKHIKFQFLKDWVDNARAATGKEMFTVGEYWQNDLGALNNYLAKVNYNQSLFDAPLHYNFYAASTGGGYYDMRNILNNTLVASNPTKAVTLVENHDTQPGQSLESTVQPWFKPLAYAFILTRSGGYPSVFYGDMYGTKGTTTREIPALKSKIEPLLKARKDYAYGTQRDYIDNPDVIGWTREGDSTKAKSGLATVITDGPGGSKRMYVGTSNAGEIWYDLTGNRTDKITIGSDGYATFPVNGGSVSVWVQQ

SEQ ID NO: 38653 - protein, 480 aa, Cytophaga sp.
NGTMMQYFEWYVPNDGQQWNRLRTDAPYLSSVGITAVWTPPAYKGTSQADVGYGPYDLYDLGEFNQKGTVRTKYGTKGELKSAVNTLHSNGIQVYGDVVMNHKAGADYTENVTAVEVNPSNRYQETSGEYNIQAWTGFNFPGRGTTYSNWKWQWFHFDGTDWDQSRSLSRIFKFDGKAWDWEVSSENGNYDYLMYADYDYDHPDVVNEMKKWGVWYANEVGLDGYRLDAVKHIKFQFLKDWVDNARAATGKEMFTVGEYWQNDLGALNNYLAKVNYNQSLFDAPLHYNFYAASTGGGYYDMRNILNNTLVASNPTKAVTLVENHDTQPGQSLESTVQPWFKPLAYAFILTRSGGYPSVFYGDMVGTKGTTTREIPALKSKIEPLLKARKDYAYGTQRDYIDNPDVIGWTREGDSTKAKSGLATVITDGPGGSKRMYVGTSNAGEIWYDLTGNRTDKITIGSDGYATFPVNGGSVSVWVQQ

SEQ ID NO: 38654 - protein, 480 aa, Cytophaga sp.
NGTMMQYFEWYVPNDGQQWNRLRTDAPYLSSVGITAVWTPPAYKGTSQADVGYGPYDLYDLGEFNQKGTVRTKYGTKGELKSAVNTLHSNGIQVYGDVVMNHKAGADYTENVTAVEVNPSNRYQETSGEYNIQAWTGFNFPGRGTTYSNWKWQWFHFDGTDWDQSRSLSRIFKFDGKAWDWEVSSENGNYDYLMYADYDYDHPDVVNEMKKWGVWYANEVGLDGYRLDAVKHIKFQFLKDWVDNARAATGKEMFTVGEYWQNDLGALNNYLAKVNYNQSLFDAPLHYNFYAASTGGGYYDMRNILNNTLVASNPTKAVTLVENHDTQPGQSLESTVQPWFKPLAYAFILTRSGGYPSVFYGDMYGTKGTTTREIPALKSKIEPLLKARKDYAYGTQRDYIDNPDVIGWTREGDSTKALSGLATVITDGPGGSKRMYVGTSNAGEIWYDLTGNRTDKITIGSDGYATFPVNGGSVSVWVQQ

SEQ ID NO: 38655 - protein, 480 aa, Cytophaga sp.
NGTMMQYFEWYVPNDGQQWNRLRTDAPYLSSVGITAVWTPPAYKGTCQADVGYGPYDLYDLGEFNQKGTVRTKYGTKGELKSAVNTLHSNGIQVYGDVVMNHKAGADYTENVTAVEVNPSNRYQETSGEYNIQAWTGFNFPGRGTTYSNWKWQWFHFDGTDWDQSRSLSRIFKFDGKAWDWEVSSENGNYDYLMYADYDYDHPDVVNEMKKWGVWYANEVGLDGYRLDAVKHIKFQFLKDWVDNARAATGKEMFTVGEYWQNDLGALNNYLAKVNYNQSLFDAPLHYNFYAASTGGGYYDMRNILNNTLVASNPTKAVTLVENHDTQPGQSLESTVQPWFKPLAYAFILTRSGGYPSVFYGDMYGTKGTTTREIPALKSKIEPLLKARKDYAYGTQRDYIDNPDVIGWTREGDSTKAKSGLATVITDGPGGSKRMYVGTSNAGEIWYDLTGNRTDKITIGSDGYATFPVNGGSVSVWVQQ

SEQ ID NO: 38656 - protein, 480 aa, Cytophaga sp.
NGTMMQYFEWYVPNDGQQWNRLRTDAPYLSSVGITAVWTPPAYKGTSQADVGYGPYDLYDLGEFNQKGTVRTKYGTKGELKSAVNTLHSNGIQVYGDVVMNHKAGADYTENVTAVEVNPSNRYHETSGEYNIQAWTGFNFPGRGTTYSNWKWQWFHFDGTDWDQSRSLSRIFKFDGKAWDWEVSSENGNYDYLMYADYDYDHPDVVNEMKKWGVWYANEVGLDGYRLDAVKHIKFQFLKDWVDNARAATGKEMFTVGEYWQNDLGALNNYLAKVNYNQSLFDAPLHYNFYAASTGGGYYDMRNILNNTLVASNPTKAVTLVENHDTQPGQSLESTVQPWFKPLAYAFILTRSGGYPSVFYGDMYGTKGTTTREIPALKSKIEPLLKARKDYAYGTQRDYIDNPDVIGWTREGDSTKAKSGLATVITDGPGGSKRMYVGTSNAGEIWYDLTGNRTDKITIGSDGYATFPVNGGSVSVWVQQ

SEQ ID NO: 38657 - protein, 480 aa, Cytophaga sp.
NGTMMQYFEWYVPNDGQQWNRLRTDAPYLSSVGITAVWTPPAYKGTSQADVGYGPYDLYDLGEFNQKGTVRTKYGTKGELKSAVNTLHSNGIQVYGDVVMNHKAGADYTENVTAVEVNPSNRYRETSGEYNIQAWTGFNFPGRGTTYSNWKWQWFHFDGTDWDQSRSLSRIFKFDGKAWDWEVSSENGNYDYLMYADYDYDHPDVVNEMKKWGVWYANEVGLDGYRLDAVKHIKFQFLKDWVDNARAATGKEMFTVGEYWQNDLGALNNYLAKVNYNQSLFDAPLHYNFYAASTGGGYYDMRNILNNTLVASNPTKAVTLVENHDTQPGQSLESTVQPWFKPLAYAFILTRSGGYPSVFYGDMYGTKGTTTREIPALKSKIEPLLKARKDYAYGTQRDYIDNPDVIGWTREGDSTKAKSGLATVITDGPGGSKRMYVGTSNAGEIWYDLTGNRTDKITIGSDGYATFPVNGGSVSVWVQQ

SEQ ID NO: 38658 - protein, 480 aa, Cytophaga sp.
NGTMMQYFEWYVPNDGQQWNRLRTDAPYLSSVGITAVWTPPAYKGTSQADVGYGPYDLYDLGEFNQKGTVRTKYGTKGELKSAVNTLHSNGIQVYGDVVMNHKAGADYTENVTAVEVNPSNRYQETSGEYNIQAWTGFNFPGRGTTYSNWKWQWFHFDGTDWDQSRSLSRIFKFDGKAWDWEVSSENGNYDYLMYADYDYDHPDVVNEMKKWGVWYANEVGLDGYRLDAVKHIKFQFLKDWVDNARAATGKEMFTVGEYWQNDLGALNNYLAKVNYNQSLFDAPLHYNFYAASTGGGYYDMRNILNNTLVASNPTKAVTLVENHDTQPGQSLESTVQPWFKPLAYAFILTRSGGYPSVFYGDMYGTKGTTTREIPALKSKIEPLLKARKDYAYGTQRDYIDNPDHIGWTREGDSTKAKSGLATVITDGPGGSKRMYVGTSNAGEIWYDLTGNRTDKITIGSDGYATFPVNGGSVSVWVQQ

SEQ ID NO: 38659 - protein, 480 aa, Cytophaga sp.
NGTMMQYFEWYVPNDGQQWNRLRTDAPYLSSVGITAVWTPPAYKGTSQADVGYGPYDLYDLGEFNQKGTVRTKYGTKGELKSAVNTLHSNGIQVYGDVVMNHKAGADYFENVTAVEVNPSNRYQETSGEYNIQAWTGFNFPGRGTTYSNWKWQWFHFDGTDWDQSRSLSRIFKFDGKAWDWEVSSENGNYDYLMYADYDYDHPDVVNEMKKWGVWYANEVGLDGYRLDAVKHIKFQFLKDWVDNARAATGKEMFTVGEYWQNDLGALNNYLAKVNYNQSLFDAPLHYNFYAASTGGGYYDMRNILNNTLVASNPTKAVTLVENHDTQPGQSLESTVQPWFKPLAYAFILTRSGGYPSVFYGDMYGTKGTTTREIPALKSKIEPLLKARKDYAYGTQRDYIDNPDVIGWTREGDSTKAKSGLATVITDGPGGSKRMYVGTSNAGEIWYDLTGNRTDKITIGSDGYATFPVNGGSVSVWVQQ

SEQ ID NO: 38660 - protein, 480 aa, Cytophaga sp.
NGTMMQYFEWYVPNDGQQWNRLRTDAPYLSSVGITAVWTPPAYKGTSQADVGYGPYDLYDLGEFNQKGTVRTKYGTKGELKSAVNTLHSNGIQVYGDVVMNHKAGADYTENVTAVEVNPSNRYQETSGEYNIQAWTGFNFPGRGTTYSNWKWQWFHFDGTDWDQSRSLSRIFKFDGKAWDWEVSSENGNYDYLMYADYDYDHPDVVNEMKKWGVWYANEVGLDGYRLDAVKHIKFQFLKDWVDNARAATGKEMFTVGEYWQNDLGALNNYLAKVNYNQSLFDAPLHYNFYAASTGGGYYDMRNILNNTLVASNPTKAVTLVENHDTQPGQSLESTVQPWFKPLAYAFILTRSGGYPSVFYGDMYGTKGTTTREIPALKSKIEPLLKARKDYAYGTQRDYIDNPDVIGWTREGDSTKAKSGLATVITDGPGGSKRMYVGTSNAGEIWYDLTGNRTDKITIGSDGYATFPVNGDSVSVWVQQ

SEQ ID NO: 38661 - protein, 480 aa, Cytophaga sp.
NGTMMQYFEWYVPNDGQQWNRLRTDAPYLSSVGITAVWTPPAYKGTSQADVGYGPYDLYDLGEFNQKGTVRTKYGTKGELKSAVNTLHSNGIQVYGDVVMNHKAGADYTENVTAVEVNPSNRYQETSGEYNIQAWTGFNFPGRGTTYSNWKWQWFHFDGTDWDQSRSLSRIFKFDGKAWDWEVSSENGNYDYLMYADYDYDHPDVVNEMKKWGVWYANEVGLDGYRLDAVKHIKFQFLKDWVDNARAATGKEMFTVGEYWQNDLGALNNYLAKVNYNQSLFDAPLHYNFYAASTGGGYYDMRNILNNTLVASNPTKAVTLVENHDTQPGQSLESTVQPWFKPLAYAFILTRSGGYPSVFYGDMYGTKGTTTREIPALKSKIEPLLKARKDYAYGTQRDYIDNQDVIGWTREGDSTKAKSGLATVITDGPGGSKRMYVGTSNAGEIWYDLTGNRTDKITIGSDGYATFPVNGGSVSVWVQQ

SEQ ID NO: 38662 - protein, 480 aa, Cytophaga sp.
NGTMMQYFEWYVPNDGQQWNRLRTDAPYLSSVGITAVWTPPAYKGTSQADVGYGPYDLYDLGEFNQKGTVRTKYGTKGELKSAVNTLHSNGIQVYGDVVMNHKAGADYTENVTAVEVNPSNRYQETSGEYNIQAWTGFNFPGRGTTYSNWKWQWFHFDGTDWDQSRSLSRIFKFDGKAWDWEVSSENGNYDYLMYADYDYDHPDVVNEMKKWGVWYANEVGLDGYRLDAVKHIKFQFLKDWVDNARAATGKEMFTVGEYWQNDLLALNNYLAKVNYNQSLFDAPLHYNFYAASTGGGYYDMRNILNNTLVASNPTKAVTLVENHDTQPGQSLESTVQPWFKPLAYAFILTRSGGYPSVFYGDMYGTKGTTTREIPALKSKIEPLLKARKDYAYGTQRDYIDNPDVIGWTREGDSTKAKSGLATVITDGPGGSKRMYVGTSNAGEIWYDLTGNRTDKITIGSDGYATFPVNGGSVSVWVQQ

SEQ ID NO: 38663 - protein, 480 aa, Cytophaga sp.
NGTMMQYFEWYVPNDGQQWNRLRTDAPYLSSVGITAVWTPPAYKGTSQADVGYGPYDLYDLGEFNQKGTVRTKYGTKGELKSAVNTLHSNGIQVYGDVVMNHKAGADYTENVTAVEVNPSNRYQETSGEYNIQAWTGFNFPGRGTTHSNWKWQWFHFDGTDWDQSRSNSRIFKFTGKAWDWPVSSENGNYDYLMYADYDYDHPDVVNEMKKWGVWYANEVGLDGYRLDAVKHIKFSFLKDWVDNARAATGKEMFTVGEYWQNDLGALNNYLAKVNYNQSLFDAPLHYNFYAASTGGGYYDMRNILNNTLVASNPTKAVTLVENHDTQPGQSLESTVQPWFKPLAYAFILTRSGGYPSVFYGDMYGTKGTTTREIPALKSKIEPLLKARKDYAYGTQRDYIDNPDVIGWTREGDSTKAKSGLATVITDGPGGSKRMYVGTSNAGEIWYDLTGNRTDKITIGSDGYATFPVNGGSVSVWVQQ

SEQ ID NO: 38664 - protein, 480 aa, Cytophaga sp.
NGTMMQYFEWYVPNDGQQWNRLRTDAPYLSSVGITAVWTPPAYKGTSQADVGYGPYDLYDLGEFNQKGTVRTKYGTKGELKSAVNTLHSNGIQVYGDVVMNHKAGADYTENVTAVEVNPSNRYQETSGEYNIQAWTGFNFPGRGTTYSNWKWQWFHFDGTDWDQSRSLSRIFKFDGKAWDWEVSSENGNYDYLMYADYDYDHPDKVNEMKKWGVWYANEVGLDGYRLDAVKHIKFQFLKDWVDNARAATGKEMFTVGEYWQNDLGALNNYLAKVNYNQSLFDAPLHYNFYAASTGGGYYDMRNILNNTLVASNPTKAVTLVENHDTQPGQSLESTVQPWFKPLAYAFILTRSGGYPSVFYGDMYGTKGTTTREIPALKSKIEPLLKARKDYAYGTQRDYIDNPDVIGWTREGDSTKAKSGLATVITDGPGGSKRMYVGTSNAGEIWYDLTGNRTDKITIGSDGYATFPVNGGSVSVWVQQ

SEQ ID NO: 38665 - protein, 480 aa, Cytophaga sp.
NGTMMQYFEWYVPNDGQQWNRLRTDAPYLSSVGITAVWTPPAYKGTSQADVGYGPYDLYDLGEFNQKGTVRTKYGTKGELKSAVNTLHSNGIQVYGDVVMNHKAGADYTENVTAVEVNPSNRYQETSGEYNIQAWTGFNFPGRGTTYSNWKWQWFHFDGTDWDQSRSLSRIFKFDGKAWDWEVSSENDNYDYLMYADYDYDHPDVVNEMKKWGVWYANEVGLDGYRLDAVKHIKFQFLKDWVDNARAATGKEMFTVGEYWQNDLGALNNYLAKVNYNQSLFDAPLHYNFYAASTGGGYYDMRNILNNTLVASNPTKAVTLVENHDTQPGQSLESTVQPWFKPLAYAFILTRSGGYPSVFYGDMYGTKGTTTREIPALKSKIEPLLKARKDYAYGTQRDYIDNPDVIGWTREGDSTKAKSGLATVITDGPGGSKRMYVGTSNAGEIWYDLTGNRTDKITIGSDGYATFPVNGGSVSVWVQQ

SEQ ID NO: 38666 - protein, 480 aa, Cytophaga sp.
NGTMMQYFEWYVPNDGQQWNRLRTDAPYLSSVGITAVWTPPAYKGTSQADVGYGPYDLYDLGEFNQKGTVRTKYGTKGELKSAVNTLHSNGIQVYGDVVMNHKAGADYTENVTAVEVNPSNRYQEKSGEYNIQAWTGFNFPGRGTTYSNWKWQWFHFDGTDWDQSRSLSRIFKFDGKAWDWEVSSENGNYDYLMYADYDYDHPDVVNEMKKWGVWYANEVGLDGYRLDAVKHIKFQFLKDWVDNARAATGKEMFTVGEYWQNDLGALNNYLAKVNYNQSLFDAPLHYNFYAASTGGGYYDMRNILNNTLVASNPTKAVTLVENHDTQPGQSLESTVQPWFKPLAYAFILTRSGGYPSVFYGDMYGTKGTTTREIPALKSKIEPLLKARKDYAYGTQRDYIDNPDVIGWTREGDSTKAKSGLATVITDGPGGSKRMYVGTSNAGEIWYDLTGNRTDKITIGSDGYATFPVNGGSVSVWVQQ

SEQ ID NO: 38667 - protein, 480 aa, Cytophaga sp.
NGTMMQYFEWYVPNDGQQWNRLRTDAPYLSSVGITAVWTPPAYKGTSQADVGYGPYDLYDLGEFNQKGTVRTKYGFKGELKSAVNTLHSNGIQVYGDVVMNHKAGADYTENVTAVEVNPSNRYQETSGEYNIQAWTGFNFPGRGTTYSNWKWQWFHFDGTDWDQSRSLSRIFKFDGKAWDWEVSSENGNYDYLMYADYDYDHPDVVNEMKKWGVWYANEVGLDGYRLDAVKHIKFQFLKDWVDNARAATGKEMFTVGEYWQNDLGALNNYLAKVNYNQSLFDAPLHYNFYAASTGGGYYDMRNILNNTLVASNPTKAVTLVENHDTQPGQSLESTVQPWFKPLAYAFILTRSGGYPSVFYGDMYGTKGTTTREIPALKSKIEPLLKARKDYAYGTQRDYIDNPDVIGWTREGDSTKAKSGLATVITDGPGGSKRMYVGTSNAGEIWYDLTGNRTDKITIGSDGYATFPVNGGSVSVWVQQ

SEQ ID NO: 38668 - protein, 480 aa, Cytophaga sp.
NGTMMQYFEWYVPNDGQQWNRLRTDAPYLSSVGITAVWTPPAYKGTSQADVGYGPYDLYDLGEFNQKGTVRTKYGTKGELKSAVNTLHSNGIQVYGDVVMNHKAGADYTENVTAVEVNPSNRYQETSGEYNIQAWTGFNFPGRGTTYSNWKWQWFHFDGTDWDQSRSLSRIFKFDGKAWDWEVSSENGNYDYLMYADYDYDHPDVVNEMKKWGVWLANEVGLDGYRLDAVKHIKFQFLKDWVDNARAATGKEMFTVGEYWQNDLGALNNYLAKVNYNQSLFDAPLHYNFYAASTGGGYYDMRNILNNTLVASNPTKAVTLVENHDTQPGQSLESTVQPWFKPLAYAFILTRSGGYPSVFYGDMYGTKGTTTREIPALKSKIEPLLKARKDYAYGTQRDYIDNPDVIGWTREGDSTKAKSGLATVITDGPGGSKRMYVGTSNAGEIWYDLTGNRTDKITIGSDGYATFPVNGGSVSVWVQQ

SEQ ID NO: 38669 - protein, 480 aa, Cytophaga sp.
NGTMMQYFEWYVPNDGQQWNRLRTDAPYLSSVGITAVWTPPAYKGTSQADVGYGPYDLYDLGEFNQKGTVRTKYGTKGELKSAVNTLHSNGIQVYGDVVMNHKAGADYTENVTAVEVNPSNRYQETSGEYNIQAWTGFNFPGRGTTYSNWKWQWFHFDGTDWDQSRSLSRIFKFDGKAWDWEVSSENGNYDYLMYADYDYDHPDVVNEMKKWGVWYANEVGLDGYRLDAVKHIKFQFLKDWVDNARAATGKEMFTVGEYWQNDLGALNNYLAKVNYNQSLFDAPLHYNFYAASTGGGYYDMRNILNNTLVASNPTKAVTLVENHDTQPGQSLESTVQPWFKPLAYAFILTRSGGYPSVFYGDMYGTKGTTTREIPALKSKIEPLLKARKDYAYGTQRDYIDNPDVIGWTREGDSTKAKSGLATVITDGPGGSKRMLVGTSNAGEIWYDLTGNRTDKITIGSDGYATFPVNGGSVSVWVQQ

SEQ ID NO: 38670 - protein, 480 aa, Cytophaga sp.
NGTMMQYFEWYVPNDGQQWNRLRTDAPYLSSVGITAVWTPPAYKGTSQADVGYGPYDLYDLGEFNQKGTVRTKYGTKGELKSAVNTLHSNGIQVYGDVVMNHKAGADYTENVTAVEVNPSNRYQETSGEYNIQAWTGFNFPGRGTTYSNWKWQWFHFDGTDWDQSRSLSRIFKFDGKAWDWEVSSENGNYDYLMYADYDYDHPDVVNEMKKWGVWYANEVGLDGYRLDAVKHIKFQFLKAWVDNARAATGKEMFTVGEYWQNDLGALNNYLAKVNYNQSLFDAPLHYNFYAASTGGGYYDMRNILNNTLVASNPTKAVTLVENHDTQPGQSLESTVQPWFKPLAYAFILTRSGGYPSVFYGDMYGTKGTTTREIPALKSKIEPLLKARKDYAYGTQRDYIDNPDVIGWTREGDSTKAKSGLATVITDGPGGSKRMYVGTSNAGEIWYDLTGNRTDKITIGSDGYATFPVNGGSVSVWVQQ

SEQ ID NO: 38671 - protein, 480 aa, Cytophaga sp.
NGTMMQYFEWYVPNDGQQWNRLRTDAPYLSSVGITAVWTPPAYKGTSQADVGYGPYDLCDLGEFNQKGTVRTKYGTKGELKSAVNTLHSNGIQVYGDVVMNHKAGADYTENVTAVEVNPSNRYQETSGEYNIQAWTGFNFPGRGTTYSNWKWQWFHFDGTDWDQSRSLSRIFKFDGKAWDWEVSSENGNYDYLMYADYDYDHPDVVNEMKKWGVWYANEVGLDGYRLDAVKHIKFQFLKDWVDNARAATGKEMFTVGEYWQNDLGALNNYLAKVNYNQSLFDAPLHYNFYAASTGGGYYDMRNILNNTLVASNPTKAVTLVENHDTQPGQSLESTVQPWFKPLAYAFILTRSGGYPSVFYGDMYGTKGTTTREIPALKSKIEPLLKARKDYAYGTQRDYIDNPDVIGWTREGDSTKAKSGLATVITDGPGGSKRMYVGTSNAGEIWYDLTGNRTDKITIGSDGYATFPVNGGSVSVWVQQ

SEQ ID NO: 38672 - protein, 480 aa, Cytophaga sp.
NGTMMQYFEWYVPNDGQQWNRLRTDAPYLSSVGITAVWTPPAYKGTSQADVGYGPYDLYDLGEFNQKGTVRTKYGTKGELKSAVNTLHSNGIQVYGDVVMNHKAGADYTENVTAVEVNPSNRYQETSGEYNIQAWTGFNFPGRGTTYSNWKWQWFHFDGTDWDQSRSLSRIFKFDGKAWDWEVSSENGNYDYLMYADYDYDHPDVVNEMKKWGVWYANEVGLDGYRLDAVKHIKFQFLKDWVDNARAATGKEMFTVGEYWQNDLGALNNYLAKVNYTQSLFDAPLHYNFYAASTGGGYYDMRNILNNTLVASNPTKAVTLVENHDTQPGQSLESTVQPWFKPLAYAFILTRSGGYPSVFYGDMYGTKGTTTREIPALKSKIEPLLKARKDYAYGTQRDYIDNPDVIGWTREGDSTKAKSGLATVITDGPGGSKRMYVGTSNAGEIWYDLTGNRTDKITIGSDGYATFPVNGGSVSVWVQQ

SEQ ID NO: 38673 - protein, 480 aa, Cytophaga sp.
NGTMMQYFEWYVPNDGQQWNRLRTDAPYLSSVGITAVWTPPAYKGTSQADVGYGPYDLYDLGEFNQKGTVRTKYGTKGELKSAVNTLHSNGIQVYGDVVMNHKAGADYTENVTAVEVNPSNRYQETSGEYNIQAWTGFNFPGRGTTYSNWKWQWFHFDGTDWDQSRSLSRIFKFDGKAWDWDVSSENGNYDYLMYADYDYDHPDVVNEMKKWGVWYANEVGLDGYRLDAVKHIKFQFLKDWVDNARAATGKEMFTVGEYWQNDLGALNNYLAKVNYNQSLFDAPLHYNFYAASTGGGYYDMRNILNNTLVASNPTKAVTLVENHDTQPGQSLESTVQPWFKPLAYAFILTRSGGYPSVFYGDMYGTKGTTTREIPALKSKIEPLLKARKDYAYGTQRDYIDNPDVIGWTREGDSTKAKSGLATVITDGPGGSKRMYVGTSNAGEIWYDLTGNRTDKITIGSDGYATFPVNGGSVSVWVQQ

SEQ ID NO: 38674 - protein, 480 aa, Cytophaga sp.
NGTMMQYFEWYVPNDGQQWNRLRTDAPYLSSVGITAVWTPPAYKGTSQADVGYGPYDLYDLGEFNQKGTVRTKYGTFGELKSAVNTLHSNGIQVYGDVVMNHKAGADYTENVTAVEVNPSNRYQETSGEYNIQAWTGFNFPGRGTTYSNWKWQWFHFDGTDWDQSRSLSRIFKFDGKAWDWEVSSENGNYDYLMYADYDYDHPDVVNEMKKWGVWYANEVGLDGYRLDAVKHIKFQFLKDWVDNARAATGKEMFTVGEYWQNDLGALNNYLAKVNYNQSLFDAPLHYNFYAASTGGGYYDMRNILNNTLVASNPTKAVTLVENHDTQPGQSLESTVQPWFKPLAYAFILTRSGGYPSVFYGDMYGTKGTTTREIPALKSKIEPLLKARKDYAYGTQRDYIDNPDVIGWTREGDSTKAKSGLATVITDGPGGSKRMYVGTSNAGEIWYDLTGNRTDKITIGSDGYATFPVNGGSVSVWVQQ

SEQ ID NO: 38675 - protein, 480 aa, Cytophaga sp.
NGTMMQYFEWYVPNDGQQWNRLRTDAPYLSSVGITAVWTPPAYKGTSQADVGYGPYDLYDLGEFNQKGTVRTKYGTKGELKSAVNTLHSNGIQVYGDVVMNHKAGADYTENVTAVEVNPSNRYQETSGEYNIQAWTGFNFPGRGTTYSNWKWQWFHFDGTDWDQSRSLSRIFKFDGKAWDWEVSSENGNYDYLMYADYDYDHPDVVNEMKKWGVWYANEVGLDGYRLDAVKHIKFQFLKDWVDNARAATGKEMFTVGEYWQNDLGALNNYLAKVNYNQSLFDAPLHYNFYAASTGGGYYDMRNILNNTLVASNPTKAVTLVENHDTQPGQSLESTVQPWFKPLAYAFILTRSGGYPSVFYGDMYGTKGTTTREIPALKSKIEPLLKARKDYAYGTQRDYIDNPDVIGWTREGDSTKAKSGLATVITDGPGGSKRMWVGTSNAGEIWYDLTGNRTDKITIGSDGYATFPVNGGSVSVWVQQ

SEQ ID NO: 38676 - protein, 480 aa, Cytophaga sp.
NGTMMQYFEWYVPNDGQQWNRLRTDAPYLSSVGITAVWTPPAYKGTSQADVGYGPYDLYDLGEFNQKGTVRTKYGTKGELKSAVNTLHSNGIQVYGDVVMNHKAGADYTENVTAVEVNPSNRYQETSGEYNIQAWTGFNFPGRGTTYSNWKWQWFHFDGTDWDQSRSLSRIFKFDGKAWDWEVSSENGNYDYLMYADYDYDHPDVVNEMKKWGVWYANEVGLDGYRLDAVKHIKFQFLKDWVDNARAATGKEMFTVGEYWQNDLGALNNYLAKVNYNQSLFDAPLHYNFYAASTGGGYYDMRNILNNTLVASNPTKAVTLVENHDTQPGQSLESTVQPWFKPLAYAFILTRSGGYPSVFYGDMYGTKGTTTREIPALKSKIEPLLKARKDYAYGTQRDYIDNMDVIGWTREGDSTKAKSGLATVITDGPGGSKRMYVGTSNAGEIWYDLTGNRTDKITIGSDGYATFPVNGGSVSVWVQQ

SEQ ID NO: 38677 - protein, 480 aa, Cytophaga sp.
NGTMMQYFEWYVPNDGQQWNRLRTDAPYLSSVGITAVWTPPAYKGTSQADVGYGPYDLYDLGEFNQKGTVRTKYGTKGELKSAVNTLHSNGIQVYGDVVMNHKAGADYTENVTAVEVNPSNRYQETSGEYNIQAWTGFNFPGRGTTYSNWKWQWFHFDGTDWDQSRSLSRIFKFDYKAWDWEVSSENGNYDYLMYADYDYDHPDVVNEMKKWGVWYANEVGLDGYRLDAVKHIKFQFLKDWVDNARAATGKEMFTVGEYWQNDLGALNNYLAKVNYNQSLFDAPLHYNFYAASTGGGYYDMRNILNNTLVASNPTKAVTLVENHDTQPGQSLESTVQPWFKPLAYAFILTRSGGYPSVFYGDMYGTKGTTTREIPALKSKIEPLLKARKDYAYGTQRDYIDNPDVIGWTREGDSTKAKSGLATVITDGPGGSKRMYVGTSNAGEIWYDLTGNRTDKITIGSDGYATFPVNGGSVSVWVQQ

SEQ ID NO: 38678 - protein, 480 aa, Cytophaga sp.
NGTMMQYFEWYVPNDGQQWNRLRTDAPYLSSVGITAVWTPPAYKGTSQADVGYGPYDLYDLGEFNQKGTVRTKYGTKGELKSAVNTLHSNGIQVYGDVVMNHKAGADYTENVTAVEVNPSNRYQETSGEYNIQAWTGFNFPGRGTTYSNWKWQWFHFDGTDWDQSRSLSRIFKFDGKAWDWEVSSENGNYDYLMYADYDYDHPDVVNEMKKWGVWYANEVGLDGYRLDAVKHIKFQFLKDWVDNARAATGKEMFTVGEYWQNDLGALNNYLAKVNYNQSLFDAPLHYNFYAASTGVGYYDMRNILNNTLVASNPTKAVTLVENHDTQPGQSLESTVQPWFKPLAYAFILTRSGGYPSVFYGDMYGTKGTTTREIPALKSKIEPLLKARKDYAYGTQRDYIDNPDVIGWTREGDSTKAKSGLATVITDGPGGSKRMYVGTSNAGEIWYDLTGNRTDKITIGSDGYATFPVNGGSVSVWVQQ

SEQ ID NO: 38679 - protein, 480 aa, Cytophaga sp.
NGTMMQYFEWYVPNDGQQWNRLRTDAPYLSSVGITAVWTPPAYKGTSQADVGYGPYDLYDLGEFNQKGTVRTKYGTKGELKSAVNTLHSNGIQVYGDVVMNHKAGADYTENVTAVEVNPSNRYQETSGEYNIQAWTGFNFPGRGTTYSNWKWQWFHFDGTDWDQSRSLSRIFKFDGKAWDWEVSSENGNYDYLMYADYDYDHPDVVNEMKKWGVWYANEVGLDGYRLDAVKHIKFQFLKDWVDNARAATGKEMFTVGEYWQNDLIALNNYLAKVNYNQSLFDAPLHYNFYAASTGGGYYDMRNILNNTLVASNPTKAVTLVENHDTQPGQSLESTVQPWFKPLAYAFILTRSGGYPSVFYGDMYGTKGTTTREIPALKSKIEPLLKARKDYAYGTQRDYIDNPDVIGWTREGDSTKAKSGLATVITDGPGGSKRMYVGTSNAGEIWYDLTGNRTDKITIGSDGYATFPVNGGSVSVWVQQ

SEQ ID NO: 38680 - protein, 480 aa, Cytophaga sp.
NGTMMQYFEWYVPNDGQQWNRLRTDAPYLSSVGITAVWTPPAYKGTSQADVGYGPYDLYDLGEFNQKGTVRTKYGTKGELKSAVNTLHSNGIQVYGDVVMNHKAGADYTENVTAVEVNPSNRYQETSGEYNIQAWTGFNFPGRGTTYINWKWQWFHFDGTDWDQSRSLSRIFKFDGKAWDWEVSSENGNYDYLMYADYDYDHPDVVNEMKKWGVWYANEVGLDGYRLDAVKHIKFQFLKDWVDNARAATGKEMFTVGEYWQNDLGALNNYLAKVNYNQSLFDAPLHYNFYAASTGGGYYDMRNILNNTLVASNPTKAVTLVENHDTQPGQSLESTVQPWFKPLAYAFILTRSGGYPSVFYGDMYGTKGTTTREIPALKSKIEPLLKARKDYAYGTQRDYIDNPDVIGWTREGDSTKAKSGLATVITDGPGGSKRMYVGTSNAGEIWYDLTGNRTDKITIGSDGYATFPVNGGSVSVWVQQ

SEQ ID NO: 38681 - protein, 480 aa, Cytophaga sp.
NGTMMQYFEWYVPNDGQQWNRLRTDAPYLSSVGITAVWTPPAYKGTSQADVGYGPYDLYDLGEFNQKGTVRTKYGTKGELKSAVNTLHSNGIQVYGDVVMNHKAGADYTENVTAVEVNPSNRYQETSGEYNIQAWTGFNFPGRGTTYSNWKWQWFHFDGTDWDQSRSLSRIFKFDGKAWDWEVSSENGNYDYLMYADYDYDHPDEVNEMKKWGVWYANEVGLDGYRLDAVKHIKFQFLKDWVDNARAATGKEMFTVGEYWQNDLGALNNYLAKVNYNQSLFDAPLHYNFYAASTGGGYYDMRNILNNTLVASNPTKAVTLVENHDTQPGQSLESTVQPWFKPLAYAFILTRSGGYPSVFYGDMYGTKGTTTREIPALKSKIEPLLKARKDYAYGTQRDYIDNPDVIGWTREGDSTKAKSGLATVITDGPGGSKRMYVGTSNAGEIWYDLTGNRTDKITIGSDGYATFPVNGGSVSVWVQQ

SEQ ID NO: 38682 - protein, 480 aa, Cytophaga sp.
NGTMMQYFEWYVPNDGQQWNRLRTDAPYLSSVGITAVWTPPAYKGTSQADVGYGPYDLYDLGEFNQKGTVRTKYGTKGELKSAVNTLHSNGIQVYGDVVMNHKAGADYAENVTAVEVNPSNRYQETSGEYNIQAWTGFNFPGRGTTYSNWKWQWFHFDGTDWDQSRSLSRIFKFDGKAWDWEVSSENGNYDYLMYADYDYDHPDVVNEMKKWGVWYANEVGLDGYRLDAVKHIKFQFLKDWVDNARAATGKEMFTVGEYWQNDLGALNNYLAKVNYNQSLFDAPLHYNFYAASTGGGYYDMRNILNNTLVASNPTKAVTLVENHDTQPGQSLESTVQPWFKPLAYAFILTRSGGYPSVFYGDMYGTKGTTTREIPALKSKIEPLLKARKDYAYGTQRDYIDNPDVIGWTREGDSTKAKSGLATVITDGPGGSKRMYVGTSNAGEIWYDLTGNRTDKITIGSDGYATFPVNGGSVSVWVQQ

SEQ ID NO: 38683 - protein, 480 aa, Cytophaga sp.
NGTMMQYFEWYVPNDGQQWNRLRTDAPYLSSVGITAVWTPPAYKGTSQADVGYGPYDLYDLGEFNQKGTVRTKYGTKGELKSAVNTLHSNGIQVYGDVVMNHKAGADYTENVTAVEVNPSNRYQETSGEYNIQAWTGFNFPGRGTTYSNWKWQWFHFDGTDWDQSRSLSRIFKFDGKAWDWEVSSENGNYDYLMYADYDYDHPDVVNEMKKWGVWYANEVGLDGYRLDAVKHIKFQFLKDWVDNARAATGKEMFTVGEYWQNDLGALNNYLAKVNYNQSLFDAPLHYNFYAASTGGGYYDMRNILNNTLVASNPTKAVTLVENHDTQPGQSLESTVQPWFKPLAYAFILTRSGGYPSVFYGDFYGTKGTTTREIPALKSKIEPLLKARKDYAYGTQRDYIDNPDVIGWTREGDSTKAKSGLATVITDGPGGSKRMYVGTSNAGEIWYDLTGNRTDKITIGSDGYATFPVNGGSVSVWVQQ

SEQ ID NO: 38684 - protein, 480 aa, Cytophaga sp.
NGTMMQYFEWYVPNDGQQWNRLRTDAPYLSSVGITAVWTPPAYKGTSQADVGYGPYDLYDLGEFNQKGTVRTKYGTKGELKSAVNTLHSNGIQVYGDVVMNHKAGADYTENVTAVEVNPSNRYQETSGEYNIQAWTGFNFGGRGTTYSNWKWQWFHFDGTDWDQSRSLSRIFKFDGKAWDWEVSSENGNYDYLMYADYDYDHPDVVNEMKKWGVWYANEVGLDGYRLDAVKHIKFQFLKDWVDNARAATGKEMFTVGEYWQNDLGALNNYLAKVNYNQSLFDAPLHYNFYAASTGGGYYDMRNILNNTLVASNPTKAVTLVENHDTQPGQSLESTVQPWFKPLAYAFILTRSGGYPSVFYGDMYGTKGTTTREIPALKSKIEPLLKARKDYAYGTQRDYIDNPDVIGWTREGDSTKAKSGLATVITDGPGGSKRMYVGTSNAGEIWYDLTGNRTDKITIGSDGYATFPVNGGSVSVWVQQ

SEQ ID NO: 38685 - protein, 480 aa, Cytophaga sp.
NGTMMQYFEWYVPNDGQQWNRLRTDAPYLSSVGITAVWTPPAYKGTSQADVGYGPYDLYDLGEFNQKGTVRTKYGTKGELKSAVNTLHSNGIQVYGDVVMNHKAGADYTENVTAVEVNPSNRYQETSGEYNIQAWTGFNFPGRGTTYSNWKWQWFHFDGTDWDQSRSLSRIFKFDGKAWDWEVSSENGNYDYLMYADYDYDHPDVVNEMKKWGVWYANEVGLDGYRLDAVKHIKFQFLKDWVDNARAATGKEMFTVGEYWQNDLGALNNYLAKVNYNQSLFDAPLHYNFYAASTGGGYYDMRNILNNTLVASNPTKAVTLVENHDTQPGQSLESTVQPWFKPMAYAFILTRSGGYPSVFYGDMYGTKGTTTREIPALKSKIEPLLKARKDYAYGTQRDYIDNPDVIGWTREGDSTKAKSGLATVITDGPGGSKRMYVGTSNAGEIWYDLTGNRTDKITIGSDGYATFPVNGGSVSVWVQQ

SEQ ID NO: 38686 - protein, 480 aa, Cytophaga sp.
NGTMMQYFEWYVPNDGQQWNRLRTDAPYLSSVGITAVWTPPAYKGTSQADVGYGPYDLYDLGEFNQKGTVRTKYGTKGELKSAVNTLHSNGIQVIGDVVMNHKAGADYTENVTAVEVNPSNRYQETSGEYNIQAWTGFNFPGRGTTYSNWKWQWFHFDGTDWDQSRSLSRIFKFDGKAWDWEVSSENGNYDYLMYADYDYDHPDVVNEMKKWGVWYANEVGLDGYRLDAVKHIKFQFLKDWVDNARAATGKEMFTVGEYWQNDLGALNNYLAKVNYNQSLFDAPLHYNFYAASTGGGYYDMRNILNNTLVASNPTKAVTLVENHDTQPGQSLESTVQPWFKPLAYAFILTRSGGYPSVFYGDMYGTKGTTTREIPALKSKIEPLLKARKDYAYGTQRDYIDNPDVIGWTREGDSTKAKSGLATVITDGPGGSKRMYVGTSNAGEIWYDLTGNRTDKITIGSDGYATFPVNGGSVSVWVQQ

SEQ ID NO: 38687 - protein, 480 aa, Cytophaga sp.
NGTMMQYFEWYVPNDGQQWNRLRTDAPYLSSVGITAVWTPPAYKGTSQADVGYGPYDLYDLGEFNQKGTVRTKYGTKGELKSAVNTLHSNGIQVYGDVVMNHKAGADYTENVTAVEVNPSNRYQETSGEYNIQAWTGFNFPGRGTTYQNWKWQWFHFDGTDWDQSRSLSRIFKFDGKAWDWEVSSENGNYDYLMYADYDYDHPDVVNEMKKWGVWYANEVGLDGYRLDAVKHIKFQFLKDWVDNARAATGKEMFTVGEYWQNDLGALNNYLAKVNYNQSLFDAPLHYNFYAASTGGGYYDMRNILNNTLVASNPTKAVTLVENHDTQPGQSLESTVQPWFKPLAYAFILTRSGGYPSVFYGDMYGTKGTTTREIPALKSKIEPLLKARKDYAYGTQRDYIDNPDVIGWTREGDSTKAKSGLATVITDGPGGSKRMYVGTSNAGEIWYDLTGNRTDKITIGSDGYATFPVNGGSVSVWVQQ

SEQ ID NO: 38688 - protein, 480 aa, Cytophaga sp.
NGTMMQYFEWYVPNDGQQWNRLRTDAPYLSSVGITAVWTPPAYKGTSQADVGYGPYDLYDLGEFNQKGTVRTKYGTKGELKSAVNTLHSNGIQVYGDVVMNHKAGADYTENVTAVEVNPSNRYQETSGEYNIQTWTGFNFPGRGTTYSNWKWQWFHFDGTDWDQSRSLSRIFKFDGKAWDWEVSSENGNYDYLMYADYDYDHPDVVNEMKKWGVWYANEVGLDGYRLDAVKHIKFQFLKDWVDNARAATGKEMFTVGEYWQNDLGALNNYLAKVNYNQSLFDAPLHYNFYAASTGGGYYDMRNILNNTLVASNPTKAVTLVENHDTQPGQSLESTVQPWFKPLAYAFILTRSGGYPSVFYGDMYGTKGTTTREIPALKSKIEPLLKARKDYAYGTQRDYIDNPDVIGWTREGDSTKAKSGLATVITDGPGGSKRMYVGTSNAGEIWYDLTGNRTDKITIGSDGYATFPVNGGSVSVWVQQ

SEQ ID NO: 38689 - protein, 480 aa, Cytophaga sp.
NGTMMQYFEWYVPNDGHQWNRLRTDAPYLSSVGITAVWTPPAYKGTSQADVGYGPYDLYDLGEFNQKGTVRTKYGTKGELKSAVNTLHSNGIQVYGDVVMNHKAGADYTENVTAVEVNPSNRYQETSGEYNIQAWTGFNFPGRGTTYSNWKWQWFHFDGTDWDQSRSLSRIFKFDGKAWDWEVSSENGNYDYLMYADYDYDHPDVVNEMKKWGVWYANEVGLDGYRLDAVKHIKFQFLKDWVDNARAATGKEMFTVGEYWQNDLGALNNYLAKVNYNQSLFDAPLHYNFYAASTGGGYYDMRNILNNTLVASNPTKAVTLVENHDTQPGQSLESTVQPWFKPLAYAFILTRSGGYPSVFYGDMYGTKGTTTREIPALKSKIEPLLKARKDYAYGTQRDYIDNPDVIGWTREGDSTKAKSGLATVITDGPGGSKRMYVGTSNAGEIWYDLTGNRTDKITIGSDGYATFPVNGGSVSVWVQQ

SEQ ID NO: 38690 - protein, 480 aa, Cytophaga sp.
NGTMMQYFEWYVPNDGQQWNRLRTDAPYLSSVGITAVWTPPAYKGTSQADVGYGPYDLYDLGEFNQKGTVRTKYGTKGELKSAVNTLHSNGIQVYGDVVMNHKAGADYTENVTAVEVNPSNRYQETSGEYNIQAWTGFNFPGRGTTYSNWKWQWFHFDGTDWDQSRSLSRIFKFDGKAWDWEVSSENGNYDYLMYADYDYDHPDVVNEMNKWGVWYANEVGLDGYRLDAVKHIKFQFLKDWVDNARAATGKEMFTVGEYWQNDLGALNNYLAKVNYNQSLFDAPLHYNFYAASTGGGYYDMRNILNNTLVASNPTKAVTLVENHDTQPGQSLESTVQPWFKPLAYAFILTRSGGYPSVFYGDMYGTKGTTTREIPALKSKIEPLLKARKDYAYGTQRDYIDNPDVIGWTREGDSTKAKSGLATVITDGPGGSKRMYVGTSNAGEIWYDLTGNRTDKITIGSDGYATFPVNGGSVSVWVQQ

SEQ ID NO: 38691 - protein, 480 aa, Cytophaga sp.
NGTMMQYFEWYVPNDGQQWNRLRTDAPYLSSVGITAVWTPPAYKGTSQADVGYGPYDLYDLGEFNQKGTVRTKYGTKGELKSAVNTLHSNGIQVYGDVVMNHKAGADYTENVTAVEVNPSNRYQETSGEYNIQAWTGFNFPGRGTTYSNWKWQWFHFDGTDWDQSRSLSRIFKFDGKAWDWEVSSENGNYDYLMYADYDYDHPDVVNEMKKWGVWYANEVGLDGYRLDAVKHIKFQFLKDWVDNARAATGKEMFTVGEYWQNDLGALNNYLAKVNYNQSLFDAPLHYNFYAASTGGGYYDMRNILNNTLVASNPTKAVTLVENHDTQPGQSLESTVQPWFKPLAYAFILTRSGGYPSVFYGDMYGTKGTTTREIPALKSKIEPLLKARKDYAYGTQRDYIDNPDVIGWTREGDSTKAKSGLATVITDGPGGSKRMYVGTSNAGEIWYDLTGNRTDKITIGSDGYATFPVCGGSVSVWVQQ

SEQ ID NO: 38692 - protein, 480 aa, Cytophaga sp.
NGTMMQYFEWYVPNDGQQWNRLRTDAPYLSSVGITAVWTPPAYKGTSQADVGYGPYDLYDLGEFNQKGTVRTKYGTKGELKSAVNTLHSNGIQVYGDVVMNHKAGADYTENVTAVEVNPSNRYQETSGEYNIQAWTGFNFPGRGTTYSNWKWQWFHFDGTDWDQSRSLSRIFKFDGKAWDWEVSSENGNYDYLMYADYDYDHPDVVNEMKKWGVWYANEVGLDGYRLDAVKHIKFQFLKDWVDNARAATGKEMFTVGEYWQNDLGALNNYLAKVNYNQSLFDAPLHYNFYAASTGGGYYDMRNILNNTLVASNPTKAVTLVENHDTQPGQSLESTVQPWFKPLAYAFILTRSGGYPSVFYGDMYGTKGTTTREIPALKSKIEPLLKARKDYAYGTQRDYIDNPDVIGWTREGDSTKAKSGLATVITDGPGGSKRMYVGTSNAGEIWYDLTGNRTDKITIGSDGYATFPVLGGSVSVWVQQ

SEQ ID NO: 38693 - protein, 480 aa, Cytophaga sp.
NGTMMQYFEWYVPNDGQQWNRLRTDAPYLSSVGITAVWTPPAYKGTSQADVGYGPYDLYDLGEFNQKGTVRTKYGTKGELKSAVNTLHSNGIQVYGDVVMNHKAGADYTENVTAVEVNPSNRYQETSGEYNIQAWTGFNFPGRGTTYSNWKWQWFHFDGTDWDQSRSLSRIFKFDGKAWDWEVSSENGNYDYLMYADYDYDHPDVVNEMKKWGVWYANEVGLDGYRLDAVKHIKFQFLKDWVDNARAATGKEMFTVGEYWQNDLGALNNYLAKVNYNQSLFDAPLHYNFYAASTGFGYYDMRNILNNTLVASNPTKAVTLVENHDTQPGQSLESTVQPWFKPLAYAFILTRSGGYPSVFYGDMYGTKGTTTREIPALKSKIEPLLKARKDYAYGTQRDYIDNPDVIGWTREGDSTKAKSGLATVITDGPGGSKRMYVGTSNAGEIWYDLTGNRTDKITIGSDGYATFPVNGGSVSVWVQQ

SEQ ID NO: 38694 - protein, 480 aa, Cytophaga sp.
NGTMMQYFEWYVPNDGQQWNRLRTDAPYLSSVGVTAVWTPPAYKGTSQADVGYGPYDLYDLGEFNQKGTVRTKYGTKGELKSAVNTLHSNGIQVYGDVVMNHKAGADYTENVTAVEVNPSNRYQETSGEYNIQAWTGFNFPGRGTTYSNWKWQWFHFDGTDWDQSRSLSRIFKFDGKAWDWEVSSENGNYDYLMYADYDYDHPDVVNEMKKWGVWYANEVGLDGYRLDAVKHIKFQFLKDWVDNARAATGKEMFTVGEYWQNDLGALNNYLAKVNYNQSLFDAPLHYNFYAASTGGGYYDMRNILNNTLVASNPTKAVTLVENHDTQPGQSLESTVQPWFKPLAYAFILTRSGGYPSVFYGDMYGTKGTTTREIPALKSKIEPLLKARKDYAYGTQRDYIDNPDVIGWTREGDSTKAKSGLATVITDGPGGSKRMYVGTSNAGEIWYDLTGNRTDKITIGSDGYATFPVNGGSVSVWVQQ

SEQ ID NO: 38695 - protein, 480 aa, Cytophaga sp.
NGTMMQYFEWYVPNDGQQWNRLRTDAPYLSSVGITAVWTPPAYKGTSQADVGYGPYDLYDLGEFNQKGTVRTKYGTKGELKSAVNTLHSNGIQVYGDVVMNHKAGADYTENVTAVEVNPSNRYQETSGEYNIQAWTGFNFPGRGTTYSNWKWQWFMFDGTDWDQSRSLSRIFKFDGKAWDWEVSSENGNYDYLMYADYDYDHPDVVNEMKKWGVWYANEVGLDGYRLDAVKHIKFQFLKDWVDNARAATGKEMFTVGEYWQNDLGALNNYLAKVNYNQSLFDAPLHYNFYAASTGGGYYDMRNILNNTLVASNPTKAVTLVENHDTQPGQSLESTVQPWFKPLAYAFILTRSGGYPSVFYGDMYGTKGTTTREIPALKSKIEPLLKARKDYAYGTQRDYIDNPDVIGWTREGDSTKAKSGLATVITDGPGGSKRMYVGTSNAGEIWYDLTGNRTDKITIGSDGYATFPVNGGSVSVWVQQ

SEQ ID NO: 38696 - protein, 480 aa, Cytophaga sp.
NGTMMQYFEWYVPNDGQQWNRLRTDAPYLSSVGITAVWTPPAYKGTSQADVGYGPYDLYDLGEFNQKGTVRTKYGTKGELKSAVNTLHSNGIQVYGDVVMNHKAGADYTENVTAVEVNWSNRYQETSGEYNIQAWTGFNFPGRGTTYSNWKWQWFHFDGTDWDQSRSLSRIFKFDGKAWDWEVSSENGNYDYLMYADYDYDHPDVVNEMKKWGVWYANEVGLDGYRLDAVKHIKFQFLKDWVDNARAATGKEMFTVGEYWQNDLGALNNYLAKVNYNQSLFDAPLHYNFYAASTGGGYYDMRNILNNTLVASNPTKAVTLVENHDTQPGQSLESTVQPWFKPLAYAFILTRSGGYPSVFYGDMYGTKGTTTREIPALKSKIEPLLKARKDYAYGTQRDYIDNPDVIGWTREGDSTKAKSGLATVITDGPGGSKRMYVGTSNAGEIWYDLTGNRTDKITIGSDGYATFPVNGGSVSVWVQQ

SEQ ID NO: 38697 - protein, 480 aa, Cytophaga sp.
NGTMMQYFEWYVPNDGQQWNRLRTDAPYLSSVGITAVWTPPAYKGTSQADVGYGPYDLYDLGEFNQKGTVRTKYGTKGELKSAVNTLHSNGIQVYGDVVMNHKAGADYTENVTAVEVNPSNRYQETSGHYNIQAWTGFNFPGRGTTYSNWKWQWFHFDGTDWDQSRSLSRIFKFDGKAWDWEVSSENGNYDYLMYADYDYDHPDVVNEMKKWGVWYANEVGLDGYRLDAVKHIKFQFLKDWVDNARAATGKEMFTVGEYWQNDLGALNNYLAKVNYNQSLFDAPLHYNFYAASTGGGYYDMRNILNNTLVASNPTKAVTLVENHDTQPGQSLESTVQPWFKPLAYAFILTRSGGYPSVFYGDMYGTKGTTTREIPALKSKIEPLLKARKDYAYGTQRDYIDNPDVIGWTREGDSTKAKSGLATVITDGPGGSKRMYVGTSNAGEIWYDLTGNRTDKITIGSDGYATFPVNGGSVSVWVQQ

SEQ ID NO: 38698 - protein, 480 aa, Cytophaga sp.
NGTMMQYFEWYVPNDGQQWNRLRTDAPYLSSVGITAVWTPPAYKGTSQADVGYGPYDLYDLGEFNQKGTVRTKYGTKGELKSAVNTLHSNGIQVYGDVVMNHKAGADYTENVTAVEVNPSNRYQETSGEYNIQAWTGFNFPGRGTTYSNWKWQWFHFDGTDWDQSRSLSRIFKFDGKAWDWNVSSENGNYDYLMYADYDYDHPDVVNEMKKWGVWYANEVGLDGYRLDAVKHIKFQFLKDWVDNARAATGKEMFTVGEYWQNDLGALNNYLAKVNYNQSLFDAPLHYNFYAASTGGGYYDMRNILNNTLVASNPTKAVTLVENHDTQPGQSLESTVQPWFKPLAYAFILTRSGGYPSVFYGDMYGTKGTTTREIPALKSKIEPLLKARKDYAYGTQRDYIDNPDVIGWTREGDSTKAKSGLATVITDGPGGSKRMYVGTSNAGEIWYDLTGNRTDKITIGSDGYATFPVNGGSVSVWVQQ

SEQ ID NO: 38699 - protein, 480 aa, Cytophaga sp.
NGTMMQYFEWYVPNDGQQWNRLRTDAPYLSSVGITAVWTPPAYKGTSQADVGYGPYDLYDLGEFNQKGTVRTKYGTKGELKSAVNTLHSNGIQVYGDVVMNHKAGADYTENVTAVEVNPSNRYQETSGEYNIQAWTGFNFPGRGTTYSNWKWQWFHFDGTDWDQSRSLSRIFKFDGKAWDWEVSSENGNYDYLMYADYDYDHPDVVNEMKKWGVWYANEVGLDGYRLDAVKHIKFQFLKDWVDNARAMTGKEMFTVGEYWQNDLGALNNYLAKVNYNQSLFDAPLHYNFYAASTGGGYYDMRNILNNTLVASNPTKAVTLVENHDTQPGQSLESTVQPWFKPLAYAFILTRSGGYPSVFYGDMYGTKGTTTREIPALKSKIEPLLKARKDYAYGTQRDYIDNPDVIGWTREGDSTKAKSGLATVITDGPGGSKRMYVGTSNAGEIWYDLTGNRTDKITIGSDGYATFPVNGGSVSVWVQQ

SEQ ID NO: 38700 - protein, 480 aa, Cytophaga sp.
NGTMMQYFEWYVPNDGQQWNRLRTDAPYLSSVGITAVWTPPAYKGTSQADVGYGPYDLYDLGEFNQKGTVRTKYGTKGELKSAVNTLHSNGIQVYGDVVMNHKAGADYTENVTAVEVNPSNRYQETSGEYNIQAWTGFNFPGRGTTYSNWKWQWFHFDGTDWDQSRSLSRIFKFDGKAWDWEVSSENCNYDYLMYADYDYDHPDVVNEMKKWGVWYANEVGLDGYRLDAVKHIKFQFLKDWVDNARAATGKEMFTVGEYWQNDLGALNNYLAKVNYNQSLFDAPLHYNFYAASTGGGYYDMRNILNNTLVASNPTKAVTLVENHDTQPGQSLESTVQPWFKPLAYAFILTRSGGYPSVFYGDMYGTKGTTTREIPALKSKIEPLLKARKDYAYGTQRDYIDNPDVIGWTREGDSTKAKSGLATVITDGPGGSKRMYVGTSNAGEIWYDLTGNRTDKITIGSDGYATFPVNGGSVSVWVQQ

SEQ ID NO: 38701 - protein, 480 aa, Cytophaga sp.
NGTMMQYFEWYVPNDGQQWNRLRTDAPYLSSVGITAVWTPPAYKGTSQADVGYGPYDLYDLGEFNQKGTVRTKYGTKGELKSAVNTLHSNGIQVYGDVVMNHKAGADYTENVTAVEVNPSNRYQETSGEYNIQAWTGFNFPGRGTTYSNWKWQWFHFDGTDWDQSRSLSRIFKFDGKAWDWEVSSENGNYDYLMYADYDYDHPDVVNEMKKWGVWYANEVGLDGYRLDAVKHIKFQFLKDWVDNARAATGKEMFTVGEYWQNDLGALNNYLAKVNYNQSLFDAPLHYNFYAASTGGGYYDMRNILNNTLVASNPTKAVTLVENHDTQPGQSLESTVQPWFKPLAYAFILTRSGGYPSVFYGDMYGTKGTTTREIPALKSKIESLLKARKDYAYGTQRDYIDNPDVIGWTREGDSTKAKSGLATVITDGPGGSKRMYVGTSNAGEIWYDLTGNRTDKITIGSDGYATFPVNGGSVSVWVQQ

SEQ ID NO: 38702 - protein, 480 aa, Cytophaga sp.
NGTMMQYFEWYVPNDGQQWNRLRTDAPYLSSVGITAVWTPPAYKGTSQADVGYGPYDLYDLGEFNQKGTVRTKYGTKGELKSAVNTLHSNGIQVYGDVVMNHKAGADYTENVTAVEVNPSNRYQETSGEYNIQAWTGFNFPGRGTTYSNWKWQWFHFDGTDWDQSRSLSRIFKFDGKAWDWEVSSENGNYDYLMYADYDYDHPDVVNEMKKWGVWYANEVGLDGYRLDAVKHIKFQFLKDWVDNARAATGKEMFTVGEYWQNDLGALNNYLAKVNYNQSLFDAPLHYNFYAASTGGGYYDMRNILNNTLVASNPTKAVTLVENHDTQPGQSLESTVQPWFKPLAYAFILTRSGGYPSVFYGDMYGTKGTTTREIPALKSKIEPLLKARKDYAYGTQRDYIDNPDVIGWTREGDSTKAKSGLATVITDGPGGSKRMYVGTSNAGEIWYDLTGNRTAKITIGSDGYATFPVNGGSVSVWVQQ

SEQ ID NO: 38703 - protein, 480 aa, Cytophaga sp.
NGTMMQYFEWYVPNDGQQWNRLRTDAPYLSSVGITAVWTPPAYKGTSQADVGYGPYDLYDLGEFNQKGTVRTKYGTKGELKSAVNTLHSNGIQVYGDVVMNHKAGADYTENVTAVEVNPSNRYQETSGEYNIQAWTGFNFPGRGTTYSNWKWQWFHFDGTDWDQSRSLSRIFKFDGKAWDWEVSSENGNYDYLMYADYDYDHPDVVNEMKKWGVWYANEVGLDGYRLDAVKHIKFQFLKDWVDNARAATGKEMFTVGEYWQNDLGALNNYLAKVNYNQSLFDAPLHYNFYAASTGGGYYDMRNILNNTLVASNPTKAVTLVENHDTQPGQSLESTVQPWFKPLAYAFILTRSGGYPSVFYGDMYGTKGTTTREIPALKSKIEPLLKARKDYAYGTQRDYIDNPDVIGWTRNGDSTKAKSGLATVITDGPGGSKRMYVGTSNAGEIWYDLTGNRTDKITIGSDGYATFPVNGGSVSVWVQQ

SEQ ID NO: 38704 - protein, 480 aa, Cytophaga sp.
NGTMMQYFEWYVPNDGQQWNRLRTDAPYLSSVGITAVWTPPAYKGTSQADVGYGPYDLYDLGEFNQKGTVRTKYGTKGELKSAVNTLHSNGIQVYGDVVMNHKAGADYTENVTAVEVNPSNRYQETSGEYNIQAWTGFNFPGRGTTYSNWKWQWFHFDGTDWDQSRSLSRIFKFDGKAWDWEVSSENGNYDYLMYADYDYDHPDVVNEMKKWGVWYANEVGLDGYRLDAVKHAKFQFLKDWVDNARAATGKEMFTVGEYWQNDLGALNNYLAKVNYNQSLFDAPLHYNFYAASTGGGYYDMRNILNNTLVASNPTKAVTLVENHDTQPGQSLESTVQPWFKPLAYAFILTRSGGYPSVFYGDMYGTKGTTTREIPALKSKIEPLLKARKDYAYGTQRDYIDNPDVIGWTREGDSTKAKSGLATVITDGPGGSKRMYVGTSNAGEIWYDLTGNRTDKITIGSDGYATFPVNGGSVSVWVQQ

SEQ ID NO: 38705 - protein, 480 aa, Cytophaga sp.
NGTMMQYFEWYVPNDGQQWNRLRTDAPYLSSVGITAVWTPPAYKGTSQADVGYGPYDLYDLGEFNQKGTVRTKYGTKGELKSAVNTLHSNGIQVYGDVVMNHKAGADYTENVTAVEVNPSNRYQETSGEYNIQAWTGFNFPGRGTTYSNWKWQWFHFDGTDWDQSRSLSRIFKFDGKAWDWEVSSENGNYDYLMYADYDYDHPDVVNEMKKWGVWYANEVGLDGYRLDAVKHIKFQFLKDWVDNARAATGKEMFTVGEYWQYDLGALNNYLAKVNYNQSLFDAPLHYNFYAASTGGGYYDMRNILNNTLVASNPTKAVTLVENHDTQPGQSLESTVQPWFKPLAYAFILTRSGGYPSVFYGDMYGTKGTTTREIPALKSKIEPLLKARKDYAYGTQRDYIDNPDVIGWTREGDSTKAKSGLATVITDGPGGSKRMYVGTSNAGEIWYDLTGNRTDKITIGSDGYATFPVNGGSVSVWVQQ

SEQ ID NO: 38706 - protein, 480 aa, Cytophaga sp.
NGTMMQYFEWYVPNDGQQWNRLRTDAPYLSSVGITAVWTPPAYKGTSQADVGYGPYDLYDLGEFNQKGTVRTKYGTKGELKSAVNTLHSNGIQVYGDVVMNHKAGADYTENVTAVEVNPSNRYQETSGEYNIQAWTGFNFPGRRTTYSNWKWQWFHFDGTDWDQSRSLSRIFKFDGKAWDWEVSSENGNYDYLMYADYDYDHPDVVNEMKKWGVWYANEVGLDGYRLDAVKHIKFQFLKDWVDNARAATGKEMFTVGEYWQNDLGALNNYLAKVNYNQSLFDAPLHYNFYAASTGGGYYDMRNILNNTLVASNPTKAVTLVENHDTQPGQSLESTVQPWFKPLAYAFILTRSGGYPSVFYGDMYGTKGTTTREIPALKSKIEPLLKARKDYAYGTQRDYIDNPDVIGWTREGDSTKAKSGLATVITDGPGGSKRMYVGTSNAGEIWYDLTGNRTDKITIGSDGYATFPVNGGSVSVWVQQ

SEQ ID NO: 38707 - protein, 480 aa, Cytophaga sp.
NGTMMQYFEWYVPNDGQQWNRLRTDAPYLSSVGITAVWTPPAYKGTSQADVGYGPYDLYDLGEFNQKGTVRTKYGTKGELKSAVNTLHSNGIQVYGDVVMNHKAGADYTENVTVVEVNPSNRYQETSGEYNIQAWTGFNFPGRGTTYSNWKWQWFHFDGTDWDQSRSLSRIFKFDGKAWDWEVSSENGNYDYLMYADYDYDHPDVVNEMKKWGVWYANEVGLDGYRLDAVKHIKFQFLKDWVDNARAATGKEMFTVGEYWQNDLGALNNYLAKVNYNQSLFDAPLHYNFYAASTGGGYYDMRNILNNTLVASNPTKAVTLVENHDTQPGQSLESTVQPWFKPLAYAFILTRSGGYPSVFYGDMYGTKGTTTREIPALKSKIEPLLKARKDYAYGTQRDYIDNPDVIGWTREGDSTKAKSGLATVITDGPGGSKRMYVGTSNAGEIWYDLTGNRTDKITIGSDGYATFPVNGGSVSVWVQQ

SEQ ID NO: 38708 - protein, 480 aa, Cytophaga sp.
NGTMMQYFEWYVPNDGQQWNRLRTDAPYLSSVGITAVWTPPAYKGTSQADVGYGPYDLYDLGEFNQKGTVRTKYGTKGELKSAVNTLHSNGIQVYGDVVMNHKAGADYTENVTAVEVNPSNRYQETSGEYNIQAWTGFNFPGRGTTYSNWKWQWFHFDGTDWDQSRSLSRIFKFDGKAWDWEVSSENGNYDYLMYADYDYDHPDVVNEMKKWGVWYANEVGLDGYRLDAVKHIKFQFLKDWVDNARAATGKEMFTVGEYWQNDLGALNNYLAKVNYNQSLFDAPLHYNFYAASTGGGYYDMRNILNNTLVASNPTKAVTLVENHDTQPGQSLESTVQPWFKPLAYAFILTRSGGYPSVFYGDMNGTKGTTTREIPALKSKIEPLLKARKDYAYGTQRDYIDNPDVIGWTREGDSTKAKSGLATVITDGPGGSKRMYVGTSNAGEIWYDLTGNRTDKITIGSDGYATFPVNGGSVSVWVQQ

SEQ ID NO: 38709 - protein, 480 aa, Cytophaga sp.
NGTMMQYFEWYVPNDGQQWNRLRTDAPYLSSVGITAVWTPPAYKGTSQADVGYGPYDLYDLGEFNQKGTVRTKYGTKGELKSAVNTLHSNGIQVYGDVVMNHKAGADYTENVTAVEVNPSNRYQETSGEYNIQAWTGFNFPGRGTTYSNWKWQWFHFDGTDWDQSRSLSRIFKFDGKAWDWEVSSENGNYDYLMYADYDYDHPDVVNEMKKWGVWYANEVGLDGYRLDAVKHIKFQFLKDWVDNARAATGKEMFTVGEYWQNDLGALNNYLAKVNYNQSLFDAPLHYNFYAASTGGGYYDMRNILNNTLVASNPTKAVTLVENHDTQPGQSLESTVQPWFKPLAYAFILTRSGGYPSVFYGDMYGTKGTTTREIPALKSKIEPLLKARKDYAYGTCRDYIDNPDVIGWTREGDSTKAKSGLATVITDGPGGSKRMYVGTSNAGEIWYDLTGNRTDKITIGSDGYATFPVNGGSVSVWVQQ

SEQ ID NO: 38710 - protein, 480 aa, Cytophaga sp.
NGTMMQYFEWYVPNDGQQWNRLRTDAPYLSSVGITAVWTPPAYKGTSQADVGYGPYDLYDLGEFNQKGTVRTKYGTKGELKSAVNTLHSNGIQVYGDVVMNHKAGADYTENVTAVEVNPSNRYQETSGEYNIQAWTGFNFPGRGTTYSNWKWQWFHFDGTDWDQSRSLSRIFKFDGKAWDWEVSSENGNYDYLMYADYDYDHPDVVNEMKKWGVWYANEVGLDGYRLDAVKHIKFQFLKDWVDNARAATGKEMFTVGEYWQNDLGALNNYLAKVNYNQSLFDAPLHYNFYAASTGGGYYDMRNILNNTLVASNPTKAVTLVENHDTQPGQSLESTVQPWFKPLAYAFILTRSGGYPSVFYGDMYGTKGTTTREIPALKSKIEPLLKARKDYAYGTQRDYIDNPDVIGWTREGDSTKAKSGLATVITDGPGGSKRMYVGTSNAGEIYYDLTGNRTDKITIGSDGYATFPVNGGSVSVWVQQ

SEQ ID NO: 38711 - protein, 480 aa, Cytophaga sp.
NGTMMQYFEWYVPNDGQQWNRLRTDAPYLSSVGITAVWTPPAYKGTSQADVGYGPYDLYDLGEFNQKGTVRTKYGTKGELKSAVNTLHSNGIQVYGDVVMNHKAGADYTENVTAVEVNPSNRYQETSGEYNIQAWTGFNFPGRGTTYSNWKWQWFHFDGTDWDQSRSLSRIFKFDGKAWDWEVSSENGNYDYLMYADYDYDHPDVVNEMKKWGVWYANEVGLDGYRLDAVKHIKFQFLKDWVDNARAATGKEMFTVGEYWQNDLGALNNYLAKVNYNQSLFDAPLHYNFYAASTGGGYYDMRNILNNTLVASNPTKAVTLVENHDTQPGQSLESTVQPWFKPLAYAFILTRSGGYPSVFYGDMYGTKGTTTREIPALKSKIEPLLKARKDYEYGTQRDYIDNPDVIGWTREGDSTKAKSGLATVITDGPGGSKRMYVGTSNAGEIWYDLTGNRTDKITIGSDGYATFPVNGGSVSVWVQQ

SEQ ID NO: 38712 - protein, 480 aa, Cytophaga sp.
NGTMMQYFEWYVPNDGQQWNRLRTDAPYLSSVGITAVWTPPAYKGTSQADVGYGPYDLYDLGEFNQKGTVRTKYGTKGELKSAVNTLHSNGIQVYGDVVMNHKAGADYTENVTAVEVNPSNRYQETSGEYNIQAWTGFNFPGRGTTYSNWKWQWFHFDGTDWDQSRSLSRIFKFDGKAWDWEVSSENGNYDYLMYADYDYDHPDVVNEMKKWGVWYANEVGLDGYRLDAVKHIRFQFLKDWVDNARAATGKEMFTVGEYWQNDLGALNNYLAKVNYNQSLFDAPLHYNFYAASTGGGYYDMRNILNNTLVASNPTKAVTLVENHDTQPGQSLESTVQPWFKPLAYAFILTRSGGYPSVFYGDMYGTKGTTTREIPALKSKIEPLLKARKDYAYGTQRDYIDNPDVIGWTREGDSTKAKSGLATVITDGPGGSKRMYVGTSNAGEIWYDLTGNRTDKITIGSDGYATFPVNGGSVSVWVQQ

SEQ ID NO: 38713 - protein, 480 aa, Cytophaga sp.
NGTMMQYFEWYVPNDGQQWNRLRTDAPYLSSVGITAVWTPPAYKGTSQADVGYGPYDLYDLGEFNQKGTVRTKYGTKGELKSAVNTLHSNGIQVYGDVVMNHKAGADYTENVTAVEVNPSNRYQETSGEYNIQAWTGFNFPGRGTTYSNWKWQWFHFDGTDWDQSRSLSRIFKFDGKAWDWEVSAENGNYDYLMYADYDYDHPDVVNEMKKWGVWYANEVGLDGYRLDAVKHIKFQFLKDWVDNARAATGKEMFTVGEYWQNDLGALNNYLAKVNYNQSLFDAPLHYNFYAASTGGGYYDMRNILNNTLVASNPTKAVTLVENHDTQPGQSLESTVQPWFKPLAYAFILTRSGGYPSVFYGDMYGTKGTTTREIPALKSKIEPLLKARKDYAYGTQRDYIDNPDVIGWTREGDSTKAKSGLATVITDGPGGSKRMYVGTSNAGEIWYDLTGNRTDKITIGSDGYATFPVNGGSVSVWVQQ

SEQ ID NO: 38714 - protein, 480 aa, Cytophaga sp.
NGTMMQYFEWYVPNDGQQWNRLRTDAPYLSSVGITAVWTPPAYKGTSQADVGYGPYDLYDLGEFNQKGTVRTKYGTKGELKSAVNTLHSNGIQVYGDVVMNHKAGADYTENVTAVEVNPSNRYQETSGEYNIQAWTGFNFPGRGTTYSNWKWQWFHFDGTDWDQSRSLSRIFKFDGKAWDWEVSSENGNYDYLMYADYDYDHPDVVNEMKKWGVWYANEVGLDGYRLDAVKHIKFQFLKDWVDNARAATGKEMFTVGEYWQNDLGALNNYLAKVNYNQSLFDAPLHYNFYAASTGGGYYDMRNILNNTLVASNPTKAVTLVENHDTQPGQSLESTVQPWFKPLAYAFILTRSGGYPSVFYGDMYGTKGTTTREIPALKSKIEPLLKARKDYAYGTQRDYIDNPDVIGWTREGDSTKAKSGLATVITDGPGGSKRMYVGTSNAGEIWYDLTGNRTDKITIGSDGYATFPVNGGSVSVWLQQ

SEQ ID NO: 38715 - protein, 480 aa, Cytophaga sp.
NGTMMQYFEWYVPNDGQQWNRLRTDAPYLSSVGITAVWTPPAYKGTSQADVGYGPYDLYDLGEFNQKGTVRTKYGTKGELKSAVNTLHSNGIQVYGDVVMNHKAGADYTENVTAVEVNPSNRYQETSGEYNIQAWTGFNFPGRGTTYSNWKWQWFHFDGTDWDQSRSLSRIFKFDGKAWDWEVSSENGNYDYLMYADYDYDHPDVVNEMKKWGVWYANEVGLDGYRLDAVKHIKFQFLKDWVDNARAATGKEMFTVGEYWQNDLGALNNYLAKVNYNQSLFDAPLHYNFYAASTGGGYYDMRNILNNTLVASNPTKAVTLVENHDTQPGQSLESTVQPWFKPLAYAFILTRSGGYPSVFYGDMYGTKGTTTREIPALKSKIEPLLKARKDYAYGTQRDYIDNPDVIGWTREGESTKAKSGLATVITDGPGGSKRMYVGTSNAGEIWYDLTGNRTDKITIGSDGYATFPVNGGSVSVWVQQ

SEQ ID NO: 38716 - protein, 480 aa, Cytophaga sp.
NGTMMQYFEWYVPNDGQQWNRLRTDAPYLSSVGITAVWTPPAYKGTSQADVGYGPYDLYDLGEFNQKGTVRTKYGTKGELKSAVNTLHSNGIQVYGDVVMNHKAGADYTENVTAVEVNPSNRYQETSGEYNIQAWTGFNFPGRGTTYSNWKWQWFHFDGTDWDQSRSLSRIFKFDGKAWDWEVSSENGNYDYLMYADYDYDHPDVVNEMKKWGVWYANEVGLDGYRLDAVKHIKFQFLKDWVDNARAATGKEMFTVGEYWQNDLGALNNYLAKVNYNQSLFDAPLHYNFYAASTGGGYYDMRNIANNTLVASNPTKAVTLVENHDTQPGQSLESTVQPWFKPLAYAFILTRSGGYPSVFYGDMYGTKGTTTREIPALKSKIEPLLKARKDYAYGTQRDYIDNPDVIGWTREGDSTKAKSGLATVITDGPGGSKRMYVGTSNAGEIWYDLTGNRTDKITIGSDGYATFPVNGGSVSVWVQQ

SEQ ID NO: 38717 - protein, 480 aa, Cytophaga sp.
NGTMMQYFEWYVPNDGQQWNRLRTDAPYLSSVGITAVWTPPAYKGTSQADVGYGPYDLYDLGEFNQKGTVRTKYGTKGELKSAVNTLHSNGIQVYGDVVMNHKAGADYTENVTIVEVNPSNRYQETSGEYNIQAWTGFNFPGRGTTYSNWKWQWFHFDGTDWDQSRSLSRIFKFDGKAWDWEVSSENGNYDYLMYADYDYDHPDVVNEMKKWGVWYANEVGLDGYRLDAVKHIKFQFLKDWVDNARAATGKEMFTVGEYWQNDLGALNNYLAKVNYNQSLFDAPLHYNFYAASTGGGYYDMRNILNNTLVASNPTKAVTLVENHDTQPGQSLESTVQPWFKPLAYAFILTRSGGYPSVFYGDMYGTKGTTTREIPALKSKIEPLLKARKDYAYGTQRDYIDNPDVIGWTREGDSTKAKSGLATVITDGPGGSKRMYVGTSNAGEIWYDLTGNRTDKITIGSDGYATFPVNGGSVSVWVQQ

SEQ ID NO: 38718 - protein, 480 aa, Cytophaga sp.
NGTMMQYFEWYVPNDGQQWNRLRTDAPYLSSVGITAVWTPPAYKGTSQADVGYGPYDLYDLGEFNQKGTVRTKYGTKGELKSAVNTLHSNGIQVYGDVVMNHKAGADYTENVTAVEVNPSNRYQETSGEYNIQAWTGFNFPGRGTTYSNWKWQWFHFDGTDWDQSRSLSRIFKFDGKAWDWEVSSENGNYDYLMYADYDYDHPDVVNEMKKWGVWYANEVGLDGYRLDAVKHIKFQFLKDWVDNARAATGKEMFTVGEYWQNDLGALNNYLAKVNYNQSLFDAPLHYNFYAASTGGGYYDMRNILNNTLVASNPTKAVTLVENHDTQPGQSLESTVQPWFKPLAYAFILTRSGGYPSVFYGDMYGTKGTTTREIPALKSKIEPLLKARKDYAYGTQRDYIDNPDVIGWTREGDSTKAKSGLATVITDGPGGSKRMYVGTSNAGEIWYDLTGNRTDKITIASDGYATFPVNGGSVSVWVQQ

SEQ ID NO: 38719 - protein, 480 aa, Cytophaga sp.
NGTMMQYFEWYVPNDGQQWNRLRTDAPYLSSVGITAVWTPPAYKGTSQADVGYGPYDLYDLGEFNQKGTVRTKYGTKGELKSAVNTLHSNGIQVYGDVVMNHKAGADYTENVTAVEVNPSNRYQETSGEYNIQAWTGFNFPGRGTTYSNWKWQWFHFDGTDWDQSRSLSRIFKFDGKAWDWEVSSENGNYDYLMYADYDYDHPDVVNEMKKWGVWYANEVGLDGYRLDAVKHIKFQFLKDWVDNARAATGKEMFTVGEYWQNDLGALNNYLAKVNYNQSLFDAPLHYNFYAASTGGGYYDMRNILNNTLVASNPTKAVTLVENHDTQPGQSLESTVQPWFKPLAYAFILTRSGGYPSVFYGDMYGTKGTTTREIPALKSKIEPLLKARKDYAYGTQRDYIDNPDVIGWTREGDSTKAKSGLATVITDGPGGSKRMDVGTSNAGEIWYDLTGNRTDKITIGSDGYATFPVNGGSVSVWVQQ

SEQ ID NO: 38720 - protein, 480 aa, Cytophaga sp.
NGTMMQYFEWYVPNDGQQWNRLRTDAPYLSSVGITAVWTPPAYKGTSQADVGYGPYDLYDLGEFNQKGTVRTKYGTKGELKSAVNTLHSNGIQVYGDVVMNHKAGADYTENVTAVEVNPSNRYQETSGEYNIQAWTGFNFPGRGTTYSNWKWQWFHFDGTDWDQSRSLSRIFKFDGKAWDWEVSSENGNYDYLMYADYDYDHPDVVNEMKKWGVWYANEVGLDGYRLDAVKHIKFQFLKDWVDNARAATGKEMFTVGEYWQNDLGALNNYLAKVNYNQSLFDAPLHYNFYAASTGGGYYDMRNILNNTLVASNPTKAVTLVENHDTQPGQSLESTVQPWFKPLAYAFILTRSGGYPSVFYGDMYGTKGTTTREIPALKSKIEPLLKARKDYAYGTQRDYIDNPDVIGWTREGDSTKAKSGLATVITDGPGMSKRMYVGTSNAGEIWYDLTGNRTDKITIGSDGYATFPVNGGSVSVWVQQ

SEQ ID NO: 38721 - protein, 480 aa, Cytophaga sp.
NGTMMQYFEWYVPNDGQQWNRLRTDAPYLSSVGITAVWTPPAYKGTSQADVGYGPYDLYDLGEFNQKGTVRTKYGTKGELKSAVNTLHSNGIQVYGDVVMNHKAGADYTENVTAVEVNPSNRYQETSGEYNIQAWTGFNFPGRGTTYSNWKWQWFHFDGTDWDQSRSLSRIFKFDGKAWDWEVSSENGNYDYLMYADYDYDHPDVVNEMKKWGVWYATEVGLDGYRLDAVKHIKFQFLKDWVDNARAATGKEMFTVGEYWQNDLGALNNYLAKVNYNQSLFDAPLHYNFYAASTGGGYYDMRNILNNTLVASNPTKAVTLVENHDTQPGQSLESTVQPWFKPLAYAFILTRSGGYPSVFYGDMYGTKGTTTREIPALKSKIEPLLKARKDYAYGTQRDYIDNPDVIGWTREGDSTKAKSGLATVITDGPGGSKRMYVGTSNAGEIWYDLTGNRTDKITIGSDGYATFPVNGGSVSVWVQQ

SEQ ID NO: 38722 - protein, 480 aa, Cytophaga sp.
NGTMMQYFEWYVPNDGQQWNRLRTDAPYLSSVGITAVWTPPAYKGTSQADVGYGPYDLYDLGEFNQKGTVRTKYGTKGELKSAVNTLHSNGIQVYGDVVMNHKAGADYTENVTAVEVNPSNRYQETSGEYNIQAWTGFNFPGRGTTYSNWKWQWFHFDGTDWDQSRSLSRIFKFDGKAWDWEVSSENGNYDYLMYADYDYDHPDVVNEMKKWGVWYANEVGLDGYRLDAVKHIKFQFLKDWVDNARAATGKEMFTVGEYWQNDLGALNNYLAKVNYNQSLFDAPLHYNFYAASTGGGYYDMRNILNNALVASNPTKAVTLVENHDTQPGQSLESTVQPWFKPLAYAFILTRSGGYPSVFYGDMYGTKGTTTREIPALKSKIEPLLKARKDYAYGTQRDYIDNPDVIGWTREGDSTKAKSGLATVITDGPGGSKRMYVGTSNAGEIWYDLTGNRTDKITIGSDGYATFPVNGGSVSVWVQQ

SEQ ID NO: 38723 - protein, 480 aa, Cytophaga sp.
NGTMMQYFEWYVPNDGQQWNRLRTDAPYLSSVGITAVWTPPAYKGTSQADVGYGPYDLYDLGEFNQKGTVRTKYGTKGELKSAVNTLHSNGIQVYGDVVMNHKAGADYTENVTAVEVNPSNRYQETSGEYNIQAWTGFNFPGRGTTYSNWKWQWFHFDGTDWDQSRSLSRIFKFDGKAWDWEVSSENGNYDYLMYADYDYDHPDVVNEMKKWGVWYANEVGLDGYRLDAVKHIKFQFLKDWVDNARAATGKEMFTVGEYWQNDLGALNNYLAKVNYNQSLFDAPLHYNFYAASTGGGYYDMRNILNNTLVASNPTKAVTLVENHDTQPGQSLESTVQPWFKPLAYAFILTRSGGYPSVFYGDMYGTKGTTTREIPALKSKIEPLLKARKDYAYGTQRDYIDNKDVIGWTREGDSTKAKSGLATVITDGPGGSKRMYVGTSNAGEIWYDLTGNRTDKITIGSDGYATFPVNGGSVSVWVQQ

SEQ ID NO: 38724 - protein, 480 aa, Cytophaga sp.
NGTMMQYFEWYVPNDGQQWNRLRTDAPYLSSVGITAVWTPPAYKGTSQADVGYGPYDLYDLGEFNQKGTVRTKYGTKGELKSAVNTLHSNGIQVYGDVVMNHKAGADYTENVTAVEVNPSNRYQETSGVYNIQAWTGFNFPGRGTTYSNWKWQWFHFDGTDWDQSRSLSRIFKFDGKAWDWEVSSENGNYDYLMYADYDYDHPDVVNEMKKWGVWYANEVGLDGYRLDAVKHIKFQFLKDWVDNARAATGKEMFTVGEYWQNDLGALNNYLAKVNYNQSLFDAPLHYNFYAASTGGGYYDMRNILNNTLVASNPTKAVTLVENHDTQPGQSLESTVQPWFKPLAYAFILTRSGGYPSVFYGDMYGTKGTTTREIPALKSKIEPLLKARKDYAYGTQRDYIDNPDVIGWTREGDSTKAKSGLATVITDGPGGSKRMYVGTSNAGEIWYDLTGNRTDKITIGSDGYATFPVNGGSVSVWVQQ

SEQ ID NO: 38725 - protein, 480 aa, Cytophaga sp.
NGTMMQYFEWYVPNDGQQWNRLRTDAPYLSSVGITAVWTPPAYKGTSQADVGYGPYDLYDLGEFNQKGTVRTKYGTIGELKSAVNTLHSNGIQVYGDVVMNHKAGADYTENVTAVEVNPSNRYQETSGEYNIQAWTGFNFPGRGTTYSNWKWQWFHFDGTDWDQSRSLSRIFKFDGKAWDWEVSSENGNYDYLMYADYDYDHPDVVNEMKKWGVWYANEVGLDGYRLDAVKHIKFQFLKDWVDNARAATGKEMFTVGEYWQNDLGALNNYLAKVNYNQSLFDAPLHYNFYAASTGGGYYDMRNILNNTLVASNPTKAVTLVENHDTQPGQSLESTVQPWFKPLAYAFILTRSGGYPSVFYGDMYGTKGTTTREIPALKSKIEPLLKARKDYAYGTQRDYIDNPDVIGWTREGDSTKAKSGLATVITDGPGGSKRMYVGTSNAGEIWYDLTGNRTDKITIGSDGYATFPVNGGSVSVWVQQ

SEQ ID NO: 38726 - protein, 480 aa, Cytophaga sp.
NGTMMQYFEWYVPNDGQQWNRLRTDAPYLSSVGITAVWTPPAYKGTSQADVGYGPYDLYDLGEFNQKATVRTKYGTKGELKSAVNTLHSNGIQVYGDVVMNHKAGADYTENVTAVEVNPSNRYQETSGEYNIQAWTGFNFPGRGTTYSNWKWQWFHFDGTDWDQSRSLSRIFKFDGKAWDWEVSSENGNYDYLMYADYDYDHPDVVNEMKKWGVWYANEVGLDGYRLDAVKHIKFQFLKDWVDNARAATGKEMFTVGEYWQNDLGALNNYLAKVNYNQSLFDAPLHYNFYAASTGGGYYDMRNILNNTLVASNPTKAVTLVENHDTQPGQSLESTVQPWFKPLAYAFILTRSGGYPSVFYGDMYGTKGTTTREIPALKSKIEPLLKARKDYAYGTQRDYIDNPDVIGWTREGDSTKAKSGLATVITDGPGGSKRMYVGTSNAGEIWYDLTGNRTDKITIGSDGYATFPVNGGSVSVWVQQ

SEQ ID NO: 38727 - protein, 480 aa, Cytophaga sp.
NGTMMQYFEWYVPNDGQQWNRLRTDAPYLSSVGITAPWTPPAYKGTSQADVGYGPYDLYDLGEFNQKGTVRTKYGTKGELKSAVNTLHSNGIQVYGDVVMNHKAGADYTENVTAVEVNPSNRYQETSGEYNIQAWTGFNFPGRGTTYSNWKWQWFHFDGTDWDQSRSLSRIFKFDGKAWDWEVSSENGNYDYLMYADYDYDHPDVVNEMKKWGVWYANEVGLDGYRLDAVKHIKFQFLKDWVDNARAATGKEMFTVGEYWQNDLGALNNYLAKVNYNQSLFDAPLHYNFYAASTGGGYYDMRNILNNTLVASNPTKAVTLVENHDTQPGQSLESTVQPWFKPLAYAFILTRSGGYPSVFYGDMYGTKGTTTREIPALKSKIEPLLKARKDYAYGTQRDYIDNPDVIGWTREGDSTKAKSGLATVITDGPGGSKRMYVGTSNAGEIWYDLTGNRTDKITIGSDGYATFPVNGGSVSVWVQQ

SEQ ID NO: 38728 - protein, 480 aa, Cytophaga sp.
NGDMMQYFEWYVPNDGQQWNRLRTDAPYLSSVGITAVWTPPAYKGTSQADVGYGPYDLYDLGEFNQKGTVRTKYGTKGELKSAVNTLHSNGIQVYGDVVMNHKAGADYTENVTAVEVNPSNRYQETSGEYNIQAWTGFNFPGRGTTYSNWKWQWFHFDGTDWDQSRSLSRIFKFDGKAWDWEVSSENGNYDYLMYADYDYDHPDVVNEMKKWGVWYANEVGLDGYRLDAVKHIKFQFLKDWVDNARAATGKEMFTVGEYWQNDLGALNNYLAKVNYNQSLFDAPLHYNFYAASTGGGYYDMRNILNNTLVASNPTKAVTLVENHDTQPGQSLESTVQPWFKPLAYAFILTRSGGYPSVFYGDMYGTKGTTTREIPALKSKIEPLLKARKDYAYGTQRDYIDNPDVIGWTREGDSTKAKSGLATVITDGPGGSKRMYVGTSNAGEIWYDLTGNRTDKITIGSDGYATFPVNGGSVSVWVQQ

SEQ ID NO: 38729 - protein, 480 aa, Cytophaga sp.
NGTMMQYFEWYVPNDGQQWNRLRTDAPYLSSVGITAVWTPPAYKGTSQADVGYGPYDLYDLGEFNQKGTVRTKYGTKGELKSAVNTLHSNGIQVYGDVVMNHKAGADYTENVTAVEVNPSNRYQETSGEYNIQAWTGFNFPGRGTTYSNWKWQWFHFDGTDWDQSRSLSRIFKFDGKAWDWEVSSENGNYDYLMYADYDYDHPDVVNEMKKWGVWYANEVGLDGYRLDAVKHIKFQFLKDWVDNARAATGKEMFTVGEYWQNDLGALNNYLAKVNYNQSLFDAPLHYNFYAASTGGGYYDMRNIWNNTLVASNPTKAVTLVENHDTQPGQSLESTVQPWFKPLAYAFILTRSGGYPSVFYGDMYGTKGTTTREIPALKSKIEPLLKARKDYAYGTQRDYIDNPDVIGWTREGDSTKAKSGLATVITDGPGGSKRMYVGTSNAGEIWYDLTGNRTDKITIGSDGYATFPVNGGSVSVWVQQ

SEQ ID NO: 38730 - protein, 480 aa, Cytophaga sp.
NGTMMQYFEWYVPNDGQQWNRLRTDAPYLSSVGITAVWTPPAYKGTSQADVGYGPYDLYDLGEFNQKGTVRTKYGTKGELKSAVNTLHSNGIQVYGDVVMNHKAGADYTENVTAVEVNPSNRYQETSGEYNIQAWTGFNFPGRGTTYSNWKWQWFHFDGTDWDQSRSLSRIFKFDGKAWDWRVSSENGNYDYLMYADYDYDHPDVVNEMKKWGVWYANEVGLDGYRLDAVKHIKFQFLKDWVDNARAATGKEMFTVGEYWQNDLGALNNYLAKVNYNQSLFDAPLHYNFYAASTGGGYYDMRNILNNTLVASNPTKAVTLVENHDTQPGQSLESTVQPWFKPLAYAFILTRSGGYPSVFYGDMYGTKGTTTREIPALKSKIEPLLKARKDYAYGTQRDYIDNPDVIGWTREGDSTKAKSGLATVITDGPGGSKRMYVGTSNAGEIWYDLTGNRTDKITIGSDGYATFPVNGGSVSVWVQQ

SEQ ID NO: 38731 - protein, 480 aa, Cytophaga sp.
NGTMMQYFEWYVPNDGQQWNRLRTDAPYLSSVGITAVWTPPAYKGTSQADVGYGPYDLYDLGEFNQKGTVRTKYGTKGELKSAVNTLHSNGIQVYGDVVMNHKAGADYTENVTAVEVNPSSRYQETSGEYNIQAWTGFNFPGRGTTYSNWKWQWFHFDGTDWDQSRSLSRIFKFDGKAWDWEVSSENGNYDYLMYADYDYDHPDVVNEMKKWGVWYANEVGLDGYRLDAVKHIKFQFLKDWVDNARAATGKEMFTVGEYWQNDLGALNNYLAKVNYNQSLFDAPLHYNFYAASTGGGYYDMRNILNNTLVASNPTKAVTLVENHDTQPGQSLESTVQPWFKPLAYAFILTRSGGYPSVFYGDMYGTKGTTTREIPALKSKIEPLLKARKDYAYGTQRDYIDNPDVIGWTREGDSTKAKSGLATVITDGPGGSKRMYVGTSNAGEIWYDLTGNRTDKITIGSDGYATFPVNGGSVSVWVQQ

SEQ ID NO: 38732 - protein, 480 aa, Cytophaga sp.
NGTMMQYFEWYVPNDGQQWNRLRTDAPYLSSVGITAVWTPPAYKGTSQADVGYGPYDLYDLGEFNQKGTVRTKYGTKGELKSAVNTLHSNGIQVYGDVVMNHKAGADYTENVTAVEVNPSNRYQETSGEYNIQAWTGFNFPGRGTTYSNWKWQWFHFDGTDWDQSRSLSRIFKFDGKAWDWEVSSENGNYDYLMYADYDYDHPDVVNEMKKWGVWYAEEVGLDGYRLDAVKHIKFQFLKDWVDNARAATGKEMFTVGEYWQNDLGALNNYLAKVNYNQSLFDAPLHYNFYAASTGGGYYDMRNILNNTLVASNPTKAVTLVENHDTQPGQSLESTVQPWFKPLAYAFILTRSGGYPSVFYGDMYGTKGTTTREIPALKSKIEPLLKARKDYAYGTQRDYIDNPDVIGWTREGDSTKAKSGLATVITDGPGGSKRMYVGTSNAGEIWYDLTGNRTDKITIGSDGYATFPVNGGSVSVWVQQ

SEQ ID NO: 38733 - protein, 480 aa, Cytophaga sp.
NGTMMQYFEWYVPNDGQQWNRLRTDAPYLSSVGITAVWTPPAYKGTSQADVGYGPYDLYDLGEFNQKGTVRTKYGTDGELKSAVNTLHSNGIQVYGDVVMNHKAGADYTENVTAVEVNPSNRYQETSGEYNIQAWTGFNFPGRGTTYSNWKWQWFHFDGTDWDQSRSLSRIFKFDGKAWDWEVSSENGNYDYLMYADYDYDHPDVVNEMKKWGVWYANEVGLDGYRLDAVKHIKFQFLKDWVDNARAATGKEMFTVGEYWQNDLGALNNYLAKVNYNQSLFDAPLHYNFYAASTGGGYYDMRNILNNTLVASNPTKAVTLVENHDTQPGQSLESTVQPWFKPLAYAFILTRSGGYPSVFYGDMYGTKGTTTREIPALKSKIEPLLKARKDYAYGTQRDYIDNPDVIGWTREGDSTKAKSGLATVITDGPGGSKRMYVGTSNAGEIWYDLTGNRTDKITIGSDGYATFPVNGGSVSVWVQQ

SEQ ID NO: 38734 - protein, 480 aa, Cytophaga sp.
NGTMMQYFEWYVPNDGQQWNRLRTDAPYLSSVGITAVWTPPAYKGTSQADVGYGPYDLYDLGEFNQKGTVRTKYGTKGELKSAVNTLHSNGIQVYGDVVMNHKAGADYTENVTAVEVNPSNRYQETSGEYNIQAWTGFNFPGRGTTYSNFKWQWFHFDGTDWDQSRSLSRIFKFDGKAWDWPVSSENGNYDYLMYADYDYDHPDVVNEMKKWGVWYANEVGLDGYRLDAVKHIKFSFLKDWVDNARAATGKEMFTVGEYWQNDLGALNNYLAKVNYNQSLFDAPLHYNFYAASTGGGDYDMRNILNNTLVASNPTKAVTLVENHDTQPGQSLESTVQPWFKPLAYAFILTRSGGYPSVFYGDMYGTKGTTTREIPALKSKIEPLLKARKDYAYGTQRDYIDNPDVIGWTREGDSTKAKSGLATVITDGPGGSKRMYVGTSNAGEIWYDLTGNRTDKITIGSDGYATFPVETRSVSVWVQQ

SEQ ID NO: 38735 - protein, 480 aa, Cytophaga sp.
NGTMMQYFEWYVPNDGQQWNRLRTDAPYLSSVGITAVWTPPAYKGTSQADVGYGPYDLYDLGEFNQKGTVRTKYGTKGELKSAVNTLHSNGIQVYGDVVMNHKAGADYTENVTAVEVNPSNRYQETSGEYNIQAWTGFNFPGRGTTYSNWKWQWFHFDGTDWDQSRSLSRIFKFDGKAWDWEVSSENGNYDYLMYADYDYDHPDVANEMKKWGVWYANEVGLDGYRLDAVKHIKFQFLKDWVDNARAATGKEMFTVGEYWQNDLGALNNYLAKVNYNQSLFDAPLHYNFYAASTGGGYYDMRNILNNTLVASNPTKAVTLVENHDTQPGQSLESTVQPWFKPLAYAFILTRSGGYPSVFYGDMYGTKGTTTREIPALKSKIEPLLKARKDYAYGTQRDYIDNPDVIGWTREGDSTKAKSGLATVITDGPGGSKRMYVGTSNAGEIWYDLTGNRTDKITIGSDGYATFPVNGGSVSVWVQQ

SEQ ID NO: 38736 - protein, 480 aa, Cytophaga sp.
NGTMMQYFEWYVPNDGQQWNRLRTDAPYLSSVGITAVWTPPAYKGTSQADVGYGPYDLYDLGEFNQKGTVRTKYGTKGELKSAVNTLHSNGIQVYGDVVMNHKAGADYTENVTAVEVNPSNRYQETSGEWNIQAWTGFNFPGRGTTYSNWKWQWFHFDGTDWDQSRSLSRIFKFDGKAWDWEVSSENGNYDYLMYADYDYDHPDVVNEMKKWGVWYANEVGLDGYRLDAVKHIKFQFLKDWVDNARAATGKEMFTVGEYWQNDLGALNNYLAKVNYNQSLFDAPLHYNFYAASTGGGYYDMRNILNNTLVASNPTKAVTLVENHDTQPGQSLESTVQPWFKPLAYAFILTRSGGYPSVFYGDMYGTKGTTTREIPALKSKIEPLLKARKDYAYGTQRDYIDNPDVIGWTREGDSTKAKSGLATVITDGPGGSKRMYVGTSNAGEIWYDLTGNRTDKITIGSDGYATFPVNGGSVSVWVQQ

SEQ ID NO: 38737 - protein, 480 aa, Cytophaga sp.
NGTMMQYFEWYVPNDGQQWNRLRTDAPYLSSVGITAVWTPPAYKGTSQADVGYGPYDLYDLGEFNQKGTVRTKYGTKGELKSAVNTLHSNGIQVYGDVVMNHKAGADYTENVTAVEVNPSNRYQETSGEYNIQAWTGFNFPGRGTTYSNWKWQWFHFDGTDWDQSRSLSRIFKFDGKAWDWEVSSENGNYDYLMYADYDYDHPDVVNEMKKWGVWYANEVGLDGYRLDAVKHIKFQFLKDWVDNARAATGKEMFTVGEYWQNDLGALNNYLAKVNYNQSLFDAPLHYNFYAASTGGGYYDMRNILNNTLVASNPTKAVTLVENHDTQPGQSLESTVQPWFKPLAYAFILTRSGGYPSVFYGDMYGTKGTTTREIPALKSKIEPLLKARKDYAYGTQRDYIDNPDCIGWTREGDSTKAKSGLATVITDGPGGSKRMYVGTSNAGEIWYDLTGNRTDKITIGSDGYATFPVNGGSVSVWVQQ

SEQ ID NO: 38738 - protein, 480 aa, Cytophaga sp.
NGTMMQYFEWYVPNDGQQWNRLRTDAPYLSSVGITAVWTPPAYKGTSQADVGYGPYDLYDLGEFNQKGTVRTKYGTKGELKSAVNTLHSNGIQVYGDVVMNHKAGADYTENVTAVEVNPSNRYQETSGEYNIQAWTGFNFPGRGTTYSNWKWQWFHFDGTDWDQSRSLSRIFKFDGKAWDWEVSSENGNYDYLMYADYDYDHPDVVNEMKKWGVWYANEVGLDGYRLDAVKHIKFQFLKDWVDNARAATGKEMFTVGEYWQNDLGALNNYLAKVNYNQSLFDAPLHYNFYAASTGGGYYDMRNILNNTLVASNPTKAVTLVENHDTQPGQSLESTVQPWFKPLAYAFILTRSGGYPSVFYGDMYGTKGTTTREIPALKSKIEPLLKARKDYAYGTQRDYIDNPDVIGWTREGDSTKAKSGLATVITDGPGGSKRMYVGTSNAGEIWYDLTGNRTDKITIGSDGYATFPVAGGSVSVWVQQ

SEQ ID NO: 38739 - protein, 480 aa, Cytophaga sp.
NGTMMQYFEWYVPNDGQQWNRLRTDAPYLSSVGITAVWTPPAYKGTSQADVGYGPYDLYDLGEFNQKGTVRTKYGTKGELKSAVNTLHSNGIQVYGDVVMNHKAGADYTENVTAVEVNPSNRYQETSGEYNIQAWTGFNFPGRGTTYSNWKWQWFHFDGTDWDQSRSLSRIFKFDGKAWDWEVSSENGNYDYLMYADYDYDHPDVVNEMKKWGVWYANEVGLDGYRLDAVKHIKFQFLKDWVDNARAATGKEMFTVGEYWQNDLGALNNYLAKVNYNQSLFDAPLHYNFYAASTGGGYYDMRNILNNTLVASNPTKAVTLVENHDTQPGQSLESTVQPWFKPLAYAFILTRSGGYPSVFYGDMYGTKGTTTREIPALKSKIEPLLKARKDYAYGTQRDYIDNPDVIGWTREGDSTKAKSGLATVITDGPGGSKRMYVGTSNDGEIWYDLTGNRTDKITIGSDGYATFPVNGGSVSVWVQQ

SEQ ID NO: 38740 - protein, 480 aa, Cytophaga sp.
NGTMMQYFEWYVPNDGQQWNRLRTDAPYLSSVGITAVWTPPAYKGTSQADVGYGPYDLYDLGEFNQKGTVRTKYGTKGELKSAVNTLHSNGIQVYGDVVMNHKAGADYTENVTAVEVNPSNRYQETSGEYNIQAWTGFNFPGRGTTYSNWKWQWFHFDGTDWDQSRSLSRIFKFDGKAWDWEVSSYNGNYDYLMYADYDYDHPDVVNEMKKWGVWYANEVGLDGYRLDAVKHIKFQFLKDWVDNARAATGKEMFTVGEYWQNDLGALNNYLAKVNYNQSLFDAPLHYNFYAASTGGGYYDMRNILNNTLVASNPTKAVTLVENHDTQPGQSLESTVQPWFKPLAYAFILTRSGGYPSVFYGDMYGTKGTTTREIPALKSKIEPLLKARKDYAYGTQRDYIDNPDVIGWTREGDSTKAKSGLATVITDGPGGSKRMYVGTSNAGEIWYDLTGNRTDKITIGSDGYATFPVNGGSVSVWVQQ

SEQ ID NO: 38741 - protein, 480 aa, Cytophaga sp.
NGTMMQYFEWYVPNDGQQWNRLRTDAPYLSSVGITAVWTPPAYKGTSQADVGYGPYDLYDLGEFNQKGTVRTKYGTKGELKSAVNTLHSNGINVYGDVVMNHKAGADYTENVTAVEVNPSNRYQETSGEYNIQAWTGFNFPGRGTTYSNWKWQWFHFDGTDWDQSRSLSRIFKFDGKAWDWEVSSENGNYDYLMYADYDYDHPDVVNEMKKWGVWYANEVGLDGYRLDAVKHIKFQFLKDWVDNARAATGKEMFTVGEYWQNDLGALNNYLAKVNYNQSLFDAPLHYNFYAASTGGGYYDMRNILNNTLVASNPTKAVTLVENHDTQPGQSLESTVQPWFKPLAYAFILTRSGGYPSVFYGDMYGTKGTTTREIPALKSKIEPLLKARKDYAYGTQRDYIDNPDVIGWTREGDSTKAKSGLATVITDGPGGSKRMYVGTSNAGEIWYDLTGNRTDKITIGSDGYATFPVNGGSVSVWVQQ

SEQ ID NO: 38742 - protein, 480 aa, Cytophaga sp.
NGTMMQYFEWYVPNDGQQWNRLRTDAPYLSSVGITAVWTPPAYKGTSQADVGYGPYDLYDLGEFNQKGTVRTKYGTKGELKSAVNTLHSNGIQVYGDVVMNHKAGADYTENVTAVEVNPSNRYQETSGEYNIQAWTGFNFPGRGTTYSNWKWQWFHFDGTDWDQSRSLSRIFKFDGKAWDWEVSSENGNYDYLMYADYDYDHPDVVNEMKKWGVWYANEVGLDGYRLDAVKHIKFQFLKDWVDNARAATGKEMFTVGEYWQNDLGALNNYLAKVNYNQSLFDAPLHYNFYAASTGGGYYDMRNILNNTLVASNPTKAVTLVENHDTQPGQSLESTVQPWFKPLAYAFILTRSGGYPSVFYGDMYGTKGTTTREIPALKSKIEPLLKARKDYAYGTQRDYIDNPDVIGWTREGVSTKAKSGLATVITDGPGGSKRMYVGTSNAGEIWYDLTGNRTDKITIGSDGYATFPVNGGSVSVWVQQ

SEQ ID NO: 38743 - protein, 480 aa, Cytophaga sp.
NGTMMQYFEWYVPNDGQQWNRLRTDAPYLSSVGITAVWTPPAYKGTSQADVGYGPYDLYDLGEFNQKGTVRTKYGTKGELKSAVNTLHSNGIQVYGDVVMNHKAGADYTENVTAVEVNPSNRYQETSGEYNIQAWTGFNFPGRGTTYSNWKWQWFHFDGTDWDQSRSLSRIFKFDGKAWDWEVSSENGNYDYLMYADYDYDHPDVVNEMKKWGVWYANEVGLDGYRLDAVKHIKFQFLKDWVDNARAATGKEMFTVGEYWQNDLGALNNYLAKVNYNQSLFDAPLHYNFYAASTGGGYYDMRNILNNTLVASNPTKAVTLVENHDTQPGQSLESTVQPWFKPLAYAFILTRSGGYPSVFYGDMYGTKGTTTREIPALKSKIEPLLKARKDYAYGTQRDYIDNPDVIGWTREGDSTKAKSGLATVITDGPGGSKRMYVGTSNAGEIWYDLTGNRTDKITIGSDGYATFPVVGGSVSVWVQQ

SEQ ID NO: 38744 - protein, 480 aa, Cytophaga sp.
NGTMMQYFEWYVPNDGQQWNRLRTDAPYLSSVGITAVWTPPAYKGTSQADVGYGPYDLYDLGEFNQKGTVRTKYGTKGELKSAVNTLHSNGIQVYGDVVMNHKAGADYTENVTAVEVNPSNRYQETSGEYNIQAWTGFNFPGRGTFYSNWKWQWFHFDGTDWDQSRSLSRIFKFDGKAWDWEVSSENGNYDYLMYADYDYDHPDVVNEMKKWGVWYANEVGLDGYRLDAVKHIKFQFLKDWVDNARAATGKEMFTVGEYWQNDLGALNNYLAKVNYNQSLFDAPLHYNFYAASTGGGYYDMRNILNNTLVASNPTKAVTLVENHDTQPGQSLESTVQPWFKPLAYAFILTRSGGYPSVFYGDMYGTKGTTTREIPALKSKIEPLLKARKDYAYGTQRDYIDNPDVIGWTREGDSTKAKSGLATVITDGPGGSKRMYVGTSNAGEIWYDLTGNRTDKITIGSDGYATFPVNGGSVSVWVQQ

SEQ ID NO: 38745 - protein, 480 aa, Cytophaga sp.
NGTMMQYFEWYVPNDGQQWNRLRTDAPYLSSVGITAVWTPPAYKGTSQADVGYGPYDLYDLGEFNQKGTVRTKYGTKGELKSAVNTLHSNGIQVYGDVVMNHKAGADYTENVTAVEVNPSNRYQETSGEYNIQAWTGFNFPGRGTTYSNWKWQWFHFDGTDWDQSRSLSRIFKFDGKAWDWEVSSENGNYDYLMYADYDYDHPDVVNEMKKWGVWYANEVGLDGYRLDAVKHIKFQFLKDWVDNARAATGKEMFTVGEYWQNDLGALNNYLAKVNYNQSLFDAPLHYNFYAASTGGGYYDMRNILNNTLVASNPTKAVTLVENHDTQPGQSLESTVQPWFKPLAYAFILTRSGGYPSVFYGDMYGTKGTTTREIPALKSKIEPLLKARKDYAYGTQRDYIDNPDVIGWTREGDSTKAKSGLATVITDGPQGSKRMYVGTSNAGEIWYDLTGNRTDKITIGSDGYATFPVNGGSVSVWVQQ

SEQ ID NO: 38746 - protein, 480 aa, Cytophaga sp.
NGTMMQYFEWYVPNDGQQWNRLRTDAPYLSSVGITAVWTPPAYKGTSQADVGYGPYDLMDLGEFNQKGTVRTKYGTKGELKSAVNTLHSNGIQVYGDVVMNHKAGADYTENVTAVEVNPSNRYQETSGEYNIQAWTGFNFPGRGTTYSNWKWQWFHFDGTDWDQSRSLSRIFKFDGKAWDWEVSSENGNYDYLMYADYDYDHPDVVNEMKKWGVWYANEVGLDGYRLDAVKHIKFQFLKDWVDNARAATGKEMFTVGEYWQNDLGALNNYLAKVNYNQSLFDAPLHYNFYAASTGGGYYDMRNILNNTLVASNPTKAVTLVENHDTQPGQSLESTVQPWFKPLAYAFILTRSGGYPSVFYGDMYGTKGTTTREIPALKSKIEPLLKARKDYAYGTQRDYIDNPDVIGWTREGDSTKAKSGLATVITDGPGGSKRMYVGTSNAGEIWYDLTGNRTDKITIGSDGYATFPVNGGSVSVWVQQ

SEQ ID NO: 38747 - protein, 480 aa, Cytophaga sp.
NGTMMQYFEWYVPNDGQQWNRLRTDAPYLSSVGITAVWTPPAYKGTSQADVGYGPYDLYDLGEFNQKGTVRTKYGTKGELKSAVNTLHSNGIQVYGDVVMNHKAGADYTENVTAVEVNPSNRYQETSGEYNIQAWTGFNFPGRGTTYSNWKWQWFHFDGTDWDQSRSLSRIFKFDGKAWDWEVSSENGNYDYLMYADYDYDHPDVVNEMKKWGVWYANEVGLDGYRLDAVKHIKFQFLKDWVDNARAATGKEMFTVGEYWQNDLGALNNYLAKVNYNQSLFDAPLHYNFYAASTGGGYYDMRNILNNTLVASNPTKAVTLVENHDTQPGQSLESTVQPWFKPLAYAFILTRSGGYPSVFYGDMYGTKGTTTREIPALKSKIEPLLKARKDYAYGTQRDYIDNPDVIGWTREGDSTKAKSGLATVITDGPGGSKSMYVGTSNAGEIWYDLTGNRTDKITIGSDGYATFPVNGGSVSVWVQQ

SEQ ID NO: 38748 - protein, 480 aa, Cytophaga sp.
NGTMMQYFEWYVPNDGQQWNRLRTDAPYLSSVGITAVWTPPAYKGTSQADVGYGPYDLYDLGEFNQKGTVRTKYGTKGELKSAVNTLHSNGIQVYGDVVMNHKAGADYTENVTAVEVNPSNRYQETSGEYNIQAWTGFNFPGRGTTYSNWKWQWFHFDGTDWDQSRSLSRIFKFDGKAWDWEVSSENGNYDYLMYADYDYDHPDVVNEMKKWGVWYANEVGLDGYRLDAVKHIKFQFLKDWVDNARAASGKEMFTVGEYWQNDLGALNNYLAKVNYNQSLFDAPLHYNFYAASTGGGYYDMRNILNNTLVASNPTKAVTLVENHDTQPGQSLESTVQPWFKPLAYAFILTRSGGYPSVFYGDMYGTKGTTTREIPALKSKIEPLLKARKDYAYGTQRDYIDNPDVIGWTREGDSTKAKSGLATVITDGPGGSKRMYVGTSNAGEIWYDLTGNRTDKITIGSDGYATFPVNGGSVSVWVQQ

SEQ ID NO: 38749 - protein, 480 aa, Cytophaga sp.
NGTMMQYFEWYVPNDGQQWNRLRTDAPYLSSVGITAVWTPPAYKGTSQADVGYGPYDLYDLGEFNQKGTVRTKYGTKGELKSAVNTLHSNGIQVYGDVVMNHKAGADYTENVTAVEVNPSNRYQETSGEYNIQAWTGFNFPGRGTTYSNWKWQWFHFDGTDWDQSRSLSRIFKFDGKAWDWEVSSENGNYDYLMYADYDYDHPDVVNEMKKWGVWYANEVGLDGYRLDAVKHIKFQFLKDWVDNARAATGKEMFTVGEYWQNDLGALNNYLAKVNYNQSLFDAPLHYNFYAASTGGGYYDMRNILNNTLVASNPTKAVTLVENHDTQPGQSLESTVQPWFKPLAYAFILTRSGGYPSVFYGDMLGTKGTTTREIPALKSKIEPLLKARKDYAYGTQRDYIDNPDVIGWTREGDSTKAKSGLATVITDGPGGSKRMYVGTSNAGEIWYDLTGNRTDKITIGSDGYATFPVNGGSVSVWVQQ

SEQ ID NO: 38750 - protein, 480 aa, Cytophaga sp.
NGTMMQYFEWYVPNDGQQWNRLRTDAPYLSSVGITAVWTPPAYKGTSQADVGYGPYDLYDLGEFNQKGTVRTKYGTKGELKSAVNTLHSNGIQVYGDVVMNHKAGADYTENVTAVEVNPSNRYQETSGEYNIQAWTGFNFHGRGTTYSNWKWQWFHFDGTDWDQSRSLSRIFKFDGKAWDWEVSSENGNYDYLMYADYDYDHPDVVNEMKKWGVWYANEVGLDGYRLDAVKHIKFQFLKDWVDNARAATGKEMFTVGEYWQNDLGALNNYLAKVNYNQSLFDAPLHYNFYAASTGGGYYDMRNILNNTLVASNPTKAVTLVENHDTQPGQSLESTVQPWFKPLAYAFILTRSGGYPSVFYGDMYGTKGTTTREIPALKSKIEPLLKARKDYAYGTQRDYIDNPDVIGWTREGDSTKAKSGLATVITDGPGGSKRMYVGTSNAGEIWYDLTGNRTDKITIGSDGYATFPVNGGSVSVWVQQ

SEQ ID NO: 38751 - protein, 480 aa, Cytophaga sp.
NGTMMQYFEWYVPNDGQQWNRLRTDAPYLSSVGITAVWTPPAYKGTSQADVGYGPYDLYDLGEFNQKGTVRTKYGTKGELKSAVNTLHSNGIIVYGDVVMNHKAGADYTENVTAVEVNPSNRYQETSGEYNIQAWTGFNFPGRGTTYSNWKWQWFHFDGTDWDQSRSLSRIFKFDGKAWDWEVSSENGNYDYLMYADYDYDHPDVVNEMKKWGVWYANEVGLDGYRLDAVKHIKFQFLKDWVDNARAATGKEMFTVGEYWQNDLGALNNYLAKVNYNQSLFDAPLHYNFYAASTGGGYYDMRNILNNTLVASNPTKAVTLVENHDTQPGQSLESTVQPWFKPLAYAFILTRSGGYPSVFYGDMYGTKGTTTREIPALKSKIEPLLKARKDYAYGTQRDYIDNPDVIGWTREGDSTKAKSGLATVITDGPGGSKRMYVGTSNAGEIWYDLTGNRTDKITIGSDGYATFPVNGGSVSVWVQQ

SEQ ID NO: 38752 - protein, 480 aa, Cytophaga sp.
NGTMMQYFEWYVPNDGQQWNRLRTDAPYLSSVGITAVWTPPAYKGTSQADVGYGPYDLYDLGEFNQKGTVRTKYGTKGELKSAVNTLHSNGIQVYGDVVMNHKAGADYKENVTAVEVNPSNRYQETSGEYNIQAWTGFNFPGRGTTYSNWKWQWFHFDGTDWDQSRSLSRIFKFDGKAWDWEVSSENGNYDYLMYADYDYDHPDVVNEMKKWGVWYANEVGLDGYRLDAVKHIKFQFLKDWVDNARAATGKEMFTVGEYWQNDLGALNNYLAKVNYNQSLFDAPLHYNFYAASTGGGYYDMRNILNNTLVASNPTKAVTLVENHDTQPGQSLESTVQPWFKPLAYAFILTRSGGYPSVFYGDMYGTKGTTTREIPALKSKIEPLLKARKDYAYGTQRDYIDNPDVIGWTREGDSTKAKSGLATVITDGPGGSKRMYVGTSNAGEIWYDLTGNRTDKITIGSDGYATFPVNGGSVSVWVQQ

SEQ ID NO: 38753 - protein, 480 aa, Cytophaga sp.
NGTMMQYFEWYVPNDGQQWNRLRTDAPYLSSVGITAVWTPPAYKGTSQADVGYGPYDLYDLGEFNQKGTVRTKYGTKGELKSAVNTLHSNGIQVYGDVVMNHKAGADYTENVTAVEVNPSNRYQEQSGEYNIQAWTGFNFPGRGTTYSNWKWQWFHFDGTDWDQSRSLSRIFKFDGKAWDWEVSSENGNYDYLMYADYDYDHPDVVNEMKKWGVWYANEVGLDGYRLDAVKHIKFQFLKDWVDNARAATGKEMFTVGEYWQNDLGALNNYLAKVNYNQSLFDAPLHYNFYAASTGGGYYDMRNILNNTLVASNPTKAVTLVENHDTQPGQSLESTVQPWFKPLAYAFILTRSGGYPSVFYGDMYGTKGTTTREIPALKSKIEPLLKARKDYAYGTQRDYIDNPDVIGWTREGDSTKAKSGLATVITDGPGGSKRMYVGTSNAGEIWYDLTGNRTDKITIGSDGYATFPVNGGSVSVWVQQ

SEQ ID NO: 38754 - protein, 480 aa, Cytophaga sp.
NGTMMQYFEWYVPNDGQQWNRLRTDAPYLSSVGITAVWTPPAYKGTSQADVGYGPYDLYDLGEFNQKGTVRTKYGTKGELKSAVNTLHSNGIQVYGDVVMNHKAGADYTENVTAVEVNPSNRYQETSGEYNIQAWTGFNFPGRGTTYSNWKWQWFHFDGTDWDQSRSLSRIFKFDGKAWDWEVSSENGNYDYLMYADYDYDHPDVVNEMKKWGVWYANEVGLDGYRLDAVKHIKFQFLKDWVDNARAVTGKEMFTVGEYWQNDLGALNNYLAKVNYNQSLFDAPLHYNFYAASTGGGYYDMRNILNNTLVASNPTKAVTLVENHDTQPGQSLESTVQPWFKPLAYAFILTRSGGYPSVFYGDMYGTKGTTTREIPALKSKIEPLLKARKDYAYGTQRDYIDNPDVIGWTREGDSTKAKSGLATVITDGPGGSKRMYVGTSNAGEIWYDLTGNRTDKITIGSDGYATFPVNGGSVSVWVQQ

SEQ ID NO: 38755 - protein, 480 aa, Cytophaga sp.
NGTMMQYFEWYVPNDGQQWNRLRTDAPYLSSVGITAVWTPPAYKGTSQADVGYGPYDLYDLGEFNQKGTVRTKYGTKGELKSAVNTLHSNGIQVYGDVVMNHKAGADYTENVTAVEVNPSNRYQETSGKYNIQAWTGFNFPGRGTTYSNWKWQWFHFDGTDWDQSRSLSRIFKFDGKAWDWEVSSENGNYDYLMYADYDYDHPDVVNEMKKWGVWYANEVGLDGYRLDAVKHIKFQFLKDWVDNARAATGKEMFTVGEYWQNDLGALNNYLAKVNYNQSLFDAPLHYNFYAASTGGGYYDMRNILNNTLVASNPTKAVTLVENHDTQPGQSLESTVQPWFKPLAYAFILTRSGGYPSVFYGDMYGTKGTTTREIPALKSKIEPLLKARKDYAYGTQRDYIDNPDVIGWTREGDSTKAKSGLATVITDGPGGSKRMYVGTSNAGEIWYDLTGNRTDKITIGSDGYATFPVNGGSVSVWVQQ

SEQ ID NO: 38756 - protein, 480 aa, Cytophaga sp.
NGTMMQYFEWYVPNDGQQWNRLRTDAPYLSSVGITAVWTPPAYKGTSQADVGYGPYDLYDLGEFNQKGTVRTKYGTKGELKSAVNTLHSNGIQVYGDVVMNHKAGADYTENVTAVEVNPSNRYQETSGEYNIQAWTGFNFPGRGTTYSNWKWQWFHFDGTDWDQSRSLSRIFKFDGKAWDWEVSSENGNYDYLMYADYDYDHPDVVNEMKKWGVWYANEVGLDGYRLDAVKHIKFQFLKDWVDNARAATGKEMFTVGEYWQNDLGALNNYLAKVNYNQSLFDAPLHYNFYAASTGGGYYDMRNILNNTLVASNPTYAVTLVENHDTQPGQSLESTVQPWFKPLAYAFILTRSGGYPSVFYGDMYGTKGTTTREIPALKSKIEPLLKARKDYAYGTQRDYIDNPDVIGWTREGDSTKAKSGLATVITDGPGGSKRMYVGTSNAGEIWYDLTGNRTDKITIGSDGYATFPVNGGSVSVWVQQ

SEQ ID NO: 38757 - protein, 480 aa, Cytophaga sp.
NGTMMQYFEWYVPNDGQQWNRLRTDAPYLSSVGITAVWTPPAYKGTSQADVGYGPYDLYDLGEFNQKGTVRTKYGTKGELKSAVNTLHSNGIQVYGDVVMNHKAGADYTENVTAVEVNPSNRYQETSGEYNIQAWTGFNFPGRGTTYSNWKWQWFHFDGTDWDQSRSLSRIFKFDGKAWDWEVSSENGNYDYLMYADYDYDHPDVVNEMKKWGVWYANEVGLDGYRLDAVKHIKFQFLKDWVDNARAATGKEMFTVGEYWQNDLGALNNYLAKVNYNQSLFDAPLHYNFYAASTGGGYYDMRNILNNTLVASNPTFAVTLVENHDTQPGQSLESTVQPWFKPLAYAFILTRSGGYPSVFYGDMYGTKGTTTREIPALKSKIEPLLKARKDYAYGTQRDYIDNPDVIGWTREGDSTKAKSGLATVITDGPGGSKRMYVGTSNAGEIWYDLTGNRTDKITIGSDGYATFPVNGGSVSVWVQQ

SEQ ID NO: 38758 - protein, 480 aa, Cytophaga sp.
NGTMMQYFEWYVPNDGQQWNRLRTDAPYLSSVGITAVWTPPAYKGTSQADVGYGPYDLYDLGEFNQKGTVRTKYGTKGELKSAVNTLHSNGIQVYGDVVMNHKAGADYTENVTAVEVNPSNRYQETSGEYNIQAWTGFNFPGRGTTYSNWKWQWFHFDGTDWDQSRSLSRIFKFDGKAWDWEVSSENGNYDYLMYADYDYDHPDVVNEMKKWGVWYANEVGLDGYRLDAVKHIKFQFLKDWVDNARAATGKEMFTVGEYWQNDLGALNNYLAKVNYNQSLFDAPLHYNFYAASTGGGYYDMRNIHNNTLVASNPTKAVTLVENHDTQPGQSLESTVQPWFKPLAYAFILTRSGGYPSVFYGDMYGTKGTTTREIPALKSKIEPLLKARKDYAYGTQRDYIDNPDVIGWTREGDSTKAKSGLATVITDGPGGSKRMYVGTSNAGEIWYDLTGNRTDKITIGSDGYATFPVNGGSVSVWVQQ

SEQ ID NO: 38759 - protein, 480 aa, Cytophaga sp.
NGTMMQYFEWYVPNDGQQWNRLRTDAPYLSSVGITAVWTPPAYKGTSQADVGYGPYDLYDLGEFNQKGTVRTKYGTKGELKSAVNTLHSNGIQVYGDVVMNHKAGADYTENVTAVEVNPSNRYQETSGEYNIQAWTGFNFPGRGTTYSNWKWQWFHFDGTDWDQSRSLSRIFKFDGKAWDWEVSSENGNYDYLMYADYDYDHPDVVNEMKKWGVWYANEVGLDGYRLDAVKHIKFQFLKDWVDNARAATGKEMFTVGEYWQNDLGALNNYLAKVNYNQSLFDAPLHYNFYAASTGGGYYDMRNILNNTLVASNPTKAVTLVENHDTQPGQSLESTVQPWFKPLAYAFILTRSGGYPSVFYGDMYGTKGTTTREIPALKSKIEPLLKARKDYAYGTQRDYIDNPDVIGWTREGDSTKAKSGLATVITDGPGGSKRMYVGTSNAGEIWYDLTGNRTDKITIGDDGYATFPVNGGSVSVWVQQ

SEQ ID NO: 38760 - protein, 480 aa, Cytophaga sp.
NGTMMQYFEWYVPNDGQQWNRLRTDAPYLSSVGITAVWTPPAYKGTSQADVGYGPYDLYDLGEFNQKGTVRTKYGTKGELKSAVNTLHSNGIQVYGDVVMNHKAGADYTENVTAVEVNPSNRYQETSGEYNIQAWTGFNFPGRGTTYSNWKWQWFHFDGTDWDQSRSLSRIFKFDGKAWDWEVSSENGNYDYLMYADYDYDHPDVVNEMKKWGVWYANEVGLDGYRLDAVKHIKFQFLKDWVDNARAATGKEMFTVGEYWQNDLGALNNYLAKVNYNQSLFDAPLHYNFYAASTGGGYYDMRNILNNTLVASNPTKAVTLVENHDTQPGQSLESTVQPWFKPLAYAFILTRSGGYPSVFYGDMYGTKGTTTREIPALKSKIEPLLKARKDYAYGTQRDYIDNPDVIGWTRYGDSTKAKSGLATVITDGPGGSKRMYVGTSNAGEIWYDLTGNRTDKITIGSDGYATFPVNGGSVSVWVQQ

SEQ ID NO: 38761 - protein, 480 aa, Cytophaga sp.
NGTMMQYFEWYVPNDGQQWNRLRTDAPYLSSVGITAVWTPPAYKGTSQADVGYGPYDLYDLGEFNQKGTVRTKYGTKGELKSAVNTLHSNGIQVYGDVVMNHKAGADYTENVTAVEVNPSNRYQETSGEYNIQAWTGFNFPGRGTTYSNWKWQWFHFDGTDDDQSRSLSRIFKFDGKAWDWEVSSENGNYDYLMYADYDYDHPDVVNEMKKWGVWYANEVGLDGYRLDAVKHIKFQFLKDWVDNARAATGKEMFTVGEYWQNDLGALNNYLAKVNYNQSLFDAPLHYNFYAASTGGGYYDMRNILNNTLVASNPTKAVTLVENHDTQPGQSLESTVQPWFKPLAYAFILTRSGGYPSVFYGDMYGTKGTTTREIPALKSKIEPLLKARKDYAYGTQRDYIDNPDVIGWTREGDSTKAKSGLATVITDGPGGSKRMYVGTSNAGEIWYDLTGNRTDKITIGSDGYATFPVNGGSVSVWVQQ

SEQ ID NO: 38762 - protein, 480 aa, Cytophaga sp.
NGTMMQYFEWYVPNDGQQWNRLRTDAPYLSSVGITAVWTPPAYKGTSQADVGYGPYDLYDLGEFNQKGTVRTKYGTKGELKSAVNTLHSNGIQVYGDVVMNHKAGADYTENVTAVEVNPSNRYQETSGEYNIQAWTGFNFPGRGTTYSNWKWQWFHFDGTDWDQSRSLSRIFKFDGKAWDWEVSSGNGNYDYLMYADYDYDHPDVVNEMKKWGVWYANEVGLDGYRLDAVKHIKFQFLKDWVDNARAATGKEMFTVGEYWQNDLGALNNYLAKVNYNQSLFDAPLHYNFYAASTGGGYYDMRNILNNTLVASNPTKAVTLVENHDTQPGQSLESTVQPWFKPLAYAFILTRSGGYPSVFYGDMYGTKGTTTREIPALKSKIEPLLKARKDYAYGTQRDYIDNPDVIGWTREGDSTKAKSGLATVITDGPGGSKRMYVGTSNAGEIWYDLTGNRTDKITIGSDGYATFPVNGGSVSVWVQQ

SEQ ID NO: 38763 - protein, 480 aa, Cytophaga sp.
NGTMMQYFEWYVPNDGQQWNRLRTDAPYLSSVGITAVWTPPAYKGTSQADVGYGPYDLYDLGEFNQKGTVRTKYGTKGELKSAVNTLHSNGIQVYGDVVMNHKAGADYTENVTAVEVNPSNRYQETSGEYNIQAWTGFNFPGRGTTYSNWKWQWFHFDGTDWDQSRSLSRIFKFDGKAWDWEVSSENGNYDYLMYADYDYDHPDVVNEMKKWGVWYANEVGLDGYRLDAVKHIKFQFLKDWVDNARAATGKEMFTVGEYWQNDLYALNNYLAKVNYNQSLFDAPLHYNFYAASTGGGYYDMRNILNNTLVASNPTKAVTLVENHDTQPGQSLESTVQPWFKPLAYAFILTRSGGYPSVFYGDMYGTKGTTTREIPALKSKIEPLLKARKDYAYGTQRDYIDNPDVIGWTREGDSTKAKSGLATVITDGPGGSKRMYVGTSNAGEIWYDLTGNRTDKITIGSDGYATFPVNGGSVSVWVQQ

SEQ ID NO: 38764 - protein, 480 aa, Cytophaga sp.
NGTMMQYFEWYVPNDGQQWNRLRTDAPYLSSVGITAVWTPPAYKGTSQADVGYGPYDLYDLGEFNQKGTVRTKYGTKGELKSAVNTLHSNGIQVYGDVVMNHKAGADYTENVTAVEVNPSNRYQETSGERNIQAWTGFNFPGRGTTYSNWKWQWFHFDGTDWDQSRSLSRIFKFDGKAWDWEVSSENGNYDYLMYADYDYDHPDVVNEMKKWGVWYANEVGLDGYRLDAVKHIKFQFLKDWVDNARAATGKEMFTVGEYWQNDLGALNNYLAKVNYNQSLFDAPLHYNFYAASTGGGYYDMRNILNNTLVASNPTKAVTLVENHDTQPGQSLESTVQPWFKPLAYAFILTRSGGYPSVFYGDMYGTKGTTTREIPALKSKIEPLLKARKDYAYGTQRDYIDNPDVIGWTREGDSTKAKSGLATVITDGPGGSKRMYVGTSNAGEIWYDLTGNRTDKITIGSDGYATFPVNGGSVSVWVQQ

SEQ ID NO: 38765 - protein, 480 aa, Cytophaga sp.
NGTMMQYFEWYVPNDGQQWNRLRTDAPYLSSVGITAVWTPPAYKGTSQADVGYGPYDLYDLGEFNQKGTVRTKYGTKGELKSAVNTLHSNGIQVYGDVVMNHKAGADYTENVTAVEVNPSNRYQETSGEYNIQAWTGFNFPGRGTTYSNWKWQWFHFDGTDWDQSRSLSRIFKFDGKAWDWEVSSENGNYDYLMYADYDYDHPDSVNEMKKWGVWYANEVGLDGYRLDAVKHIKFQFLKDWVDNARAATGKEMFTVGEYWQNDLGALNNYLAKVNYNQSLFDAPLHYNFYAASTGGGYYDMRNILNNTLVASNPTKAVTLVENHDTQPGQSLESTVQPWFKPLAYAFILTRSGGYPSVFYGDMYGTKGTTTREIPALKSKIEPLLKARKDYAYGTQRDYIDNPDVIGWTREGDSTKAKSGLATVITDGPGGSKRMYVGTSNAGEIWYDLTGNRTDKITIGSDGYATFPVNGGSVSVWVQQ

SEQ ID NO: 38766 - protein, 480 aa, Cytophaga sp.
NGTMMQYFEWYVPNDGQQWNRLRTDAPYLSSVGITAVWTPPAYKGTSQADVGYGPYDLYDLGEFNQKGTVRTKYGTKGELKSAVNTLHSNGIQVYGDVVMNHKAGADYTENVTAVEVNPSNRYQETSGEYNIQAWTGFNFPGRGTTYSNWKWQWFHFDGTDWDQSRSLSRIFKFDGKAWDWEVSSENGNYDYLMYADYDYDHPDVVNEMKKWGVWYANEVGLDGYRLDAVKHIKFQFLKDWVDNARAATGKEMFTVGEYWQNDLGALNNYLAKVNYNQSLFDAPLHYNFYAASTGGGYYDMRNILNNTLVASNPTKAVTLVENHDTQPGQSLESTVQPWFKPLAYAFILTRSGGYPSVFYGDMYGTKGTTTREIPALKSKIEPLLKARKDYAYGTQRDYIDNPDVIGWTREGDSTKAKSGLATVITDGPGGSKRMYVGTSNAGEIWYDLTGRRTDKITIGSDGYATFPVNGGSVSVWVQQ

SEQ ID NO: 38767 - protein, 480 aa, Cytophaga sp.
NGTMMQYFEWYVPNDGQQWNRLRTDAPYLSSVGITAVWTPPAYKGTSQADVGYGPYDLYDLGEFNQKGTVRTKYGTKGELKSAVNTLHSNGIQVYGDVVMNHKAGADYTENVTAVEVNPSNRYQETSGEYNIQAWTGFNFPGRGTTYSNWKWQWFHFDGTDWDQSRSLSRIFKFDGKAWDWEVSSENGNYDYLMYADYDYDHPDVVNEMKKWGVWYANEVGWDGYRLDAVKHIKFQFLKDWVDNARAATGKEMFTVGEYWQNDLGALNNYLAKVNYNQSLFDAPLHYNFYAASTGGGYYDMRNILNNTLVASNPTKAVTLVENHDTQPGQSLESTVQPWFKPLAYAFILTRSGGYPSVFYGDMYGTKGTTTREIPALKSKIEPLLKARKDYAYGTQRDYIDNPDVIGWTREGDSTKAKSGLATVITDGPGGSKRMYVGTSNAGEIWYDLTGNRTDKITIGSDGYATFPVNGGSVSVWVQQ

SEQ ID NO: 38768 - protein, 480 aa, Cytophaga sp.
NGTMMQYFEWYVPNDGQQWNRLRTDAPYLSSVGITAVWTPPAYKGTSQADVGYGPYDLYDLGEFNQKGTVRTKYGTKGELKSAVNTLHSNGIQVYGDVVMNHKAGADYTENVTAVEVNPSNRYQETSGEYNIQAWTGFNFPGRGTTYSNWKWQWFHFDGTDWDQSRSLSRIFKFDGKAWDWEVSSENGNYDYLMYADYDYDHPDVVNEMKKWGVWYANEVGLDGYRLDAVKHIKFQFLKDWVDNARAATGKEMFTVGEYWQNDLGALNNYLAKVNYNQSLFDAPLHYNFYAASTGGGYYDMRNILNNTLVASNPTKAVTLVENHDTQPGQSLESTVQPWFKPLAYAFILTRSGGYPSVFYGDMYGTKGTTTREIPALKSKIEPLLKARKDYAYGTQRDYIDNPDVIGWTREGDSTKAKSGLATVITDGPGGSKRMYVGTSNAGEIWYDLTGNRTDKITIGSDGYATFPVNGTSVSVWVQQ

SEQ ID NO: 38769 - protein, 480 aa, Cytophaga sp.
NGTMMQYFEWYVPNDGQQWNRLRTDAPYLSSVGITAVWTPPAYKGTSQADVGYGPYDLYDLGEFNQKGTVRTKYGTKGELKSAVNTLHSNGIQVYGDVVMNHKAGADYTENVTAVEVNPSNRYQETSGEYNIQAWTGFNFPGRGTTYSNWKWQWFHFDGTDWDQSRSLSRIFKFDGKAWDWEVSSENGNYDYLMYADYDYDHPDVVNEMKKWGVWYANEVGLDGYRLDAVKHIKFQFLKDWVDNARAATGKEMFTVGEYWQNDLGALNNYLAKVNYNQSLFDAPLHYNFYAASTGGGYYDMRNILNNTLVASNPTKAVTLVENHDTQPGQSLESTVQPWFKPLAYAFILTRSGGYPSVFYGDMYGTKGTTTREIPALKSKIEPLLKARKDYAYGTQRDYIDNPDVIGWTREGDSTKAKSGLATVITDGPGGSKRMYVGTSNAWEIWYDLTGNRTDKITIGSDGYATFPVNGGSVSVWVQQ

SEQ ID NO: 38770 - protein, 480 aa, Cytophaga sp.
NGTMMQYFEWYVPNDGQQWNRLRTDAPYLSSVGITAVWTPPAYKGTSQADVGYGPYDLYDLGEFNQKGTVRTKYGTKGELKSAVNTLHSNGIQVYGDVVMNHKAGADYTENVTAVEVNPSNRYQETSGEYNIQAWTGFNFPGRGTTYSNWKWQWFHFDGTDWDQSRSLSRIFKFDGKAWDWEVSSENGNYDYLMYADYDYDHPDVVNEMKKWGVWYANEVGLDGYRLDAVKHIKFQFLKDWVDNARAATGKEMFTVGEYWQNDLGALNNYLAKVNYNQSLFDAPLHYNFYAASTGGGYYDMRNILNNTLVASNPTKAVTLVENHDTQPGQSLESTVQPWFKPLAYAFILTRSGGYPSVFYGDMYGTKGTTTREIPALKSKIEPLLKARKDYAYGTQRDMIDNPDVIGWTREGDSTKAKSGLATVITDGPGGSKRMYVGTSNAGEIWYDLTGNRTDKITIGSDGYATFPVNGGSVSVWVQQ

SEQ ID NO: 38771 - protein, 480 aa, Cytophaga sp.
NGTMMQYFEWYVPNDGQQWNRLRTDAPYLSSVGITAVWTPPAYKGTSQADVGYGPYDLYDLGEFNQKGTVRTKYGTKGELKSAVNTLHSNGIQVYGDVVMNHKAGADYTENVTAVEVNPSNRYQETSGEYNIQAWTGFNFPGRGTTYSNWKWQWFHFDGTDWDQSRSLSRIFKFDGKAWDWEVSSENGNYDYLMYADYDYDHPDVVNEMKKWGVWYANEVGLDGYRLDAVKHIKFQFLKDWVDNARAATGKEMFTVGEYWQNDLGALNNYLAKVNYNQSLFDAPLHYNFYAASTGGGYYDMRNILNNTLVASNPTKAVTLVENHDTQPGQSLESTVQPWFKPLAYAFILTRSGGYPSVFYGDMYGTKGTTTREIPALKSKIEPLLKARKDYAYGTQRDYIDNPDVIGWTREGDSTKAKSGLATVITDGPCGSKRMYVGTSNAGEIWYDLTGNRTDKITIGSDGYATFPVNGGSVSVWVQQ

SEQ ID NO: 38772 - protein, 480 aa, Cytophaga sp.
NGTMMQYFEWYVPNDGQQWNRLRTDAPYLSSVGITAVWTPPAYKGTSQADVGYGPYDLYDLGEFNQKGTVRTKYGTKGELKSAVNTLHSNGIQVYGDVVMNHKAGADYTENVTAVEVNPSNRYQETSGEYNIQAWTGFNFPGRGTTYSNWKWQWFHFDGTDWDQSRSLSRIFKFDGKAWDWEVSSENGNYDYLMYADYDYDHPDVVNEMKKWGVWYANEVGLDGYRLDAVKHIKFQFLKDWVDNARAATGKEMFTVGEYWQNDLGALNNYLAKVNYNQSLFDAPLHYNFYAASTGGGYYDMRNILNNTLVASNPTKAVTLVENHDTQPGQSLESTVQPWFKPLAYAFILTRSGGYPSVFYGDMEGTKGTTTREIPALKSKIEPLLKARKDYAYGTQRDYIDNPDVIGWTREGDSTKAKSGLATVITDGPGGSKRMYVGTSNAGEIWYDLTGNRTDKITIGSDGYATFPVNGGSVSVWVQQ

SEQ ID NO: 38773 - protein, 480 aa, Cytophaga sp.
NGTMMQYFEWYVPNDGQQWNRLRTDAPYLSSVGITAVWTPPAYKGTSQADVGYGPYDLYDLGEFNQKGTVRTKYGTKGELKSAVNTLHSNGIQVYGDVVMNHKAGADYTENVTAVEVNPSNRYQETSGEYNIQAWTGFNFPGRGTTYSNWKWQWFHFDGTDWDQSRSLSRIFKFDFKAWDWEVSSENGNYDYLMYADYDYDHPDVVNEMKKWGVWYANEVGLDGYRLDAVKHIKFQFLKDWVDNARAATGKEMFTVGEYWQNDLGALNNYLAKVNYNQSLFDAPLHYNFYAASTGGGYYDMRNILNNTLVASNPTKAVTLVENHDTQPGQSLESTVQPWFKPLAYAFILTRSGGYPSVFYGDMYGTKGTTTREIPALKSKIEPLLKARKDYAYGTQRDYIDNPDVIGWTREGDSTKAKSGLATVITDGPGGSKRMYVGTSNAGEIWYDLTGNRTDKITIGSDGYATFPVNGGSVSVWVQQ

SEQ ID NO: 38774 - protein, 480 aa, Cytophaga sp.
NGTMMQYFEWYVPNDGQQWNRLRTDAPYLSSVGITAVWTPPAYKGTSQADVGYGPYDLYDLGEFNQKGTVRTKYGTKGELKSAVNTLHSNGIQVYGDVVMNHKAGADYTENVTAVEVNPSNRYQETSGEYNIQAWTGFNFPGRGTTYSNWKWQWFHFDGTDWDQSRSLSRIFKFDGKAWDWEVSSENGNYDYLMYADYDYDHPDVVNEMKKWGVWYANEVGLDGYRLDAVKHIKFQFLKDWVDNARAATGKEMFTVGEYWQNDLGALNNYLAKVNYNQSLFDAPLHYNFYAASTGGGYYDMRNILNNTLVASNPTKAVTLVENHDTQPGQSLESTVQPWFKPLAYAFILTRSGGYPSVFYGDMYGTKGTTTREIPALKSKIEPLLKARKDYAYGTQRDYIDNPDVIGWTREGDSTKAKSGLATVITDGPGGSKVMYVGTSNAGEIWYDLTGNRTDKITIGSDGYATFPVNGGSVSVWVQQ

SEQ ID NO: 38775 - protein, 480 aa, Cytophaga sp.
NGTMMQYFEWYVPNDGQQWNRLRTDAPYLSSVGITAVWTPPCYKGTSQADVGYGPYDLYDLGEFNQKGTVRTKYGTKGELKSAVNTLHSNGIQVYGDVVMNHKAGADYTENVTAVEVNPSNRYQETSGEYNIQAWTGFNFPGRGTTYSNWKWQWFHFDGTDWDQSRSLSRIFKFDGKAWDWEVSSENGNYDYLMYADYDYDHPDVVNEMKKWGVWYANEVGLDGYRLDAVKHIKFQFLKDWVDNARAATGKEMFTVGEYWQNDLGALNNYLAKVNYNQSLFDAPLHYNFYAASTGGGYYDMRNILNNTLVASNPTKAVTLVENHDTQPGQSLESTVQPWFKPLAYAFILTRSGGYPSVFYGDMYGTKGTTTREIPALKSKIEPLLKARKDYAYGTQRDYIDNPDVIGWTREGDSTKAKSGLATVITDGPGGSKRMYVGTSNAGEIWYDLTGNRTDKITIGSDGYATFPVNGGSVSVWVQQ

SEQ ID NO: 38776 - protein, 480 aa, Cytophaga sp.
NGTMMQYFEWYVPNDGQQWNRLRTDAPYLSSVGITAVWTPPAYKGTSQADVGYGPYDLYDLGEFNQKGTVRTKYGTKGELKSAVNTLHSNGIQVYGDVVMNHKAGADYTENVTAVEVNPSNRYQETSGEYNIQAWTGFNFPGRGTTYSNWKWQWFHFDGTDWDQSRSLSRIFKFDGKAWDWEVSSENGNYDYLMYADYDYDHPDVVNEMKKWGVWYANEVGLDGYRLDAVKHIKFQFLKDWVDNARAATGKEMFTVGEYWQNDLGALNNYLAKVNYNQSLFDAPLHYNFYAASTGGGYYDMRNILNNTLVASNPTKAVTLVENHDTQPGQSLESTVQPWFKPLAYAFILTRSGGYPSVFYGDMYGTKGTTTREIPALKSKIEPLLKARKDYAYGTQRDYIDNPDVIGWTREGDSTKAKSGLATVITDGPGGSKRMYVGTSNSGEIWYDLTGNRTDKITIGSDGYATFPVNGGSVSVWVQQ

SEQ ID NO: 38777 - protein, 480 aa, Cytophaga sp.
NGTMMQYFEWYVPNDGQQWNRLRTDAPYLSSVGITAVWTPPAYKGTSQADVGYGPYDLYDLGEFNQKGTVRTKYGTKGELKSAVNTLHSNGIQVYGDVVMNHKAGADYTENVTAVEVNPSNRYQETSGEYNIQAWTGFNFPGRGTTYSNWKWQWFHFDGTDWDQSRSLSRIFKFDGKAWDWEVSSENGNYDYLMYADYDYDHPDVVNEMKKWGVWYANEVGLDGYRLDAVKHIKFQFLKDWVDNARAATGKEMFTVGEYWQNDLGALNNYLAKVNYNQSLFDAPLHYNFYAASTGGGYYDMRNILNNTLVASNPTKAVTLVENHDTQPGQSLESTVQPWFKPLAYAFILTRSGGYPSVFYGDMYGTKGTTTREIPALKSKIEPLLKARLDYAYGTQRDYIDNPDVIGWTREGDSTKAKSGLATVITDGPGGSKRMYVGTSNAGEIWYDLTGNRTDKITIGSDGYATFPVNGGSVSVWVQQ

SEQ ID NO: 38778 - protein, 480 aa, Cytophaga sp.
NGTMMQYFEWYVPNDGQQWNRLRTDAPYLSSVGITAYWTPPAYKGTSQADVGYGPYDLYDLGEFNQKGTVRTKYGTKGELKSAVNTLHSNGIQVYGDVVMNHKAGADYTENVTAVEVNPSNRYQETSGEYNIQAWTGFNFPGRGTTYSNWKWQWFHFDGTDWDQSRSLSRIFKFDGKAWDWEVSSENGNYDYLMYADYDYDHPDVVNEMKKWGVWYANEVGLDGYRLDAVKHIKFQFLKDWVDNARAATGKEMFTVGEYWQNDLGALNNYLAKVNYNQSLFDAPLHYNFYAASTGGGYYDMRNILNNTLVASNPTKAVTLVENHDTQPGQSLESTVQPWFKPLAYAFILTRSGGYPSVFYGDMYGTKGTTTREIPALKSKIEPLLKARKDYAYGTQRDYIDNPDVIGWTREGDSTKAKSGLATVITDGPGGSKRMYVGTSNAGEIWYDLTGNRTDKITIGSDGYATFPVNGGSVSVWVQQ

SEQ ID NO: 38779 - protein, 480 aa, Cytophaga sp.
NGTMMQYFEWYVPNDGQQWNRLRTDAPYLSSVGITAVWTPPAYKGTGQADVGYGPYDLYDLGEFNQKGTVRTKYGTKGELKSAVNTLHSNGIQVYGDVVMNHKAGADYTENVTAVEVNPSNRYQETSGEYNIQAWTGFNFPGRGTTYSNWKWQWFHFDGTDWDQSRSLSRIFKFDGKAWDWEVSSENGNYDYLMYADYDYDHPDVVNEMKKWGVWYANEVGLDGYRLDAVKHIKFQFLKDWVDNARAATGKEMFTVGEYWQNDLGALNNYLAKVNYNQSLFDAPLHYNFYAASTGGGYYDMRNILNNTLVASNPTKAVTLVENHDTQPGQSLESTVQPWFKPLAYAFILTRSGGYPSVFYGDMYGTKGTTTREIPALKSKIEPLLKARKDYAYGTQRDYIDNPDVIGWTREGDSTKAKSGLATVITDGPGGSKRMYVGTSNAGEIWYDLTGNRTDKITIGSDGYATFPVNGGSVSVWVQQ

SEQ ID NO: 38780 - protein, 480 aa, Cytophaga sp.
NGTMMQYFEWYVPNDGQQWNRLRTDAPYLSSVGITAVWTPPAYKGTSQADVGYGPYDLYDLGEFNQKGTVRTKYGTKGELKSAVNTLHSNGIQVYGDVVMNHKAGADYTENVTAVEVNPSNRYWETSGEYNIQAWTGFNFPGRGTTYSNWKWQWFHFDGTDWDQSRSLSRIFKFDGKAWDWEVSSENGNYDYLMYADYDYDHPDVVNEMKKWGVWYANEVGLDGYRLDAVKHIKFQFLKDWVDNARAATGKEMFTVGEYWQNDLGALNNYLAKVNYNQSLFDAPLHYNFYAASTGGGYYDMRNILNNTLVASNPTKAVTLVENHDTQPGQSLESTVQPWFKPLAYAFILTRSGGYPSVFYGDMYGTKGTTTREIPALKSKIEPLLKARKDYAYGTQRDYIDNPDVIGWTREGDSTKAKSGLATVITDGPGGSKRMYVGTSNAGEIWYDLTGNRTDKITIGSDGYATFPVNGGSVSVWVQQ

SEQ ID NO: 38781 - protein, 480 aa, Cytophaga sp.
NGTMMQYFEWYVPNDGQQWNRLRTDAPYLSSVGITAVWTPPAYKGTSQADVGYGPYDLYDLGEFNQKDTVRTKYGTKGELKSAVNTLHSNGIQVYGDVVMNHKAGADYTENVTAVEVNPSNRYQETSGEYNIQAWTGFNFPGRGTTYSNWKWQWFHFDGTDWDQSRSLSRIFKFDGKAWDWEVSSENGNYDYLMYADYDYDHPDVVNEMKKWGVWYANEVGLDGYRLDAVKHIKFQFLKDWVDNARAATGKEMFTVGEYWQNDLGALNNYLAKVNYNQSLFDAPLHYNFYAASTGGGYYDMRNILNNTLVASNPTKAVTLVENHDTQPGQSLESTVQPWFKPLAYAFILTRSGGYPSVFYGDMYGTKGTTTREIPALKSKIEPLLKARKDYAYGTQRDYIDNPDVIGWTREGDSTKAKSGLATVITDGPGGSKRMYVGTSNAGEIWYDLTGNRTDKITIGSDGYATFPVNGGSVSVWVQQ

SEQ ID NO: 38782 - protein, 480 aa, Cytophaga sp.
NGTMMQYFEWYVPNDGQQWNRLRTDAPYLSSVGITAVWTPPAYKGTSQADVGYGPYDLYDLGEFNQKGTVRTKYGTKGELKSAVNTLHSNGIQVYGDVVMNHKAGADYTENVTAVEVNPSNRYQETSGEYNIQAWTGFNFPGRGTTYSNWKWQWFHFDGTDFDQSRSLSRIFKFDGKAWDWEVSSENGNYDYLMYADYDYDHPDVVNEMKKWGVWYANEVGLDGYRLDAVKHIKFQFLKDWVDNARAATGKEMFTVGEYWQNDLGALNNYLAKVNYNQSLFDAPLHYNFYAASTGGGYYDMRNILNNTLVASNPTKAVTLVENHDTQPGQSLESTVQPWFKPLAYAFILTRSGGYPSVFYGDMYGTKGTTTREIPALKSKIEPLLKARKDYAYGTQRDYIDNPDVIGWTREGDSTKAKSGLATVITDGPGGSKRMYVGTSNAGEIWYDLTGNRTDKITIGSDGYATFPVNGGSVSVWVQQ

SEQ ID NO: 38783 - protein, 480 aa, Cytophaga sp.
NGTMMQYVEWYVPNDGQQWNRLRTDAPYLSSVGITAVWTPPAYKGTSQADVGYGPYDLYDLGEFNQKGTVRTKYGTKGELKSAVNTLHSNGIQVYGDVVMNHKAGADYTENVTAVEVNPSNRYQETSGEYNIQAWTGFNFPGRGTTYSNWKWQWFHFDGTDWDQSRSLSRIFKFDGKAWDWEVSSENGNYDYLMYADYDYDHPDVVNEMKKWGVWYANEVGLDGYRLDAVKHIKFQFLKDWVDNARAATGKEMFTVGEYWQNDLGALNNYLAKVNYNQSLFDAPLHYNFYAASTGGGYYDMRNILNNTLVASNPTKAVTLVENHDTQPGQSLESTVQPWFKPLAYAFILTRSGGYPSVFYGDMYGTKGTTTREIPALKSKIEPLLKARKDYAYGTQRDYIDNPDVIGWTREGDSTKAKSGLATVITDGPGGSKRMYVGTSNAGEIWYDLTGNRTDKITIGSDGYATFPVNGGSVSVWVQQ

SEQ ID NO: 38784 - protein, 480 aa, Cytophaga sp.
NGTMMQYFEWYVPNDGQQWNRLRTDAPYLSSVGITAVWTPPAYKGTSQADVGYGPYDLYDLGEFNQKGTVRTKYGTKGELKSAVNTLHSNGIQVYGDVVMNHKAGADYTENVTAVEVNPSNRYQETSGEYNIQAWTGFNFPGRGTTHSNWKWQWFHFDGTDWDQSRSNSRIFKFHGKAWDWEVSSENGNYDYLMYADYDYDHPDVVNEMKKWGVWYANEVGLDGYRLDAVKHIKFQFLKDWVDNARAATGKEMFTVGEYWQNDLGALNNYLAKVNYNQSLFDAPLHYNFYAASTGGGYYDMRNILNNTLVASNPTKAVTLVENHDTQPGQSLESTVQPWFKPLAYAFILTRSGGYPSVFYGDMYGTKGTTTREIPALKSKIEPLLKARKDYAYGTQRDYIDNPDVIGWTREGDSTKAKSGLATVITDGPGGSKRMYVGTSNAGEIWYDLTGNRTDKITIGSDGYATFPVNGGSVSVWVQQ

SEQ ID NO: 38785 - protein, 480 aa, Cytophaga sp.
NGTMMQYFEWYVPNDGQQWNRLRTDAPYLSSVGITAVWTPPAYKGTSQADVGYGPYDLYDLGEFNQKGTVRTKYGTKGELKSAVNTLHSNGIQVYGDVVMNHKAGADYTENVTAVEVNPSNRYQETSGEYNIQAWTGFNFPGRGTTYSNWKWQWFHFDGTDWDQSRSLSRIFKFDGKAWDWEVSSENGNYDYLMYADYDYDHPDVVNEMKKWGVWYANEVGLDGYRLDAVKHIKFQFLKDWVDNARAATGKEMFTVGEYWQNDLGALNNYLAKVNYNQSLFDAPLHYNFYAASTGGGYYDMRNILNNTLVASNPTKAVTLVENHDTQPGQSLESTVQPWFKPLAYAFILTRSGGYPSVFYGDMYGTKGTTTREIPALKSKIEPLLKARKDYAYGTQRDYIDNPDVIGWTREGDSTKAKSGLATVITDGPNGSKRMYVGTSNAGEIWYDLTGNRTDKITIGSDGYATFPVNGGSVSVWVQQ

SEQ ID NO: 38786 - protein, 480 aa, Cytophaga sp.
NGTMMQYFEWYVPNDGQQWNRLRTDAPYLSSVGITAVWTPPAYKGTSQADVGYGPYDLYDLGEFNQKGTVRTKYGTKGELKSAVNTLHSNGIQVYGDVVMNHKAGADYTENVTAVEVNPSNRYQETSGEYNIQAWTGFNFPGRGTTYSNWKWQWFHFDGTDWDQSRSLSRIFKFDGKAWDWEVSSENGNYDYLMYADYDYDHPDVVNEMKKWGVWYANEVGLDGYRLDAVKHIKFQFLKDWVDNARAATGKEMFTVGEYWQNDLGALNNYLAKVNYNQSLFDAPLHYNFYAASTGGGYYDMRNILNNTLVASNPTKAVTLVENHDTQPGQSLESTVQPWFKPLAYAFILTRSGGYPSVFYGDMYGTKGTTTREIPALKSKIEPLLKARKDYAYGTLRDYIDNPDVIGWTREGDSTKAKSGLATVITDGPGGSKRMYVGTSNAGEIWYDLTGNRTDKITIGSDGYATFPVNGGSVSVWVQQ

SEQ ID NO: 38787 - protein, 480 aa, Cytophaga sp.
NGTMMQYFEWYVPNDGQQWNRLRTDAPYLSSVGITAVWTPPAYKGTSQADVGYGPYDLYDLGEFNQKGTVRTKYGTKGELKSAVNTLHSNGIQVYGDVVMNHKAGADYTENVTAVEVNPSNRYQETSGEYNIQAWTGFNFPGRGTTYSNWKWQWFHFDGTDWDQSRSLSRIFKFDGKAWDWEVSSENGNYDYLMYADYDYDHPDVVNEMYKWGVWYANEVGLDGYRLDAVKHIKFQFLKDWVDNARAATGKEMFTVGEYWQNDLGALNNYLAKVNYNQSLFDAPLHYNFYAASTGGGYYDMRNILNNTLVASNPTKAVTLVENHDTQPGQSLESTVQPWFKPLAYAFILTRSGGYPSVFYGDMYGTKGTTTREIPALKSKIEPLLKARKDYAYGTQRDYIDNPDVIGWTREGDSTKAKSGLATVITDGPGGSKRMYVGTSNAGEIWYDLTGNRTDKITIGSDGYATFPVNGGSVSVWVQQ

SEQ ID NO: 38788 - protein, 480 aa, Cytophaga sp.
NGTMMQYFEWYVPNDGQQWNRLRTDAPYLSSVGITAVWTPPAYKGTSQADVGYGPYDLYDLGEFNQKGTVRTKYGTKGELKSAVNTLHSNGIQVYGDVVMNHKAGADYTENVTAVEVNPSNRYQETSGEYNIQAWTGFNFPGRGTTYSNWKWQWFHFDGTDWDQSRSLSRIFKFDGKAWDWEVSSENGNYDYLMYADYDYDHPDVVNEMKKWGVWYANEVGLDGYRLDAVKHIKFQFLKDWVDNARAATGKEMFTVGEYWQNDLVALNNYLAKVNYNQSLFDAPLHYNFYAASTGGGYYDMRNILNNTLVASNPTKAVTLVENHDTQPGQSLESTVQPWFKPLAYAFILTRSGGYPSVFYGDMYGTKGTTTREIPALKSKIEPLLKARKDYAYGTQRDYIDNPDVIGWTREGDSTKAKSGLATVITDGPGGSKRMYVGTSNAGEIWYDLTGNRTDKITIGSDGYATFPVNGGSVSVWVQQ

SEQ ID NO: 38789 - protein, 480 aa, Cytophaga sp.
NGTMMQYFEWYVPNDGQQWNRLRTDAPYLSSVGITAVWTPPAYKGTSQADVGYGPYDLYDLGEFNQKGTVRTKYGTKGELKSAVNTLHSNGIQVYGDVVMNHKAGADYTENVTAVEVNPSNRYQETSGEYNIQAWTGFNFPGRGTTYSNWKWQWFHFDGTDWDQSRSLSRIFKFDGKAWDWEVSPENGNYDYLMYADYDYDHPDVVNEMKKWGVWYANEVGLDGYRLDAVKHIKFQFLKDWVDNARAATGKEMFTVGEYWQNDLGALNNYLAKVNYNQSLFDAPLHYNFYAASTGGGYYDMRNILNNTLVASNPTKAVTLVENHDTQPGQSLESTVQPWFKPLAYAFILTRSGGYPSVFYGDMYGTKGTTTREIPALKSKIEPLLKARKDYAYGTQRDYIDNPDVIGWTREGDSTKAKSGLATVITDGPGGSKRMYVGTSNAGEIWYDLTGNRTDKITIGSDGYATFPVNGGSVSVWVQQ

SEQ ID NO: 38790 - protein, 480 aa, Cytophaga sp.
NGTMMQYFEWYVPNDGQQWNRLRTDAPYLSSVGITAVWTPPAYKGTSQADVGYGPYDLYDLGEFNQKGTVRTKYGTKGELKSAVNTLHSNGIQVYGDVVMNHKAGADYTENVTAVEVNPSNRYQETSGEYNIQAWTGFNFPGRGTTYSNWKWQWFHFDGTDWDQSRSLSRIFKFDGKAWDWEVSSENGNYDYLMYADYDYDHPDVVNEMKKWGVWYANEVGLDGYRLDAVKHIKFQFLKDWVDNARAATGSEMFTVGEYWQNDLGALNNYLAKVNYNQSLFDAPLHYNFYAASTGGGYYDMRNILNNTLVASNPTKAVTLVENHDTQPGQSLESTVQPWFKPLAYAFILTRSGGYPSVFYGDMYGTKGTTTREIPALKSKIEPLLKARKDYAYGTQRDYIDNPDVIGWTREGDSTKAKSGLATVITDGPGGSKRMYVGTSNAGEIWYDLTGNRTDKITIGSDGYATFPVNGGSVSVWVQQ

SEQ ID NO: 38791 - protein, 480 aa, Cytophaga sp.
NGTMMQYFEWYVPNDGQQWNRLRTDAPYLSSVGITAVWTPPAYKGTSQADVGYGPYDLYDLGEFNQKGTVRTKYGTKGELKSAVNTLHSNGIQVYGDVVMNHKAGADYTENVTAVEVNPSNRYQETSGEYNIQAWTGFNFPGRGTTYSNWKWQWFHFDGTDWDQSRSLSRIFKFDGKAWDWEVSSENGNYDYLMYADYDYDHPDVVNEMKKWGVWYANEVGLDGYRLDAVKHIKFQFLKDWVDNARAATGKEMFTVGEYWQNDLGALNNYLAKVNYNQSLFDAPLHYNFYAASTGGGYYDMRNILNNTLVASNPTKAVTLVENHDTQPGQSLESTVQPWFKPLAYAFILTRSGGYPSVFYGDMYGTKGTTTREIPALKSKIEPLLKARKDYAYGTQRDYIDNPDVIGWTREGDSTKAKSGLATVITDGPGGSKRMYVGTSNAGEIWYDLTGKRTDKITIGSDGYATFPVNGGSVSVWVQQ

SEQ ID NO: 38792 - protein, 480 aa, Cytophaga sp.
NGTMMQYFEWYVPNDGQQWNRLRTDAPYLSSVGITAVWTPPAYKGTSQADVGYGPYDLYDLGEFNQKGTVRTKYGTKGELKSAVNTLHSNGIQVYGDVVMNHKAGADYTENVTAVEVNPSNRYQETSGEYNIQAWTGFNFPGRGTTYSNWKWQWFHFDGTDWDQSRSLSRIFKFDGKAWDWEVSSENGNYDYLMYADYDYDHPDVVNEMKKWGVWYANEVGLDGYRLDAVKHIKFQFLKDWVDNARAATGKEMFTVGEYWQNDLGALNNYLAKVNYNQSLFDAPLHYNFYAASTGGGYYDMRNILNNTLVASNPTNAVTLVENHDTQPGQSLESTVQPWFKPLAYAFILTRSGGYPSVFYGDMYGTKGTTTREIPALKSKIEPLLKARKDYAYGTQRDYIDNPDVIGWTREGDSTKAKSGLATVITDGPGGSKRMYVGTSNAGEIWYDLTGNRTDKITIGSDGYATFPVNGGSVSVWVQQ

SEQ ID NO: 38793 - protein, 480 aa, Cytophaga sp.
NGTMMQYFEWYVPNDGQQWNRLRTDAPYLSSVGITAVWTPPAYKGTSQADVGYGPYDLYDLGEFNQKGTVRTKYGTKGELKSAVNTLHSNGIQVYGDVVMNHKAGADYTENVTAQEVNPSNRYQETSGEYNIQAWTGFNFPGRGTTYSNWKWQWFHFDGTDWDQSRSLSRIFKFDGKAWDWEVSSENGNYDYLMYADYDYDHPDVVNEMKKWGVWYANEVGLDGYRLDAVKHIKFQFLKDWVDNARAATGKEMFTVGEYWQNDLGALNNYLAKVNYNQSLFDAPLHYNFYAASTGGGYYDMRNILNNTLVASNPTKAVTLVENHDTQPGQSLESTVQPWFKPLAYAFILTRSGGYPSVFYGDMYGTKGTTTREIPALKSKIEPLLKARKDYAYGTQRDYIDNPDVIGWTREGDSTKAKSGLATVITDGPGGSKRMYVGTSNAGEIWYDLTGNRTDKITIGSDGYATFPVNGGSVSVWVQQ

SEQ ID NO: 38794 - protein, 480 aa, Cytophaga sp.
NGTMMQYFEWYVPNDGQQWNRLRTDAPYLSSVGITAVWTPPAYKGTSQADVGYGPYDLYDLGEFNQKGTVRTKYGTKGELKSAVNTLHSNGIQVYGDVVMNHKAGADYTENVTAVEVNPSNRYQETSGEYNIQAWTGFNFPGRGTTYSNWKWQWFHFDGTDWDQSRSLSRIFKFDGKAWDWEVSSENGNYDYLMYADYDYDHPDVVNEMKKWGVWYANEVGLDGYRLDAVKHIKFQFLKDWVDNARAATGKEMFTVGEYWQNDLGALNNYLAKVNYNQSLFDAPLHYNFYAASTGGGYYDMRNILNNTLVASNPTKAVTLVENHDTQPGQSLESTVQPWFKPLAYAFILTRSGGYPSVFYGDMYGTKGTTTREIPALKSKIEPLLKARKDYAYGTQRDYIDNPDVIGWTREGDSTKAKSGLATVITDGPGGSKRMYVGTSNAGEIWYDLTGNRTDKITIGSDGYATFPSNGGSVSVWVQQ

SEQ ID NO: 38795 - protein, 480 aa, Cytophaga sp.
NGTMMQYFEWYVPNDGQQWNRLRTDAPYLSSVGITAVWTPPAYKGTSQADVGYGPYDLYDLGEFNQKGTVRTKYGTKGELKSAVNTLHSNGIQVYGDVVMNHKAGADYTENVTAVEVNPSNRYQETSGEYNIQAWTGFNFPGRGTTYSNWKWQWFHFDGTDWDQSRSLSRIFKFDGKAWDWEVSSENGNYDYLMYADYDYDHPDVVNEMKKWGVWYANEVGLDGYRLDAVKHLKFQFLKDWVDNARAATGKEMFTVGEYWQNDLGALNNYLAKVNYNQSLFDAPLHYNFYAASTGGGYYDMRNILNNTLVASNPTKAVTLVENHDTQPGQSLESTVQPWFKPLAYAFILTRSGGYPSVFYGDMYGTKGTTTREIPALKSKIEPLLKARKDYAYGTQRDYIDNPDVIGWTREGDSTKAKSGLATVITDGPGGSKRMYVGTSNAGEIWYDLTGNRTDKITIGSDGYATFPVNGGSVSVWVQQ

SEQ ID NO: 38796 - protein, 480 aa, Cytophaga sp.
NGTMMQYFEWYVPNDGQQWNRLRTDAPYLSSVGITAVWTPPAYKGTSQADVGYGPYDLYDLGEFNQKGTVRTKYGTKGELKSAVNTLHSNGIQVYGDVVMNHKAGADYTENVTAVEVNPSNRYQETSGEYNIQAWTGFNFPGRGTTYSNWKWQWFHFDGTDWDQSRSLSRIFKFDGKAWDWEVSSENGNYDYLMYADYDYDHPDVVNEMKKWGVWYANEVGLDGYRLDAVKHIKFQFLKDWVDNARAATGKEMFTVGEYWQNDLGALNNYLAKVNYNQSLFDAPLHYNFYAASTGGGYYDMRNILNNTLVASNPTKAVTLVENHDTQPGQSLESTVQPWFKPLAYAFILTRSGGYPSVFYGDMYGTKGTTTREIPALKSKIEPLLKARKDYAYGTQRDYIDNPDVIGWTREGDSTKAKSGLATVITDGPKGSKRMYVGTSNAGEIWYDLTGNRTDKITIGSDGYATFPVNGGSVSVWVQQ

SEQ ID NO: 38797 - protein, 480 aa, Cytophaga sp.
NGTMMQYFEWYVPNDGQQWNRLRTDAPYLSSVGITAVWTPPAYKGTSQADVGYGPYDLYDLGEFNQKGTVRTKYGTKGELKSAVNTLHSNGIQVYGDVVMNHKAGADYTENVTAVEVNPSNRYQETSGEYNIQAWTGFNFPGRGTTYSNWKWQWFHFDGTDWDQSRSLSRIFKFDGKAWDWEVSSENGNYDYLMYADYDYDHPDVVNEMKKWGVWYANEVGLDGYRLDAVKHIKFQFLKDWVDNARAATGKEMFTVGEYWQNDLGALNNYLAKVNYNQSLFDAPLHYNFYGASTGGGYYDMRNILNNTLVASNPTKAVTLVENHDTQPGQSLESTVQPWFKPLAYAFILTRSGGYPSVFYGDMYGTKGTTTREIPALKSKIEPLLKARKDYAYGTQRDYIDNPDVIGWTREGDSTKAKSGLATVITDGPGGSKRMYVGTSNAGEIWYDLTGNRTDKITIGSDGYATFPVNGGSVSVWVQQ

SEQ ID NO: 38798 - protein, 480 aa, Cytophaga sp.
NGTMMQYFEWYVPNDGQQWNRLRTDAPYLSSVGITAVWTPPAYKGTSQADVGYGPYDLYDLGEFNQKGTVRTKYGTKGELKSAVNTLHSNGIQVYGDVVMNHKAGADYTENVTAVEVNPSNRYQETSGEYNIQAWTGFNFPGRGTTYSNWKWQWFHFDGTDWDQSRSLSRIFKFDGKAWDWEVSSENGNYDYLMYADYDYDHPDVVNEMKKWGVWYANEVGLDGYRLDAVKHIKFQFLKDWVDNARAATGKEMFTVGEYWQNDLGALNNYLAKVNYNQSLFDAPLHYNFYVASTGGGYYDMRNILNNTLVASNPTKAVTLVENHDTQPGQSLESTVQPWFKPLAYAFILTRSGGYPSVFYGDMYGTKGTTTREIPALKSKIEPLLKARKDYAYGTQRDYIDNPDVIGWTREGDSTKAKSGLATVITDGPGGSKRMYVGTSNAGEIWYDLTGNRTDKITIGSDGYATFPVNGGSVSVWVQQ

SEQ ID NO: 38799 - protein, 480 aa, Cytophaga sp.
NGTMMQYFEWYVPNDGQQWNRLRTDAPYLSSVGITAVWTPPAYKGTSQADVGYGPYDLYDLGEFNQKGTVRTKYGTKGELKSAVNTLHSNGIQVYGDVVMNHKAGADYTENVTAVEVNPSNRYQETSGEYNIQAWTGFNFPGRGTTYSNWKWQWFHFDGTDWDQSRSLSRIFKFDGKAWDWEVSSENGNYDYLMYADYDYDHPDVVNEMKKWGVWYANEVGLDGYRLDAVKHIKFQFLKDWVDNARAATGKEMFTVGEYWQNDLGALNNYLAKVNYNQSLFDAPLHYNFYAASTGGGYYDMRNILNNTLVASNPTKAVTLVENHDTQPGQSLDSTVQPWFKPLAYAFILTRSGGYPSVFYGDMYGTKGTTTREIPALKSKIEPLLKARKDYAYGTQRDYIDNPDVIGWTREGDSTKAKSGLATVITDGPGGSKRMYVGTSNAGEIWYDLTGNRTDKITIGSDGYATFPVNGGSVSVWVQQ

SEQ ID NO: 38800 - protein, 480 aa, Cytophaga sp.
NGTMMQYFEWYVPNDGQQWNRLRTDAPYLSSVGITAVWTPPAYKATSQADVGYGPYDLYDLGEFNQKGTVRTKYGTKGELKSAVNTLHSNGIQVYGDVVMNHKAGADYTENVTAVEVNPSNRYQETSGEYNIQAWTGFNFPGRGTTYSNWKWQWFHFDGTDWDQSRSLSRIFKFDGKAWDWEVSSENGNYDYLMYADYDYDHPDVVNEMKKWGVWYANEVGLDGYRLDAVKHIKFQFLKDWVDNARAATGKEMFTVGEYWQNDLGALNNYLAKVNYNQSLFDAPLHYNFYAASTGGGYYDMRNILNNTLVASNPTKAVTLVENHDTQPGQSLESTVQPWFKPLAYAFILTRSGGYPSVFYGDMYGTKGTTTREIPALKSKIEPLLKARKDYAYGTQRDYIDNPDVIGWTREGDSTKAKSGLATVITDGPGGSKRMYVGTSNAGEIWYDLTGNRTDKITIGSDGYATFPVNGGSVSVWVQQ

SEQ ID NO: 38801 - protein, 480 aa, Cytophaga sp.
NGTMMQYFEWYVPNDGQQWNRLRTDAPYLSSVGITAVWTPPAYKGTSQADVGYGPYDLYDLGEFNQKGTVRTKYGTKGELKSAVNTLHSNGIQVYGDVVMNHKAGADYTENVTAVEVNPSNRYQETSGEYNIQAWTGFNFPGRGTTYSNWKWQWFHFDGTDIDQSRSLSRIFKFDGKAWDWEVSSENGNYDYLMYADYDYDHPDVVNEMKKWGVWYANEVGLDGYRLDAVKHIKFQFLKDWVDNARAATGKEMFTVGEYWQNDLGALNNYLAKVNYNQSLFDAPLHYNFYAASTGGGYYDMRNILNNTLVASNPTKAVTLVENHDTQPGQSLESTVQPWFKPLAYAFILTRSGGYPSVFYGDMYGTKGTTTREIPALKSKIEPLLKARKDYAYGTQRDYIDNPDVIGWTREGDSTKAKSGLATVITDGPGGSKRMYVGTSNAGEIWYDLTGNRTDKITIGSDGYATFPVNGGSVSVWVQQ

SEQ ID NO: 38802 - protein, 480 aa, Cytophaga sp.
NGTMMQYFEWYVPNDGQQWNRLRTDAPYLSSVGITAVWTPPAYKGTSQADVGYGPYDLYDLGEFNQKGTVRTKYGTKGELKSAVNTLHSNGIQVYGDVVMNHKAGADYTENVTAVEVNPSNRYQETSGEYNIQAWTGFNFPGRGTTYSNWKWQWFHFDGTDWDQSRSLSRIFKFDGKAWDWEVSSENLNYDYLMYADYDYDHPDVVNEMKKWGVWYANEVGLDGYRLDAVKHIKFQFLKDWVDNARAATGKEMFTVGEYWQNDLGALNNYLAKVNYNQSLFDAPLHYNFYAASTGGGYYDMRNILNNTLVASNPTKAVTLVENHDTQPGQSLESTVQPWFKPLAYAFILTRSGGYPSVFYGDMYGTKGTTTREIPALKSKIEPLLKARKDYAYGTQRDYIDNPDVIGWTREGDSTKAKSGLATVITDGPGGSKRMYVGTSNAGEIWYDLTGNRTDKITIGSDGYATFPVNGGSVSVWVQQ

SEQ ID NO: 38803 - protein, 480 aa, Cytophaga sp.
NGTMMQYFEWYVPNDGQQWNRLRTDAPYLSSVGITAVWTPPAYKGTSQADVGYGPYDLYDLGEFNQKGTVRTKYGTKGELKSAVNTLHSNGIQVYGDVVMNHKAGADYTENVTAVEVNPSNRYQETPGEYNIQAWTGFNFPGRGTTYSNWKWQWFHFDGTDWDQSRSLSRIFKFDGKAWDWEVSSENGNYDYLMYADYDYDHPDVVNEMKKWGVWYANEVGLDGYRLDAVKHIKFQFLKDWVDNARAATGKEMFTVGEYWQNDLGALNNYLAKVNYNQSLFDAPLHYNFYAASTGGGYYDMRNILNNTLVASNPTKAVTLVENHDTQPGQSLESTVQPWFKPLAYAFILTRSGGYPSVFYGDMYGTKGTTTREIPALKSKIEPLLKARKDYAYGTQRDYIDNPDVIGWTREGDSTKAKSGLATVITDGPGGSKRMYVGTSNAGEIWYDLTGNRTDKITIGSDGYATFPVNGGSVSVWVQQ

SEQ ID NO: 38804 - protein, 480 aa, Cytophaga sp.
NGTMMQYFEWYVPNDGQQWNRLRTDAPYLSSVGITAVWTPPAYKGTSQADVGYGPYDLYDLGEFNQKGTVRTKYGTKGELKSAVNTLHSNGIQVYGDVVMNHKAGADYTENVTAVEVNPSNRYQETSGEYNIQAWTGFNFPGRGTTYSNWKWQWFHFDGTDWDQSRSLHRIFKFDGKAWDWEVSSENGNYDYLMYADYDYDHPDVVNEMKKWGVWYANEVGLDGYRLDAVKHIKFQFLKDWVDNARAATGKEMFTVGEYWQNDLGALNNYLAKVNYNQSLFDAPLHYNFYAASTGGGYYDMRNILNNTLVASNPTKAVTLVENHDTQPGQSLESTVQPWFKPLAYAFILTRSGGYPSVFYGDMYGTKGTTTREIPALKSKIEPLLKARKDYAYGTQRDYIDNPDVIGWTREGDSTKAKSGLATVITDGPGGSKRMYVGTSNAGEIWYDLTGNRTDKITIGSDGYATFPVNGGSVSVWVQQ

SEQ ID NO: 38805 - protein, 480 aa, Cytophaga sp.
NGTMMQYFEWYVPNDGQQWNRLRTDAPYLSSVGITAVWTPPAYKGTSQADVGYGPYDLYDLGEFNQKGTVRTKYGTKGELKSAVNTLHSNGIQVYGDVVMNHKAGADYTENVTAVEVNPSNRYQETSGEYNIQAWTGFNFPGRGTTYSNWKWQWFHFDGTDWDQSRSLSRIFKFDGKAWDWEVSSENGNYDYLMYADYDYDHPDVVNEMKKWGVWYANEVGLDGYRLDAVKHIKFQFLKDWVDNARAATGKEMFTVGEYWQNDLGALNNYLAKVNYNQSLFDAPLHYNFYAASTGGGYYDMRNILNNTLVASNPTKAVTLVENHDTQPGQSLESTVVPWFKPLAYAFILTRSGGYPSVFYGDMYGTKGTTTREIPALKSKIEPLLKARKDYAYGTQRDYIDNPDVIGWTREGDSTKAKSGLATVITDGPGGSKRMYVGTSNAGEIWYDLTGNRTDKITIGSDGYATFPVNGGSVSVWVQQ

SEQ ID NO: 38806 - protein, 480 aa, Cytophaga sp.
NGTMMQYFEWYVPNDGQQWNRLRTDAPYLSSVGITAVWTPPAYKGTSQADVGYGPYDLYDLGEFNQKGTVRTKYGTKGELKSAVNTLHSNGIQVYGDVVMNHKAGADYTENVTAVEVNPSNRYQETSGEYNIQAWTGFNFPGRGTTYSNWKWQWFHFDGTDWDQSRSLSRIFKFDGKAWDWEVSSENGNYDYLMYADYDYDHPDVVNEMKKWGVWYANEVGLDGYRLDAVKHIKFQFLKDWVDNARAATGKEMFTVGEYWQNDLGALNNYLAKVNYNQSLFDAPLHYNFYAASTGGGYYDMRNILNNTLVASNPTKAVTLVENHDTQPGQSLESTVQPWFKPLAYAFILTRSGGYPSVFYGDMYGTKGTTTREIPALKSKIEPLLKARKDYAYGTQRDYIDNPDVIGWTREGDSTKAKSGLATVITDGPGGSKRMYVGTSNAGEIWYDLTGNRTDKITIYSDGYATFPVNGGSVSVWVQQ

SEQ ID NO: 38807 - protein, 480 aa, Cytophaga sp.
NGTMMQYFEWYVPNDGQQWNRLRTDAPYLSSVGITAVWTPPAYKGTSQADVGYGPYDLYDLGEFNQKGTVRTKYGTKGELKSAVNTLHSNGIQVYGDVVMNHKAGADYTENVTAVEVNPSNRYQETSGETNIQAWTGFNFPGRGTTYSNWKWQWFHFDGTDWDQSRSLSRIFKFDGKAWDWEVSSENGNYDYLMYADYDYDHPDVVNEMKKWGVWYANEVGLDGYRLDAVKHIKFQFLKDWVDNARAATGKEMFTVGEYWQNDLGALNNYLAKVNYNQSLFDAPLHYNFYAASTGGGYYDMRNILNNTLVASNPTKAVTLVENHDTQPGQSLESTVQPWFKPLAYAFILTRSGGYPSVFYGDMYGTKGTTTREIPALKSKIEPLLKARKDYAYGTQRDYIDNPDVIGWTREGDSTKAKSGLATVITDGPGGSKRMYVGTSNAGEIWYDLTGNRTDKITIGSDGYATFPVNGGSVSVWVQQ

SEQ ID NO: 38808 - protein, 480 aa, Cytophaga sp.
NGTMMQYFEWYVPNDGQQWNRLRTDAPYLSSVGITAVWTPPAYKGTSQADVGYGPYDLYDLGEFNQKGTVRTKYGTKGELKSAVNTLHSNGIQVYGDVVMNHKAGADYTENVTAVEVNPSNRYQETSGEYNIQAWTGFNFPGRGTTYSNWKWQWFHFDGTDWDQSRSLSRIFKFDGKAWDWEVSSENGNYDYLMYADYDYDHPDVVNEMKKWGVWYANEVGLDGYRLDAVKHIKFQFLKDWVDNARAATGKEMFTVGEYWQNDLGALNNYLAKVNYNQSLFDAPLHYNFYAASTGGGYYDMRNILNNTLVASNPTKAVTLVENHDTQPGQSLESTVQPWFKPLAYAFILTRSGGYPSVFYGDMYGTKGTTTREIPALKSKIEPLLKARKDYAYGTQRDYIDNPDVIGWTREGDSTKAKSGLATVITDGPIGSKRMYVGTSNAGEIWYDLTGNRTDKITIGSDGYATFPVNGGSVSVWVQQ

SEQ ID NO: 38809 - protein, 480 aa, Cytophaga sp.
NGTMMQYFEWYVPNDGQQWNRLRTDAPYLSSVGITAVWTPPAYKGTSQADVGYGPYDLYDLGEFNQKGTVRTKYGTKGELKSAVNTLHSNGIQVYGDVVMNHKAGADYTENVTAVEVNPSNRYQETSGEANIQAWTGFNFPGRGTTYSNWKWQWFHFDGTDWDQSRSLSRIFKFDGKAWDWEVSSENGNYDYLMYADYDYDHPDVVNEMKKWGVWYANEVGLDGYRLDAVKHIKFQFLKDWVDNARAATGKEMFTVGEYWQNDLGALNNYLAKVNYNQSLFDAPLHYNFYAASTGGGYYDMRNILNNTLVASNPTKAVTLVENHDTQPGQSLESTVQPWFKPLAYAFILTRSGGYPSVFYGDMYGTKGTTTREIPALKSKIEPLLKARKDYAYGTQRDYIDNPDVIGWTREGDSTKAKSGLATVITDGPGGSKRMYVGTSNAGEIWYDLTGNRTDKITIGSDGYATFPVNGGSVSVWVQQ

SEQ ID NO: 38810 - protein, 480 aa, Cytophaga sp.
NGTMMQYFEWYVPNDGQQWNRLRTDAPYLSSVGITAVWTPPAYKGTSQADVGYGPYDLYDLGEFNQKGTVRTKYGTKGELKSAVNTLHSNGIQVYGDVVMNHKAGADYTENVTAVEVNPSNRYQETSGEYNIQAWTGFNFPGRGTTYSNWKWQWFHFDGTDWDQSRSLSRIFKFDGKAWDWEVSSENGNYDYLMYADYDYDHPDVVNEMKKWGVWYANEVGLDGYRLDAVKHIKFQFLKDWVDNARAATGKEMFTVGEYWQNDLGALNNYLAKVNYNQSLFDAPLHYNFYAASTGGGYYDMRNILNNTLVASNPTKAVTLVENHDTQPGQSLESTVQPWFKPLAYAFILTRSGGYPSVFYGDMYGTKGTTTREIPALKSKIEPLLKARKDYAYGTQRDYIDNPDVIGWTREGDSTKAKTGLATVITDGPGGSKRMYVGTSNAGEIWYDLTGNRTDKITIGSDGYATFPVNGGSVSVWVQQ

SEQ ID NO: 38811 - protein, 480 aa, Cytophaga sp.
NGTMMQYFEWYVPNDGQQWNRLRTDAPYLSSVGITAVWTPPAYKGTSQADVGYGPYDLYDLGEFNQKGTVRTKYGTKGELKSAVNTLHSNGIQVYGDVVMNHKAGADYTENVTAVEVNPSNRYQETSGEYNIQAWTGFNFPGRGTTYSNWKWQWFHFDGTDWDQSRSLSRIFKFDGKAWDWEVSSENGNYDYLMYADYDYDHPDVVNEMKKWGVWYANEVGLDGYRLDAVKHIKFQFLKDWVDNARAATGKEMFTVGEYWQNDLGALNNYLAKVNYNQSLFDAPLHYNFYAASTGGGYYDMRNILNNTLVASNPTKAVTLVENHDTQPGQSLESTVQPWFKPLAYAFILTRSGGYPSVFYGDMYGTKGTTTREIPALKSKIEPLLKARKDYAYGTQRDYIDNPDVIGWTREGDSTKDKSGLATVITDGPGGSKRMYVGTSNAGEIWYDLTGNRTDKITIGSDGYATFPVNGGSVSVWVQQ

SEQ ID NO: 38812 - protein, 480 aa, Cytophaga sp.
NGTMMQYFEWYVPNDGQQWNRLRTDAPYLSSVGITAVWTPPAYKGTSQADVGYGPYDLYDLGEFNQKGTVRTKYGTKGELKSAVNTLHSNGIQVYGDVVMNHKAGADYTENVTAVEVNPSNRYQETSGEYNIQAWTGFNFPGRGTTYSNWKWQWFHFDGTDWDQSRSLSRIFKFDGKAWDWEVSSENGNYDYLMYADYDYDHPDVVNEMKKWGVWYANEVGLDGYRLDAVKHIKFQFLKDWVDNARAATGKEMFTVGEYWQNDLGALNNYLAKVNYNQSLFDAPLHYNFYAASTGGGYYDMRNILNNTLVASNPTKAVTLVENHDTQPGQSLESTVQPWFKPLAYAFILTRSGGYPSVFYGDMYGTKGTTTREIPALKSKIEPLLKARKDYAYGTQRDYIDNPDVIGWTREGDSTKAKSGLATVITDGPGGSKRMYVGTSNAGEIWYDLTGNRTDKITIGSDGYATFPVNGGSVSVWVRQ

SEQ ID NO: 38813 - protein, 480 aa, Cytophaga sp.
NGTMMQYFEWYVPNDGQQWNRLRTDAPYLSSVGITAVWTPPAYKGTSQADVGYGPYDLYDLGEFNQKGTVRTKYGTKGELKSAVNTLHSNGIQVYGDVVMNHKAGADYTENVTAVEVNGSNRYQETSGEYNIQAWTGFNFPGRGTTYSNWKWQWFHFDGTDWDQSRSLSRIFKFDGKAWDWEVSSENGNYDYLMYADYDYDHPDVVNEMKKWGVWYANEVGLDGYRLDAVKHIKFQFLKDWVDNARAATGKEMFTVGEYWQNDLGALNNYLAKVNYNQSLFDAPLHYNFYAASTGGGYYDMRNILNNTLVASNPTKAVTLVENHDTQPGQSLESTVQPWFKPLAYAFILTRSGGYPSVFYGDMYGTKGTTTREIPALKSKIEPLLKARKDYAYGTQRDYIDNPDVIGWTREGDSTKAKSGLATVITDGPGGSKRMYVGTSNAGEIWYDLTGNRTDKITIGSDGYATFPVNGGSVSVWVQQ

SEQ ID NO: 38814 - protein, 480 aa, Cytophaga sp.
NGTMMQYFEWYVPNDGQQWNRLRTDAPYLSSVGITAVWTPPAYKGTSQADVGYGPYDLYDLGEFNQKGTVRTKYGTKGELKSAVNTLHSNGIQVYGDVVMNHKAGADYTENVTAVEVNPSNRYQETSGEYNIQAWTGFNFPGRGTTYSNWKWQWFHFDGTDWDQSRSLSRIFKFDGKAWDWEVSSENGNYDYLMYADYDYDHPDVVNEMKKWGVWYANEVGLDGYRLDAVKHIKFQFLKDWVDNARAATGKEMFTVGEYWQNDLGALNNYLAKVNYNQSLFDAPLHYNFYAASTGGGYYDMRNILNNTLVASNPTKAVTLVENHDTQPGQSLESTVQPWFKPLAYAFILTRSGGYPSVFYGDMYGTKGTTTREIPALKSKIEPLLKARKDYAYGTQRDYIDNPDVIGWTREGASTKAKSGLATVITDGPGGSKRMYVGTSNAGEIWYDLTGNRTDKITIGSDGYATFPVNGGSVSVWVQQ

SEQ ID NO: 38815 - protein, 480 aa, Cytophaga sp.
NGTMMQYFEWYVPNDGQQWNRLRTDAPYLSSVGITAVWTPPAYKGTSQADVGYGPYDLYDLGEFNQKGTVRTKYGTKGELKSAVNTLHSNGIQVYGDVVMNHKAGADYTENVTAVEVNPSNRYQETSGEYNIQAWTGFNFPGRGTTYSNWKWQWFHFDGTDWDQSRSLSRIFKFDGKAWDWEVSSENGNYDYLMYADYDYDHPDVVNEMKKWGVWYANEVGLDGYRLDAVKHIKFQFLKDWVDNARAATGKEMFTVGEYWQNDLGALNNYLAKVNYNQSLFDAPLHYNFYAASTGGGYYDMRNILNNTLVASNPTKAVTLVENHDTQPGQSLESTVQPWFKPLAYAFILTRSGGYPSVFYGDMYGTKGTTTREIPALKSKIEPLLKARKDYAYGTQRDYIDNPDVIGWTREGDSTKAKSGLATVITDGPGGSKRMYVGTSNAGEIWYDLTGNRTSKITIGSDGYATFPVNGGSVSVWVQQ

SEQ ID NO: 38816 - protein, 480 aa, Cytophaga sp.
NGTMMQYFEWYVPNDGQQWNRLRTDAPYLSSVGITAVWTPPAYKGTSQADVGYGPYDLYDLGEFNQKGTVRTKYGTKGELKSAVNTLHSNGIYVYGDVVMNHKAGADYTENVTAVEVNPSNRYQETSGEYNIQAWTGFNFPGRGTTYSNWKWQWFHFDGTDWDQSRSLSRIFKFDGKAWDWEVSSENGNYDYLMYADYDYDHPDVVNEMKKWGVWYANEVGLDGYRLDAVKHIKFQFLKDWVDNARAATGKEMFTVGEYWQNDLGALNNYLAKVNYNQSLFDAPLHYNFYAASTGGGYYDMRNILNNTLVASNPTKAVTLVENHDTQPGQSLESTVQPWFKPLAYAFILTRSGGYPSVFYGDMYGTKGTTTREIPALKSKIEPLLKARKDYAYGTQRDYIDNPDVIGWTREGDSTKAKSGLATVITDGPGGSKRMYVGTSNAGEIWYDLTGNRTDKITIGSDGYATFPVNGGSVSVWVQQ

SEQ ID NO: 38817 - protein, 480 aa, Cytophaga sp.
NGTMMQYFEWYVPNDGQQWNRLRTDAPYLSSVGITAVWTPPAYKGTSQADVGYGPYDLYDLGEFNQKGTVRTKYGTKGELKSAVNTLHSNGIQVYGDVVMNHKAGADYTENVTAVEVNPSNRYQETSGEYNIQAWTGFNFPGRGTTYSNWKWQWFHFDGTDWDQSRSLSRIFKFDGKAWDWEVSSENGNYDYLMYADYDYDHPDVVNEMKKWGVWYANEVGLDGYRLDAVKHIKFQFLKDWVDNARAATGKEMFTVGEYWQNDLGALNNYLAKVNYNQSLFDAPLHYNFYAASTGGGYYDMRNILNNTLVASNPTKAVTLVENHDTQPGQSLESTVQPWFKPLAYAFILTRSGGYPSVFYGDMYGTKGTTTREIPALKSKIEPLLKARKDYAYGTQRDYIDNPDVIGWTREGDSTKAKSGLATVITDGSGGSKRMYVGTSNAGEIWYDLTGNRTDKITIGSDGYATFPVNGGSVSVWVQQ

SEQ ID NO: 38818 - protein, 480 aa, Cytophaga sp.
NGTMMQYFEWYVPNDGQQWNRLRTDAPYLSSVGITAVWTPPAYKGTSQADVGYGPYDLYDLGEFNQKGTVRTKYGTKGELKSAVNTLHSNGIQVYGDVVMNHKAGADYTENVTAVEVNPSNRYQETSGEYNIQAWTGFNFPGRGTTYSNWKWQWFHFDGTDWDQSRSLSRIFKFDRKAWDWEVSSENGNYDYLMYADYDYDHPDVVNEMKKWGVWYANEVGLDGYRLDAVKHIKFQFLKDWVDNARAATGKEMFTVGEYWQNDLGALNNYLAKVNYNQSLFDAPLHYNFYAASTGGGYYDMRNILNNTLVASNPTKAVTLVENHDTQPGQSLESTVQPWFKPLAYAFILTRSGGYPSVFYGDMYGTKGTTTREIPALKSKIEPLLKARKDYAYGTQRDYIDNPDVIGWTREGDSTKAKSGLATVITDGPGGSKRMYVGTSNAGEIWYDLTGNRTDKITIGSDGYATFPVNGGSVSVWVQQ

SEQ ID NO: 38819 - protein, 480 aa, Cytophaga sp.
NGTMMQYFEWYVPNDGQQWNRLRTDAPYLSSVGITAVWTPPAYKGTSQADVGYGPYDLYDLGEFNQKGTVRTKYGTKGELKSAVNTLHSNGIQVYGDVVMNHKAGADYTENVTAVEVNPSNRYQETSGEYNIQAWTGFNFPGRGTTYSNWKWQWFHFDGTDWDQSRSLSRIFKFDGKAWDWEVSSENGNYDYLMYADYDYDHPDVVNEMKKWGVWYANEVGLDGYRLDAVKHIKFQFLKDWVDNARAATGKEMFTVGEYWQNDLGALNNYLAKVNYNQSLFDAPLHYNFYAASTGGGYYDMRNILNNTLVASNPTHAVTLVENHDTQPGQSLESTVQPWFKPLAYAFILTRSGGYPSVFYGDMYGTKGTTTREIPALKSKIEPLLKARKDYAYGTQRDYIDNPDVIGWTREGDSTKAKSGLATVITDGPGGSKRMYVGTSNAGEIWYDLTGNRTDKITIGSDGYATFPVNGGSVSVWVQQ

SEQ ID NO: 38820 - protein, 480 aa, Cytophaga sp.
NGTMMQYFEWYVPNDGQQWNRLRTDAPYLSSVGITAVWTPPAYKGTSQADVGYGPYDLYDLGEFNQKGTVRTKYGTKGELKSAVNTLHSNGIQVYGDVVMNHKAGADYTENVTAVEVNPSNRYQETSGEYNIQAWTGFNFPGRGTTYSNWKWQWFHFDGTDWDQSRSLSRIFKFDGKAWDWEVSSENGNYDYLMYADYDYDHPDVVNEMKKWGVWYANEVGLDGYRLDAVKHIKFQFLKDWVDNARAATGKEMFTVGEYWQNDLGALNNYLAKVNYNQSLFDAPLHYNFYHASTGGGYYDMRNILNNTLVASNPTKAVTLVENHDTQPGQSLESTVQPWFKPLAYAFILTRSGGYPSVFYGDMYGTKGTTTREIPALKSKIEPLLKARKDYAYGTQRDYIDNPDVIGWTREGDSTKAKSGLATVITDGPGGSKRMYVGTSNAGEIWYDLTGNRTDKITIGSDGYATFPVNGGSVSVWVQQ

SEQ ID NO: 38821 - protein, 480 aa, Cytophaga sp.
NGTMMQYFEWYVPNDGQQWNRLRTDAPYLSSVGITAVWTPPAYKGTSQADVGYGPYDLYDLGEFNQKGTVRTKYGTKGELKSAVNTLHSNGIQVYGDVVMNHKAGADYTENVTAVEVNPSNRYTETSGEYNIQAWTGFNFPGRGTTYSNWKWQWFHFDGTDWDQSRSLSRIFKFDGKAWDWEVSSENGNYDYLMYADYDYDHPDVVNEMKKWGVWYANEVGLDGYRLDAVKHIKFQFLKDWVDNARAATGKEMFTVGEYWQNDLGALNNYLAKVNYNQSLFDAPLHYNFYAASTGGGYYDMRNILNNTLVASNPTKAVTLVENHDTQPGQSLESTVQPWFKPLAYAFILTRSGGYPSVFYGDMYGTKGTTTREIPALKSKIEPLLKARKDYAYGTQRDYIDNPDVIGWTREGDSTKAKSGLATVITDGPGGSKRMYVGTSNAGEIWYDLTGNRTDKITIGSDGYATFPVNGGSVSVWVQQ

SEQ ID NO: 38822 - protein, 480 aa, Cytophaga sp.
NGTMMQYFEWYVPNDGQQWNRLRTDAPYLSSVGITAVWTPPAYKGTSQADVGYGPYDLYDLGEFNQKGTVRTKYGTKGELKSAVNTLHSNGIQVYGDVVMNHKAGADYTENVCAVEVNPSNRYQETSGEYNIQAWTGFNFPGRGTTYSNWKWQWFHFDGTDWDQSRSLSRIFKFDGKAWDWEVSSENGNYDYLMYADYDYDHPDVVNEMKKWGVWYANEVGLDGYRLDAVKHIKFQFLKDWVDNARAATGKEMFTVGEYWQNDLGALNNYLAKVNYNQSLFDAPLHYNFYAASTGGGYYDMRNILNNTLVASNPTKAVTLVENHDTQPGQSLESTVQPWFKPLAYAFILTRSGGYPSVFYGDMYGTKGTTTREIPALKSKIEPLLKARKDYAYGTQRDYIDNPDVIGWTREGDSTKAKSGLATVITDGPGGSKRMYVGTSNAGEIWYDLTGNRTDKITIGSDGYATFPVNGGSVSVWVQQ

SEQ ID NO: 38823 - protein, 480 aa, Cytophaga sp.
NGTMMQYFEWYVPNDGQQWNRLRTDAPYLSSVGITAVWTPPAYKGTSQADVGYGPYDLYDLGEFNQKGTVRTKYGTKGELKSAVNTLHSNGIQVYGDVVMNHKAGADYTENVTAVEVNPSNRYQETSGEYNIQAWTGFNFPGRGTTYSNWKWQWFHFDGTDWDQSRSLSRIFKFDGKAWDWEVSSENGNYDYLMYADYDYDHPDVVNEMKKWGVWYANEVGLDGYRLDAVKHIKFQFLKDWVDNARAATGKEMFTVGEYWQNDLGALNNYLAKVNYNQSLFDAPLHYNFYAASTGGGYYDMRNILNNTLVASNPTKAVTLVENHDTQPGQSLESTVQPWFKPLAYAFILTRSGGYPSVFYGDMYGTKGTTTREIPALKSKIEPLLKARKDYAYGTQRDYIDNPDVIGWTREGDLTKAKSGLATVITDGPGGSKRMYVGTSNAGEIWYDLTGNRTDKITIGSDGYATFPVNGGSVSVWVQQ

SEQ ID NO: 38824 - protein, 480 aa, Cytophaga sp.
NGTMMQYFEWYVPNDGQQWNRLRTDAPYLSSVGITAVWTPPAYKGTSQADVGYGPYDLYDLGEFNQKGTVRTKYGTKGELKSAVNTLHSNGIQVYGDVVMNHKAGADYTENVTAVEVNPSNRYQETSGEYNIQAWTGFNFEGRGTTYSNWKWQWFHFDGTDWDQSRSLSRIFKFDGKAWDWEVSSENGNYDYLMYADYDYDHPDVVNEMKKWGVWYANEVGLDGYRLDAVKHIKFQFLKDWVDNARAATGKEMFTVGEYWQNDLGALNNYLAKVNYNQSLFDAPLHYNFYAASTGGGYYDMRNILNNTLVASNPTKAVTLVENHDTQPGQSLESTVQPWFKPLAYAFILTRSGGYPSVFYGDMYGTKGTTTREIPALKSKIEPLLKARKDYAYGTQRDYIDNPDVIGWTREGDSTKAKSGLATVITDGPGGSKRMYVGTSNAGEIWYDLTGNRTDKITIGSDGYATFPVNGGSVSVWVQQ

SEQ ID NO: 38825 - protein, 480 aa, Cytophaga sp.
NGTMMQYFEWYVPNDGQQWNRLRTDAPYLSSVGITAVWTPPAYKGTSQADVGYGPYDLYDLGEFNQKGTVRTKYGTKGELKSAVNTLHSNGIQVYGDVVMNHKAGADYTENVTAVEVNPSNRYQETSGEYNIQAWTGFNFPGRGTTYSNWKWQWFHFDGTDWDQSRSLSRIFKFDGKAWDWEVSSENGNYDYLMYADYDYDHPDVVNEMKKWGVWYANEVGLDGYRLDAVKHIKFQFLKDWVDNARAATGKEMFTVGEYWQNDLGALNNYLAKVNYNQSLFDAPLHYNFYAASTGGGYYDMRNILNNTLVASNPTKAVTLVENHDTQPGQSLESTVQPWFKPLAYAFILTRSGGYPSVFYGDMYGTKGTTTREIPALKSKIEPLLKARKDYAYGTQRDYIDNPDVIGWTREGDSTKAKSGLATVITDGPGGSKRMYVGTSNNGEIWYDLTGNRTDKITIGSDGYATFPVNGGSVSVWVQQ

SEQ ID NO: 38826 - protein, 480 aa, Cytophaga sp.
NGTMMQYFEWYVPNDGQQWNRLRTDAPYLSSVGITAVWTPPAYKGTSQADVGYGPYDLYDLGEFNQKGTVRTKYGTKGELKSAVNTLHSNGIQVYGDVVMNHKAGADYTENVTAVEVNPSNRYQETSGEYNIQAWTGFNFPGRGTTYSNWKWQWFHFDGTDWDQSRSLSRIFKFDGKAWDWEVSSENGNYDYLMYADYDYDHPDVVNEMKKWGVWYANEVGLDGYRLDAVKHIKFQFLKDWVDNARAATGKEMFTVGEYWQNDLGALNNYLAKVNYNQSLFDAPLHYNFYAASTGGGYYDMRNILNNTLVASNPTKAVTLVENHDTQPGQSLESTVQPWFKPLAYAFILTRSGGYPSVFYGDMYGTKGTTTREIPALYSKIEPLLKARKDYAYGTQRDYIDNPDVIGWTREGDSTKAKSGLATVITDGPGGSKRMYVGTSNAGEIWYDLTGNRTDKITIGSDGYATFPVNGGSVSVWVQQ

SEQ ID NO: 38827 - protein, 480 aa, Cytophaga sp.
NGTMMQYFEWYVPNDGQQWNRLRTDAPYLSSVGITAVWTPPAYKGTSQADVGYGPYDLIDLGEFNQKGTVRTKYGTKGELKSAVNTLHSNGIQVYGDVVMNHKAGADYTENVTAVEVNPSNRYQETSGEYNIQAWTGFNFPGRGTTYSNWKWQWFHFDGTDWDQSRSLSRIFKFDGKAWDWEVSSENGNYDYLMYADYDYDHPDVVNEMKKWGVWYANEVGLDGYRLDAVKHIKFQFLKDWVDNARAATGKEMFTVGEYWQNDLGALNNYLAKVNYNQSLFDAPLHYNFYAASTGGGYYDMRNILNNTLVASNPTKAVTLVENHDTQPGQSLESTVQPWFKPLAYAFILTRSGGYPSVFYGDMYGTKGTTTREIPALKSKIEPLLKARKDYAYGTQRDYIDNPDVIGWTREGDSTKAKSGLATVITDGPGGSKRMYVGTSNAGEIWYDLTGNRTDKITIGSDGYATFPVNGGSVSVWVQQ

SEQ ID NO: 38828 - protein, 480 aa, Cytophaga sp.
NGTMMQYFEWYVPNDGQQWNRLRTDAPYLSSVGITAVWTPPAYKGTSQADVGYGPYDLYDLGEFNQKGTVRTKYGTKGELKSAVNTLHSNGIQVYGDVVMNHKAGADYTENVTAVEVNPSNRYQETSGEYNIQAWTGFNFPGRGTTYSNWKWQWFHFDGTDWDQSRSLSRIFKFDGKAWDWEVSSENGNYDYLMYADYDYDHPDVVNEMKKWGVWYANEVGLDGYRLDAVKHIKFQFLKDWVDNARAATGKEMFTVGEYWQNDLGALNNYLAKVNYNQSLFDAPLHYNFYAASTGGGYYDMRNILNNTLVASNPTKAVTLVENHDTQPGQSLESTVQPWFKPLAYAFILTRSGGYPSVFYGDMYGTKGTTTREIPALKSKIEPLLKARKDYAYGTQRDYIDNPDVIGWTREGDSTKAKSGLATVITDGPGGSKRMYVGTSAAGEIWYDLTGNRTDKITIGSDGYATFPVNGGSVSVWVQQ

SEQ ID NO: 38829 - protein, 480 aa, Cytophaga sp.
NGTMMQYFEWYVPNDGQQWNRLRTDAPYLSSVGITAVWTPPAYKGTSQADVGYGPYDLYDLGEFNQKGTVRTKYGTKGELKSAVNTLHSNGIQVYGDVVMNHKAGADYTENVTAVEVNPSNRYQETSGEYNIQAWTGFNFPGRGTTYSNWKWQWFHFDGTDWDQSRSLSRIFKFDGKAWDWEVSSENGNYDYLMYADYDYDHPDVVNEMKKWGVWYANEVGLDGYRLDAVKHIKFQFLKDWVDNARAATGKEMFTVGEYWQNDLGALNNYLAKVNYNQSLFDAPLHYNFYAASTGGGYYDMRNILNNTLVASNPTKAVTLVENHDTQPGQSLESTVQPWFKPLAYAFILTRSGGYPSVFYGDMYGTKGTTTREIPALKSKIEPLLKARKDYAYGTQRDYIDNPDVIGWTREGNSTKAKSGLATVITDGPGGSKRMYVGTSNAGEIWYDLTGNRTDKITIGSDGYATFPVNGGSVSVWVQQ

SEQ ID NO: 38830 - protein, 480 aa, Cytophaga sp.
NGTMMQYFEWYVPNDGQQWNRLRTDAPYLSSVGITAVWTPPAYKGTSQADVGYGPYDLYDLGEFNQKGTVRTKYGTKGELKSAVNTLHSNGIQVYGDVVMNHKAGADYTENVTAVEVNPSNRYQETSGEYNIQAWTGFNFPGRGTTYSNWKWQWFHFDGTDWDQSRSLSRIFKFDGKAWDWEVSSENGNYDYLMYADYDYDHPDVVNEMKKWGVWYANEVGLDGYRLDAVKHIKFQFLKDWVDNARAATGKEMFTVGEYWQNDLGALNNYLAKVNYNQSLFDAPLHYNFYAASTGGGYYDMRNILNNTLVASNPTKAVTLVENHDTQPGQSLESTVQPWFKPLAYAFILTRSGGYPSVFYGDMYGTKGTTTREIPALKSKIEPLLKARKDYAYGTQRDYIDNPDVIGWTREGDSTKAKSGLATVITDGPGGSKRMYVGTSNAGDIWYDLTGNRTDKITIGSDGYATFPVNGGSVSVWVQQ

SEQ ID NO: 38831 - protein, 480 aa, Cytophaga sp.
NGTMMQYFEWYVPNDGQQWNRLRTDAPYLSSVGITAVWTPPAYKGTSQADVGYGPYDLYDLGEFNQKGTVRTKYGTKGELKSAVNTLHSNGIQVYGDVVMNHKAGADYTENVTAVEVNPSNRYQETSGEYNIQAWTGFNFPGRGTTYSNWKWQWFHFDGTDWDQSRSLSRIFKFDGKAWDWEVSSENGNYDYLMYADYDYDHPDVVNEMKKWGVWYANEVGLDGYRLDAVKHIKFQFLKDWVDNARAATGKEMFTVGEYWQNDLGALNNYLAKVNYNQSLFDAPLHYNFYAASTGGGYYDMRNILNNTLVASNPTKAVTLVENHDTQPGQSLESTVQPWFKPLAYAFILTRSGGYPSVFYGDMYGTKGTTTREIPALKSKIEPLLKARKDYAYGTQRDYIDNPDVIGWTREGDSTKAKSGLATVITDGPGGSKRMYVGTSNAGEIWYDLTGNRTDKITIGNDGYATFPVNGGSVSVWVQQ

SEQ ID NO: 38832 - protein, 480 aa, Cytophaga sp.
NGTMMQYFEWYVPNDGQQWNRLRTDAPYLSSVGITAVWTPPAYKGTSQADVGYGPYDLYDLGEFNQKGTVRTKYGTKGELKSAVNTLHSNGIQVYGDVVMNHKAGADYTENVTAVEVNPSLRYQETSGEYNIQAWTGFNFPGRGTTYSNWKWQWFHFDGTDWDQSRSLSRIFKFDGKAWDWEVSSENGNYDYLMYADYDYDHPDVVNEMKKWGVWYANEVGLDGYRLDAVKHIKFQFLKDWVDNARAATGKEMFTVGEYWQNDLGALNNYLAKVNYNQSLFDAPLHYNFYAASTGGGYYDMRNILNNTLVASNPTKAVTLVENHDTQPGQSLESTVQPWFKPLAYAFILTRSGGYPSVFYGDMYGTKGTTTREIPALKSKIEPLLKARKDYAYGTQRDYIDNPDVIGWTREGDSTKAKSGLATVITDGPGGSKRMYVGTSNAGEIWYDLTGNRTDKITIGSDGYATFPVNGGSVSVWVQQ

SEQ ID NO: 38833 - protein, 480 aa, Cytophaga sp.
NGTMMQYFEWYVPNDGQQWNRLRTDAPYLSSVGITAVWTPPAYKGTSQADVGYGPYDLYDLGEFNQKGTVRTKYGTKGELKSAVNTLHSNGIQVYGDVVMNHKAGADYTENVTAVEVNPSNRYQETSGEYNIQAWTGFNFPGRGTTYSNWKWQWFHFDGTDWDQSRSLSRIFKFDGKAWDWEVSSENGNYDYLMYADYDYDHPDVVNEMKKWGVWYANEVGLDGYRLDAVKHIKFQFLKDWVDNARAATGKEMFTVGEYWQNDLGALNNYLAKVNYNQSLFDAPLHYNFYAASTGGGYYDMRNILNNTLVASNPTKAVTLVENHDTQPGQSLESTVQPWFKPLAYAFILTRSGGYPSVFYGDMYGTKGTTTREIPALKSKIEPLLKARKDYAYGTQRDYIDNPDVIGWTREGDSTKAKSGLATVITDGCGGSKRMYVGTSNAGEIWYDLTGNRTDKITIGSDGYATFPVNGGSVSVWVQQ

SEQ ID NO: 38834 - protein, 480 aa, Cytophaga sp.
NGTMMQYFEWYVPNDGQQWNRLRTDAPYLSSVGITAVWTPPAYKGTSQADVGYGPYDLYDLGEFNQKGTVRTKYGTKGELKSAVNTLHSNGIQVYGDVVMNHKAGADYTENVTAVEVNPSNRYQETSGEYNIQAWTGFNFPGRGTTYSNWKWQWFHFDGTDWDQSRSLSRIFKFDGKAWDWEVSSENGNYDYLMYADYDYDHPDVVNEMKKWGVWYANEVGLDGYRLDAVKHIKFQFLKDWVDNARAATGKEMFTVGEYWQNDLGALNNYLAKVNYNQSLFDAPLHYNFYAASTGGGYYDMRNILNNTLVASNPTKAVTLVENHDTQPGQSLESTVQPWFKPLAYAFILTRSGGYPSVFYGDMYGTKGTTTREIPALKSKIEPLLKARKDYAYGTQRDYIDNPDVIGWTREGDSTKAKSGLATVITDGPGGSKRMYVGTSNAGEIWYDLTGNRTDKITIGSDGYATFPVNGKSVSVWVQQ

SEQ ID NO: 38835 - protein, 480 aa, Cytophaga sp.
NGTMMQYFEWYVPNDGQQWNRLRTDAPYLSSVGITAVWTPPAYKGTSQADVGYGPYDLYDLGEFNQKGTVRTKYGTKGELKSAVNTLHSNGIQTYGDVVMNHKAGADYTENVTAVEVNPSNRYQETSGEYNIQAWTGFNFPGRGTTYSNWKWQWFHFDGTDWDQSRSLSRIFKFDGKAWDWEVSSENGNYDYLMYADYDYDHPDVVNEMKKWGVWYANEVGLDGYRLDAVKHIKFQFLKDWVDNARAATGKEMFTVGEYWQNDLGALNNYLAKVNYNQSLFDAPLHYNFYAASTGGGYYDMRNILNNTLVASNPTKAVTLVENHDTQPGQSLESTVQPWFKPLAYAFILTRSGGYPSVFYGDMYGTKGTTTREIPALKSKIEPLLKARKDYAYGTQRDYIDNPDVIGWTREGDSTKAKSGLATVITDGPGGSKRMYVGTSNAGEIWYDLTGNRTDKITIGSDGYATFPVNGGSVSVWVQQ

SEQ ID NO: 38836 - protein, 480 aa, Cytophaga sp.
NGTMMQYFEWYVPNDGQQWNRLRTDAPYLSSVGITAVWTPPAYKGTSQADVGYGPYDLYDLGEFNQKGTVRTKYGTKGELKSAVNTLHSNGIQVYGDVVMNHKAGADYTENVTAVEVNPSNRYQETSGEYNIQAWTGFNFPGRGTTYSNWKWQWFHFDGTDWDQSRSLSRIFKFDGKAWDWEVSSCNGNYDYLMYADYDYDHPDVVNEMKKWGVWYANEVGLDGYRLDAVKHIKFQFLKDWVDNARAATGKEMFTVGEYWQNDLGALNNYLAKVNYNQSLFDAPLHYNFYAASTGGGYYDMRNILNNTLVASNPTKAVTLVENHDTQPGQSLESTVQPWFKPLAYAFILTRSGGYPSVFYGDMYGTKGTTTREIPALKSKIEPLLKARKDYAYGTQRDYIDNPDVIGWTREGDSTKAKSGLATVITDGPGGSKRMYVGTSNAGEIWYDLTGNRTDKITIGSDGYATFPVNGGSVSVWVQQ

SEQ ID NO: 38837 - protein, 480 aa, Cytophaga sp.
NGTMMQYFEWYVPNDGQQWNRLRTDAPYLSSVGITAVWTPPAYKGTSQADVGYGPYDLYDLGEFNQKGTVRTKYGTKGELKSAVNTLHSNGIQVYGDVVMNHKAGADYTENVTAVEVNPSNRYQETSGEYNIQAWTGFNFPGRGTTYSNWKWQWFHFDGTDWDQSRSLSRIFKFDGKAWDWEVSSENGNYDYLMYADYDYDHPDVVNEMKKWGVWYAKEVGLDGYRLDAVKHIKFQFLKDWVDNARAATGKEMFTVGEYWQNDLGALNNYLAKVNYNQSLFDAPLHYNFYAASTGGGYYDMRNILNNTLVASNPTKAVTLVENHDTQPGQSLESTVQPWFKPLAYAFILTRSGGYPSVFYGDMYGTKGTTTREIPALKSKIEPLLKARKDYAYGTQRDYIDNPDVIGWTREGDSTKAKSGLATVITDGPGGSKRMYVGTSNAGEIWYDLTGNRTDKITIGSDGYATFPVNGGSVSVWVQQ

SEQ ID NO: 38838 - protein, 480 aa, Cytophaga sp.
NGTMMQYFEWYVPNDGQQWNRLRTDAPYLSSVGITAVWTPPAYKGTSQADVGYGPYDLYDLGEFNQKGTVRTKYGTKGELKSAVNTLHSNGIQVYGDVVMNHKAGADYTENVTAVEVNPSNRYQETSGEYNIQAWTGFNFPGRGTTYSNWKWQWFHFDGTDWDQSRSLSRIFKFDGKAWDWEVSSENGNYDYLMYADYDYDHPDVVNEMKKWGVWYANEVGLDGYRLDAVKHIKFQFLKDWVDNARAATGKEMFTVGEYWQNDLGALNNYLAKVNYNQSLFDAPLHYNFYAASTGGGYYDMRNILNNTLVASNPTKAVTLVENHDTQPGQSLESTVQPWFKPLAYAFILTRSGGYPSVFYGDMYGTKGTTTREIPALKSKIEPLLKARKDYAYGTQRDYIDNPDVIGWTREGDSTKAKSGLATVITDGPGGSKRMYVGTSNMGEIWYDLTGNRTDKITIGSDGYATFPVNGGSVSVWVQQ

SEQ ID NO: 38839 - protein, 480 aa, Cytophaga sp.
NGTMMQYFEWYVPNDGQQWNRLRTDAPYLSSVGITAVWTPPAYKGTSQADVGYGPYDLYDLGEFNQKGTVRTKYGTKGELKSAVNTLHSNGIQVYGDVVMNHKAGADYTENVTAVEVNPSNRYQETSGEYNIQAWTGFNFPGRGTTYSNWKWQWFHFDGTDWDQSRSLSRIFKFDGKAWDWEVSSENGNYDYLMYADYDYDHPDVVNEMKKWGVWYANEVGLDGYRLDAVKHIKFQFLKDWVDNARAATGKEMFTVGEYWQNDLGALNNYLAKVNYNQSLFDAPLHYNFYAASTGGGYYDMRNILNNTLVASNPTKAVTLVENHDTQPGQSLESTVQPWFKPLAYAFILTRSGGYPSVFYGDMYGTKGTTTREIPALKSKIEPLLKARKDYAYGTQRDYIDNPDVIGWTREGDSTKAKSGLATVITDGPWGSKRMYVGTSNAGEIWYDLTGNRTDKITIGSDGYATFPVNGGSVSVWVQQ

SEQ ID NO: 38840 - protein, 480 aa, Cytophaga sp.
NGTMMQYFEWYVPNDGQQWNRLRTDAPYLSSVGITAVWTPPAYKGTSQADVGYGPYDLYDLGEFNQKGTVRTKYGTKGELKSAVNTLHSNGIQVYGDVVMNHKAGADYTENVTAVEVNPSNRYQETSGMYNIQAWTGFNFPGRGTTYSNWKWQWFHFDGTDWDQSRSLSRIFKFDGKAWDWEVSSENGNYDYLMYADYDYDHPDVVNEMKKWGVWYANEVGLDGYRLDAVKHIKFQFLKDWVDNARAATGKEMFTVGEYWQNDLGALNNYLAKVNYNQSLFDAPLHYNFYAASTGGGYYDMRNILNNTLVASNPTKAVTLVENHDTQPGQSLESTVQPWFKPLAYAFILTRSGGYPSVFYGDMYGTKGTTTREIPALKSKIEPLLKARKDYAYGTQRDYIDNPDVIGWTREGDSTKAKSGLATVITDGPGGSKRMYVGTSNAGEIWYDLTGNRTDKITIGSDGYATFPVNGGSVSVWVQQ

SEQ ID NO: 38841 - protein, 480 aa, Cytophaga sp.
NGTMMQYFEWYVPNDGQQWNRLRTDAPYLSSVGITAVWTPPAYKGTSQADVGYGPYDLYDLGEFNQKGTVRTKYGTKGELKSAVNTLHSNGIQVYGDVVMNHKAGADYTENVTAVEVNPSNRYQETSGEYNIQAWTGFNFPGRGTTYSNWKWQWFHFDGTDWDQSRSLSRIFKFDGKAWDWEVSSENGNYDYLMYADYDYDHPDVVNEMKKWGVWYANEVGLDGYRLDAVKHIKFQFLKDWVDNARAATGKEMFTVGEYWQNDLGALNNYLAKVNYNQSLFDAPLHYNFYAASTGGGYYDMCNILNNTLVASNPTKAVTLVENHDTQPGQSLESTVQPWFKPLAYAFILTRSGGYPSVFYGDMYGTKGTTTREIPALKSKIEPLLKARKDYAYGTQRDYIDNPDVIGWTREGDSTKAKSGLATVITDGPGGSKRMYVGTSNAGEIWYDLTGNRTDKITIGSDGYATFPVNGGSVSVWVQQ

SEQ ID NO: 38842 - protein, 480 aa, Cytophaga sp.
NGTMMQYFEWYVPNDGQQWNRLRTDAPYLSSVGITAVWTPPAYKGTSQADVGYGPYDLYDLGEFNQKGTVRTKYGTKGELKSAVNTLHSNGIQVYGDVVMNHKAGADYTENVTAVEVNPSNRYQETSGEYNIQAWTGFNFPGRGTTYSNWKWQWFHFDGTDWDQSRSLSRIFKFDGKAWDWEVSSENWNYDYLMYADYDYDHPDVVNEMKKWGVWYANEVGLDGYRLDAVKHIKFQFLKDWVDNARAATGKEMFTVGEYWQNDLGALNNYLAKVNYNQSLFDAPLHYNFYAASTGGGYYDMRNILNNTLVASNPTKAVTLVENHDTQPGQSLESTVQPWFKPLAYAFILTRSGGYPSVFYGDMYGTKGTTTREIPALKSKIEPLLKARKDYAYGTQRDYIDNPDVIGWTREGDSTKAKSGLATVITDGPGGSKRMYVGTSNAGEIWYDLTGNRTDKITIGSDGYATFPVNGGSVSVWVQQ

SEQ ID NO: 38843 - protein, 480 aa, Cytophaga sp.
NGTMMQYFEWYVPNDGQQWNRLRTDAPYLSSVGITAVWTPPAYKGTSQADVGYGPYDLYDLGEFNQKGTVRTKYGTKGELKSAVNTLHSNGIQVYGDVVMNHKAGADYTENVTAVEVNPSNRYQETSGEYNIQAWTGFNFPGRGTTYSNWCWQWFHFDGTDWDQSRSLSRIFKFDGKAWDWEVSSENGNYDYLMYADYDYDHPDVVNEMKKWGVWYANEVGLDGYRLDAVKHIKFQFLKDWVDNARAATGKEMFTVGEYWQNDLGALNNYLAKVNYNQSLFDAPLHYNFYAASTGGGYYDMRNILNNTLVASNPTKAVTLVENHDTQPGQSLESTVQPWFKPLAYAFILTRSGGYPSVFYGDMYGTKGTTTREIPALKSKIEPLLKARKDYAYGTQRDYIDNPDVIGWTREGDSTKAKSGLATVITDGPGGSKRMYVGTSNAGEIWYDLTGNRTDKITIGSDGYATFPVNGGSVSVWVQQ

SEQ ID NO: 38844 - protein, 480 aa, Cytophaga sp.
NGTMMQYFEWYVPNDGQQWNRLRTDAPYLSSVGITAVWTPPAYKGTSQADVGYGPYDLYDLGEFNQKGTVRTKYGTKGELKSAVNTLHSNGIQVYGDVVMNHKAGADYTENVTAVEVNPSNRYQETSGEYNIQAWTGFNFPGRGTTYSNWKWQWFHFDGTDWDQSRSLSRIFKFDGKAWDWEVSSENGNYDYLMYADYDYDHPDVVNEMKKWGVWYANEVGLDGYRLDAVKHIPFQFLKDWVDNARAATGKEMFTVGEYWQNDLGALNNYLAKVNYNQSLFDAPLHYNFYAASTGGGYYDMRNILNNTLVASNPTKAVTLVENHDTQPGQSLESTVQPWFKPLAYAFILTRSGGYPSVFYGDMYGTKGTTTREIPALKSKIEPLLKARKDYAYGTQRDYIDNPDVIGWTREGDSTKAKSGLATVITDGPGGSKRMYVGTSNAGEIWYDLTGNRTDKITIGSDGYATFPVNGGSVSVWVQQ

SEQ ID NO: 38845 - protein, 480 aa, Cytophaga sp.
NGTMMQYFEWYVPNDGQQWNRLRTDAPYLSSVGITAVWTPPAYKGTSQADVGYGPYDLYDLGEFNQKGTVRTKYGTKGELKSAVNTLHSNGIQVYGDVVMNHKAGADYTENVTAVEVNPSNRYQETSGEYNIQAWTGFNFPGRGTTYSNWKWQWFHFDGTDWDQSRSLSRIFKFDQKAWDWEVSSENGNYDYLMYADYDYDHPDVVNEMKKWGVWYANEVGLDGYRLDAVKHIKFQFLKDWVDNARAATGKEMFTVGEYWQNDLGALNNYLAKVNYNQSLFDAPLHYNFYAASTGGGYYDMRNILNNTLVASNPTKAVTLVENHDTQPGQSLESTVQPWFKPLAYAFILTRSGGYPSVFYGDMYGTKGTTTREIPALKSKIEPLLKARKDYAYGTQRDYIDNPDVIGWTREGDSTKAKSGLATVITDGPGGSKRMYVGTSNAGEIWYDLTGNRTDKITIGSDGYATFPVNGGSVSVWVQQ

SEQ ID NO: 38846 - protein, 480 aa, Cytophaga sp.
NGTMMQYFEWYVPNDGQQWNRLRTDAPYLSSVGITAVWTPPAYKGTSQADVGYGPYDLYDLGEFNQKGTVRTKYGTKGELKSAVNTLHSNGIQVYGDVVMNHKAGADYTENVTAVEVNPSNRYQETSGEYNIQAWTGFNFPGRGTTYSNWKWQWFHFDGTDWDQMRSLSRIFKFDGKAWDWEVSSENGNYDYLMYADYDYDHPDVVNEMKKWGVWYANEVGLDGYRLDAVKHIKFQFLKDWVDNARAATGKEMFTVGEYWQNDLGALNNYLAKVNYNQSLFDAPLHYNFYAASTGGGYYDMRNILNNTLVASNPTKAVTLVENHDTQPGQSLESTVQPWFKPLAYAFILTRSGGYPSVFYGDMYGTKGTTTREIPALKSKIEPLLKARKDYAYGTQRDYIDNPDVIGWTREGDSTKAKSGLATVITDGPGGSKRMYVGTSNAGEIWYDLTGNRTDKITIGSDGYATFPVNGGSVSVWVQQ

SEQ ID NO: 38847 - protein, 480 aa, Cytophaga sp.
NGTMMQYFEWYVPNDGQQWNRLRTDAPYLSSVGITAVWTPPAYKGTSQADVGYGPYDLYDLGEFNQKGTVRTKYGTKGELKSAVNTLHSNGIQVYGDVVMNHKAGADYTENVTAVEVNPSNRYQETSGEYNIQAWTGFNFPGRGTTYSNWKWQWFHFDGTDWDQSRSLSRIFKFDGKAWDWEVSSENGNYDYLMYADYDYDHPDVVNEMKKWGVWYANEVGLDGYRLDAVKHIKFQFLKDWVDNARAATGKEMFTVGEYWQNDLGALNNYLAKVNYNQSLFDAPLHYNFYAASTGGGYYDMRNILNNTLVASNPTKAVTLVENHDTQPGQSLESTVQPWFKPLAYAFILTRSGGYPSVFYGDMYGTKGTTTREIPALKSKIEPLLKARKDYAYGTQRDYIDNPDVIGWTREGDSTKAKSGLATVITDGPGGSKRMYVGTSNAGEIWYDLTGNRTDKITIGSDGYATFPVNGGSISVWVQQ

SEQ ID NO: 38848 - protein, 480 aa, Cytophaga sp.
NGTMMQYFEWYVPNDGQQWNRLRTDAPYLSSVGITAVWTPPAYKGTSQADVGYGPYDLYDLGEFNQKGTVRTKYGTKGELKSAVNTLHSNGIQVYGDVVMNHKAGADYTENVTAVEVNPSNRYQETSGEYNIQAWTGFNFPGRGTTYSNWKWQWFHFDGTDWDQSRSLSRIFKFDGKAWDWEVSSENGNYDYLMYADYDYDHPDVVNEMKKWGVWYANEVGLDGYRLDAVKHIKFQFLKDWVDNARAATGKEMFTVGEYWQNDLGALNNYLAKVNYNQSLFDAPLHYNFYAASTGGGYYDMRNILNNTLVASNPTKAVTLVENHDTQPGQSLESTVQPWFKPLAYAFILTRSGGYPSVFYGDMYGTKGTTTREIPALKSKIEPLLKARKDYAYGTQRDYVDNPDVIGWTREGDSTKAKSGLATVITDGPGGSKRMYVGTSNAGEIWYDLTGNRTDKITIGSDGYATFPVNGGSVSVWVQQ

SEQ ID NO: 38849 - protein, 480 aa, Cytophaga sp.
NGTMMQYFEWYVPNDGQQWNRLRTDAPYLSSVGITAVWTPPAYKGTSQADVGYGPYDLYDLGEFNQKGTVRTKYGTKGELKSAVNTLHSNGIQVYGDVVMNHKAGADYTENVTAVEVNPSNRYQETSGEYNIQAWTGFNFPGRGTTYSNWKWQWFHFDGTDWDQSRSLSRIFKFDGKAWDWEVSSENGNYDYLMYADYDYDHPDVVNEMKKWGVWYANEVGLDGYRLDAVKHIKFQFLKDWVDNARAATGKEMFTVGEYWQNDLGALNNYLAKVNYNQSLFDAPLHYNFYAASTGGGYYDMRNILNNTLVASNPTKAVTLVENHDTQPGQSLESTVQPWFKPLAYAFILTRSGGYPSVFYGDMYGTKGTTTREIPALKSKIEPLLKARKDYAYGTQRDYIDNPDVIGWTREGDSTKAKSGLATVITDGPGGSKRMYVGTSNAGEIWYDLTGNRTDKITIGSLGYATFPVNGGSVSVWVQQ

SEQ ID NO: 38850 - protein, 480 aa, Cytophaga sp.
NGTMMQYFEWYVPNDGQQWNRLRTDAPYLSSVGITAVWTPPAYKGTSQADVGYGPYDLYDLGEFNQKGTVRTKYGTKGELKSAVNTLHSNGIQVYGDVVMNHKAGADYTENVTAVEVNPSNRYQETSGEYNIQAWTGFNFPGRGTTYSNWKWQWFHFDGTDWDQSRSLSRIFKFDGKAWDWEVSSENGNYDYLMYADYDYDHPDVVNEMKKWGVWYANEVGLDGYRLDAVKHIKFQFLKDWVDNARAATGKEMFTVGEYWQNDLGALNNYLAKVNYNQSLFDAPLHYNFYAASTGGGYYDMRNILNNTLVASNPTKAVTLVENHDTQPGQSLESTVQPWFKPLAYAFILTRSGGYPSVFYGDMYGTKGTTTREIPALKSKIEPLLKARKDYAYGTQRDYIDNPDVIGWTREGDSTKAKSGLATVITDGPGGSKRMYVGTSNAGEIWYDLTGNRTDKITIGSDGYATFPVNGGSVSVWGQQ

SEQ ID NO: 38851 - protein, 480 aa, Cytophaga sp.
NGTMMQYFEWYVPNDGQQWNRLRTDAPYLSSVGITAVWTPPAYKGTSQADVGYGPYDLYDLGEFNQKGTVRTKYGTKGELKSAVNTLHSNGIQVYGDVVMNHKAGADYTENVTAVEVNPSNRYQETSGEYNIQAWTGFNFTGRGTTYSNWKWQWFHFDGTDWDQSRSLSRIFKFDGKAWDWEVSSENGNYDYLMYADYDYDHPDVVNEMKKWGVWYANEVGLDGYRLDAVKHIKFQFLKDWVDNARAATGKEMFTVGEYWQNDLGALNNYLAKVNYNQSLFDAPLHYNFYAASTGGGYYDMRNILNNTLVASNPTKAVTLVENHDTQPGQSLESTVQPWFKPLAYAFILTRSGGYPSVFYGDMYGTKGTTTREIPALKSKIEPLLKARKDYAYGTQRDYIDNPDVIGWTREGDSTKAKSGLATVITDGPGGSKRMYVGTSNAGEIWYDLTGNRTDKITIGSDGYATFPVNGGSVSVWVQQ

SEQ ID NO: 38852 - protein, 480 aa, Cytophaga sp.
NGTMMQYFEWYVPNDGQQWNRLRTDAPYLSSVGITAVWTPPAYKGTSQADVGYGPYDLYDLGEFNQKGTVRTKYGTKGELKSAVNTLHSNGIQVYGDVVMNHKAGADYTENVTAVEVNPSNRYQETSGEYNIQAWTGFNFPGRGTTYSNWKWQWFHFDGTDWDQSRSLSRIFKFDGKAWDWEVSSENGNYDYLMYADYDYDHPDVVNEMKKWGVWYANEVGLDGYRLDAVKHIKFQFLKDWVDNARAATGKEMFTVGEYWQNDLGALNNYLAKVNYNQSLFDAPLHYNFYAASTGGGYYDMRNILNNTLVASNPTKAVTLVENHDTQPGQSLESTVQPWFKPLAYAFILTRSGGYPSVFYGDMYGTKGTTTREIPALKSKIEPLLKARKDYAYGTQRDYIDNPDVIGWSREGDSTKAKSGLATVITDGPGGSKRMYVGTSNAGEIWYDLTGNRTDKITIGSDGYATFPVNGGSVSVWVQQ

SEQ ID NO: 38853 - protein, 480 aa, Cytophaga sp.
NGTMMQYFEWYVPNDGQQWNRLRTDAPYLSSVGITAVWTPPAYKGTSQADVGYGPYDLYDLGEFNQKGTVRTKYGTKGELKSAVNTLHSNGIQVYGDVVMNHKAGADYTENVTAVEVNPSNRYQETSGEYNIQAWTGFNFPGRGTTYSNWKWQWFHFDGTDWDQSRSLSRIFKFDGKAWDWEVSSENGNYDYLMYADYDYDHPDVVNEMKKWGVWYAWEVGLDGYRLDAVKHIKFQFLKDWVDNARAATGKEMFTVGEYWQNDLGALNNYLAKVNYNQSLFDAPLHYNFYAASTGGGYYDMRNILNNTLVASNPTKAVTLVENHDTQPGQSLESTVQPWFKPLAYAFILTRSGGYPSVFYGDMYGTKGTTTREIPALKSKIEPLLKARKDYAYGTQRDYIDNPDVIGWTREGDSTKAKSGLATVITDGPGGSKRMYVGTSNAGEIWYDLTGNRTDKITIGSDGYATFPVNGGSVSVWVQQ

SEQ ID NO: 38854 - protein, 480 aa, Cytophaga sp.
NGTMMQYFEWYVPNDGQQWNRLRTDAPYLSSVGITAVWTPPAYKGTSQADVGYGPYDLYDLGEFNQKGTVRTKYGTKGELKSAVNTLHSNGIQVYGDVVMNHKAGADYTENVTAVEVNPSNRYQETSGEYNIQAWTGFNFPGRGTTYSNWKWQWFHFDGTDWDQSRSLSRIFKFDGKAWDWEVSSENGNYDYLMYADYDYDHPDVVNEMKKWGVWYANEVGLDGYRLDAVKHIKFQFLKDWVDNARAATGKEMFTVGEYWQNDLGALNNYLAKVNYNQSLFDAPLHYNFYAASTGGGYYDMRNILNNTLVASNPTKAVTLVENHDTQPGQSLESTVQPWFKPLAYAFILTRSGGYPSVFYGDMYGTKGTTTREIPALKSKIEPLLKARQDYAYGTQRDYIDNPDVIGWTREGDSTKAKSGLATVITDGPGGSKRMYVGTSNAGEIWYDLTGNRTDKITIGSDGYATFPVNGGSVSVWVQQ

SEQ ID NO: 38855 - protein, 480 aa, Cytophaga sp.
NGTMMQYFEWYVPNDGQQWNRLRTDAPYLSSVGITAVWTPPAYKGTSQADVGYGPYDLYDLGEFNQKGTVRTKYGTKGELKSAVNTLHSNGIQVYGDVVMNHKAGADYTENVTAVEVNPSNRYQETKGEYNIQAWTGFNFPGRGTTYSNWKWQWFHFDGTDWDQSRSLSRIFKFDGKAWDWEVSSENGNYDYLMYADYDYDHPDVVNEMKKWGVWYANEVGLDGYRLDAVKHIKFQFLKDWVDNARAATGKEMFTVGEYWQNDLGALNNYLAKVNYNQSLFDAPLHYNFYAASTGGGYYDMRNILNNTLVASNPTKAVTLVENHDTQPGQSLESTVQPWFKPLAYAFILTRSGGYPSVFYGDMYGTKGTTTREIPALKSKIEPLLKARKDYAYGTQRDYIDNPDVIGWTREGDSTKAKSGLATVITDGPGGSKRMYVGTSNAGEIWYDLTGNRTDKITIGSDGYATFPVNGGSVSVWVQQ

SEQ ID NO: 38856 - protein, 480 aa, Cytophaga sp.
NGTMMQYFEWYVPNDGQQWNRLRTDAPYLSSVGITAVWTPPAYKGTSQADVGYGPYDLYDLGEFNQKGTVRTKYGTKGELKSAVNTLHSNGIQVYGDVVMNHKAGADYTENVTAVEVNPSNRYQETSGEYNIQAWTGFNFPGRGTTYSNWKWQWFHFDGTDWDQSRSLSRIMKFDGKAWDWEVSSENGNYDYLMYADYDYDHPDVVNEMKKWGVWYANEVGLDGYRLDAVKHIKFQFLKDWVDNARAATGKEMFTVGEYWQNDLGALNNYLAKVNYNQSLFDAPLHYNFYAASTGGGYYDMRNILNNTLVASNPTKAVTLVENHDTQPGQSLESTVQPWFKPLAYAFILTRSGGYPSVFYGDMYGTKGTTTREIPALKSKIEPLLKARKDYAYGTQRDYIDNPDVIGWTREGDSTKAKSGLATVITDGPGGSKRMYVGTSNAGEIWYDLTGNRTDKITIGSDGYATFPVNGGSVSVWVQQ

SEQ ID NO: 38857 - protein, 480 aa, Cytophaga sp.
NGTMMQYFEWYVPNDGQQWNRLRTDAPYLSSVGITAVWTPPAYKGTSQADVGYGPYDLYDLGEFNQKGTVRTKYGTKGELKSAVNTLHSNGIQVYGDVVMNHKAGADYTENVTAVEVNPSNRYQETSGEYNIQAWTGFNFPGRGTTYSNWKWQWFHFDGTDWDQSRSLSRIFKFDGKAWDWEVSSENGNYDYLMYADYDYDHPDVVNEMKKWGVWYANEVGLDGYRLDAVKHIKFQFLKDWVDNARAATGKEMFTVGEYWQNDLGALNNYLAKVNYNQSLFDAPLHYNFYAASTGGGYYDMRNILNNTLVASNPTKAVTLVENHDTQPGQSLESTVQPWFKPLAYAFILTRSGGYPSVFYGDMYGTKGTTTREIPALKSKIEPLLKARKDYQYGTQRDYIDNPDVIGWTREGDSTKAKSGLATVITDGPGGSKRMYVGTSNAGEIWYDLTGNRTDKITIGSDGYATFPVNGGSVSVWVQQ

SEQ ID NO: 38858 - protein, 480 aa, Cytophaga sp.
NGTMMQYFEWYVPNDGQQWNRLRTDAPYLSSVGITAVWTPPAYKGTSQADVGYGPYDLYDLGEFNQKGTVRTKYGTKGELKSAVNTLHSNGIQVYGDVVMNHKAGADYTENVTAVEVNPSNRYQETSGEYNIQAWTGFNFPGRGTTYSNWKWQWFHFDGTDWDQSRSLSRIFKFDGKAWDWEVSSENGNYDYLMYADYDYDHPDVVNEMKKWGVWYANEVGLDGYRLDAVKHIKFQFLKDWVDNARAATGKEMFTVGEYWQNDLGALNNYLAKVNYNQSLFDAPLHYNFYAASTGGGYYDMRNILNNTLVASNPTKAVTLVENHDTQPGQSLESTVQPWFKPLAYAFILTRSGGYPSVFYGDMYGTKGTTTREIPALKSKIEPLLKARKDYAYGTQRDYIDNPDVIGWTREGDSTKAKSGLATVITDGPGGSKRMYVGTSNAGKIWYDLTGNRTDKITIGSDGYATFPVNGGSVSVWVQQ

SEQ ID NO: 38859 - protein, 480 aa, Cytophaga sp.
NGTMMQYFEWYVPNDGQQWNRLRTDAPYLSSVGITAVWTPPAYKGTSQADVGYGPYDLYDLGEFNQKGTVRTKYGTKGELKSAVNTLHSNGIQVYGDVVMNHKAGADYTENVTAVEVNPSNRYQETSGEYNIQAWTGFNFPGRGTTYSNWEWQWFHFDGTDWDQSRSLSRIFKFDGKAWDWEVSSENGNYDYLMYADYDYDHPDVVNEMKKWGVWYANEVGLDGYRLDAVKHIKFQFLKDWVDNARAATGKEMFTVGEYWQNDLGALNNYLAKVNYNQSLFDAPLHYNFYAASTGGGYYDMRNILNNTLVASNPTKAVTLVENHDTQPGQSLESTVQPWFKPLAYAFILTRSGGYPSVFYGDMYGTKGTTTREIPALKSKIEPLLKARKDYAYGTQRDYIDNPDVIGWTREGDSTKAKSGLATVITDGPGGSKRMYVGTSNAGEIWYDLTGNRTDKITIGSDGYATFPVNGGSVSVWVQQ

SEQ ID NO: 38860 - protein, 480 aa, Cytophaga sp.
NGTMMQYFEWYVPNDGQQWNRLRTDAPYLSSVGITAVWTPPAYKGTSQADVGYGPYDLYDLGEFNQKGTVRTKYGTKGELKSAVNTLHSNGIQVYGDVVMNHKAGADYTENVSAVEVNPSNRYQETSGEYNIQAWTGFNFPGRGTTYSNWKWQWFHFDGTDWDQSRSLSRIFKFDGKAWDWEVSSENGNYDYLMYADYDYDHPDVVNEMKKWGVWYANEVGLDGYRLDAVKHIKFQFLKDWVDNARAATGKEMFTVGEYWQNDLGALNNYLAKVNYNQSLFDAPLHYNFYAASTGGGYYDMRNILNNTLVASNPTKAVTLVENHDTQPGQSLESTVQPWFKPLAYAFILTRSGGYPSVFYGDMYGTKGTTTREIPALKSKIEPLLKARKDYAYGTQRDYIDNPDVIGWTREGDSTKAKSGLATVITDGPGGSKRMYVGTSNAGEIWYDLTGNRTDKITIGSDGYATFPVNGGSVSVWVQQ

SEQ ID NO: 38861 - protein, 480 aa, Cytophaga sp.
NGTMMQYFEWYVPNDGQQWNRLRTDAPYLSSVGITAVWTPPAYKGTSQADVGYGPYDLYDLGEFNQKGTVRTKYGTKGELKSAVNTLHSNGIQVYGDVVMNHKAGADYTENVTAVEVNPSNRYQETSGEYNIQAWTGFNFPGRGTTYSNWKWQWFHFDGTDWDQSRSLSRIFKFDGKAWDWEVSSENKNYDYLMYADYDYDHPDVVNEMKKWGVWYANEVGLDGYRLDAVKHIKFQFLKDWVDNARAATGKEMFTVGEYWQNDLGALNNYLAKVNYNQSLFDAPLHYNFYAASTGGGYYDMRNILNNTLVASNPTKAVTLVENHDTQPGQSLESTVQPWFKPLAYAFILTRSGGYPSVFYGDMYGTKGTTTREIPALKSKIEPLLKARKDYAYGTQRDYIDNPDVIGWTREGDSTKAKSGLATVITDGPGGSKRMYVGTSNAGEIWYDLTGNRTDKITIGSDGYATFPVNGGSVSVWVQQ

SEQ ID NO: 38862 - protein, 480 aa, Cytophaga sp.
NGTMMQYFEWIVPNDGQQWNRLRTDAPYLSSVGITAVWTPPAYKGTSQADVGYGPYDLYDLGEFNQKGTVRTKYGTKGELKSAVNTLHSNGIQVYGDVVMNHKAGADYTENVTAVEVNPSNRYQETSGEYNIQAWTGFNFPGRGTTYSNWKWQWFHFDGTDWDQSRSLSRIFKFDGKAWDWEVSSENGNYDYLMYADYDYDHPDVVNEMKKWGVWYANEVGLDGYRLDAVKHIKFQFLKDWVDNARAATGKEMFTVGEYWQNDLGALNNYLAKVNYNQSLFDAPLHYNFYAASTGGGYYDMRNILNNTLVASNPTKAVTLVENHDTQPGQSLESTVQPWFKPLAYAFILTRSGGYPSVFYGDMYGTKGTTTREIPALKSKIEPLLKARKDYAYGTQRDYIDNPDVIGWTREGDSTKAKSGLATVITDGPGGSKRMYVGTSNAGEIWYDLTGNRTDKITIGSDGYATFPVNGGSVSVWVQQ

SEQ ID NO: 38863 - protein, 480 aa, Cytophaga sp.
NGTMMQYFEWYVPNDGQQWNRLRTDAPYLSSVGITAVWTPPAYKGTSQADVGYGPYDLYDLGEFNQKGTVRTKYGTKGELKSAVNTLHSNGIQVYGDVVMNHKAGADYTENVTAVEVNPSNRYQETSGEDNIQAWTGFNFPGRGTTYSNWKWQWFHFDGTDWDQSRSLSRIFKFDGKAWDWEVSSENGNYDYLMYADYDYDHPDVVNEMKKWGVWYANEVGLDGYRLDAVKHIKFQFLKDWVDNARAATGKEMFTVGEYWQNDLGALNNYLAKVNYNQSLFDAPLHYNFYAASTGGGYYDMRNILNNTLVASNPTKAVTLVENHDTQPGQSLESTVQPWFKPLAYAFILTRSGGYPSVFYGDMYGTKGTTTREIPALKSKIEPLLKARKDYAYGTQRDYIDNPDVIGWTREGDSTKAKSGLATVITDGPGGSKRMYVGTSNAGEIWYDLTGNRTDKITIGSDGYATFPVNGGSVSVWVQQ

SEQ ID NO: 38864 - protein, 480 aa, Cytophaga sp.
NGTMMQYFEWYVPNDGQQWNRLRTDAPYLSSVGITAVWTPPAYKGTSQADVGYGPYDLYDLGEFNQKGTVRTKYGTKGELKSAVNTLHSNGIQVYGDVVMNHKAGADYTENVTAVEVNPSNRYQETSGEYNIQAWTGFNFPGRGTTYSNWKWQWFHFDGTDWDQSRSLSRIFKFDGKAWDWEVSSENGNYDYLMYADYDYDHIDVVNEMKKWGVWYANEVGLDGYRLDAVKHIKFQFLKDWVDNARAATGKEMFTVGEYWQNDLGALNNYLAKVNYNQSLFDAPLHYNFYAASTGGGYYDMRNILNNTLVASNPTKAVTLVENHDTQPGQSLESTVQPWFKPLAYAFILTRSGGYPSVFYGDMYGTKGTTTREIPALKSKIEPLLKARKDYAYGTQRDYIDNPDVIGWTREGDSTKAKSGLATVITDGPGGSKRMYVGTSNAGEIWYDLTGNRTDKITIGSDGYATFPVNGGSVSVWVQQ

SEQ ID NO: 38865 - protein, 480 aa, Cytophaga sp.
NGTMMQYFEWYVPNDGQQWNRLRTDAPYLSSVGITAVWTPPAYKGTSQADVGYGPYDLADLGEFNQKGTVRTKYGTKGELKSAVNTLHSNGIQVYGDVVMNHKAGADYTENVTAVEVNPSNRYQETSGEYNIQAWTGFNFPGRGTTYSNWKWQWFHFDGTDWDQSRSLSRIFKFDGKAWDWEVSSENGNYDYLMYADYDYDHPDVVNEMKKWGVWYANEVGLDGYRLDAVKHIKFQFLKDWVDNARAATGKEMFTVGEYWQNDLGALNNYLAKVNYNQSLFDAPLHYNFYAASTGGGYYDMRNILNNTLVASNPTKAVTLVENHDTQPGQSLESTVQPWFKPLAYAFILTRSGGYPSVFYGDMYGTKGTTTREIPALKSKIEPLLKARKDYAYGTQRDYIDNPDVIGWTREGDSTKAKSGLATVITDGPGGSKRMYVGTSNAGEIWYDLTGNRTDKITIGSDGYATFPVNGGSVSVWVQQ

SEQ ID NO: 38866 - protein, 480 aa, Cytophaga sp.
NGTMMQYFEWYVPNDGQQWNRLRTDAPYLSSVGITAVWTPPAYKGTSQADVGYGPYDLYDLGEFNQKGTVRTKYGTKGELKSAVNTLHSNGIQVYGDVVMNHKAGADYTENVTAVEVNPSNRYQETSGEYNIQAWTGFNFPGRGTTYSNWKWQWFHFDGTDWDQSRSLSRIFKFDGKAWDWEVSSENGNYDYLMYADYDYDHPDVVNEMKKWGVWYANEVGLDGYRLDAVKHIKFQFLKDWVDNARAATGKEMFTVGEYWQNDLGALNNYLAKVNYNQSLFDAPLHYNFYAASTGLGYYDMRNILNNTLVASNPTKAVTLVENHDTQPGQSLESTVQPWFKPLAYAFILTRSGGYPSVFYGDMYGTKGTTTREIPALKSKIEPLLKARKDYAYGTQRDYIDNPDVIGWTREGDSTKAKSGLATVITDGPGGSKRMYVGTSNAGEIWYDLTGNRTDKITIGSDGYATFPVNGGSVSVWVQQ

SEQ ID NO: 38867 - protein, 480 aa, Cytophaga sp.
NGTMMQYFEWYVPNDGQQWNRLRTDAPYLSSVGITAVWTPPAYKGTSQADVGYGPYDLYDLGEFNQKGTVRTKYGTKGELKSAVNTLHSNGIQVYGDVVMNHKAGADYTENVTAVEVNPSNRYQETSGEYNIQAWTGFNFQGRGTTYSNWKWQWFHFDGTDWDQSRSLSRIFKFDGKAWDWEVSSENGNYDYLMYADYDYDHPDVVNEMKKWGVWYANEVGLDGYRLDAVKHIKFQFLKDWVDNARAATGKEMFTVGEYWQNDLGALNNYLAKVNYNQSLFDAPLHYNFYAASTGGGYYDMRNILNNTLVASNPTKAVTLVENHDTQPGQSLESTVQPWFKPLAYAFILTRSGGYPSVFYGDMYGTKGTTTREIPALKSKIEPLLKARKDYAYGTQRDYIDNPDVIGWTREGDSTKAKSGLATVITDGPGGSKRMYVGTSNAGEIWYDLTGNRTDKITIGSDGYATFPVNGGSVSVWVQQ

SEQ ID NO: 38868 - protein, 480 aa, Cytophaga sp.
NGTMMQYFEWYVPNDGQQWNRLRTDAPYLSSVGITAVWTPPAYKGTSQADVGYGPYDLYDLGEFNQKGTVRTKYGTKGELKSAVNTLHSNGIQVYGDVVMNHKAGADYTENVTAVEVNPSNRYQETSGEYNIQAWTGFNFPGRGTTYSNWKWQWFHFDGTDWDQSRSLSRIFKFDGKAWDWEVSSENGNYDYLMYADYDYDHPDVRNEMKKWGVWYANEVGLDGYRLDAVKHIKFQFLKDWVDNARAATGKEMFTVGEYWQNDLGALNNYLAKVNYNQSLFDAPLHYNFYAASTGGGYYDMRNILNNTLVASNPTKAVTLVENHDTQPGQSLESTVQPWFKPLAYAFILTRSGGYPSVFYGDMYGTKGTTTREIPALKSKIEPLLKARKDYAYGTQRDYIDNPDVIGWTREGDSTKAKSGLATVITDGPGGSKRMYVGTSNAGEIWYDLTGNRTDKITIGSDGYATFPVNGGSVSVWVQQ

SEQ ID NO: 38869 - protein, 480 aa, Cytophaga sp.
NGTMMQYFEWYVPNDGQQWNRLRTTAPYLSSVGITAVWTPPAYKGTSQADVGYGPYDLYDLGEFNQKGTVRTKYGTKGELKSAVNTLHSNGIQVYGDVVMNHKAGADYTENVTAVEVNPSNRYQETSGEYNIQAWTGFNFPGRGTTYSNWKWQWFHFDGTDWDQSRSLSRIFKFDGKAWDWEVSSENGNYDYLMYADYDYDHPDVVNEMKKWGVWYANEVGLDGYRLDAVKHIKFQFLKDWVDNARAATGKEMFTVGEYWQNDLGALNNYLAKVNYNQSLFDAPLHYNFYAASTGGGYYDMRNILNNTLVASNPTKAVTLVENHDTQPGQSLESTVQPWFKPLAYAFILTRSGGYPSVFYGDMYGTKGTTTREIPALKSKIEPLLKARKDYAYGTQRDYIDNPDVIGWTREGDSTKAKSGLATVITDGPGGSKRMYVGTSNAGEIWYDLTGNRTDKITIGSDGYATFPVNGGSVSVWVQQ

SEQ ID NO: 38870 - protein, 480 aa, Cytophaga sp.
NGTMMQYFEWYVPNDGQQWNRLRTDAPYLSSVGITAVWTPPAYKGTSQADVGYGPYDLYDLGEFNQKGTVRTKYGTKGELKSAVNTLHSNGIQVYGDVVMNHKAGADYTENVTAVEVNPSNRYQEISGEYNIQAWTGFNFPGRGTTYSNWKWQWFHFDGTDWDQSRSLSRIFKFDGKAWDWEVSSENGNYDYLMYADYDYDHPDVVNEMKKWGVWYANEVGLDGYRLDAVKHIKFQFLKDWVDNARAATGKEMFTVGEYWQNDLGALNNYLAKVNYNQSLFDAPLHYNFYAASTGGGYYDMRNILNNTLVASNPTKAVTLVENHDTQPGQSLESTVQPWFKPLAYAFILTRSGGYPSVFYGDMYGTKGTTTREIPALKSKIEPLLKARKDYAYGTQRDYIDNPDVIGWTREGDSTKAKSGLATVITDGPGGSKRMYVGTSNAGEIWYDLTGNRTDKITIGSDGYATFPVNGGSVSVWVQQ

SEQ ID NO: 38871 - protein, 480 aa, Cytophaga sp.
NGTMMQYFEWYVPNDGQQWNRLRTDAPYLSSVGITAVWTPPAYKGTSQADVGYGPYDLYDLGEFNQKGTVRTKYGTKGELKSAVNTLHSNGIQVYGDVVMNHKAGADYTENVTAVEVNPSNRYQETSGEYNIQAWTGFNFPGRGTTYSNWKWQWFHFDGTDWDQSRSLSRIFKFDGKAWDWEVSSENGNYDYLMYADYDYDHPDVVNEMKKWGVWYANEVGLDGYRLDAVKHIKFQFLKDWVDNARAATGKEMFTVGEYWQNDLAALNNYLAKVNYNQSLFDAPLHYNFYAASTGGGYYDMRNILNNTLVASNPTKAVTLVENHDTQPGQSLESTVQPWFKPLAYAFILTRSGGYPSVFYGDMYGTKGTTTREIPALKSKIEPLLKARKDYAYGTQRDYIDNPDVIGWTREGDSTKAKSGLATVITDGPGGSKRMYVGTSNAGEIWYDLTGNRTDKITIGSDGYATFPVNGGSVSVWVQQ

SEQ ID NO: 38872 - protein, 480 aa, Cytophaga sp.
NGTMMQYFEWYVPNDGQQWNRLRTDAPYLSSVGITAVWTPPAYKGTSQADVGYGPYDLYDLGEFNQKGTVRTKYGTKGELKSAVNTLHSNGIQVYGDVVMNHKAGADYTENVTAVEVNPSNRYQETSGEYNIQAWTGFNFPGRGTTYSNWKWQWFHFDGTDWDQSRSLSRIFKFDGKAWDWEVSSENGNYDYLMYADYDYHHPDVVNEMKKWGVWYANEVGLDGYRLDAVKHIKFQFLKDWVDNARAATGKEMFTVGEYWQNDLGALNNYLAKVNYNQSLFDAPLHYNFYAASTGGGYYDMRNILNNTLVASNPTKAVTLVENHDTQPGQSLESTVQPWFKPLAYAFILTRSGGYPSVFYGDMYGTKGTTTREIPALKSKIEPLLKARKDYAYGTQRDYIDNPDVIGWTREGDSTKAKSGLATVITDGPGGSKRMYVGTSNAGEIWYDLTGNRTDKITIGSDGYATFPVNGGSVSVWVQQ

SEQ ID NO: 38873 - protein, 480 aa, Cytophaga sp.
NGTMMQYFEWYVPNDGQQWNRLRTDAPYLSSVGITAVWTPPAYKGTSQADVGYGPYDLYDLGEFNQKGTVRTKYGTKGELKSAVNTLHSNGIQVYGDVVMNHKAGADYTENVTAVEVNPSNRYQETSGEYNIQAWTGFNFPGRGTTYSNWKWQWFHFDGTDWDQSRSLSRIFKFDGKAWDWEVSSENGNYDYLMYADYDYDHPDVVNEMKKWGVWYANEVGLDGYRLDAVKHIKFQFLKDWVDNARAATGKEMFTVGEYWQNDLGALNNYLAKVNYNQSLFDAPLHYNFYAASTGGGYYDMRNILNNTLVASNPTKAVTLVENHDTQPGQSLESTVQPWFKPLAYAFILTRSGGYPSVFYGDMYGTKGTTTREIPALKSKIEPLLKARKDYAYGTQRDYIDNPDVIGWTREGDSTKAKSGLATVITDGPGGSKRMYVGTSNAGEIWYDLTGNRTDKITIGSDGYATFPVTGGSVSVWVQQ

SEQ ID NO: 38874 - protein, 480 aa, Cytophaga sp.
NGTMMQYFEWYVPNDGQQWNRLRTDAPYLSSVGITAVWTPPAYKGTSQADVGYGPYDLYDLGEFNQKGTVRTKYGTKGELKSAVNTLHSNGIQVYGDVVMNHKAGADYTENVTAVEVNPSNRYQETSGEYNIQAWTGFNFPGRGTTYSNWKWQWFHFDGTDWDQSRSLSRIFKFDGKAWDWEVSSENGNYDYLMYADYDYDHPDVVNEMKKWGVWYANEVGLDGYRLDAVKHIKFQFLKCWVDNARAATGKEMFTVGEYWQNDLGALNNYLAKVNYNQSLFDAPLHYNFYAASTGGGYYDMRNILNNTLVASNPTKAVTLVENHDTQPGQSLESTVQPWFKPLAYAFILTRSGGYPSVFYGDMYGTKGTTTREIPALKSKIEPLLKARKDYAYGTQRDYIDNPDVIGWTREGDSTKAKSGLATVITDGPGGSKRMYVGTSNAGEIWYDLTGNRTDKITIGSDGYATFPVNGGSVSVWVQQ

SEQ ID NO: 38875 - protein, 480 aa, Cytophaga sp.
NGTMMQYFEWYVPNDGQQWNRLRTDAPYLSSVGITAVWTPPAYKGTSQADVGYGPYDLYDLGEFNQKGTVRTKYGTKGELKSAVNTLHSNGIQVYGDVVMNHKAGADYTENVTAVEVNPSNRYQETWGEYNIQAWTGFNFPGRGTTYSNWKWQWFHFDGTDWDQSRSLSRIFKFDGKAWDWEVSSENGNYDYLMYADYDYDHPDVVNEMKKWGVWYANEVGLDGYRLDAVKHIKFQFLKDWVDNARAATGKEMFTVGEYWQNDLGALNNYLAKVNYNQSLFDAPLHYNFYAASTGGGYYDMRNILNNTLVASNPTKAVTLVENHDTQPGQSLESTVQPWFKPLAYAFILTRSGGYPSVFYGDMYGTKGTTTREIPALKSKIEPLLKARKDYAYGTQRDYIDNPDVIGWTREGDSTKAKSGLATVITDGPGGSKRMYVGTSNAGEIWYDLTGNRTDKITIGSDGYATFPVNGGSVSVWVQQ

SEQ ID NO: 38876 - protein, 480 aa, Cytophaga sp.
NGTMMQYFEWYVPNDGQQWNRLRTDAPYLSSVGITAVWTPPAYKGTSQADVGYGPYDLYDLGEFNQKGTVRTKYGTKGELKSAVNTLHSNGIQVYGDVVMNHKAGADYTENVTAVEVNPSNRYQETSGEYNIQAWTGFNFPGRGTTYSNWKWQWFHFDGTDWDQSRSLSRIFKFDGKAWDWEVSSENGNYDYLMYADYDYDHPDVVNEMKKWGVWYANEVGLDGYRLDAVKHIKFQFLKDWVDNARAATGKEMFTVGEYWQNDLGALNNYLAKVNYNQSLFDAPLHYNFYAASTGGGYYDMRNILNNTLVASNPTKAVTLVENHDTQPGQSLESTVQPWFKPLAYAFILTRSGGYPSVFYGDMYGTKGTTTREIPALKSKIEPLLKARKDYAYGTQRDYIDNPDVIGWTREGDSTKAKSGLATVITDGPGGSKRMYVGTSNAGTIWYDLTGNRTDKITIGSDGYATFPVNGGSVSVWVQQ

SEQ ID NO: 38877 - protein, 480 aa, Cytophaga sp.
NGTMMQYFEWYVPNDGQQWNRLRTDAPYLSSVGITAVWTPPAYKGTSQADVGYGPYDLYDLGEFNQKGTVRTKYGTKGELKSAVNTLHSNGIQVYGDVVMNHKAGADYTENVTAVEVNPSNRYQETSGEYNIQAWTGFNFPGRGTTYSNWKWQWFHFDGTDWDQSRSLSRIFKFDGKAWDWEVSSENGNYDYLMYADYDYDHPDVVNEMKKWGVWYANEVGLDGYRLDAVKHIKFQFLKDWVDNARAATGKEMFTVGEYWQNDLGALNNYLAKVNYNQSLFDAPLHYNFYAASTGGGYYDMRNILNNTLVASNPTKAVTLVENHDTQPGQSLESTVQPWFKPLAYAFILTRSGGYPSVFYGDMYGTKGTTTREIPALKSKIEPLLKARKDYAYGTQRDYIDNPDVIGWTREGDSTKAKSGLATVITDGPGGSKRMYVGTSNAGEIWYDLTGNRTDKITIGSDGYATFPVNGGSHSVWVQQ

SEQ ID NO: 38878 - protein, 480 aa, Cytophaga sp.
NGTMMQYFEWYVPNDGQQWNRLRTDAPYLSSVGITAVWTPPAYKGTSQADVGYGPYDLYDLGEFNQKGTVRTKYGTKGELKSAVNTLHSNGIQVYGDVVMNHKAGADYTENVTAVEVNPSNRYQEYSGEYNIQAWTGFNFPGRGTTYSNWKWQWFHFDGTDWDQSRSLSRIFKFDGKAWDWEVSSENGNYDYLMYADYDYDHPDVVNEMKKWGVWYANEVGLDGYRLDAVKHIKFQFLKDWVDNARAATGKEMFTVGEYWQNDLGALNNYLAKVNYNQSLFDAPLHYNFYAASTGGGYYDMRNILNNTLVASNPTKAVTLVENHDTQPGQSLESTVQPWFKPLAYAFILTRSGGYPSVFYGDMYGTKGTTTREIPALKSKIEPLLKARKDYAYGTQRDYIDNPDVIGWTREGDSTKAKSGLATVITDGPGGSKRMYVGTSNAGEIWYDLTGNRTDKITIGSDGYATFPVNGGSVSVWVQQ

SEQ ID NO: 38879 - protein, 480 aa, Cytophaga sp.
NGTMMQYFEWYVPNDGQQWNRLRTDAPYLSSVGITAVWTPPAYKGTSQADVGYGPYDLYDLGEFNQKGTVRTKYGTKGELKSAVNTLHSNGIQVYGDVVMNHKAGADYTENVTAVEVNPSNRYQETSGEYNIQAWTGFNFPGRGTTYSNWKWQWFHFDGTDWDQSRSLSRIFKFDGKAWDWEVSSENGNYDYLMYADYDYDHPDVVNEMKKWGVWYANEVGLDGYRLDAVKHITFQFLKDWVDNARAATGKEMFTVGEYWQNDLGALNNYLAKVNYNQSLFDAPLHYNFYAASTGGGYYDMRNILNNTLVASNPTKAVTLVENHDTQPGQSLESTVQPWFKPLAYAFILTRSGGYPSVFYGDMYGTKGTTTREIPALKSKIEPLLKARKDYAYGTQRDYIDNPDVIGWTREGDSTKAKSGLATVITDGPGGSKRMYVGTSNAGEIWYDLTGNRTDKITIGSDGYATFPVNGGSVSVWVQQ

SEQ ID NO: 38880 - protein, 480 aa, Cytophaga sp.
NGTMMQYFEWYVPNDGQQWNRLRTDAPYLSSVGITAVWTPPAYKGTSQADVGYGPYDLYDLGEFNQKGTVRTKYGTKGELKSAVNTLHSNGIQVYGDVVMNHKAGADYTENVTAVEVNPSNRYQETSGEYNIQAWTGFNFPGRGTTYSNWKWQWFHFDGTDWDQSRSLSRIFKFDGKAWDWEVSSENGNYDYLMYADYDYDHPDVVNEMKKWGVWYANEVGLDGYRLDAVKHIKFQFLKDWVDNARAATGKEMFTVGEYWQRDLGALNNYLAKVNYNQSLFDAPLHYNFYAASTGGGYYDMRNILNNTLVASNPTKAVTLVENHDTQPGQSLESTVQPWFKPLAYAFILTRSGGYPSVFYGDMYGTKGTTTREIPALKSKIEPLLKARKDYAYGTQRDYIDNPDVIGWTREGDSTKAKSGLATVITDGPGGSKRMYVGTSNAGEIWYDLTGNRTDKITIGSDGYATFPVNGGSVSVWVQQ

SEQ ID NO: 38881 - protein, 480 aa, Cytophaga sp.
NGTMMQYFEWYVPNDGQQWNRLRTDAPYLSSVGITAVWTPPAYKGTSQADVGYGPYDLYDLGEFNQKGTVRTKYGTKGELKSAVNTLHSNGIQVYGDVVMNHKAGADYTENVTAVEVNPSNRYQETSGEYNIQAWTGFNFPGRGTTYSNWKWQWFHFDGTDWDQSRSLSRIFKFDGKAWDWEVSSENGNYDYLMYADYDYDHPDVVNEMKKWGVWYANEVGLDGYRLDAVKHIKFQFLKDWVDNARAATGKEMFTVGEYWQNDLGALNNYLAKVNYNQSLFDAPLHYNFYAASTGGGYYDMRNILNNTLVASNPTKAVTLVENHDTQPGQSLESTVQPWFKPLAYAFILTRSGGYPSVFYGDMYGTKGTTTREIPALKSKIEPLLKARKDYAYGTQRDYIDNPDVIGWTREGDSTKAKSGLATVITDGPGGSKRMYVGTSCAGEIWYDLTGNRTDKITIGSDGYATFPVNGGSVSVWVQQ

SEQ ID NO: 38882 - protein, 480 aa, Cytophaga sp.
NGTMMQYFEWYVPNDGQQWNRLRTDAPYLSSVGITAVWTPPAYKGTSQADVGYGPYDLYDLGEFNQKGTVRTKYGTKGELKSAVNTLHSNGIQVYGDVVMNHKAGADYTENVTAVEVNPSNRYQETSGEYNIQAWTGFNFPGRGTTYSNWKWQWFHFDGTDWDQSRSLSRIFKFDGKAWDWEVSSENGNYDYLMYADYDYDHPDVVNEMKKWGVWYANEVGLDGYRLDAVKHIKFQFLKDWVDNARAATGKEMFTVGEYWQNDLGALNNYLAKVNYNQSLFDAPLHYNFYAASTGGGYYDMRNILNNTLVASNPTKAVTLVENHDTQPGQSLESTVQPWFKPLAYAFILTRSGGYPSVFYGDMYGTKGTTTREIPALKSKIEPLLKARKDYAYGTQRDYIDNPDVIGWTREGDSTKAKSGLATVITDGIGGSKRMYVGTSNAGEIWYDLTGNRTDKITIGSDGYATFPVNGGSVSVWVQQ

SEQ ID NO: 38883 - protein, 480 aa, Cytophaga sp.
NGTMMQYFEWYVPNDGQQWNRLRTDAPYLSSVGITAVWTPPAYKGTSQADVGYGPYDLYDLGEFNQKGTVRTKYGTKGELKSAVNTLHSNGIQVYGDVVMNHKAGADYTENVTAVEVNPSNRYQETSGEYNIQAWTGFNFPGRGTTYSNWKWQWFHFDGTDWDQSRSLSRIFKFDGKAWDWEVSSENGNYDYLMYADYDYDHPDVVNEMKKWGVWYANEVGLDGYRLDAVKHIKFQFLKDWVDNARAATGKEMFTVGEYWQNDLGALNNYMAKVNYNQSLFDAPLHYNFYAASTGGGYYDMRNILNNTLVASNPTKAVTLVENHDTQPGQSLESTVQPWFKPLAYAFILTRSGGYPSVFYGDMYGTKGTTTREIPALKSKIEPLLKARKDYAYGTQRDYIDNPDVIGWTREGDSTKAKSGLATVITDGPGGSKRMYVGTSNAGEIWYDLTGNRTDKITIGSDGYATFPVNGGSVSVWVQQ

SEQ ID NO: 38884 - protein, 480 aa, Cytophaga sp.
NGTMMQYFEWYVPNDGQQWNRLRTDAPYLSSVGITAVWTPPAYKGTSQADVGYGPYDLYDLGEFNQKETVRTKYGTKGELKSAVNTLHSNGIQVYGDVVMNHKAGADYTENVTAVEVNPSNRYQETSGEYNIQAWTGFNFPGRGTTYSNWKWQWFHFDGTDWDQSRSLSRIFKFDGKAWDWEVSSENGNYDYLMYADYDYDHPDVVNEMKKWGVWYANEVGLDGYRLDAVKHIKFQFLKDWVDNARAATGKEMFTVGEYWQNDLGALNNYLAKVNYNQSLFDAPLHYNFYAASTGGGYYDMRNILNNTLVASNPTKAVTLVENHDTQPGQSLESTVQPWFKPLAYAFILTRSGGYPSVFYGDMYGTKGTTTREIPALKSKIEPLLKARKDYAYGTQRDYIDNPDVIGWTREGDSTKAKSGLATVITDGPGGSKRMYVGTSNAGEIWYDLTGNRTDKITIGSDGYATFPVNGGSVSVWVQQ

SEQ ID NO: 38885 - protein, 480 aa, Cytophaga sp.
NGTMMQYFEWYVPNDGQQWNRLRTDAPYLSSVGITAVWTPPAYKGTSQADVGYGPYDLYDLGEFNQKGTVRTKYGTKGELKSAVNTLHSNGIQVYGDVVMNHKAGADYTENVTAVEVNPSNRYQETSGEYNIQAWTGFNFPGRGTTYSNWKWQWFHFDGTDWDQSRSLSRIFKFDGKAWDWEVSSENGNYDYLMYADYDYDHPDVVNEMKKWGVWYANEVGLDGYRLDAVKHIKFQFLKDWVDNARAATGKEMFTVGEYWQNDLFALNNYLAKVNYNQSLFDAPLHYNFYAASTGGGYYDMRNILNNTLVASNPTKAVTLVENHDTQPGQSLESTVQPWFKPLAYAFILTRSGGYPSVFYGDMYGTKGTTTREIPALKSKIEPLLKARKDYAYGTQRDYIDNPDVIGWTREGDSTKAKSGLATVITDGPGGSKRMYVGTSNAGEIWYDLTGNRTDKITIGSDGYATFPVNGGSVSVWVQQ

SEQ ID NO: 38886 - protein, 480 aa, Cytophaga sp.
NGTMMQYFEWYVPNDGQQWNRLRTDAPYLSSVGITAVWTPPAYKGTSQADVGYGPYDLYDLGEFNQKGTVRTKYGTKGELKSAVNTLHSNGIQVYGDVVMNHKAGADYTENVTAVEVNPSNRYQETSGEYNIQAWTGFNFPGRGTTYSNWKWQWFHFDGTDWDQSRSLSRIFKFDGKAWDWEVSSENGNYDYLMYADYDYDHPDVVNEMKKWGVWYANEVGLDGYRLDAVKHIKFQFLKDWVDNARAATGKEMFTVGEYWQNDLGALNNYLAKVNYNQSLFDAPLHYNFYAASTGGGYYDMRNILNNTLVASNPTKAVTLVENHDTQPGQSLESTVQPWFKPLAYAFILTRSGGYPSVFYGDMYGTKGTTTREIPALKSKIEPLLKARKDYAYGTQRDYIDNPDVIGWTREGDSTKAKSGLATVITDGPGGSKRMYVGTSNRGEIWYDLTGNRTDKITIGSDGYATFPVNGGSVSVWVQQ

SEQ ID NO: 38887 - protein, 480 aa, Cytophaga sp.
NGTMMQYFEWYVPNDGQQWNRLRTDAPYLSSVGITAVWTPPAYKGTSQADVGYGPYDLYDLGEFNQKGTSRTKYGTKGELKSAVNTLHSNGIQVYGDVVMNHKAGADYTENVTAVEVNPSNRYQETSGEYNIQAWTGFNFPGRGTTYSNWKWQWFHFDGTDWDQSRSLSRIFKFDGKAWDWEVSSENGNYDYLMYADYDYDHPDVVNEMKKWGVWYANEVGLDGYRLDAVKHIKFQFLKDWVDNARAATGKEMFTVGEYWQNDLGALNNYLAKVNYNQSLFDAPLHYNFYAASTGGGYYDMRNILNNTLVASNPTKAVTLVENHDTQPGQSLESTVQPWFKPLAYAFILTRSGGYPSVFYGDMYGTKGTTTREIPALKSKIEPLLKARKDYAYGTQRDYIDNPDVIGWTREGDSTKAKSGLATVITDGPGGSKRMYVGTSNAGEIWYDLTGNRTDKITIGSDGYATFPVNGGSVSVWVQQ

SEQ ID NO: 38888 - protein, 480 aa, Cytophaga sp.
NGTMMQYFEWYVPNDGQQWNRLRTDAPYLSSVGITAVWTPPAYKGTSQADVGYGPYDLYDLGEFNQKGTVRTKYGTKGELKSAVNTLHSNGIQVYGDVVMNHKAGADYTENVTAVEVNPSNRYQETSGEYNIQAWTGFNFPGRGTDYSNWKWQWFHFDGTDWDQSRSLSRIFKFDGKAWDWEVSSENGNYDYLMYADYDYDHPDVVNEMKKWGVWYANEVGLDGYRLDAVKHIKFQFLKDWVDNARAATGKEMFTVGEYWQNDLGALNNYLAKVNYNQSLFDAPLHYNFYAASTGGGYYDMRNILNNTLVASNPTKAVTLVENHDTQPGQSLESTVQPWFKPLAYAFILTRSGGYPSVFYGDMYGTKGTTTREIPALKSKIEPLLKARKDYAYGTQRDYIDNPDVIGWTREGDSTKAKSGLATVITDGPGGSKRMYVGTSNAGEIWYDLTGNRTDKITIGSDGYATFPVNGGSVSVWVQQ

SEQ ID NO: 38889 - protein, 480 aa, Cytophaga sp.
NGTMMQYFEWYVPNDGAQWNRLRTDAPYLSSVGITAVWTPPAYKGTSQADVGYGPYDLYDLGEFNQKGTVRTKYGTKGELKSAVNTLHSNGIQVYGDVVMNHKAGADYTENVTAVEVNPSNRYQETSGEYNIQAWTGFNFPGRGTTYSNWKWQWFHFDGTDWDQSRSLSRIFKFDGKAWDWEVSSENGNYDYLMYADYDYDHPDVVNEMKKWGVWYANEVGLDGYRLDAVKHIKFQFLKDWVDNARAATGKEMFTVGEYWQNDLGALNNYLAKVNYNQSLFDAPLHYNFYAASTGGGYYDMRNILNNTLVASNPTKAVTLVENHDTQPGQSLESTVQPWFKPLAYAFILTRSGGYPSVFYGDMYGTKGTTTREIPALKSKIEPLLKARKDYAYGTQRDYIDNPDVIGWTREGDSTKAKSGLATVITDGPGGSKRMYVGTSNAGEIWYDLTGNRTDKITIGSDGYATFPVNGGSVSVWVQQ

SEQ ID NO: 38890 - protein, 480 aa, Cytophaga sp.
NGTMMQYFEWYVPNDGQQWNRLRTDAPYLSSVGITAVWTPPAYKGTSQADVGYGPYDLYDLGEFNQKGTVRTKYGTKGELKSAVNTLHSNGIQVYGDVVMNHKAGADYTENVTAVEVNPSNRYQETSGEYNIQAWTGFNFPGRGTTYSNWKWQWFHFDGTDWDQSRSLSRIFKFDGKAWDWEVSSENGNYDYLMYADYDYDHPDVVNEMKKWGVWYANEVGLDGYRLDAVKHIKFQFLKDWVDNARAATGKEMFTVGEYWQNDLGALNNYLAKVNYNQSLFDAPLHYNFYAASTGGGYYDMRNILNNTLVASNPTKAVTLVENHDTQPGQSLESTVQPWFKPLAYAFILTRSGGYPSVFYGDMYGTKGTTTREIPALKSKIEPLLKARKDYAYGTQRDYIDNPDVIGWTREGDSTKAKSGLATVITDGPGGSKRMYVGTSNAGEIWYDLTGNRTDKITIGLDGYATFPVNGGSVSVWVQQ

SEQ ID NO: 38891 - protein, 480 aa, Cytophaga sp.
NGTMMQYFEWYVPNDGQQWNRLRTDAPYLSSVGITAVWTPPAYKGTSQADVGYGPYDLYDLGEFNQKGTVRTKYGTKGELKSAVNTLHSNGIQVYGDVVMNHKAGADYTENVTAVEVNPSNRYQETSGEYNIQAWTGFNFPGRGTTYSNWKWQWFHFDGTDWDQSRSLSRIFKFDGKAWDWEVSSENGNYDYLMYADYDYDHPDVVNEMKKWGVWYANEVGLDGYRLDAVKHIKFQFLKDWVDNARAATGKEMFTVGEYWQNDLGALNNYLAKVNYNQSLFDAPLHYNFYAASTGGGYYDMRNILNNTLVASNPTKAVTLVENHDTQPGQSLESTVQPWFKPLAYAFILTRSGGYPSVFYGDMYGTKGTTTREIPALKSKIEPLLKARKDYAYGTQRDYIDNPDVIGWTREGDSTKAKSGLATVITDGPGGSKRMYVGTSNAHEIWYDLTGNRTDKITIGSDGYATFPVNGGSVSVWVQQ

SEQ ID NO: 38892 - protein, 480 aa, Cytophaga sp.
NGTMMQYFEWYVPNDGQQWNRLRTDAPYLSSVGITAVWTPPAYKGTSQADVGYGPYDLYDLGEFNQKGTVRTKYGTKGELKSAVNTLHSNGIQVYGDVVMNHKAGADYTENVTAVEVNPSNRYQETSGEYNIQAWTGFNFPGRGTTYSNWKWQWFHFDGTDWDQSRSLSRIFKFDGKAWDWEVSSENGNYDYLMYADYDYDHPDVVNEMKKWGVWYANEVGLDGYRLDAVKHIKFQFLKDWVDNARAATGKEMFTVGEYWQNDLGALNNYLAKVNYNQSLFDAPLHYNFYAASTGGGYYDMRNILNNTLVASNPTKAVTLVENHDTQPGQSLESTVQPWFKPLAYAFILTRSGGYPSVFYGDMYGTKGTTTREIPALISKIEPLLKARKDYAYGTQRDYIDNPDVIGWTREGDSTKAKSGLATVITDGPGGSKRMYVGTSNAGEIWYDLTGNRTDKITIGSDGYATFPVNGGSVSVWVQQ

SEQ ID NO: 38893 - protein, 480 aa, Cytophaga sp.
NGTMMQYFEWYVPNDGQQWNRLRTDAPYLSSVGITAVWTPPAYKGTSQADVGYGPYDLYDLGEFNQKGTVRTKYGTKGELKSAVNTLHSNGIQVYGDVVMNHKAGADYTENVTAVEVNPSNRYQETSGEYNIQAWTGFNFPGRGTTYSNWKWQWFHFDGTDWDQSRSLSRIFKFDGKAWDWEVSSENGNYDYLMYADYDYDHPDVVNEMKKWGVWYANEVGLDGYRLDAVKHIKFQFLKDWVDNARAATGKEMFTVGEYWQNDLGALNNYLAKVNYNQSLFDAPLHYNFYAASTGGGYYDMRNILNNTLVASNPTKAVTLVENHDTQPGQSLESTVQPWFKPLAYAFILTRSGGYPSVFYGDMYGTKGTTTREIPALKSKIEPLLKARKDYAYGTQRDYIDNPDVIGWTRDGDSTKAKSGLATVITDGPGGSKRMYVGTSNAGEIWYDLTGNRTDKITIGSDGYATFPVNGGSVSVWVQQ

SEQ ID NO: 38894 - protein, 480 aa, Cytophaga sp.
NGTMMQYFEWYVPNDGQQWNRLRTDAPYLSSVGITAVWTPPAYKGTSQADVGYGPYDLYDLGEFNQKGTVRTKYGTKGELKSAVNTLHSNGIQVYGDVVMNHKAGADYTENVTAVEVNPSNRYQETSGEYNIQAWTGFNFPGRGTTYSNWKWQWFHFDGTDWDQIRSLSRIFKFDGKAWDWEVSSENGNYDYLMYADYDYDHPDVVNEMKKWGVWYANEVGLDGYRLDAVKHIKFQFLKDWVDNARAATGKEMFTVGEYWQNDLGALNNYLAKVNYNQSLFDAPLHYNFYAASTGGGYYDMRNILNNTLVASNPTKAVTLVENHDTQPGQSLESTVQPWFKPLAYAFILTRSGGYPSVFYGDMYGTKGTTTREIPALKSKIEPLLKARKDYAYGTQRDYIDNPDVIGWTREGDSTKAKSGLATVITDGPGGSKRMYVGTSNAGEIWYDLTGNRTDKITIGSDGYATFPVNGGSVSVWVQQ

SEQ ID NO: 38895 - protein, 480 aa, Cytophaga sp.
NGTMMQYFEWYVPNDGQQWNRLRTDAPYLSSVGITAVWTPPAYKGTSQADVGYGPYDLYDLGEFNQKGTVRTKYGTKGELKSAVNTLHSNGIQVYGDVVMNHKAGADYTENVTAVEVNPSNRYQETSGEYNIQAWTGFNFPGRGTTYSNWKWQWFHFDGTDWDQSRSLSRIFKFDGKAWDWEVSSENGNYDYLMYADYDYDHPDVVNEMKKWGVWYANEVGLDGYRLDAVKHIKFQFLKDWVDNARAATGKEMFTVGEYWQNDLGALNNYLAKVNYNQSLFDAPLHYNFYAASTGGGYYDMKNILNNTLVASNPTKAVTLVENHDTQPGQSLESTVQPWFKPLAYAFILTRSGGYPSVFYGDMYGTKGTTTREIPALKSKIEPLLKARKDYAYGTQRDYIDNPDVIGWTREGDSTKAKSGLATVITDGPGGSKRMYVGTSNAGEIWYDLTGNRTDKITIGSDGYATFPVNGGSVSVWVQQ

SEQ ID NO: 38896 - protein, 480 aa, Cytophaga sp.
NGTMMQYFEWYVPNDGQQWNRLRTDAPYLSSVGITAVWTPPAYKGTSQADVGYGPYDLYDLGEFNQKGTVRTKYGTKGELKSAVNTLHSNGIQVYGDVVMNHKAGADYTENVTAVEVNPSNRYQETSGEYNIQAWTGFNFPGRGTTYSNWKWQWFHFDGTDWDQSRSLSRIFKFDGKAWDWEVSSENGNYDYLMYADYDYDHPDVVNEMKKWGVWYANEVGLDGYRLDAVKHIKFQFLKDWVDNARAATGKEMFTVGEYWQNDLGALNNYLAKVNYNQSLFDAPLHYNFYAASTGGGYYDMRNILNNTLVASNPTKAVTLVENHDTQPGQSLESTVQPWFKPLAYAFILTRSGGYPSVFYGDMYGTKGTTTREIPALKSKIEPLLKARKDYAYGTQRDYIDNPDVIGWTREGDSTKAKCGLATVITDGPGGSKRMYVGTSNAGEIWYDLTGNRTDKITIGSDGYATFPVNGGSVSVWVQQ

SEQ ID NO: 38897 - protein, 480 aa, Cytophaga sp.
NGTMMQYFEWYVPNDGQQWNRLRTDAPYLSSVGITAVWTPPAYKGTSQADVGYGPYDLYDLGEFNQKGTVRTKYGTKGELKSAVNTLHSNGIQVYGDVVMNHKAGADYTENVTAVEVNPSNRYQETSGEYNIQAWTGFNFPGRGTTYSNWKWQWFHFDGTDWDQSRSLSRIFKFDGKAWDWEVSSENGNYDYLMYADYDYDHPDVVNEMKKWGVWYANEVGLDGYRLDAVKHIKFQFLKDWVDNARAATGKEMFTVGEYWQNDLGALNNYLAKVNYNQSLFDAPLHYNFYAASTGGGYYDMRNILNNTLVASNPTKAVTLVENHDTQPGQSLESTVQPWFKPLAYAFILTRSGGYPSVFYGDMYGTKGTTTREIPALKSKIEPLLKARKDYAYGTQRDYIDNPDVIGWTREGDSTKAKSGLATVITDGPGGSKRMYVGTSNAGEIWYDLTGNRTDKITIGSDGYATFPVRGGSVSVWVQQ

SEQ ID NO: 38898 - protein, 480 aa, Cytophaga sp.
NGTMMQYFEWYVPNDGQQWNRLRTDAPYLSSVGITAVWTPPAYKGTSQADVGYGPYDLYDLGEFNQKGTVRTKYGTKGELKSAVNTLHSNGIQVYGDVVMNHKAGADYTENVTAVEVNPSNRYQETSGEYNIQAWTGFNFPGRGTTYSNWKWQWFHFDGTDWDQSRSLSRIFKFDGKAWDWEVSSENGNYDYLMYADYDYDHPDVVNEMKKWGVWYANEVGLDGYRLDAVKHIKFQFLKDWVDNARAATGKEMFTVGEYWQNDLGALNNYLAKVNYNQSLFDAPLHYNFYAASTGGGYYDMRNILNNTLVASNPTKAVTLVENHDTQPGQSLESTVQPWFKPSAYAFILTRSGGYPSVFYGDMYGTKGTTTREIPALKSKIEPLLKARKDYAYGTQRDYIDNPDVIGWTREGDSTKAKSGLATVITDGPGGSKRMYVGTSNAGEIWYDLTGNRTDKITIGSDGYATFPVNGGSVSVWVQQ

SEQ ID NO: 38899 - protein, 480 aa, Cytophaga sp.
NGTMMQYFEWYVPNDGQQWNRLRTDAPYLSSVGITAVWTPPAYKGTSQADVGYGPYDLYDLGEFNQKGTVRTKYGTKGELKSAVNTLHSNGIQVYGDVVMNHKAGADYTENVTAVEVNPSNRYQETSGEYNIQAWTGFNFPGRGTTYSNWKWQWFHFDGTDWDQSRSLSRIFKFDGKAWDWEVSSENGNYDYLMYADYDYDHPDVVNEMKKWGVWYANEVGLDGYRLDAVKHIKFQFLKDWVDNARAYTGKEMFTVGEYWQNDLGALNNYLAKVNYNQSLFDAPLHYNFYAASTGGGYYDMRNILNNTLVASNPTKAVTLVENHDTQPGQSLESTVQPWFKPLAYAFILTRSGGYPSVFYGDMYGTKGTTTREIPALKSKIEPLLKARKDYAYGTQRDYIDNPDVIGWTREGDSTKAKSGLATVITDGPGGSKRMYVGTSNAGEIWYDLTGNRTDKITIGSDGYATFPVNGGSVSVWVQQ

SEQ ID NO: 38900 - protein, 480 aa, Cytophaga sp.
NGTMMQYFEWYVPNDGQQWNRLRTDAPYLSSVGITAVWTPPAYKGTSQADVGYGPYDLYDLGEFNQKGTVRTKYGTKGELKSAVNTLHSNGIQVYGDVVMNHKAGADYTENVTAVEVNPSNRYQETSGEYNIQAWTGFNFPGRGTTYSNWKWQWFHFDGTDWDQSRSLSRIFKFDGKAWDWEVSSENGNYDYLMYADYDYDHPDVVNEMKKWGVWYANEVGLDGYRLDAVKHIKFQFLKDWVDNARAATGKEMFTVGEYWQNDLGALNNYLAKVNYNQSLFDAPLHYNFYAASTGGGYYDMRNILNNTLVASNPTKAVTLVENHDTQPGQSLESTVQPWFKPLAYAFILTRSGGYPSVFYGDMYGTKGTTTREIPALKSKIEPLLKARKDYAYGTQRDYIDNPDVIGWTREGDYTKAKSGLATVITDGPGGSKRMYVGTSNAGEIWYDLTGNRTDKITIGSDGYATFPVNGGSVSVWVQQ

SEQ ID NO: 38901 - protein, 480 aa, Cytophaga sp.
NGTMMQYFEWYVPNDGQQWNRLRTDAPYLSSVGITAVWTPPAYKGTSQADVGYGPYDLYDLGEFNQKGTVRTKYGTKGELKSAVNTLHSNGIQVYGDVVMNHKAGADYTENVTAVEVNPSNRYQETSGEYNIQAWTGFNFPGRGTTYSNWKWQWFHFDGTDWDQSRSLSRIFKFDGKAWDWEVSSENGNYDYLMYADYDYDHPDVVNEMKKWGVWYANEVGLDGYRLDAVKHIKFQFLKDWVDNARAATGKEMFTVGEYWQQDLGALNNYLAKVNYNQSLFDAPLHYNFYAASTGGGYYDMRNILNNTLVASNPTKAVTLVENHDTQPGQSLESTVQPWFKPLAYAFILTRSGGYPSVFYGDMYGTKGTTTREIPALKSKIEPLLKARKDYAYGTQRDYIDNPDVIGWTREGDSTKAKSGLATVITDGPGGSKRMYVGTSNAGEIWYDLTGNRTDKITIGSDGYATFPVNGGSVSVWVQQ

SEQ ID NO: 38902 - protein, 480 aa, Cytophaga sp.
NGTMMQYFEWYVPNDGQQWNRLRTDAPYLSSVGITAVWTPPAYKGTSQADVGYGPYDLYDLGEFNQKGTVRTKYGTKGELKSAVNTLHSNGIQVYGDVVMNHKAGADYTENVTAVEVNPSNRYQETSGEYNIQAWTGFNFPGRGTTYSNWKWQWFHFDGTDWDQFRSLSRIFKFDGKAWDWEVSSENGNYDYLMYADYDYDHPDVVNEMKKWGVWYANEVGLDGYRLDAVKHIKFQFLKDWVDNARAATGKEMFTVGEYWQNDLGALNNYLAKVNYNQSLFDAPLHYNFYAASTGGGYYDMRNILNNTLVASNPTKAVTLVENHDTQPGQSLESTVQPWFKPLAYAFILTRSGGYPSVFYGDMYGTKGTTTREIPALKSKIEPLLKARKDYAYGTQRDYIDNPDVIGWTREGDSTKAKSGLATVITDGPGGSKRMYVGTSNAGEIWYDLTGNRTDKITIGSDGYATFPVNGGSVSVWVQQ

SEQ ID NO: 38903 - protein, 480 aa, Cytophaga sp.
NGTMMQYFEWYVPNDGQQWNRLRTDAPYLSSVGITAVWTPPAYKGTSQADVGYGPYDLYDLGEFNQKGTVRTKYGTKGELKSAVNTLHSNGIQVYGDVVMNHKAGADYTENVTAVEVNPSNRYQETSGEYNIQAWTGFNFPGRGTTYSNWKWQWFYFDGTDWDQSRSLSRIFKFDGKAWDWEVSSENGNYDYLMYADYDYDHPDVVNEMKKWGVWYANEVGLDGYRLDAVKHIKFQFLKDWVDNARAATGKEMFTVGEYWQNDLGALNNYLAKVNYNQSLFDAPLHYNFYAASTGGGYYDMRNILNNTLVASNPTKAVTLVENHDTQPGQSLESTVQPWFKPLAYAFILTRSGGYPSVFYGDMYGTKGTTTREIPALKSKIEPLLKARKDYAYGTQRDYIDNPDVIGWTREGDSTKAKSGLATVITDGPGGSKRMYVGTSNAGEIWYDLTGNRTDKITIGSDGYATFPVNGGSVSVWVQQ

SEQ ID NO: 38904 - protein, 480 aa, Cytophaga sp.
NGTMMQYFEWYVPNDGQQWNRLRTDAPYLSSVGITAVWTPPAYKGTSQADVGYGAYDLYDLGEFNQKGTVRTKYGTKGELKSAVNTLHSNGIQVYGDVVMNHKAGADYTENVTAVEVNPSNRYQETSGEYNIQAWTGFNFPGRGTTYSNWKWQWFHFDGTDWDQSRSLSRIFKFDGKAWDWEVSSENGNYDYLMYADYDYDHPDVVNEMKKWGVWYANEVGLDGYRLDAVKHIKFQFLKDWVDNARAATGKEMFTVGEYWQNDLGALNNYLAKVNYNQSLFDAPLHYNFYAASTGGGYYDMRNILNNTLVASNPTKAVTLVENHDTQPGQSLESTVQPWFKPLAYAFILTRSGGYPSVFYGDMYGTKGTTTREIPALKSKIEPLLKARKDYAYGTQRDYIDNPDVIGWTREGDSTKAKSGLATVITDGPGGSKRMYVGTSNAGEIWYDLTGNRTDKITIGSDGYATFPVNGGSVSVWVQQ

SEQ ID NO: 38905 - protein, 480 aa, Cytophaga sp.
NGTMMQYFEWYVPNDGQQWNRLRTDAPYLSSVGITAVWTPPAYKGTSQADVGYGPYDLYDLGEFNQKGTVRTKYGTKGELKSAVNTLHSNGIQVYGDVVMNHKAGADYTENVTAVEVNPSNRYQETSGEYNIQAWTGFNFPGRGTTYSNWKWQWFHFDGTDTDQSRSLSRIFKFDGKAWDWEVSSENGNYDYLMYADYDYDHPDVVNEMKKWGVWYANEVGLDGYRLDAVKHIKFQFLKDWVDNARAATGKEMFTVGEYWQNDLGALNNYLAKVNYNQSLFDAPLHYNFYAASTGGGYYDMRNILNNTLVASNPTKAVTLVENHDTQPGQSLESTVQPWFKPLAYAFILTRSGGYPSVFYGDMYGTKGTTTREIPALKSKIEPLLKARKDYAYGTQRDYIDNPDVIGWTREGDSTKAKSGLATVITDGPGGSKRMYVGTSNAGEIWYDLTGNRTDKITIGSDGYATFPVNGGSVSVWVQQ

SEQ ID NO: 38906 - protein, 480 aa, Cytophaga sp.
NGTMMQYFEWYVPNDGQQWNRLRTDAPYLSSVGITAVWTPPAYKGTSQADVGYGPYDLYDLGEFNQKGTVRTKYGTKGELKSAVNTLHSNGIQVYGDVVMNHKAGADYTENVTAVEVNPSNRYQETSGEYNIQAWTGFNFPGRGTTYSNWKWQWFHFDGTDWDQSRSLSRIFKFDGKAWDWEVSSENGNYDYLMYADYDYDHPDVVNEMKKWGVWYANEVGLDGYRLDAVKHIKFQFLKDWVDNARAATGKEMFTVGEYWQNDLGALNNYLAKVNYNQSLFDAPLHYNFYAASTGGGYYDMRNILNNTLVASNPTKAVTLVENHDTQPGQSLESTVQPWFKPLAYAFILTRSGGYPSVFYGDMYGTKGTTTREIPALRSKIEPLLKARKDYAYGTQRDYIDNPDVIGWTREGDSTKAKSGLATVITDGPGGSKRMYVGTSNAGEIWYDLTGNRTDKITIGSDGYATFPVNGGSVSVWVQQ

SEQ ID NO: 38907 - protein, 480 aa, Cytophaga sp.
NGTMMQYFEWYVPNDGQQWNRLRTDAPYLSSVGITAVWTPPAYKGTSQADVGYGPYDLYDLGEFNQKGTVRTKYGTKGELKSAVNTLHSNGIQVYGDVVMNHKAGADYTENVTAVEVNPSNRYQETSGEYNIQAWTGFNFPGRGTTYSNWKWQWFHFDGTDWDQSRSLSRIFKFDGKAWDWEVSSENGNYDYLMYADYDYDHPDVVNEMKKWGVWYANEVGLDGYRLDAVKHIKFQFLKDWVDNARAATGKEMFTVGEYWQNDLGALNNYLAKVNYNQSLFDAPLHYNFYAASTGGGYYDMRNILNNTLVASNPTKAVTLVENHDTQPGQSLESTVQPWFKPLAYAFILTRSGGYPSVFYGDMYGTKGTTTREIPALKSKIEPLLKARKDYAYGTQRDYIDNPDVIGWTREGDSTKAKSGLATVITDGPGGSKRMYVGTSNAGEIWYDLTGNRTDKITIGWDGYATFPVNGGSVSVWVQQ

SEQ ID NO: 38908 - protein, 480 aa, Cytophaga sp.
NGTMMQYFEWYVPNDGQQWNRLRTDAPYLSSVGITAVWTPPAYKGTSQADVGYGPYDLYDLGEFNQKGTVRTKYGTKGELKSAVNTLHSNGIQVYGDVVMNHKAGADYTENVTAVEVNPSNRYQETSGEYNIQAWTGFNFPGRGTTYSNWKWQWFHFDGTDWDQSRSLSRIFKFDGKAWDWEVSSENGNYDYLMYADYDYDHPDVVNEMKKWGVWYANEVGLDGYRLDAVKHIKFQFLKDWVDNARAATGKEMFTVGEYWQNDLGALNNYLAKVNYNQSLFDAPLHYNFYAASTGGGYYDMRNILNNTLVASNPTKAVTLVENHDTQPGQSLESTVQPWFKPLAYAFILTRSGGYPSVFYGDMYGTKGTTTREIPALKSKIEPLLKARKDYAYGTQRDYIDNPDVIGWTREGDSTKAKSGLATVITDGPGGSKRMYVGTSNAGEIWYDLTGNRTDKITIGSDGYATFPVNGISVSVWVQQ

SEQ ID NO: 38909 - protein, 480 aa, Cytophaga sp.
NGTMMQYFEWYVPNDGQQWNRLRTDAPYLSSVGITAVWTPPAYKGTSQADVGYGPYDLYDLGEFNQKGTVRTKYGTKGELKSAVNTLHSNGIQVYGDVVMNHKAGADYTENVTAVEVNPSNRYQETSGEYNIQAWTGFNFPGRGTTYSNWKWQWFHFDGTDWDQSRSLSRIFKFDGKAWDWEVSSENGNYDYLMYADYDYDHPDVVNEMKKWGVWYANEVGLDGYRLDAVKHIKFQFLKDWVDNARAATGKEMFTVGEYWQNDLGALNNYLAKVNYNQSLFDAPLHYNFYAASTGGGYYDMRNILNNTLVASNPTKAVTLVENHDTQPGQSLESTVQPWFKPLAYAFILTRSGGYPSVFYGDMYGTKGTTTREIPALKSKIEPLLKARKDYAYGTQRDYIDNVDVIGWTREGDSTKAKSGLATVITDGPGGSKRMYVGTSNAGEIWYDLTGNRTDKITIGSDGYATFPVNGGSVSVWVQQ

SEQ ID NO: 38910 - protein, 480 aa, Cytophaga sp.
NGTMMQYFEWYVPNDGQQWNRLRTDAPYLSSVGITAVWTPPAYKGTSQADVGYGPYDLYDLGEFNQKGTVRTKYGTKGELKSAVNTLHSNGIQVYGDVVMNHKAGADYTENVTAVEVNPSNRYQETSGEYNIQAWTGFNFPGRGTTYSNWKWQWFHFDGTDWDQSRSLSRIFKFDGKAWDWEVSSENGNYDYLMYADYDYDHPDVVNEMKKWGVWYANEVGLDGYRLDAVKHIKFQFLKDWVDNARAATGKEMFTVGEYWQNDLGALNNYLAKVNYNQSLFDAPLHYNFYAASTGGGYYDMRNILNNTLVASNPTKAVTLVENHDTQPGQSLESTVQPWFKPLAYAFILTRSGGYPSVFYGDMYGTKGTTTREIPALKSKIEPLLKARKDYAYGTQRDYIDNPDVIGWTREGDSTKAKSGLATVITDGPGVSKRMYVGTSNAGEIWYDLTGNRTDKITIGSDGYATFPVNGGSVSVWVQQ

SEQ ID NO: 38911 - protein, 480 aa, Cytophaga sp.
NGTMMQYFEWYVPNDGQQWNRLRTDAPYLSSVGITAVWTPPAYKGTSQADVGYGPYDLYDLGEFNQKGTVRTKYGTKGELKSAVNTLHSNGIQVYGDVVMNHKAGADYTENVTAVEVNPSNRYQETSGEYNIQAWTGFNFPGRGTTYSNWKWQWFHFDGTDWDQSRSLSRIFKFDGKAWDWEVSSENQNYDYLMYADYDYDHPDVVNEMKKWGVWYANEVGLDGYRLDAVKHIKFQFLKDWVDNARAATGKEMFTVGEYWQNDLGALNNYLAKVNYNQSLFDAPLHYNFYAASTGGGYYDMRNILNNTLVASNPTKAVTLVENHDTQPGQSLESTVQPWFKPLAYAFILTRSGGYPSVFYGDMYGTKGTTTREIPALKSKIEPLLKARKDYAYGTQRDYIDNPDVIGWTREGDSTKAKSGLATVITDGPGGSKRMYVGTSNAGEIWYDLTGNRTDKITIGSDGYATFPVNGGSVSVWVQQ

SEQ ID NO: 38912 - protein, 480 aa, Cytophaga sp.
NGTMMQYFEWYVPNDGQQWNRLRTDAPYLSSVGITAVWTPPAYKGTSQADVGYGPYDLYDLGEFNQKGTVRTKYGTKGELKSAVNTLHSNGIQVYGDVVMNHKAGADYTENVTAVEVNPSNRYQETSGEYNIQAWTGFNFPGRGTTYSNWKWQWFHFDGTDWDQSRSLSRIFKFDGKAWDWEVSSWNGNYDYLMYADYDYDHPDVVNEMKKWGVWYANEVGLDGYRLDAVKHIKFQFLKDWVDNARAATGKEMFTVGEYWQNDLGALNNYLAKVNYNQSLFDAPLHYNFYAASTGGGYYDMRNILNNTLVASNPTKAVTLVENHDTQPGQSLESTVQPWFKPLAYAFILTRSGGYPSVFYGDMYGTKGTTTREIPALKSKIEPLLKARKDYAYGTQRDYIDNPDVIGWTREGDSTKAKSGLATVITDGPGGSKRMYVGTSNAGEIWYDLTGNRTDKITIGSDGYATFPVNGGSVSVWVQQ

SEQ ID NO: 38913 - protein, 480 aa, Cytophaga sp.
NGTMMQYFEWYVPNDGQQWNRLRTDAPYLSSVGITAVWTPPAYKGTSQADVGYGPYDLYDLGEFNQKGTVRTKYGTKGELKSAVNTLHSNGIQVYGDVVMNHKAGADYTENVTAVEVNPSNRYQETSGEYNIQAWTGFNFDGRGTTYSNWKWQWFHFDGTDWDQSRSLSRIFKFDGKAWDWEVSSENGNYDYLMYADYDYDHPDVVNEMKKWGVWYANEVGLDGYRLDAVKHIKFQFLKDWVDNARAATGKEMFTVGEYWQNDLGALNNYLAKVNYNQSLFDAPLHYNFYAASTGGGYYDMRNILNNTLVASNPTKAVTLVENHDTQPGQSLESTVQPWFKPLAYAFILTRSGGYPSVFYGDMYGTKGTTTREIPALKSKIEPLLKARKDYAYGTQRDYIDNPDVIGWTREGDSTKAKSGLATVITDGPGGSKRMYVGTSNAGEIWYDLTGNRTDKITIGSDGYATFPVNGGSVSVWVQQ

SEQ ID NO: 38914 - protein, 480 aa, Cytophaga sp.
NGTMMQYFEWYVPNDGQQWNRLRTDAPYLSSVGITAVWTPPAYKGTSQADVGYGPYDLYDLGEFNQKGTVRTKYGTKGELKSAVNTLHSNGIQVYGDVVMNHKAGADYTENVTAVEVNPSNRYQETSGEENIQAWTGFNFPGRGTTYSNWKWQWFHFDGTDWDQSRSLSRIFKFDGKAWDWEVSSENGNYDYLMYADYDYDHPDVVNEMKKWGVWYANEVGLDGYRLDAVKHIKFQFLKDWVDNARAATGKEMFTVGEYWQNDLGALNNYLAKVNYNQSLFDAPLHYNFYAASTGGGYYDMRNILNNTLVASNPTKAVTLVENHDTQPGQSLESTVQPWFKPLAYAFILTRSGGYPSVFYGDMYGTKGTTTREIPALKSKIEPLLKARKDYAYGTQRDYIDNPDVIGWTREGDSTKAKSGLATVITDGPGGSKRMYVGTSNAGEIWYDLTGNRTDKITIGSDGYATFPVNGGSVSVWVQQ

SEQ ID NO: 38915 - protein, 480 aa, Cytophaga sp.
NGTMMQYFEWYVPNDGQQWNRLRTDAPYLSSVGITAVWTPPAYKGTSQADVGYGPYDLYDLGEFNQKGTVRTKYGTKGELKSAVNTLHSNGIQVYGDVVMNHKAGADYTENVTAVEVNPSNRYQETSGEYNIQAWTGFNFPGRGTTYSNWKWQWFHFDGTDWDQSRSLSRIFKFDGKAWDWEVSSENGNYDYLMYADYDYDHYDVVNEMKKWGVWYANEVGLDGYRLDAVKHIKFQFLKDWVDNARAATGKEMFTVGEYWQNDLGALNNYLAKVNYNQSLFDAPLHYNFYAASTGGGYYDMRNILNNTLVASNPTKAVTLVENHDTQPGQSLESTVQPWFKPLAYAFILTRSGGYPSVFYGDMYGTKGTTTREIPALKSKIEPLLKARKDYAYGTQRDYIDNPDVIGWTREGDSTKAKSGLATVITDGPGGSKRMYVGTSNAGEIWYDLTGNRTDKITIGSDGYATFPVNGGSVSVWVQQ

SEQ ID NO: 38916 - protein, 480 aa, Cytophaga sp.
NGTMMQYFEWYVPNDGQQWNRLRTDAPYLSSVGITAVWTPPAYKGTSQADVGYGPYDLYDLGEFNQKGTVRTKYGTKGELKSAVNTLHSNGIQVYGDVVMNHKAGADYTENVTAVEVNPSNRYQETSGEYNIQAWTGFNFPGRGTTYVNWKWQWFHFDGTDWDQSRSLSRIFKFDGKAWDWEVSSENGNYDYLMYADYDYDHPDVVNEMKKWGVWYANEVGLDGYRLDAVKHIKFQFLKDWVDNARAATGKEMFTVGEYWQNDLGALNNYLAKVNYNQSLFDAPLHYNFYAASTGGGYYDMRNILNNTLVASNPTKAVTLVENHDTQPGQSLESTVQPWFKPLAYAFILTRSGGYPSVFYGDMYGTKGTTTREIPALKSKIEPLLKARKDYAYGTQRDYIDNPDVIGWTREGDSTKAKSGLATVITDGPGGSKRMYVGTSNAGEIWYDLTGNRTDKITIGSDGYATFPVNGGSVSVWVQQ

SEQ ID NO: 38917 - protein, 480 aa, Cytophaga sp.
NGTMMQYFEWYVPNDGQQWNRLRTDAPYLSSVGITAVWTPPAYKGTSQADVGYGPYDLYDLGEFNQKGTVRTKYGTKGELKSAVNTLHSNGIQVYGDVVMNHKAGADYTENVTAVEVNPSNRYQETSGEYNIQAWTGFNFPGRGTTYSNWKWQWFHFDGTDWDQSRSLSRIFKLDGKAWDWEVSSENGNYDYLMYADYDYDHPDVVNEMKKWGVWYANEVGLDGYRLDAVKHIKFQFLKDWVDNARAATGKEMFTVGEYWQNDLGALNNYLAKVNYNQSLFDAPLHYNFYAASTGGGYYDMRNILNNTLVASNPTKAVTLVENHDTQPGQSLESTVQPWFKPLAYAFILTRSGGYPSVFYGDMYGTKGTTTREIPALKSKIEPLLKARKDYAYGTQRDYIDNPDVIGWTREGDSTKAKSGLATVITDGPGGSKRMYVGTSNAGEIWYDLTGNRTDKITIGSDGYATFPVNGGSVSVWVQQ

SEQ ID NO: 38918 - protein, 480 aa, Cytophaga sp.
NGTMMQYFEWYVPNDGQQWNRLRTDAPYLSSVGITAVWTPPAYKGTSQADVGYGPYDLYDLGEFNQKGTVRTKYGTKGELKSAVNTLHSNGIQVYGDVVMNHKAGADYTENVTAVEVNPSNRYQETSGEYNIQAWTGFNFPGRGTTYSNWKWQWFHFDGTDWDQSRSLSRIFKFDGKAWDWEVSSENGNYDYLMYADYDYDHPDVVNEMKKWGVWYANEVGLDGYRLDAVKHIKFQFLKDWVDNARAATGKEMFTVGEYWQNDLGALNNYLAKVNYNQSLFDAPLHYNFYAASTGGGYYDMRNILNNTLVASNPTKAVTLVENHDTQPGQSLESTVQPWFKPLRYAFILTRSGGYPSVFYGDMYGTKGTTTREIPALKSKIEPLLKARKDYAYGTQRDYIDNPDVIGWTREGDSTKAKSGLATVITDGPGGSKRMYVGTSNAGEIWYDLTGNRTDKITIGSDGYATFPVNGGSVSVWVQQ

SEQ ID NO: 38919 - protein, 480 aa, Cytophaga sp.
NGTMMQYFEWYVPNDGQQWNRLRTDAPYLSSVGITAVWTPPAYKGTSQADVGYGPYDLYDLGEFNQKGTVRTKYGTKGELKSAVNTLHSNGIQVYGDVVMNHKAGADYTENVTAVEVNPSNRYQETSGEYNIQAWTGFNFPGRGTTYSNWKWQWFHFDGTDWDQSRSLSRIFKFDGKAWDWEVSSENGNYDYLMYADYDYDHPDVVNEMKKWGVWYANEVGLDGYRLDAVKHIKFQFLKDWVDNARALTGKEMFTVGEYWQNDLGALNNYLAKVNYNQSLFDAPLHYNFYAASTGGGYYDMRNILNNTLVASNPTKAVTLVENHDTQPGQSLESTVQPWFKPLAYAFILTRSGGYPSVFYGDMYGTKGTTTREIPALKSKIEPLLKARKDYAYGTQRDYIDNPDVIGWTREGDSTKAKSGLATVITDGPGGSKRMYVGTSNAGEIWYDLTGNRTDKITIGSDGYATFPVNGGSVSVWVQQ

SEQ ID NO: 38920 - protein, 480 aa, Cytophaga sp.
NGTMMQYFEWYVPNDGQQWNRLRTDAPYLSSVGITAVWTPPAYKGTSQADVGYGPYDLYDLGEFNQKGTVRTKYGTKGELKSAVNTLHSNGIQVYGDVVMNHKAGADYTENVTAVEVNPSNRYQETSGEYNIQAWTGFNFPGRGTTYSNWKWQWFHFDGTDWDQSRSLSRIFKFDGKAWDWEVSSENGNYDYLMYADYDYDHPDVVNEMKKWGVWYANEVGLDGYRLDAVKHIKFQFLKDWVDNARAATGKEMFTVGEYWQNDLGALNNYLAKVNYNQSLFDAPLHYNFYAASTGGGYYDMRNILNNTLVASNPTKAVTLVENHDTQPGQSLVSTVQPWFKPLAYAFILTRSGGYPSVFYGDMYGTKGTTTREIPALKSKIEPLLKARKDYAYGTQRDYIDNPDVIGWTREGDSTKAKSGLATVITDGPGGSKRMYVGTSNAGEIWYDLTGNRTDKITIGSDGYATFPVNGGSVSVWVQQ

SEQ ID NO: 38921 - protein, 480 aa, Cytophaga sp.
NGTMMQYFEWYVPNDGQQWNRLRTDAPYLSSVGITAVWTPPAYKGTSQADVGYGPYDLYDLGEFNQKGTVRTKYGTKGELKSAVNTLHSNGIMVYGDVVMNHKAGADYTENVTAVEVNPSNRYQETSGEYNIQAWTGFNFPGRGTTYSNWKWQWFHFDGTDWDQSRSLSRIFKFDGKAWDWEVSSENGNYDYLMYADYDYDHPDVVNEMKKWGVWYANEVGLDGYRLDAVKHIKFQFLKDWVDNARAATGKEMFTVGEYWQNDLGALNNYLAKVNYNQSLFDAPLHYNFYAASTGGGYYDMRNILNNTLVASNPTKAVTLVENHDTQPGQSLESTVQPWFKPLAYAFILTRSGGYPSVFYGDMYGTKGTTTREIPALKSKIEPLLKARKDYAYGTQRDYIDNPDVIGWTREGDSTKAKSGLATVITDGPGGSKRMYVGTSNAGEIWYDLTGNRTDKITIGSDGYATFPVNGGSVSVWVQQ

SEQ ID NO: 38922 - protein, 480 aa, Cytophaga sp.
NGTMMQYFEWYVPNDGQQWNRLRTDAPYLSSVGITAVWTPPAYKGTSQADVGYGPYDLYDLGEFNQKGTVRTKYGTKGELKSAVNTLHSNGIQVYGDVVMNHKAGADYTENVTAVEVNPSNRYQETSGEYNIQAWTGFNFPGRGTTYSNWKWQWFHFDGTDWDQSRSLSRIFKFDGKAWDWEVSSENGNYDYLMYADYDYDHPDVVNEMKKWGVWYANEVGLDGYRLDAVKHIKFQFLKDWVDNARAATGKEMFTVGEYWQNDLGALNNYLAKVNYNQSLFDAPLHYNFYAASTGGGYYDMRNILNNTLVASNPTKAVTLVENHDTQPGQSLESTVQPWFKPLAYAFILTRSGGYPSVFYGDMYGTKGTTTREIPALKSKIEPLLKARKDYAYGTQRDYIDNPDVIGWTREGDSTKAKSGLATVITDGPGGSKRMYVGTSNAGEIWYDLTGNRTDKITIGSDGYATFPVPGGSVSVWVQQ

SEQ ID NO: 38923 - protein, 480 aa, Cytophaga sp.
NGTMMQYFEWYVPNDGQQWNRLRTDAPYLSSVGITAVWTPPAYKGTSQADVGYGPYDLYDLGEFNQKGTVRTKYGTKGELKSAVNTLHSNGIQVYGDVVMNHKAGADYTENVTAVEVNESNRYQETSGEYNIQAWTGFNFPGRGTTYSNWKWQWFHFDGTDWDQSRSLSRIFKFDGKAWDWEVSSENGNYDYLMYADYDYDHPDVVNEMKKWGVWYANEVGLDGYRLDAVKHIKFQFLKDWVDNARAATGKEMFTVGEYWQNDLGALNNYLAKVNYNQSLFDAPLHYNFYAASTGGGYYDMRNILNNTLVASNPTKAVTLVENHDTQPGQSLESTVQPWFKPLAYAFILTRSGGYPSVFYGDMYGTKGTTTREIPALKSKIEPLLKARKDYAYGTQRDYIDNPDVIGWTREGDSTKAKSGLATVITDGPGGSKRMYVGTSNAGEIWYDLTGNRTDKITIGSDGYATFPVNGGSVSVWVQQ

SEQ ID NO: 38924 - protein, 480 aa, Cytophaga sp.
NGTMMQYFEWYVPNDGQQWNRLRTDAPYLSSVGITAVWTPPAYKGTSQADVGYGPYDLYDLGEFNQKRTVRTKYGTKGELKSAVNTLHSNGIQVYGDVVMNHKAGADYTENVTAVEVNPSNRYQETSGEYNIQAWTGFNFPGRGTTYSNWKWQWFHFDGTDWDQSRSLSRIFKFDGKAWDWEVSSENGNYDYLMYADYDYDHPDVVNEMKKWGVWYANEVGLDGYRLDAVKHIKFQFLKDWVDNARAATGKEMFTVGEYWQNDLGALNNYLAKVNYNQSLFDAPLHYNFYAASTGGGYYDMRNILNNTLVASNPTKAVTLVENHDTQPGQSLESTVQPWFKPLAYAFILTRSGGYPSVFYGDMYGTKGTTTREIPALKSKIEPLLKARKDYAYGTQRDYIDNPDVIGWTREGDSTKAKSGLATVITDGPGGSKRMYVGTSNAGEIWYDLTGNRTDKITIGSDGYATFPVNGGSVSVWVQQ

SEQ ID NO: 38925 - protein, 480 aa, Cytophaga sp.
NGTMMQYFEWYVPNDGQQWNRLRTDAPYLSSVGITAVWTPPAYKGTSQADVGYGPYDLYDLGEFNQKGTVRTKYGTKGELKSAVNTLHSNGIQVYGDVVMNHKAGADYTENVTAVEVNPSNRYQETSGEYNIQAWTGFNFPGRGTTYSNWKWQWFHFDGTDWDQSRSLSRIFKFDGKAWDWEVSSENGNYDYLMYADYDYDHPDVVNEMKKWGVWYANEVGLDGYRLDAVKHIKKQFLKDWVDNARAATGKEMFTVGEYWQNDLGALNNYLAKVNYNQSLFDAPLHYNFYAASTGGGYYDMRNILNNTLVASNPTKAVTLVENHDTQPGQSLESTVQPWFKPLAYAFILTRSGGYPSVFYGDMYGTKGTTTREIPALKSKIEPLLKARKDYAYGTQRDYIDNPDVIGWTREGDSTKAKSGLATVITDGPGGSKRMYVGTSNAGEIWYDLTGNRTDKITIGSDGYATFPVNGGSVSVWVQQ

SEQ ID NO: 38926 - protein, 480 aa, Cytophaga sp.
NGTMMQYFEWYVPNDGQQWNRLRTDAPYLSSVGITAVWTPPAYKGTSQADVGYGPYDLYDLGEFNQKGTVRTKYGTKGELKSAVNTLHSNGIQVYGDVVMNHKAGADYTENVTAVEVNPSNRYQETSGEYNIQAWTGFNFPGRGTTYSNWKWQWFHFDGTDWDQSRSLSRIFKFDGKAWDWEVSSENGNYDYLMYADYDYDHPDVVNEMKKWGVWYANEVGLDGYRLDAVKHIKFQFLKDWVDNARAATGKEMFTVGEYWQNDLGALNNYLAKVNYNQSLFDAPLHYNFYAASTGGGYYDMRNILNNTLVASNPTKAVTLVENHDTQPGQSLESTVQPWFKPLAYAFILTRSGGYPSVFYGDMYGTKGTTTREIPALKSKIEPLLKARKDYAYGTQRDYIDNPDVIGWTREGDSTKAKSGLATVITDGPGGSKRMYVGTSNAGEIWYDLTGNRTDKITIGSDGYATFPVNGVSVSVWVQQ

SEQ ID NO: 38927 - protein, 480 aa, Cytophaga sp.
NGTMMQYFEWYVPNDGQQWNRLRTDAPYLSSVGITAVWTPPAYKGTSQADVGYGPYDLYDLGEFNQKGTVRTKYGTQGELKSAVNTLHSNGIQVYGDVVMNHKAGADYTENVTAVEVNPSNRYQETSGEYNIQAWTGFNFPGRGTTYSNWKWQWFHFDGTDWDQSRSLSRIFKFDGKAWDWEVSSENGNYDYLMYADYDYDHPDVVNEMKKWGVWYANEVGLDGYRLDAVKHIKFQFLKDWVDNARAATGKEMFTVGEYWQNDLGALNNYLAKVNYNQSLFDAPLHYNFYAASTGGGYYDMRNILNNTLVASNPTKAVTLVENHDTQPGQSLESTVQPWFKPLAYAFILTRSGGYPSVFYGDMYGTKGTTTREIPALKSKIEPLLKARKDYAYGTQRDYIDNPDVIGWTREGDSTKAKSGLATVITDGPGGSKRMYVGTSNAGEIWYDLTGNRTDKITIGSDGYATFPVNGGSVSVWVQQ

SEQ ID NO: 38928 - protein, 480 aa, Cytophaga sp.
NGTMMQYFEWYVPNDGQQWNRLRTDAPYLSSVGITAVWTPPAYKGTSQADVGYGPYDLYDLGEFNQKSTVRTKYGTKGELKSAVNTLHSNGIQVYGDVVMNHKAGADYTENVTAVEVNPSNRYQETSGEYNIQAWTGFNFPGRGTTYSNWKWQWFHFDGTDWDQSRSLSRIFKFDGKAWDWEVSSENGNYDYLMYADYDYDHPDVVNEMKKWGVWYANEVGLDGYRLDAVKHIKFQFLKDWVDNARAATGKEMFTVGEYWQNDLGALNNYLAKVNYNQSLFDAPLHYNFYAASTGGGYYDMRNILNNTLVASNPTKAVTLVENHDTQPGQSLESTVQPWFKPLAYAFILTRSGGYPSVFYGDMYGTKGTTTREIPALKSKIEPLLKARKDYAYGTQRDYIDNPDVIGWTREGDSTKAKSGLATVITDGPGGSKRMYVGTSNAGEIWYDLTGNRTDKITIGSDGYATFPVNGGSVSVWVQQ

SEQ ID NO: 38929 - protein, 480 aa, Cytophaga sp.
NGTMMQYFEWYVPNDGQQWNRLRTDAPYLSSVGITAVWTPPAYKGTSQADVGYGPYDLYDLGEFNQKGTVRTKYGTKGELKSAVNTLHSNGIQVYGDVVMNHKAGADYTENVRAVEVNPSNRYQETSGEYNIQAWTGFNFPGRGTTYSNWKWQWFHFDGTDWDQSRSLSRIFKFDGKAWDWEVSSENGNYDYLMYADYDYDHPDVVNEMKKWGVWYANEVGLDGYRLDAVKHIKFQFLKDWVDNARAATGKEMFTVGEYWQNDLGALNNYLAKVNYNQSLFDAPLHYNFYAASTGGGYYDMRNILNNTLVASNPTKAVTLVENHDTQPGQSLESTVQPWFKPLAYAFILTRSGGYPSVFYGDMYGTKGTTTREIPALKSKIEPLLKARKDYAYGTQRDYIDNPDVIGWTREGDSTKAKSGLATVITDGPGGSKRMYVGTSNAGEIWYDLTGNRTDKITIGSDGYATFPVNGGSVSVWVQQ

SEQ ID NO: 38930 - protein, 480 aa, Cytophaga sp.
NGTMMQYFEWYVPNDGQQWNRLRTDAPYLSSVGITAVWTPPAYKGTSQADVGYGPYDLYDLGEFNQKGTVRTKYGTKGELKSAVNTLHSNGIKVYGDVVMNHKAGADYTENVTAVEVNPSNRYQETSGEYNIQAWTGFNFPGRGTTYSNWKWQWFHFDGTDWDQSRSLSRIFKFDGKAWDWEVSSENGNYDYLMYADYDYDHPDVVNEMKKWGVWYANEVGLDGYRLDAVKHIKFQFLKDWVDNARAATGKEMFTVGEYWQNDLGALNNYLAKVNYNQSLFDAPLHYNFYAASTGGGYYDMRNILNNTLVASNPTKAVTLVENHDTQPGQSLESTVQPWFKPLAYAFILTRSGGYPSVFYGDMYGTKGTTTREIPALKSKIEPLLKARKDYAYGTQRDYIDNPDVIGWTREGDSTKAKSGLATVITDGPGGSKRMYVGTSNAGEIWYDLTGNRTDKITIGSDGYATFPVNGGSVSVWVQQ

SEQ ID NO: 38931 - protein, 480 aa, Cytophaga sp.
NGTMMQYFEWYVPNDGQQWNRLRTDAPYLSSVGITAVWTPPAYKGTSQADVGYGPYDLYDLGEFNQKGTVRTKYGTKGELKSAVNTLHSNGIQVYGDVVMNHKAGADYTENVTAVEVNPSNRYQETGGEYNIQAWTGFNFPGRGTTYSNWKWQWFHFDGTDWDQSRSLSRIFKFDGKAWDWEVSSENGNYDYLMYADYDYDHPDVVNEMKKWGVWYANEVGLDGYRLDAVKHIKFQFLKDWVDNARAATGKEMFTVGEYWQNDLGALNNYLAKVNYNQSLFDAPLHYNFYAASTGGGYYDMRNILNNTLVASNPTKAVTLVENHDTQPGQSLESTVQPWFKPLAYAFILTRSGGYPSVFYGDMYGTKGTTTREIPALKSKIEPLLKARKDYAYGTQRDYIDNPDVIGWTREGDSTKAKSGLATVITDGPGGSKRMYVGTSNAGEIWYDLTGNRTDKITIGSDGYATFPVNGGSVSVWVQQ

SEQ ID NO: 38932 - protein, 480 aa, Cytophaga sp.
NGTMMQYFEWYVPNDGQQWNRLRTDAPYLSSVGITAVWTPPAYKGTSQADVGYGPYDLYDLGEFNQKGTVRTKYGTAGELKSAVNTLHSNGIQVYGDVVMNHKAGADYTENVTAVEVNPSNRYQETSGEYNIQAWTGFNFPGRGTTYSNWKWQWFHFDGTDWDQSRSLSRIFKFDGKAWDWEVSSENGNYDYLMYADYDYDHPDVVNEMKKWGVWYANEVGLDGYRLDAVKHIKFQFLKDWVDNARAATGKEMFTVGEYWQNDLGALNNYLAKVNYNQSLFDAPLHYNFYAASTGGGYYDMRNILNNTLVASNPTKAVTLVENHDTQPGQSLESTVQPWFKPLAYAFILTRSGGYPSVFYGDMYGTKGTTTREIPALKSKIEPLLKARKDYAYGTQRDYIDNPDVIGWTREGDSTKAKSGLATVITDGPGGSKRMYVGTSNAGEIWYDLTGNRTDKITIGSDGYATFPVNGGSVSVWVQQ

SEQ ID NO: 38933 - protein, 480 aa, Cytophaga sp.
NGTMMQYFEWYVPNDGQQWNRLRTDAPYLSSVGITAVWTPPAYKGTSQADVGYGPYDLYDLGEFNQKGTVRTKYGTKGELKSAVNTLHSNGIQVYGDVVMNHKAGADYTENVTAVEVNPSNRYQETSGEYNIQAWTGFNFPGRGTTYSNWKWQWFHFDGTDWDQSRSLSRIFKFDGKAWDWEVSSENGNYDYLMYADYDYDHPDVVNEMKKWGVWYANEVGLDGYRLDAVKHIKFQFLKDWVDNARAATGKEMFTVGEYWQNDLGALNNYLAKVNYNQSLFDAPLHYNFYAASTGGGYYDMRNILNNTLVASNPTKAVTLVENHDTQPGQSLESTVQPWFKPLAYAFILTRSGGYPSVFYGDMYGTKGTTTREIPALKSKIEPLLKARKDYAYGTQRDYIDNPDVIGWTREGDSTKAKSGLATVITDGPGGSKRMYVGTSNAGEIWYDLTGNRTDKITIGKDGYATFPVNGGSVSVWVQQ

SEQ ID NO: 38934 - protein, 480 aa, Cytophaga sp.
NGTMMQYFEWYVPNDGQQWNRLRTDAPYLSSVGITAVWTPPAYKGTSQADVGYGPYDLYDLGEFNQKGTVRTKYGTKGELKSAVNTLHSNGIQVYGDVVMNHKAGADYTENVTAVEVNPSNRYQETSGEYNIQAWTGFNFPGRGTTYSNWKWQWFHFDGTDWDQSRSLSRIFKFDGKAWDWEVSSENGNYDYLMYADYDYDHPDVVNEMKKWGVWYANEVGLDGYRLDAVKHIKFQFLKDWVDNARAATGKEMFTVGEYWQNDLGALNNYLAKVNYNQSLFDAPLHYNFYAASTGGGYYDMRNILNNTLVASNPTKAVTLVENHDTQPGQSLESTVQPWFKPLAYAFILTRSGGYPSVFYGDMYGTKGTTTREIPALKSKIEPLLKARKDYAYGTQRDYIDNPDVIGWTREGDSTKAKSGLATVITDGRGGSKRMYVGTSNAGEIWYDLTGNRTDKITIGSDGYATFPVNGGSVSVWVQQ

SEQ ID NO: 38935 - protein, 480 aa, Cytophaga sp.
NGTMMQYFEWYVPNDGQQWNRLRTDAPYLSSVGITAVWTPPAYKGTSQADVGYGPYDLYDLGEFNQKGTVRTKYGTKGELKSAVNTLHSNGIQVYGDVVMNHKAGADYTENVTAVEVNPSNRYQETSGEYNIQAWTGFNFPGRCTTYSNWKWQWFHFDGTDWDQSRSLSRIFKFDGKAWDWEVSSENGNYDYLMYADYDYDHPDVVNEMKKWGVWYANEVGLDGYRLDAVKHIKFQFLKDWVDNARAATGKEMFTVGEYWQNDLGALNNYLAKVNYNQSLFDAPLHYNFYAASTGGGYYDMRNILNNTLVASNPTKAVTLVENHDTQPGQSLESTVQPWFKPLAYAFILTRSGGYPSVFYGDMYGTKGTTTREIPALKSKIEPLLKARKDYAYGTQRDYIDNPDVIGWTREGDSTKAKSGLATVITDGPGGSKRMYVGTSNAGEIWYDLTGNRTDKITIGSDGYATFPVNGGSVSVWVQQ

SEQ ID NO: 38936 - protein, 480 aa, Cytophaga sp.
NGTMMQYFEWYVPNDGQQWNRLRTDAPYLSSVGITAVWTPPAYKGTSQADVGYGPYDLYDLGEFNQKGTVRTKYGTKGELKSAVNTLHSNGIQVYGDVVMNHKAGADYTENVTAVEVNPSNRYQETSGEYNIQAWTGFNFPGRGTTYSNWKWQWFHFDGTDWDQSRSLSRIFKFDGKAWDWEVSSENGNYDYLMYADYDYDHPDVVNEMKKWGVWYANEVGLDGYRLDAVKHIKFQFLKDWVDNARAATGKEMFTVGEYWQNDLGALNNYLAKVNYNQSLFDAPLHYNFYAASTGGGYYDMRNILNNTLVASNPTKAVTLVENHDTQPGQSLESTVQPWFKPLAYAFILTRSGGYPSVFYGDMYGTKGTTTREIPALKSKIEPLLKARKDYAYGTQRDYIDNPDVIGWTREGDNTKAKSGLATVITDGPGGSKRMYVGTSNAGEIWYDLTGNRTDKITIGSDGYATFPVNGGSVSVWVQQ

SEQ ID NO: 38937 - protein, 480 aa, Cytophaga sp.
NGTMMQYFEWYVPNDGQQWNRLRTDAPYLSSVGITAVWTPPAYKGTSQADVGYGPYDLYDLGEFNQKGTVRTKYGTKGELKSAVNTLHSNGIQVYGDVVMNHKAGADYTENVTAVEANPSNRYQETSGEYNIQAWTGFNFPGRGTTYSNWKWQWFHFDGTDWDQSRSLSRIFKFDGKAWDWEVSSENGNYDYLMYADYDYDHPDVVNEMKKWGVWYANEVGLDGYRLDAVKHIKFQFLKDWVDNARAATGKEMFTVGEYWQNDLGALNNYLAKVNYNQSLFDAPLHYNFYAASTGGGYYDMRNILNNTLVASNPTKAVTLVENHDTQPGQSLESTVQPWFKPLAYAFILTRSGGYPSVFYGDMYGTKGTTTREIPALKSKIEPLLKARKDYAYGTQRDYIDNPDVIGWTREGDSTKAKSGLATVITDGPGGSKRMYVGTSNAGEIWYDLTGNRTDKITIGSDGYATFPVNGGSVSVWVQQ

SEQ ID NO: 38938 - protein, 480 aa, Cytophaga sp.
NGTMMQYFEWYVPNDGQQWNRLRTDAPYLSSVGITAVWTPPAYKGTSQADVGYGPYDLYDLGEFNQKGTVRTKYGTKGELKSAVNTLHSNGIQVYGDVVMNHKAGADYTENVTAVEVNPSNRYQETSGEYNIQAWTGFNFPGRGTTYSNWKWQWFHFDGTDWDQSRSLSRIFKFDGKAWDWEVSSENGNYDYLMYADYDYDHPDVVNEMKKWGVWYANEVGLDGYRLDAVKHIKFQFLKDWVDNARAATGKEMFTVGEYWQNDLGALNNYLAKVNYNQSLFDAPLHYNFYAASTGGGYYDMRNILNNTLVASNPTKAVTLVENHDTQPGQSLESTVQPWFKPLAYAFILTRSGGYPSVFYGDMYGTKGTTTREIPALKSKIEPLLKARKDYAYGTQRDYIDNADVIGWTREGDSTKAKSGLATVITDGPGGSKRMYVGTSNAGEIWYDLTGNRTDKITIGSDGYATFPVNGGSVSVWVQQ

SEQ ID NO: 38939 - protein, 480 aa, Cytophaga sp.
NGTMMQYFEWYVPNDGQQWNRLRTDAPYLSSVGITAVWTPPAYKGTSQADVGYGPYDLYDLGEFNQKGTVRTKYGTKGELKSAVNTLHSNGIQVYGDVVMNHKAGADYTENVTAVEVNPSNRYQETSGEYNIQAWTGFNFPGRGTTYSNWKWQWFHFDGTDWDQSRSLSRIFKFDGKAWDWEVSSENGNYDYLMYADYDYDHPDVVNEMKKWGVWYANEVGLDGYRLDAVKHIKFQFLKDWVDNARAATGKEMFTVGEYWQNDLGALNNYLAKVNYNQSLFDAPLHYNFYAASTGGGYYDMRNILNNTLVASNPTKAVTLVENHDTQPGQSLESTVQPWFKPLAYAFILTRSGGYPSVFYGDMYGTKGTTTREIPALKSKIEPLLKARKDYAYGTQRDYIDNPDVIGWTREGDSTKAKSGLATVITDGPGGSKRMYVGTSNAGEIWYDLTGNRTDKITIGSDGYATFPVNGGSESVWVQQ

SEQ ID NO: 38940 - protein, 480 aa, Cytophaga sp.
NGTMMQYFEWYVPNDGQQWNRLRTDAPYLSSVGITAVWTPPAYKGTSQADVGYGPYDLYDLGEFNQKGTVRTKYGTKGELKSAVNTLHSNGIQVYGDVVMNHKAGADYTENVTAVEVNPSNRYQETSGQYNIQAWTGFNFPGRGTTYSNWKWQWFHFDGTDWDQSRSLSRIFKFDGKAWDWEVSSENGNYDYLMYADYDYDHPDVVNEMKKWGVWYANEVGLDGYRLDAVKHIKFQFLKDWVDNARAATGKEMFTVGEYWQNDLGALNNYLAKVNYNQSLFDAPLHYNFYAASTGGGYYDMRNILNNTLVASNPTKAVTLVENHDTQPGQSLESTVQPWFKPLAYAFILTRSGGYPSVFYGDMYGTKGTTTREIPALKSKIEPLLKARKDYAYGTQRDYIDNPDVIGWTREGDSTKAKSGLATVITDGPGGSKRMYVGTSNAGEIWYDLTGNRTDKITIGSDGYATFPVNGGSVSVWVQQ

SEQ ID NO: 38941 - protein, 480 aa, Cytophaga sp.
NGTMMQYFEWYVPNDGQQWNRLRTDAPYLSSVGITAVWTPPAYKGTSQADVGYGPYDLYDLGEFNQKGTVRTKYGTKGELKSAVNTLHSNGIQVYGDVVMNHKAGADYTENVTAVEVNPSNRYQETSGEYNIQAWTGFNFPGRGTTYSNWKWQWFHFDGTDWDQSRSLSRIFKFDGKAWDWEVSSENGNYDYLMYADYDYDHPDVVNEMKKWGVWYANEVGLDGYRLDAVKHIKFQFLKDWVDNARAATGKEMFTVGEYWQNDLGALNNYLAKVNYNQSLFDAPLHYNFYAASTGGGYYDMRNILNNTLVASNPTKAVTLVENHDTQPGQSLESTVQPWFKPLAYAFILTRSGGYPSVFYGDMYGTKGTTTREIPALKSKIEPLLKARKDYAYGTQRDYIDNPDVIGWTREGDSTKAKSGLATVITDGPGGSKRMYVGTSNAGEIWYDLTGNRTDKITIGSDGYATFPVNGGSVSVWAQQ

SEQ ID NO: 38942 - protein, 480 aa, Cytophaga sp.
NGTMMQYFEWYVPNDGQQWNRLRTDAPYLSSVGITAVWTPPAYKGTSQADVGYGPYDLYDLGEFNQKGTVRTKYGTKGELKSAVNTLHSNGIQVYGDVVMNHKAGADYTENVTAVEVNPSNRYQETSGEYNIQAWTGFNFPGRGTTYSNWKWQWFHFDGTDWDQSRSLSRIFKFDGKAWDWEVSSENGNYDYLMYADYDYDHPDVVNEMKKWGVWYANEVGLDGYRLDAVKHIKFQFLKDWVDNARAATGKEMFTVGEYWQNDLGALNNYLAKVNYNQSLFDAPLHYNFYAASTGGGYYDMRNILNNTLVASNPTKAVTLVENHDTQPGQSLESTVQPWFKPLAYAFILTRSGGYPSVFYGDMYGTKGTTTREIPALKSKIEPLLKARKDYAYGTQRDYIDNPDVIGWTREGDSTKAKKGLATVITDGPGGSKRMYVGTSNAGEIWYDLTGNRTDKITIGSDGYATFPVNGGSVSVWVQQ

SEQ ID NO: 38943 - protein, 480 aa, Cytophaga sp.
NGTMMQYFEWYVPNDGQQWNRLRTDAPYLSSVGITAVWTPPAYKGTSQADVGYGPYDLYDLGEFNQKGTVRTKYGTKGELKSAVNTLHSNGIQVYGDVVMNHKAGADYTENVTAVEVNPSNRYQETSGEYNIQAWTGFNFPGRGTTYSNWKWQWFHFDGTDWDQSRSLSRIFKFDGKAWDWEVSSENGNYDYLMYADYDYDHPDVVNEMKKWGVWYANEVGLDGYRLDAVKHIKFQFLKDWVDNARAATGKEMFTVGEYWQNDLGALNNYLAKVNYNQSLFDAPLHYNFYAASTGCGYYDMRNILNNTLVASNPTKAVTLVENHDTQPGQSLESTVQPWFKPLAYAFILTRSGGYPSVFYGDMYGTKGTTTREIPALKSKIEPLLKARKDYAYGTQRDYIDNPDVIGWTREGDSTKAKSGLATVITDGPGGSKRMYVGTSNAGEIWYDLTGNRTDKITIGSDGYATFPVNGGSVSVWVQQ

SEQ ID NO: 38944 - protein, 480 aa, Cytophaga sp.
NGTMMQYFEWYVPNDGQQWNRLRTDAPYLSSVGITAVWTPPAYKGTSQADVGYGPYDLYDLGEFNQKGTVRTKYGTKGELKSAVNTLHSNGIQVYGDVVMNHKAGADYTENVTAVEVNPSNRYQETSGEYNIQAWTGFNFPGRGTTYSNWKWQWFHFDGTDWDQSRSLSRIFKFDGKAWDWEVSSENGNYDYLMYADYDYDHPDVVNEMKKWGVWYANEVGLDGYRLDAVKHIKFQFLKDWVDNARAATGKEMFTVGEYWQNDLGALNNYLAKVNYNQSLFDAPLHYNFYAASTGGGYYDMRNILNNTLVASNPTKAVTLVENHDTQPGQSLESTVQPWFKPLAYAFILTRSGGMPSVFYGDMYGTKGTTTREIPALKSKIEPLLKARKDYAYGTQRDYIDNPDVIGWTREGDSTKAKSGLATVITDGPGGSKRMYVGTSNAGEIWYDLTGNRTDKITIGSDGYATFPVNGGSVSVWVQQ

SEQ ID NO: 38945 - protein, 480 aa, Cytophaga sp.
NGTMMQYFEWYVPNDGQQWNRLRTDAPYLSSVGITAVWTPPAYKGTSQADVGYGPYDLYDLGEFNQKGTVRTKYGTKGELKSAVNTLHSNGIQVYGDVVMNHKAGADYTENVTAVEVNPSNRYQETSGEYNIQAWTGFNFPGRGTTYSNWKWQWFHFDGTDWDQSRSLSRIFKFDGKAWDWKVSSENGNYDYLMYADYDYDHPDVVNEMKKWGVWYANEVGLDGYRLDAVKHIKFQFLKDWVDNARAATGKEMFTVGEYWQNDLGALNNYLAKVNYNQSLFDAPLHYNFYAASTGGGYYDMRNILNNTLVASNPTKAVTLVENHDTQPGQSLESTVQPWFKPLAYAFILTRSGGYPSVFYGDMYGTKGTTTREIPALKSKIEPLLKARKDYAYGTQRDYIDNPDVIGWTREGDSTKAKSGLATVITDGPGGSKRMYVGTSNAGEIWYDLTGNRTDKITIGSDGYATFPVNGGSVSVWVQQ

SEQ ID NO: 38946 - protein, 480 aa, Cytophaga sp.
NGTMMQYFEWYVPNDGQQWNRLRTDAPYLSSVGITAVWTPPAYKGTSQADVGYGPYDLYDLGEFNQKGTVRTKYGTKGELKSAVNTLHSNGIQVYGDVVMNHKAGADYTENVTAVEVNPSNRYQETSGEYNIQAWTGFNFPGRGTTYSNWKWQWFHFDGTDWDQSRSLARIFKFDGKAWDWEVSSENGNYDYLMYADYDYDHPDVVNEMKKWGVWYANEVGLDGYRLDAVKHIKFQFLKDWVDNARAATGKEMFTVGEYWQNDLGALNNYLAKVNYNQSLFDAPLHYNFYAASTGGGYYDMRNILNNTLVASNPTKAVTLVENHDTQPGQSLESTVQPWFKPLAYAFILTRSGGYPSVFYGDMYGTKGTTTREIPALKSKIEPLLKARKDYAYGTQRDYIDNPDVIGWTREGDSTKAKSGLATVITDGPGGSKRMYVGTSNAGEIWYDLTGNRTDKITIGSDGYATFPVNGGSVSVWVQQ

SEQ ID NO: 38947 - protein, 480 aa, Cytophaga sp.
NGTMMQYFEWYVPNDGQQWNRLRTDAPYLSSVGITAVWTPPAYKGTSQADVGYGPYDLYDLGEFNQKGTVRTKYGTKGELKSAVNTLHSNGIQVYGDVVMNHKAGADYTENVTAVEVNPSNRYQETSGEYNIQAWTGFNFPGRGTTYSNWKWQWFHFDGTDWDQSRSLSRIFKFDGKAWDWEVSSENGNYDYLMYADYDYDHPDVVNEMKKWGVWYANEVGLDGYRLDAVKHIKFQFLKDWIDNARAATGKEMFTVGEYWQNDLGALNNYLAKVNYNQSLFDAPLHYNFYAASTGGGYYDMRNILNNTLVASNPTKAVTLVENHDTQPGQSLESTVQPWFKPLAYAFILTRSGGYPSVFYGDMYGTKGTTTREIPALKSKIEPLLKARKDYAYGTQRDYIDNPDVIGWTREGDSTKAKSGLATVITDGPGGSKRMYVGTSNAGEIWYDLTGNRTDKITIGSDGYATFPVNGGSVSVWVQQ

SEQ ID NO: 38948 - protein, 480 aa, Cytophaga sp.
NGTMMQYFEWYVPNDGQQWNRLRTDAPYLSSVGITAVWTPPAYKGTSQADVGYGPYDLYDLGEFNQKGTVRTKYGTKGELKSAVNTLHSNGIQVYGDVVMNHKAGADYTENVTAVEVNPSNRYQETSGEYNIQAWTGFNFPGRGTTYSNWKWQWFHFDGTDWDQSRSLSRIFKFDGKAWDWEVSSENGNYDYLMYADYDYDHPDVVNEMKKWGVWYANEVGLDGYRLDAVKHIKFQFLKDWVDNARAATGKEMFTVGEYWQNDLGALNNYLAKVNYNQSLFDAPLHYNFYAASTGGGYYDMRNILNNTLVASNPTKAVTLVENHDTQPGQSLESTVQPWFKPLAYAFILTRSGGYPSVFYGDMAGTKGTTTREIPALKSKIEPLLKARKDYAYGTQRDYIDNPDVIGWTREGDSTKAKSGLATVITDGPGGSKRMYVGTSNAGEIWYDLTGNRTDKITIGSDGYATFPVNGGSVSVWVQQ

SEQ ID NO: 38949 - protein, 480 aa, Cytophaga sp.
NGTMMQYFEWYVPNDGQQWNRLRTDAPYLSSVGITAVWTPPAYKGTSQADVGYGPYDLYDLGEFNQKGTVRTKYGTKGELKSAVNTLHSNGIQVYGDVVMNHKAGADYTENVTAVEVNPSNRYQETSGESNIQAWTGFNFPGRGTTYSNWKWQWFHFDGTDWDQSRSLSRIFKFDGKAWDWEVSSENGNYDYLMYADYDYDHPDVVNEMKKWGVWYANEVGLDGYRLDAVKHIKFQFLKDWVDNARAATGKEMFTVGEYWQNDLGALNNYLAKVNYNQSLFDAPLHYNFYAASTGGGYYDMRNILNNTLVASNPTKAVTLVENHDTQPGQSLESTVQPWFKPLAYAFILTRSGGYPSVFYGDMYGTKGTTTREIPALKSKIEPLLKARKDYAYGTQRDYIDNPDVIGWTREGDSTKAKSGLATVITDGPGGSKRMYVGTSNAGEIWYDLTGNRTDKITIGSDGYATFPVNGGSVSVWVQQ

SEQ ID NO: 38950 - protein, 480 aa, Cytophaga sp.
NGTMMQYFEWYVPNDGQQWNRLRTDAPYLSSVGITAVWTPPAYKGTSQADVGYGPYDLYDLGEFNQKGTVRTKYGTKGELKSAVNTLHSNGIQVYGDVVMNHKAGADYTENVTAVEVNPSNRYQETSGEYNIQAWTGFNFPGRGTTYSNWKWQWFHFDGTDWDQSRSLSRIFKFDEKAWDWEVSSENGNYDYLMYADYDYDHPDVVNEMKKWGVWYANEVGLDGYRLDAVKHIKFQFLKDWVDNARAATGKEMFTVGEYWQNDLGALNNYLAKVNYNQSLFDAPLHYNFYAASTGGGYYDMRNILNNTLVASNPTKAVTLVENHDTQPGQSLESTVQPWFKPLAYAFILTRSGGYPSVFYGDMYGTKGTTTREIPALKSKIEPLLKARKDYAYGTQRDYIDNPDVIGWTREGDSTKAKSGLATVITDGPGGSKRMYVGTSNAGEIWYDLTGNRTDKITIGSDGYATFPVNGGSVSVWVQQ

SEQ ID NO: 38951 - protein, 480 aa, Cytophaga sp.
NGTMMQYFEWYVPNDGQQWNRLRTDAPYLSSVGITAVWTPPAYKGTSQADVGYGPYDLYDLGEFNQKGTVRTKYGTKGELKSAVNTLHSNGIQVYGDVVMNHKAGADYTENVTAVEVNPSNRYQETSGEYNIQAWTGFNFPGRGTTYSNWKWQWFHFDGTDWDQSRSLSRIFKFDGKAWDWEVSSENGNYDYLMYADYDYDHPDVVNEMKKWGVWYANEVGLDGYRLDAVKHIKFQFLKDWVDNARAATGKEMFTVGEYWQNDLGALNNYLAKVNYNQSLFDAPLHYNFYAASTGGGYYDMRNILNNTLVASNPTKAVTLVENHDTQPGQSLESTVQPWFKPLAYAFILTRSGGLPSVFYGDMYGTKGTTTREIPALKSKIEPLLKARKDYAYGTQRDYIDNPDVIGWTREGDSTKAKSGLATVITDGPGGSKRMYVGTSNAGEIWYDLTGNRTDKITIGSDGYATFPVNGGSVSVWVQQ

SEQ ID NO: 38952 - protein, 480 aa, Cytophaga sp.
NGTMMQYFEWYVPNDGQQWNRLRTDAPYLSSVGITAVWTPPAYKGTSQADVGYGPYDLYDLGEFNQKGTVRTKYGTKGELKSAVNTLHSNGIQVYGDVVMNHKAGADYTENVTAVEVNPSNRYQETSGEYNIQAWTGFNFPGRGTTYSNWKWQWFHFDGTDWDQSRSLSRIFKFDGKAWDWEVSSENGNYDYLMYADYDYDHPDVVNEMKKWGVWYANEVGLDGYRLDAVKHIKFQFLKDWVDNARAATGKEMFTVGEYWQNDLGALNNYLAKVNYNQSLFDAPLHYNFYAASTGGGYYDMRNILNNTLVASNPTKAVTLVENHDTQPGQSLESTVQPWFKPLAYAFILTRSGGYPSVFYGDMYGTKGTTTREIPALKSKIEPLLKARKDYAYGTQRDYIDNPDVIGWTREGHSTKAKSGLATVITDGPGGSKRMYVGTSNAGEIWYDLTGNRTDKITIGSDGYATFPVNGGSVSVWVQQ

SEQ ID NO: 38953 - protein, 480 aa, Cytophaga sp.
NGTMMQYFEWYVPNDGQQWNRLRTDAPYLSSVGITAVWTPPAYKGTSQADVGYGIYDLYDLGEFNQKGTVRTKYGTKGELKSAVNTLHSNGIQVYGDVVMNHKAGADYTENVTAVEVNPSNRYQETSGEYNIQAWTGFNFPGRGTTYSNWKWQWFHFDGTDWDQSRSLSRIFKFDGKAWDWEVSSENGNYDYLMYADYDYDHPDVVNEMKKWGVWYANEVGLDGYRLDAVKHIKFQFLKDWVDNARAATGKEMFTVGEYWQNDLGALNNYLAKVNYNQSLFDAPLHYNFYAASTGGGYYDMRNILNNTLVASNPTKAVTLVENHDTQPGQSLESTVQPWFKPLAYAFILTRSGGYPSVFYGDMYGTKGTTTREIPALKSKIEPLLKARKDYAYGTQRDYIDNPDVIGWTREGDSTKAKSGLATVITDGPGGSKRMYVGTSNAGEIWYDLTGNRTDKITIGSDGYATFPVNGGSVSVWVQQ

SEQ ID NO: 38954 - protein, 480 aa, Cytophaga sp.
NGTMMQYFEWYVPNDGQQWNRLRTDAPYLSSVGITAVWTPPAYKGTSQADVGYGPYDLYDLGEFNQKGTVRTKYGTKGELKSAVNTLHSNGIQVYGDVVMNHKAGADYTENVTAVEVNPSNRYQETSGEYNIQAWTGFNFPGRGTTYSNWKWQWFHFDGTDWDQSRSLSRIFKFDGKAWDWEVSSENGNYDYLMYADYDYDHPDVVNEMKKWGVWYANEVGLDGYRLDAVKHIKFQFLKDWVDNARAATGKEMFTVGEYWQNDLGALNNYLAKVNYNQSLFDAPLHYNFYAASTGGGYYDMRNILNNTLVASNPTKAVTLVENHDTQPGQSLESTVQPWFKPLAYAFILTRSGGYPSVFYGDMYGTKGTTTREIPALKSKIEPLLKARKDYAYGTQRDYIDNPDVIGWTRKGDSTKAKSGLATVITDGPGGSKRMYVGTSNAGEIWYDLTGNRTDKITIGSDGYATFPVNGGSVSVWVQQ

SEQ ID NO: 38955 - protein, 480 aa, Cytophaga sp.
NGTMMQYFEWYVPNDGQQWNRLRTDAPYLSSVGITAVWTPPAYKGTSQADVGYGPYDLYDLGEFNQKGTVRTKYGTKGELKSAVNTLHSNGIQVYGDVVMNHKAGADYTENVTAVEVNPSNRYQETSGEYNIQAWTGFNFPGRGTTYSNWKWQWFHFDGTDWDQSRSLSRIFKFDGKAWDWEVSSENGNYDYLMYADYDYDHADVVNEMKKWGVWYANEVGLDGYRLDAVKHIKFQFLKDWVDNARAATGKEMFTVGEYWQNDLGALNNYLAKVNYNQSLFDAPLHYNFYAASTGGGYYDMRNILNNTLVASNPTKAVTLVENHDTQPGQSLESTVQPWFKPLAYAFILTRSGGYPSVFYGDMYGTKGTTTREIPALKSKIEPLLKARKDYAYGTQRDYIDNPDVIGWTREGDSTKAKSGLATVITDGPGGSKRMYVGTSNAGEIWYDLTGNRTDKITIGSDGYATFPVNGGSVSVWVQQ

SEQ ID NO: 38956 - protein, 480 aa, Cytophaga sp.
NGTMMQYFEWYVPNDGQQWNRLRTDAPYLSSVGITAVWTPPAYKGTSQADVGYGPYDLYDLGEFNQKGTVRTKYGTKGELKSAVNTLHSNGIQVYGDVVMNHKAGADYTENVTAVEVNPSNRYQETSGEYNIQAWTGFNFPGRGTTYSNWKWQWFHFDGTDWDQSRSLSRIFKFDGKAWDWEVSSENGNYDYLMYADYDYDHPDVVNEMKKWGVWYANEVGLDGYRLDAVKHIKFQFLKDWVDNARAATGKEMFTVGEYWQNDLGALNNYLAKVNYNQSLFDAPLHYNFYAASTGGGYYDMRNILNNTLVASNPTKAVTLVENHDTQPGQSLESTVQPWFKPLAYAFILTRSGGYPSVFYGDMYGTKGTTTREIPALKSKIEPLLKARKDVAYGTQRDYIDNPDVIGWTREGDSTKAKSGLATVITDGPGGSKRMYVGTSNAGEIWYDLTGNRTDKITIGSDGYATFPVNGGSVSVWVQQ

SEQ ID NO: 38957 - protein, 480 aa, Cytophaga sp.
NGTMMQYFEWYVPNDGQQWNRLRTDAPYLSSVGITAVWTPPAYKGTSQADVGYGPYDLYDLGEFNQKGTVRTKYGTKGELKSAVNTLHSNGIQVYGDVVMNHKAGADYTENVTAVEVNPSNRYQEFSGEYNIQAWTGFNFPGRGTTYSNWKWQWFHFDGTDWDQSRSLSRIFKFDGKAWDWEVSSENGNYDYLMYADYDYDHPDVVNEMKKWGVWYANEVGLDGYRLDAVKHIKFQFLKDWVDNARAATGKEMFTVGEYWQNDLGALNNYLAKVNYNQSLFDAPLHYNFYAASTGGGYYDMRNILNNTLVASNPTKAVTLVENHDTQPGQSLESTVQPWFKPLAYAFILTRSGGYPSVFYGDMYGTKGTTTREIPALKSKIEPLLKARKDYAYGTQRDYIDNPDVIGWTREGDSTKAKSGLATVITDGPGGSKRMYVGTSNAGEIWYDLTGNRTDKITIGSDGYATFPVNGGSVSVWVQQ

SEQ ID NO: 38958 - protein, 480 aa, Cytophaga sp.
NGTMMQYFEWYVPNDGQQWNRLRTDAPYLSSVGITAVWTPPAYKGTSQADVGYGPYDLYDLGEFNQKGTVRTKYGTKGELKSAVNTLHSNGIQVYGDVVMNHKAGADYTENVTAVEVNPSNRYQETRGEYNIQAWTGFNFPGRGTTYSNWKWQWFHFDGTDWDQSRSLSRIFKFDGKAWDWEVSSENGNYDYLMYADYDYDHPDVVNEMKKWGVWYANEVGLDGYRLDAVKHIKFQFLKDWVDNARAATGKEMFTVGEYWQNDLGALNNYLAKVNYNQSLFDAPLHYNFYAASTGGGYYDMRNILNNTLVASNPTKAVTLVENHDTQPGQSLESTVQPWFKPLAYAFILTRSGGYPSVFYGDMYGTKGTTTREIPALKSKIEPLLKARKDYAYGTQRDYIDNPDVIGWTREGDSTKAKSGLATVITDGPGGSKRMYVGTSNAGEIWYDLTGNRTDKITIGSDGYATFPVNGGSVSVWVQQ

SEQ ID NO: 38959 - protein, 480 aa, Cytophaga sp.
NGTMMQYFEWYVPNDGQQWNRLRTDAPYLSSVGITAVWTPPAYKGTSQADVGYGPYDLYDLGEFNQKGTVRTKYGTSGELKSAVNTLHSNGIQVYGDVVMNHKAGADYTENVTAVEVNPSNRYQETSGEYNIQAWTGFNFPGRGTTYSNWKWQWFHFDGTDWDQSRSLSRIFKFDGKAWDWEVSSENGNYDYLMYADYDYDHPDVVNEMKKWGVWYANEVGLDGYRLDAVKHIKFQFLKDWVDNARAATGKEMFTVGEYWQNDLGALNNYLAKVNYNQSLFDAPLHYNFYAASTGGGYYDMRNILNNTLVASNPTKAVTLVENHDTQPGQSLESTVQPWFKPLAYAFILTRSGGYPSVFYGDMYGTKGTTTREIPALKSKIEPLLKARKDYAYGTQRDYIDNPDVIGWTREGDSTKAKSGLATVITDGPGGSKRMYVGTSNAGEIWYDLTGNRTDKITIGSDGYATFPVNGGSVSVWVQQ

SEQ ID NO: 38960 - protein, 480 aa, Cytophaga sp.
NGTMMQYFEWYVPNDGQQWNRLRTDAPYLSSVGITAVWTPPAYKGTSQADVGYGPYDLYDLGEFNQKGTVRTKYGTKGELKSAVNTLHSNGIQVYGDVVMNHKAGADYTENVTAVEVNPSNRYQETSGEYNIQAWTGFNFPGRGTTYSNWKWQWFHFDGTDWDQSRSLSRIFKFDGKAWDWEVSSENGNYDYLMYADYDYDHPDVVNEMKKWGVWYANEVGLDGYRLDAVKHMKFQFLKDWVDNARAATGKEMFTVGEYWQNDLGALNNYLAKVNYNQSLFDAPLHYNFYAASTGGGYYDMRNILNNTLVASNPTKAVTLVENHDTQPGQSLESTVQPWFKPLAYAFILTRSGGYPSVFYGDMYGTKGTTTREIPALKSKIEPLLKARKDYAYGTQRDYIDNPDVIGWTREGDSTKAKSGLATVITDGPGGSKRMYVGTSNAGEIWYDLTGNRTDKITIGSDGYATFPVNGGSVSVWVQQ

SEQ ID NO: 38961 - protein, 480 aa, Cytophaga sp.
NGTMMQYFEWYVPNDGQQWNRLRTDAPYLSSVGITAVWTPPAYKGTSQADVGYGPYDLYDLGEFNQKGTVRTKYGTKGELKSAVNTLHSNGIQVYGDVVMNHKAGADYTENVTAVEVNPSNRYQETSGEYNIQAWTGFNFPGRGTTYSNWKWQWFHFDGTDWDQSRSLSRIFKFDGKAWDWEVSSENGNYDYLMYADYDYDHPDVVNEMRKWGVWYANEVGLDGYRLDAVKHIKFQFLKDWVDNARAATGKEMFTVGEYWQNDLGALNNYLAKVNYNQSLFDAPLHYNFYAASTGGGYYDMRNILNNTLVASNPTKAVTLVENHDTQPGQSLESTVQPWFKPLAYAFILTRSGGYPSVFYGDMYGTKGTTTREIPALKSKIEPLLKARKDYAYGTQRDYIDNPDVIGWTREGDSTKAKSGLATVITDGPGGSKRMYVGTSNAGEIWYDLTGNRTDKITIGSDGYATFPVNGGSVSVWVQQ

SEQ ID NO: 38962 - protein, 480 aa, Cytophaga sp.
NGTMMQYFEWYVPNDGQQWNRLRTDAPYLSSVGITAVWTPPAYKGTSQADVGYGPYDLYDLGEFNQKGTVRTKYGTKGELKSAVNTLHSNGIQVYGDVVMNHKAGADYTENVTAVEVNPSNRYQETSGEYNIQAWTGFNFPGRGTTYSNWKWQWFHFDGTDWDQSRSLSRIFKFDGKAWDWEVSSENGNYDYLMYADYDYDHPDVVNEMKKWGVWYANEVGLDGYRLDAVKHIKFQFLKDWVDNARAATGKEMFTVGEYWQNDLGALNNYLAKVNYNQSLFDAPLHYNFYMASTGGGYYDMRNILNNTLVASNPTKAVTLVENHDTQPGQSLESTVQPWFKPLAYAFILTRSGGYPSVFYGDMYGTKGTTTREIPALKSKIEPLLKARKDYAYGTQRDYIDNPDVIGWTREGDSTKAKSGLATVITDGPGGSKRMYVGTSNAGEIWYDLTGNRTDKITIGSDGYATFPVNGGSVSVWVQQ

SEQ ID NO: 38963 - protein, 480 aa, Cytophaga sp.
NGTMMQYFEWYVPNDGQQWNRLRTDAPYLSSVGITAVWTPPAYKGTSQADVGYGPYDLYDLGEFNQKGTVRTKYGTKGELKSAVNTLHSNGIQVYGDVVMNHKAGADYTENVTAVEVNPSNRYQETSGEYNIQAWTGFNFPGRGTTYSNWKWQWFHFDGTDWDQSRSLSRIFKFDGKAWDWEVSSENGNYDYLMYADYDYDHPDVVNEMKKWGVWYANEVGLDGYRLDAVKHIKFQFLKDWVDNARAATGKEMFTVGEYWQNDLGALNNYLAKVNYNQSLFDAPLHYNFYAASTGGGYYDMRNILNNTLVASNPTKAVTLVENHDTQPGQSLESTVRPWFKPLAYAFILTRSGGYPSVFYGDMYGTKGTTTREIPALKSKIEPLLKARKDYAYGTQRDYIDNPDVIGWTREGDSTKAKSGLATVITDGPGGSKRMYVGTSNAGEIWYDLTGNRTDKITIGSDGYATFPVNGGSVSVWVQQ

SEQ ID NO: 38964 - protein, 480 aa, Cytophaga sp.
NGTMMQYFEWYVPNDGQQWNRLRTDAPYLSSVGITAVWTPPAYKGTSQADVGYGPYDLYDLGEFNQKGTVRTKYGTKGELKSAVNTLHSNGIQVYGDVVMNHKAGADYTENVTAVEVNPSNRYQETSGEYNIQAWTGFNFPGRGTTYSNWKWQWFHFDGTDWDQSRSLSRIFKFDGKAWDWEVSSENGNYDYLMYADYDYDHPDVVNEMKKWGVWYANEVGLDGYRLDAVKHIKFQFLKDWVDNARAATGKEMFTVGEYWQNDLGALNNYLAKVNYNQSLFDAPLHYNFYAASTGGGYYDMRNILNNTLVASNPTKAVTLVENHDTQPGQSLESTVQPWFKPLAYAFILTRSGGYPSVFYGDMYGTKGTTTREIPALKSKIEPLLKARKDYAYGTQRDYIDNWDVIGWTREGDSTKAKSGLATVITDGPGGSKRMYVGTSNAGEIWYDLTGNRTDKITIGSDGYATFPVNGGSVSVWVQQ

SEQ ID NO: 38965 - protein, 480 aa, Cytophaga sp.
NGTMMQYFEWYVPNDGQQWNRLRTDAPYLSSVGITAVWTPPAYKGTSQADVGYGPYDLYDLGEFNQKGTVRTKYGTKGELKSAVNTLHSNGIQVYGDVVMNHKAGADYTENVTAVEVNPSNRYQETSGEYNIQAWTGFNFPGRGTTYSNWKWQWFHFDGTDWDQSRSLSRIFKFDGKAWDWEVSSENGNYDYLMYADYDYDHPDVVNEMKKWGVWYANEVGLDGYRLDAVKHIKFQFLKDWVDNARAATGNEMFTVGEYWQNDLGALNNYLAKVNYNQSLFDAPLHYNFYAASTGGGYYDMRNILNNTLVASNPTKAVTLVENHDTQPGQSLESTVQPWFKPLAYAFILTRSGGYPSVFYGDMYGTKGTTTREIPALKSKIEPLLKARKDYAYGTQRDYIDNPDVIGWTREGDSTKAKSGLATVITDGPGGSKRMYVGTSNAGEIWYDLTGNRTDKITIGSDGYATFPVNGGSVSVWVQQ

SEQ ID NO: 38966 - protein, 480 aa, Cytophaga sp.
NGTMMQYFEWYVPNDGQQWNRLRTDAPYLSSVGITAVWTPPAYKGTSQADVGYGPYDLYDLGEFNQKGTVRTKYGTKGELKSAVNTLHSNGIQVYGDVVMNHKAGADYTENVTAAEVNPSNRYQETSGEYNIQAWTGFNFPGRGTTYSNWKWQWFHFDGTDWDQSRSLSRIFKFDGKAWDWEVSSENGNYDYLMYADYDYDHPDVVNEMKKWGVWYANEVGLDGYRLDAVKHIKFQFLKDWVDNARAATGKEMFTVGEYWQNDLGALNNYLAKVNYNQSLFDAPLHYNFYAASTGGGYYDMRNILNNTLVASNPTKAVTLVENHDTQPGQSLESTVQPWFKPLAYAFILTRSGGYPSVFYGDMYGTKGTTTREIPALKSKIEPLLKARKDYAYGTQRDYIDNPDVIGWTREGDSTKAKSGLATVITDGPGGSKRMYVGTSNAGEIWYDLTGNRTDKITIGSDGYATFPVNGGSVSVWVQQ

SEQ ID NO: 38967 - protein, 480 aa, Cytophaga sp.
NGTMMQYFEWYVPNDGQQWNRLRTDAPYLSSVGITAVWTPPAYKGTSQADVGYGPYDLYDLGEFNQKGTVRTKYGTKGELKSAVNTLHSNGIAVYGDVVMNHKAGADYTENVTAVEVNPSNRYQETSGEYNIQAWTGFNFPGRGTTYSNWKWQWFHFDGTDWDQSRSLSRIFKFDGKAWDWEVSSENGNYDYLMYADYDYDHPDVVNEMKKWGVWYANEVGLDGYRLDAVKHIKFQFLKDWVDNARAATGKEMFTVGEYWQNDLGALNNYLAKVNYNQSLFDAPLHYNFYAASTGGGYYDMRNILNNTLVASNPTKAVTLVENHDTQPGQSLESTVQPWFKPLAYAFILTRSGGYPSVFYGDMYGTKGTTTREIPALKSKIEPLLKARKDYAYGTQRDYIDNPDVIGWTREGDSTKAKSGLATVITDGPGGSKRMYVGTSNAGEIWYDLTGNRTDKITIGSDGYATFPVNGGSVSVWVQQ

SEQ ID NO: 38968 - protein, 480 aa, Cytophaga sp.
NGTMMQYFEWYVPNDGQQWNRLRTDAPYLSSVGITAVWTPPAYKGTSQADVGYGPYDLYDLGEFNQKGTVRTKYGTKGELKSAVNTLHSNGIQVYGDVVMNHKAGADYTENVTAVEVNPSNRYQETSGEYNIQAWTGFNFPGRGTTYSNWNWQWFHFDGTDWDQSRSLSRIFKFDGKAWDWEVSSENGNYDYLMYADYDYDHPDVVNEMKKWGVWYANEVGLDGYRLDAVKHIKFQFLKDWVDNARAATGKEMFTVGEYWQNDLGALNNYLAKVNYNQSLFDAPLHYNFYAASTGGGYYDMRNILNNTLVASNPTKAVTLVENHDTQPGQSLESTVQPWFKPLAYAFILTRSGGYPSVFYGDMYGTKGTTTREIPALKSKIEPLLKARKDYAYGTQRDYIDNPDVIGWTREGDSTKAKSGLATVITDGPGGSKRMYVGTSNAGEIWYDLTGNRTDKITIGSDGYATFPVNGGSVSVWVQQ

SEQ ID NO: 38969 - protein, 480 aa, Cytophaga sp.
NGTMMQYFEWYVPNDGQQWNRLRTDAPYLSSVGITAVWTPPAYKGTSQADVGYGPYDLYDLGEFNQKGTVRTKYGTKGELKSAVNTLHSNGIQVYGDVVMNHKAGADYTENVTAVEVNPSNRYQETSGEYNIQAWTGFNFPGRGTTYSNWKWQWFHFDGTDWDQSRSLSRIFKFDGKAWDWEVSSINGNYDYLMYADYDYDHPDVVNEMKKWGVWYANEVGLDGYRLDAVKHIKFQFLKDWVDNARAATGKEMFTVGEYWQNDLGALNNYLAKVNYNQSLFDAPLHYNFYAASTGGGYYDMRNILNNTLVASNPTKAVTLVENHDTQPGQSLESTVQPWFKPLAYAFILTRSGGYPSVFYGDMYGTKGTTTREIPALKSKIEPLLKARKDYAYGTQRDYIDNPDVIGWTREGDSTKAKSGLATVITDGPGGSKRMYVGTSNAGEIWYDLTGNRTDKITIGSDGYATFPVNGGSVSVWVQQ

SEQ ID NO: 38970 - protein, 480 aa, Cytophaga sp.
NGTMMQYFEWYVPNDGQQWNRLRTDAPYLSSVGITAVWTPPAYKGTSQADVGYGPYDLYDLGEFNQKGTVRTKYGTKGELKSAVNTLHSNGIQVYGDVVMNHKAGADYTENVTAVEVNPSNRYQETSGEYNIQAWTGFNFPGRGTTYSNWKWQWFHFDGTDWDQSRSLSRIFKFDGKAWDWEVSSENGNYDYLMYADYDYDHPDVVNEMKKWGVWYANEVGLDGYRLDAVKHIKFQFLKDWVDNARAATGKEMFTVGEYWQNDLGALNNYLAKVNYNQSLFDAPLHYNFYAASTGGGYYDMRNILNNTLVASNPTKAVTLVENHDTQPGQSLESTVQPWFKPLAYAFILTRSGGYPSVFYGDMYGTKGTTTREIPALKSKIENLLKARKDYAYGTQRDYIDNPDVIGWTREGDSTKAKSGLATVITDGPGGSKRMYVGTSNAGEIWYDLTGNRTDKITIGSDGYATFPVNGGSVSVWVQQ

SEQ ID NO: 38971 - protein, 480 aa, Cytophaga sp.
NGTMMQYFEWYVPNDGQQWNRLRTDAPYLSSVGITAVWTPPAYKGTSQADVGYGPYDLYDLGEFNQKGTVRTKYGTKGELKSAVNTLHSNGIQVYGDVVMNHKAGADYTENVTAVEVNPSNRYQETSGEYNIQAWTGFNFPGRGTTYSNWKWQWFHFDGTDWDQSRSLSRIFKFDVKAWDWEVSSENGNYDYLMYADYDYDHPDVVNEMKKWGVWYANEVGLDGYRLDAVKHIKFQFLKDWVDNARAATGKEMFTVGEYWQNDLGALNNYLAKVNYNQSLFDAPLHYNFYAASTGGGYYDMRNILNNTLVASNPTKAVTLVENHDTQPGQSLESTVQPWFKPLAYAFILTRSGGYPSVFYGDMYGTKGTTTREIPALKSKIEPLLKARKDYAYGTQRDYIDNPDVIGWTREGDSTKAKSGLATVITDGPGGSKRMYVGTSNAGEIWYDLTGNRTDKITIGSDGYATFPVNGGSVSVWVQQ

SEQ ID NO: 38972 - protein, 480 aa, Cytophaga sp.
NGTMMQYFEWYVPNDGQQWNRLRTDAPYLSSVGITAVWTPPAYKGTSQADVGYGPYDLGDLGEFNQKGTVRTKYGTKGELKSAVNTLHSNGIQVYGDVVMNHKAGADYTENVTAVEVNPSNRYQETSGEYNIQAWTGFNFPGRGTTYSNWKWQWFHFDGTDWDQSRSLSRIFKFDGKAWDWEVSSENGNYDYLMYADYDYDHPDVVNEMKKWGVWYANEVGLDGYRLDAVKHIKFQFLKDWVDNARAATGKEMFTVGEYWQNDLGALNNYLAKVNYNQSLFDAPLHYNFYAASTGGGYYDMRNILNNTLVASNPTKAVTLVENHDTQPGQSLESTVQPWFKPLAYAFILTRSGGYPSVFYGDMYGTKGTTTREIPALKSKIEPLLKARKDYAYGTQRDYIDNPDVIGWTREGDSTKAKSGLATVITDGPGGSKRMYVGTSNAGEIWYDLTGNRTDKITIGSDGYATFPVNGGSVSVWVQQ

SEQ ID NO: 38973 - protein, 480 aa, Cytophaga sp.
NGTMMQYFEWYVPNDGQQWNRLRTDAPYLSSVGITAVWTPPAYKGTSQADVGYGPYDLYDLGEFNQKGTVRTKYGTKGELKSAVNTLHSNGIQVYGDVVMNHKAGADYTENVTAVEVNPSNRYQETSGEYNIQAWTGFNFPGRGTTYSNWKWQWFHFDGTDWDQSRSLSRIFKFDGKAWDWEVSSENGNYDYLMYADYDYDHPDVVNEMKKWGVWYANEVGLDGYRLDAVKHIKFQFLKDWVDNARAATGKEMFTVGEYWQNDLGALNNYLAKVNYNQSLFDAPLHYNFYAASTGGGYYDMRNILNNTLVASNPTKAVTLVENHDTQPGQSLESTVQPWFKPLAYAFILTRSGGYPSVFYGDMYGTKGTTTREIPALKSKIEPLLKARKDYAYGTQRDYIDNPDVIGWTREGDSTKAKSGLATVITDGPGGSKRMYVGTSNAGEIWYDLTGNRTDKITIGSDGYATFPVNGASVSVWVQQ

SEQ ID NO: 38974 - protein, 480 aa, Cytophaga sp.
NGTMMQYFEWYVPNDGQQWNRLRTDAPYLSSVGITAVWTPPAYKGTSQADVGYGPYDLYDLGEFNQKGTVRTKYGTKGELKSAVNTLHSNGIQVYGDVVMNHKAGADYTENVTAVEVNPSNRYQETSGEYNIQAWTGFNFPGRGTTYSNWKWQWFHFDGTDWDQSRSLSRIFKFDGKAWDWEVSSENGNYDYLMYADYDYDHPDVVNEMKKWGVWYANEVGLDGYRLDAVKHIKFQFLKDWVDNARAATGKEMFTVGEYWQNDLGALNNYLAKVNYNQSLFDAPLHYNFYAASTGGGYYDMRNILNNTLVASNPTKAVTLVENHDTQPGQSLESTVQPWFKPLAYAFILTRSGGYPSVFYGDMYGTKGTTTREIPALKSKIEPLLKARADYAYGTQRDYIDNPDVIGWTREGDSTKAKSGLATVITDGPGGSKRMYVGTSNAGEIWYDLTGNRTDKITIGSDGYATFPVNGGSVSVWVQQ

SEQ ID NO: 38975 - protein, 480 aa, Cytophaga sp.
NGTMMQYFEWYVPNDGQQWNRLRTDAPYLSSVGITAVWTPPAYKGTSQADVGYGPYDLYDLGEFNQKGTVRTKYGTKGELKSAVNTLHSNGIQVYGDVVMNHKAGADYTENVTAVEVNPSNRYQETSGEYNIQAWTGFNFPGRGTTYSNWKWQWFHFDGTDWDQSRSLSRIFKFDGKAWDWEVSSENGNYDYLMYADYDYDHPDVVNEMKKWGVWYANEVGLDGYRLDAVKHIKFQFLKDWVDNARAATGKEMFTVGEYWQNDLGALNNYLAKVNYNQSLFDAPLHYNFYAASTGGGYYDMRNILNNTLVASNPTKAVTLVENHDTQPGQSLESTVQPWFKPLAYAFILTRSGGYPSVFYGDMYGTKGTTTREIPALKSKIEPLLKARKDYAYGTQRDYIDNPDVIGWTREGDSTKAKSGLATVITDGPGGSKRMYVGTSNAGEIWYDLTGTRTDKITIGSDGYATFPVNGGSVSVWVQQ

SEQ ID NO: 38976 - protein, 480 aa, Cytophaga sp.
NGTMMQYFEWYVPNDGQQWNRLRTDAPYLSSVGITAVWTPPAYKGTSQADVGYGPYDLYDLGEFNQKGTVRTKYGTKGELKSAVNTLHSNGIQVYGDVVMNHKAGADYTENVTAVEVNPSNRYQETSGEYNIQAWTGFNFPGRGTTYSNWKWQWFHFDGTDWDQSRSLSRIFKFDGKAWDWEVSSENGNYDYLMYADYDYGHPDVVNEMKKWGVWYANEVGLDGYRLDAVKHIKFQFLKDWVDNARAATGKEMFTVGEYWQNDLGALNNYLAKVNYNQSLFDAPLHYNFYAASTGGGYYDMRNILNNTLVASNPTKAVTLVENHDTQPGQSLESTVQPWFKPLAYAFILTRSGGYPSVFYGDMYGTKGTTTREIPALKSKIEPLLKARKDYAYGTQRDYIDNPDVIGWTREGDSTKAKSGLATVITDGPGGSKRMYVGTSNAGEIWYDLTGNRTDKITIGSDGYATFPVNGGSVSVWVQQ

SEQ ID NO: 38977 - protein, 480 aa, Cytophaga sp.
NGTMMQYFEWYVPNDGQQWNRLRTDAPYLSSVGITAVWTPPAYKGTSQADVGYGPYDLYDLGEFNQKGTVRTKYGTKGELKSAVNTLHSNGIQVYGDVVMNHKAGADYTENVTAVEVNPSNRYQETSGEYNIQAWTGFNFPGRGTTYSNWKWQWFHFDGTDWDQSRSLSRIFKFDGKAWDWEVSSENGNYDYLMYADYDYDHPDVVNEMKKWGVWYANEVGLDGYRLDAVKHIKFQFLKDWVDNARAATGKEMFTVGEYWQNDLGALNNYLAKVNYNQSLFDAPLHYNFYAASTGGGYYDMRNILNNTLVASNPTKAVTLVENHDTQPGQSLESTVQPWFKPLAYAFILTRSGGYPSVFYGDMYGTKGTTTREIPALKSKIEVLLKARKDYAYGTQRDYIDNPDVIGWTREGDSTKAKSGLATVITDGPGGSKRMYVGTSNAGEIWYDLTGNRTDKITIGSDGYATFPVNGGSVSVWVQQ

SEQ ID NO: 38978 - protein, 480 aa, Cytophaga sp.
NGTMMQYFEWYVPNDGQQWNRLRTDAPYLSSVGITAVWTPPAYKGTSQADVGYGPYDLYDLGEFNQKGTVRTKYGTKGELKSAVNTLHSNGIQVYGDVVMNHKAGADYTENVTAVEVNPSNRYQETSGRYNIQAWTGFNFPGRGTTYSNWKWQWFHFDGTDWDQSRSLSRIFKFDGKAWDWEVSSENGNYDYLMYADYDYDHPDVVNEMKKWGVWYANEVGLDGYRLDAVKHIKFQFLKDWVDNARAATGKEMFTVGEYWQNDLGALNNYLAKVNYNQSLFDAPLHYNFYAASTGGGYYDMRNILNNTLVASNPTKAVTLVENHDTQPGQSLESTVQPWFKPLAYAFILTRSGGYPSVFYGDMYGTKGTTTREIPALKSKIEPLLKARKDYAYGTQRDYIDNPDVIGWTREGDSTKAKSGLATVITDGPGGSKRMYVGTSNAGEIWYDLTGNRTDKITIGSDGYATFPVNGGSVSVWVQQ

SEQ ID NO: 38979 - protein, 480 aa, Cytophaga sp.
NGTMMQYFEWYVPNDGQQWNRLRTDAPYLSSVGITAVWTPPAYKGTSQADVGYGPYDLYDLGEFNQKGTVRTKYGTKGELKSAVNTLHSNGIQVYGDVVMNHKAGADYTENVTAVEVNPSNRYQETSGEYNIQAWTGFNFPGRGTTYSNWKWQWFHFDGTDWDQSRSLSRIFKFDGKAWDWEVSSENGNYDYLMYADYDYDHPDVVNEMKKWGVWYANEVGLDGYRLDAVKHIKFQFLKDWVDNARAATGKEMFTVGEYWQNDLGALNNYLAKVNYNQSLFDAPLHYNFYAASTGGGYYDMRNILNNTLVASNPTKAVTLVENHDTQPGQSLESTVQPWFKPLAYAFILTRSGGYPSVFYGDMYGTKGTTTREIPALKSKIEPLLKARKDYAYGTQRDYIDNPDQIGWTREGDSTKAKSGLATVITDGPGGSKRMYVGTSNAGEIWYDLTGNRTDKITIGSDGYATFPVNGGSVSVWVQQ

SEQ ID NO: 38980 - protein, 480 aa, Cytophaga sp.
NGTMMQYFEWYVPNDGQQWNRLRTDAPYLSSVGITAVWTPPAYKGTSQADVGYGPYDLYDLGEFNQKGTVRTKYGTKGELKSAVNTLHSNGIQVYGDVVMNHKAGADYTENVTAVEVNPSNRYQETSGEYNIQAWTGFNFPGRGTTYLNWKWQWFHFDGTDWDQSRSLSRIFKFDGKAWDWEVSSENGNYDYLMYADYDYDHPDVVNEMKKWGVWYANEVGLDGYRLDAVKHIKFQFLKDWVDNARAATGKEMFTVGEYWQNDLGALNNYLAKVNYNQSLFDAPLHYNFYAASTGGGYYDMRNILNNTLVASNPTKAVTLVENHDTQPGQSLESTVQPWFKPLAYAFILTRSGGYPSVFYGDMYGTKGTTTREIPALKSKIEPLLKARKDYAYGTQRDYIDNPDVIGWTREGDSTKAKSGLATVITDGPGGSKRMYVGTSNAGEIWYDLTGNRTDKITIGSDGYATFPVNGGSVSVWVQQ

SEQ ID NO: 38981 - protein, 480 aa, Cytophaga sp.
NGTMMQYFEWYVPNDGQQWNRLRTDAPYLSSVGITAVWTPPAYKGTSQADVGYGPYDLYDLGEFNQKGTVRTKYGTKGELKSAVNTLHSNGIQVYGDVVMNHKAGADYTENVTAVEVNPSNRYQETSGEYNIQAWTGFNFPGRGTTYSNWKWQWFHFDGTDWDQSRSLSRIFKFDGKAWDWEVSSENGNYDYLMYADYDYDHPDVVNEMKKWGVWYANEVGLDGYRLDAVKHIKFQFLKDWVDNARAATGKEMFTVGEYWQNDLGALNNYLAKVNYNQSLFDAPLHYNFYAASTGGGYYDMRNILNNTLVASNPTKAVTLVENHDTQPGQSLESTVQPWFKPLAYAFILTRSGGYPSVFYGDMYGTKGTTTREIPALKSKIEPLLKARKDYAYGTQRDYIDNPDVIGWTREGDSTKAKSGLATVITDGPGGSKWMYVGTSNAGEIWYDLTGNRTDKITIGSDGYATFPVNGGSVSVWVQQ

SEQ ID NO: 38982 - protein, 480 aa, Cytophaga sp.
NGTMMQYFEWYVPNDGQQWNRLRTDAPYLSSVGITAVWTPPAYKGTSQADVGYGPYDLYDLGEFNQKGTVRTKYGTKGELKSAVNTLHSNGIQVYGDVVMNHKAGADYTENVTAVEVNPSNRYQETSGEYNIQAWTGFNFPGRGTTYSNWKWQWFHFDGTDWDQSRSLSRIFKFDGKAWDWEVSSENGNYDYLMYADYDYDHPDVVNEMKKWGVWYANEVGLDGYRLDAVKHIKFQFLKDWVDNARAATGKEMFTVGEYWQNDLGALNNYLAKVNYNQSLFDAPLHYNFYAASTGGGYYDMRNILNNTLVASNPTKAVTLVENHDTQPGQSLESTVQPWFKPLAYAFILTRSGGYPSVFYGDMYGTKGTTTREIPALKSKIEPLLKARKDYAYGTQRDYIDNPDVIGWTREGDSTKAKSGLATVITDGPHGSKRMYVGTSNAGEIWYDLTGNRTDKITIGSDGYATFPVNGGSVSVWVQQ

SEQ ID NO: 38983 - protein, 480 aa, Cytophaga sp.
NGTMMQYFEWYVPNDGQQWNRLRTDAPYLSSVGITAVWTPPAYKGTSQADVGYGPYDLYDLGEFNQKGTVRTKYGTKGELKSAVNTLHSNGIQVYGDVVMNHKAGADYTENVTAVEVNPSNRYQETSGEYNIQAWTGFNFPGRGTTYSNWKWQWFHFDGTDWDQSRSLSRIFKFDGKAWDWEVSSENGNYDYLMYADYDYDHPDVVNEMKKWGVWYANEVGLDGYRLDAVKHIKFQFLKDWVDNARAATGKEMFTVGEYWQNDLGALNNYLAKVNYNQSLFDAPLHYNFYAASTGGGYYDMRNILNNTLVASNPTKAVTLVENHDTQPGQSLESTVQPWFKPLAYAFILTRSGGYPSVFYGDMYGTKGTTTREIPALKSKIECLLKARKDYAYGTQRDYIDNPDVIGWTREGDSTKAKSGLATVITDGPGGSKRMYVGTSNAGEIWYDLTGNRTDKITIGSDGYATFPVNGGSVSVWVQQ

SEQ ID NO: 38984 - protein, 480 aa, Cytophaga sp.
NGTMMQYFEWYVPNDGQQWNRLRTDAPYLSSVGITAVWTPPAYKGTSQADVGYGPYDLYDLGEFNQKGTVRTKYGTKGELKSAVNTLHSNGIQVYGDVVMNHKAGADYTENVTAVEVNPSNRYQETSGEYNIQAWTGFNFPGRGTTYSNWKWQWFHFDGTDWDQSRSLSRIFKFDGKAWDWEVSSENGNYDYLMYADYDYDHPDVVNEMKKWGVWYANEVGLDGYRLDAVKHIKFQFLKDWVDNARAATGKEMFTVGEYWQNDLGALNNYLAKVNYNQSLFDAPLHYNFYAASTGGGYYDMRNILNNTLVASNPTKAVTLVENHDTQPGQSLESTVQPWFKPLAYAFILTRSGGYPSVFYGDMYGTKGTTTREIPALKSKIEPLLKARKDYAYGTQRDYIDNPDVIGWTREGDSTKAKSGLATVITDGPGGSKRMYVGTSNAQEIWYDLTGNRTDKITIGSDGYATFPVNGGSVSVWVQQ

SEQ ID NO: 38985 - protein, 480 aa, Cytophaga sp.
NGTMMQYFEWYVPNDGQQWNRLRTDAPYLSSVGITAVWTPPAYKGTSQADVGYGPYDLYDLGEFNQKGTVRTKYGTKGELKSAVNTLHSNGIQVYGDVVMNHKAGADYTENVTAVEVNPSNRYQETSGEYNIQAWTGFNFPGRGTTYSNWKWQWFHFDGTDWDQSRSLSRIFKFDGKAWDWEVSSENGNYDYLMYADYDYDHPDVVNEMKKWGVWYANEVGLDGYRLDAVKHIKFQFLKDWVDNARAATGKEMFTVGEYWQNDLGALNNYLAKVNYNQSLFDAPLHYNFYAASTGGGYYDMRNILNNTLVASNPTSAVTLVENHDTQPGQSLESTVQPWFKPLAYAFILTRSGGYPSVFYGDMYGTKGTTTREIPALKSKIEPLLKARKDYAYGTQRDYIDNPDVIGWTREGDSTKAKSGLATVITDGPGGSKRMYVGTSNAGEIWYDLTGNRTDKITIGSDGYATFPVNGGSVSVWVQQ

SEQ ID NO: 38986 - protein, 480 aa, Cytophaga sp.
NGTMMQYFEWYVPNDGQQWNRLRTDAPYLSSVGITAVWTPPAYKGTSQADVGYGPYDLYDLGEFNQKGTVRTKYGTKGELKSAVNTLHSNGIQVYGDVVMNHKAGADYRENVTAVEVNPSNRYQETSGEYNIQAWTGFNFPGRGTTYSNWKWQWFHFDGTDWDQSRSLSRIFKFDGKAWDWEVSSENGNYDYLMYADYDYDHPDVVNEMKKWGVWYANEVGLDGYRLDAVKHIKFQFLKDWVDNARAATGKEMFTVGEYWQNDLGALNNYLAKVNYNQSLFDAPLHYNFYAASTGGGYYDMRNILNNTLVASNPTKAVTLVENHDTQPGQSLESTVQPWFKPLAYAFILTRSGGYPSVFYGDMYGTKGTTTREIPALKSKIEPLLKARKDYAYGTQRDYIDNPDVIGWTREGDSTKAKSGLATVITDGPGGSKRMYVGTSNAGEIWYDLTGNRTDKITIGSDGYATFPVNGGSVSVWVQQ

SEQ ID NO: 38987 - protein, 480 aa, Cytophaga sp.
NGTMMQYFEWYVPNDGQQWNRLRTDAPYLSSVGITAVWTPPAYKGTSQADVGYGPYDLYDLGEFNQKGTVRTKYGTKGELKSAVNTLHSNGIQVYGDVVMNHKAGADYTENVTAVEVNPSNRYQETSGEYNIQAWTGFNFPGRGTTYSNWKWQWFHFDGTDWDQSRSLSRIFKFDGKAWDWEVSSENGNYDYLMYADYDYDHPDVVNEMKKWGVWYANEVGLDGYRLDAVKHIKFQFLKDWVDNARAATGKEMFTVGEYWQNDLGALNNYLAKVNYNQSLFDAPLHYNFYAASTGGGYYDMRNILNNTLVASNPTKAVTLVENHDTQPGQSLESTVQPWFKPLAYAFILTRSGGYPSVFYGDMYGTKGTTTREIPALKSKIEPLLKARKDYAYGTQRDGIDNPDVIGWTREGDSTKAKSGLATVITDGPGGSKRMYVGTSNAGEIWYDLTGNRTDKITIGSDGYATFPVNGGSVSVWVQQ

SEQ ID NO: 38988 - protein, 480 aa, Cytophaga sp.
NGTMMQYFEWYVPNDGQQWNRLRTDAPYLSSVGITAVWTPPAYKGTSQADVGYGPYDLYDLGEFNQKGTVRTKYGTKGELKSAVNTLHSNGIQVYGDVVMNHKAGADYTENVTAVEVNPSNRYQETSGIYNIQAWTGFNFPGRGTTYSNWKWQWFHFDGTDWDQSRSLSRIFKFDGKAWDWEVSSENGNYDYLMYADYDYDHPDVVNEMKKWGVWYANEVGLDGYRLDAVKHIKFQFLKDWVDNARAATGKEMFTVGEYWQNDLGALNNYLAKVNYNQSLFDAPLHYNFYAASTGGGYYDMRNILNNTLVASNPTKAVTLVENHDTQPGQSLESTVQPWFKPLAYAFILTRSGGYPSVFYGDMYGTKGTTTREIPALKSKIEPLLKARKDYAYGTQRDYIDNPDVIGWTREGDSTKAKSGLATVITDGPGGSKRMYVGTSNAGEIWYDLTGNRTDKITIGSDGYATFPVNGGSVSVWVQQ

SEQ ID NO: 38989 - protein, 480 aa, Cytophaga sp.
NGTMMQYFEWYVPNDGQQWNRLRTDAPYLSSVGITAVWTPPAYKGTSQADVGYGPYDLYDLGEFNQKGTVRTKYGTKGELKSAVNTLHSNGIQVYGDVVMNHKAGADYTENVTAVEVNPSNRYQETSGEYNIQAWTGFNFPGRGTTYSNWKWQWFHFDGTDWDQSRSLSRIFKFDGKAWDWEVSSENGNYDYLMYADYDYDHPDVINEMKKWGVWYANEVGLDGYRLDAVKHIKFQFLKDWVDNARAATGKEMFTVGEYWQNDLGALNNYLAKVNYNQSLFDAPLHYNFYAASTGGGYYDMRNILNNTLVASNPTKAVTLVENHDTQPGQSLESTVQPWFKPLAYAFILTRSGGYPSVFYGDMYGTKGTTTREIPALKSKIEPLLKARKDYAYGTQRDYIDNPDVIGWTREGDSTKAKSGLATVITDGPGGSKRMYVGTSNAGEIWYDLTGNRTDKITIGSDGYATFPVNGGSVSVWVQQ

SEQ ID NO: 38990 - protein, 480 aa, Cytophaga sp.
NGTMMQYFEWYVPNDGQQWNRLRTDAPYLSSVGITAVWTPPAYKGTSQADVGYGPYDLYDLGEFNQKGTVRTKYGTKGELKSAVNTLHSNGIQVYGDVVMNHKAGADYTENVTAVEVNPSNRYQETSGEYNIQAWTGFNFPGRGTTYSNWKWQWFHFDGTDWDQSRSLSRIFKFDGKAWDWEVSFENGNYDYLMYADYDYDHPDVVNEMKKWGVWYANEVGLDGYRLDAVKHIKFQFLKDWVDNARAATGKEMFTVGEYWQNDLGALNNYLAKVNYNQSLFDAPLHYNFYAASTGGGYYDMRNILNNTLVASNPTKAVTLVENHDTQPGQSLESTVQPWFKPLAYAFILTRSGGYPSVFYGDMYGTKGTTTREIPALKSKIEPLLKARKDYAYGTQRDYIDNPDVIGWTREGDSTKAKSGLATVITDGPGGSKRMYVGTSNAGEIWYDLTGNRTDKITIGSDGYATFPVNGGSVSVWVQQ

SEQ ID NO: 38991 - protein, 480 aa, Cytophaga sp.
NGTMMQYFEWYVPNDGQQWNRLRTDAPYLSSVGITAVWTPPAYKGTSQADVGYGPYDLYDLGEFNQKGTVRTKYGTKGELKSAVNTLHSNGIQVYGDVVMNHKAGADYTENVTAVEVNPSNRYQETSGEYNIQAWTGFNFPGRGTTYSNWKWQWFHFDGTDWDQSRSLSRIFKFDGKAWDWEVSSENGNYDYLMYADYDYDHPDVVNEMKKWGVWYANEVGLDGYRLDAVKHIKFQFLKDWVDNARAATGKEMFTVGEYWQNDLGALNNYLAKVNYNQSLFDAPLHYNFYAASTGGGYYDMRNILNNTLVASNPTKAVTLVENHDTQPGQSLESTVQPWFKPLAYAFILTRSGGYPSVFYGDMYGTKGTTTREIPALKSKIEPLLKARKDYAYGTQRDYIDNPDVIGWTRRGDSTKAKSGLATVITDGPGGSKRMYVGTSNAGEIWYDLTGNRTDKITIGSDGYATFPVNGGSVSVWVQQ

SEQ ID NO: 38992 - protein, 480 aa, Cytophaga sp.
NGTMMQYFEWYVPNDGQQWNRLRTDAPYLSSVGITAVWTPPAYKGTSQADVGYGPYDLYDLGEFNQKGTVRTKYGTKGELKSAVNTLHSNGIQVYGDVVMNHKAGADYTENVTAVEVNPSNRYQETSGEYNIQAWTGFNFPGRGTTYSNWKWQWFHFDGTDWDQSRSLSRIFKFDGKAWDWEVSSENGNYDYLMYADYDYDHPDVVNEMKKWGVWYANEVGLDGYRLDAVKHIKFQFLKDWVDNARAATGKEMFVVGEYWQNDLGALNNYLAKVNYNQSLFDAPLHYNFYAASTGGGYYDMRNILNNTLVASNPTKAVTLVENHDTQPGQSLESTVQPWFKPLAYAFILTRSGGYPSVFYGDMYGTKGTTTREIPALKSKIEPLLKARKDYAYGTQRDYIDNPDVIGWTREGDSTKAKSGLATVITDGPGGSKRMYVGTSNAGEIWYDLTGNRTDKITIGSDGYATFPVNGGSVSVWVQQ

SEQ ID NO: 38993 - protein, 480 aa, Cytophaga sp.
NGTMMQYFEWYVPNDGQQWNRLRTDAPYLSSVGITAVWTPPAYKGTSQADVGYGPYDLYDLGEFNQKGTVRTKYGTKGELKSAVNTLHSNGIQVYGDVVMNHKAGADYTENVTAVEVNPSNRYQETSGEYNIQAWTGFNFPGRGTTYSNWKWQWFHFDGTDWDQSRSLSRIYKFDGKAWDWEVSSENGNYDYLMYADYDYDHPDVVNEMKKWGVWYANEVGLDGYRLDAVKHIKFQFLKDWVDNARAATGKEMFTVGEYWQNDLGALNNYLAKVNYNQSLFDAPLHYNFYAASTGGGYYDMRNILNNTLVASNPTKAVTLVENHDTQPGQSLESTVQPWFKPLAYAFILTRSGGYPSVFYGDMYGTKGTTTREIPALKSKIEPLLKARKDYAYGTQRDYIDNPDVIGWTREGDSTKAKSGLATVITDGPGGSKRMYVGTSNAGEIWYDLTGNRTDKITIGSDGYATFPVNGGSVSVWVQQ

SEQ ID NO: 38994 - protein, 480 aa, Cytophaga sp.
NGTMMQYFEWYVPNDGQQWNRLRTDAPYLSSVGITAVWTPPAYKGTSQADVGYGPYDLYDLGEFNQKGTVRTKYGTKGELKSAVNTLHSNGIQVYGDVVMNHKAGADYTENVTAVEVNPSNRYQETSGEYNIQAWTGFNFPGRGTTYKNWKWQWFHFDGTDWDQSRSLSRIFKFDGKAWDWEVSSENGNYDYLMYADYDYDHPDVVNEMKKWGVWYANEVGLDGYRLDAVKHIKFQFLKDWVDNARAATGKEMFTVGEYWQNDLGALNNYLAKVNYNQSLFDAPLHYNFYAASTGGGYYDMRNILNNTLVASNPTKAVTLVENHDTQPGQSLESTVQPWFKPLAYAFILTRSGGYPSVFYGDMYGTKGTTTREIPALKSKIEPLLKARKDYAYGTQRDYIDNPDVIGWTREGDSTKAKSGLATVITDGPGGSKRMYVGTSNAGEIWYDLTGNRTDKITIGSDGYATFPVNGGSVSVWVQQ

SEQ ID NO: 38995 - protein, 480 aa, Cytophaga sp.
NGTMMQYFEWYVPNDGQQWNRLRTDAPYLSSVGITAVWTPPAYKGTSQADVGYGPYDLYDLGEFNQKGTVRTKYGTKGELKSAVNTLHSNGIQVYGDVVMNHKAGADYTENVTAVEVNPSNRYQETSGEYNIQAWTGFNFPGRGTTYSNWKWQWFHFDGTDWDQSRSLSRIFKFDGKAWDWEVSSENGNYDYLMYADYDYDHPDVVNEMKKWGVWYANEVGLDGYRLDAVKHIKFQFLKDWVDNARAATGKEMFTVGEYWQNDLGALNNYLAKVNYNQSLFDAPLHYNFYAASTGGGYYDMRNILNNTLVASNPTKAVTLVENHDTQPGQSLESTVWPWFKPLAYAFILTRSGGYPSVFYGDMYGTKGTTTREIPALKSKIEPLLKARKDYAYGTQRDYIDNPDVIGWTREGDSTKAKSGLATVITDGPGGSKRMYVGTSNAGEIWYDLTGNRTDKITIGSDGYATFPVNGGSVSVWVQQ

SEQ ID NO: 38996 - protein, 480 aa, Cytophaga sp.
NGTMMQYFEWYVPNDGQQWNRLRTDAPYLSSVGITAVWTPPAYKGTSQADVGYGPYDLYDLGEFNQKGTVRTKYGTKGELKSAVNTLHSNGIQVYGDVVMNHKAGADYTENVTAVEVNPSNRYQETSGEYNIQAWTGFNFPGRGTTYSNWKWQWFHFDGTDWDQSRSLSRIFKFDGKAWDWEVSSENGNYDYLMYADYDYDHPDVVNEMKKWGVWYANEVGLDGYRLDAVKHIKFQFLKDWVDNARAATGKEMFTVGEYWQNDLGALNNYLAKVNYNQSLFDAPLHYNFYAASTGGGYYDMRNILNNTLVASNPTKAVTLVENHDTQPGQSLESTVQPWFKPLAYAFILTRSGGYPSVFYGDMYGTKGTTTREIPALKSKIEPLLKARKDYAYGTQRDYIDNPDVIGWTREGDSTKAKSGLATVITDGPGGSKRMYVGTSNAGEIWYDLSGNRTDKITIGSDGYATFPVNGGSVSVWVQQ

SEQ ID NO: 38997 - protein, 480 aa, Cytophaga sp.
NGTMMQYFEWYVPNDGQQWNRLRTDAPYLSSVGITAVWTPPAYKGTSQADVGYGPYDLYDLGEFNQKGTVRTKYGTKGELKSAVNTLHSNGIQVYGDVVMNHKAGADYTENVTAVEVNPSNRYQETSGEYNIQAWTGFNFPGRGTTYSNWKWQWFHFDGTDWDQSRSLSRIFKFDGKAWDWEVSSENGNYDYLMYADYDYDHPDVVNEMKKWGVWYANEVGLDGYRLDAVKHIKFQFLKDWVDNARAATGKEMFTVGEYWQNDLGALNNYLAKVNYNQSLFDAPLHYNFYAASTGGGYYDMRNILNNTLVASNPTKAVTLVENHDTQPGQSLESTVQPWFKPLAYAFILTRSGGYPSVFYGDMYGTKGTTTREIPALWSKIEPLLKARKDYAYGTQRDYIDNPDVIGWTREGDSTKAKSGLATVITDGPGGSKRMYVGTSNAGEIWYDLTGNRTDKITIGSDGYATFPVNGGSVSVWVQQ

SEQ ID NO: 38998 - protein, 480 aa, Cytophaga sp.
NGTMMQYFEWYVPNDGQQWNRLRTDAPYLSSVGITAVWTPPAYKGTSQADVGYGPYDLYDLGEFNQKGTVRTKYGTKGELKSAVNTLHSNGIQVYGDVVMNHKAGADYTENVTAVEVNPSNRYQETSGEYNIQAWTGFNFPGRGTTYSNWKWQWFHFDGTDWDQSRSLSRIFKFDGKAWDWEVSSENGNYDYLMYADYDYDHPDVVNEMKKWGVWYANEVGLDGYRLDAVKHIKFQFLKDWVDNARAATGKEMFTVGEYWQNDLGALNNYLAKVNYNQSLFDAPLHYNFYAASTGGGYYDMRNILNNTLVASNPTKAVTLVENHDTQPGQSLESTVQPWFKPLAYAFILTRSGGYPSVFYGDMYGTKGTTTREIPALCSKIEPLLKARKDYAYGTQRDYIDNPDVIGWTREGDSTKAKSGLATVITDGPGGSKRMYVGTSNAGEIWYDLTGNRTDKITIGSDGYATFPVNGGSVSVWVQQ

SEQ ID NO: 38999 - protein, 480 aa, Cytophaga sp.
NGTMMQYFEWYVPNDGQQWNRLRTDAPYLSSVGITAVWTPPAYKGTSQADVGYGPYDLYDLGEFNQKGTVRTKYGTKGELKSAVNTLHSNGIQVYGDVVMNHKAGADYTENVTAVEVNHSNRYQETSGEYNIQAWTGFNFPGRGTTYSNWKWQWFHFDGTDWDQSRSLSRIFKFDGKAWDWEVSSENGNYDYLMYADYDYDHPDVVNEMKKWGVWYANEVGLDGYRLDAVKHIKFQFLKDWVDNARAATGKEMFTVGEYWQNDLGALNNYLAKVNYNQSLFDAPLHYNFYAASTGGGYYDMRNILNNTLVASNPTKAVTLVENHDTQPGQSLESTVQPWFKPLAYAFILTRSGGYPSVFYGDMYGTKGTTTREIPALKSKIEPLLKARKDYAYGTQRDYIDNPDVIGWTREGDSTKAKSGLATVITDGPGGSKRMYVGTSNAGEIWYDLTGNRTDKITIGSDGYATFPVNGGSVSVWVQQ

SEQ ID NO: 39000 - protein, 480 aa, Cytophaga sp.
NGTMMQYFEWYVPNDGQQWNRLRTDAPYLSSVGITAVWTPPAYKGTSQADVGYGPYDLYDLGEFNQKGTVRTKYGTKGELKSAVNTLHSNGIQVYGDVVMNHKAGADYTENVTAVEVNPSNRYQETSGEYNIQAWTGFNFPGRGTTYSNWKWQWFHFDGTDWDQWRSLSRIFKFDGKAWDWEVSSENGNYDYLMYADYDYDHPDVVNEMKKWGVWYANEVGLDGYRLDAVKHIKFQFLKDWVDNARAATGKEMFTVGEYWQNDLGALNNYLAKVNYNQSLFDAPLHYNFYAASTGGGYYDMRNILNNTLVASNPTKAVTLVENHDTQPGQSLESTVQPWFKPLAYAFILTRSGGYPSVFYGDMYGTKGTTTREIPALKSKIEPLLKARKDYAYGTQRDYIDNPDVIGWTREGDSTKAKSGLATVITDGPGGSKRMYVGTSNAGEIWYDLTGNRTDKITIGSDGYATFPVNGGSVSVWVQQ

SEQ ID NO: 39001 - protein, 480 aa, Cytophaga sp.
NGTMMQYFEWYVPNDGQQWNRLRTDAPYLSSVGITAVWTPPAYKGTSQADVGYGPYDLYDLGEFNQKGTVRTKYGTKGELKSAVNTLHSNGIQVYGDVVMNHKAGADYTENVNAVEVNPSNRYQETSGEYNIQAWTGFNFPGRGTTYSNWKWQWFHFDGTDWDQSRSLSRIFKFDGKAWDWEVSSENGNYDYLMYADYDYDHPDVVNEMKKWGVWYANEVGLDGYRLDAVKHIKFQFLKDWVDNARAATGKEMFTVGEYWQNDLGALNNYLAKVNYNQSLFDAPLHYNFYAASTGGGYYDMRNILNNTLVASNPTKAVTLVENHDTQPGQSLESTVQPWFKPLAYAFILTRSGGYPSVFYGDMYGTKGTTTREIPALKSKIEPLLKARKDYAYGTQRDYIDNPDVIGWTREGDSTKAKSGLATVITDGPGGSKRMYVGTSNAGEIWYDLTGNRTDKITIGSDGYATFPVNGGSVSVWVQQ

SEQ ID NO: 39002 - protein, 480 aa, Cytophaga sp.
NGTMMQYFEWYVPNDGQQWNRLRTDAPYLSSVGITAVWTPPAYKGTSQADVGYGPYDLYDLGEFNQKGTVRTKYGTKGELKSAVNTLHSNGIQVYGDVVMNHKAGADYTENVTAVEVNPSNRYQETSGEYNIQAWTGFNFPGRGTTYSNWKWQWFHFDGTDWDQSRSLSRIFKFDGKAWDWEVSSENGNYDYLMYADYDYDHPDTVNEMKKWGVWYANEVGLDGYRLDAVKHIKFQFLKDWVDNARAATGKEMFTVGEYWQNDLGALNNYLAKVNYNQSLFDAPLHYNFYAASTGGGYYDMRNILNNTLVASNPTKAVTLVENHDTQPGQSLESTVQPWFKPLAYAFILTRSGGYPSVFYGDMYGTKGTTTREIPALKSKIEPLLKARKDYAYGTQRDYIDNPDVIGWTREGDSTKAKSGLATVITDGPGGSKRMYVGTSNAGEIWYDLTGNRTDKITIGSDGYATFPVNGGSVSVWVQQ

SEQ ID NO: 39003 - protein, 480 aa, Cytophaga sp.
NGTMMQYFEWYVPNDGQQWNRLRTDAPYLSSVGITAVWTPPAYKGTSQADVGYGPYDLYDLGEFNQKGTVRTKYGTKGELKSAVNTLHSNGIQVYGDVVMNHKAGADYTENVTAVEVNPSNRYQETTGEYNIQAWTGFNFPGRGTTYSNWKWQWFHFDGTDWDQSRSLSRIFKFDGKAWDWEVSSENGNYDYLMYADYDYDHPDVVNEMKKWGVWYANEVGLDGYRLDAVKHIKFQFLKDWVDNARAATGKEMFTVGEYWQNDLGALNNYLAKVNYNQSLFDAPLHYNFYAASTGGGYYDMRNILNNTLVASNPTKAVTLVENHDTQPGQSLESTVQPWFKPLAYAFILTRSGGYPSVFYGDMYGTKGTTTREIPALKSKIEPLLKARKDYAYGTQRDYIDNPDVIGWTREGDSTKAKSGLATVITDGPGGSKRMYVGTSNAGEIWYDLTGNRTDKITIGSDGYATFPVNGGSVSVWVQQ

SEQ ID NO: 39004 - protein, 480 aa, Cytophaga sp.
NGTMMQYFEWYVPNDGQQWNRLRTDAPYLSSVGITAVWTPPAYKGTSQADVGYGPYDLYDLGEFNQKGTVRTKYGTKGELKSAVNTLHSNGIQVYGDVVMNHKAGADYTENVTAVEVNPSNRYQETSGEYNIQAWTGFNFPGRGTTYSNWKWQWFHFDGTDWDQSRSLSRIFKFDGKAWDWEVSSENGNYDYLMYADYDYDHPDVVNEMKKWGVWYANEVGLDGYRLDAVKHIKFQFLKDWVDNARAATGKEMFTVGEYWQNDLGALNNYLAKVNYNQSLFDAPLHYNFYAASTGGGYYDMRNIDNNTLVASNPTKAVTLVENHDTQPGQSLESTVQPWFKPLAYAFILTRSGGYPSVFYGDMYGTKGTTTREIPALKSKIEPLLKARKDYAYGTQRDYIDNPDVIGWTREGDSTKAKSGLATVITDGPGGSKRMYVGTSNAGEIWYDLTGNRTDKITIGSDGYATFPVNGGSVSVWVQQ

SEQ ID NO: 39005 - protein, 480 aa, Cytophaga sp.
NGTMMQYFEWYVPNDGQQWNRLRTDAPYLSSVGITAVWTPPAYKGTSQADVGYGPYDLYDLGEFNQKGTVRTKYGTKGELKSAVNTLHSNGIQVYGDVVMNHKAGADYTENVTAVEVNPSNRYQETSGEYNIQAWTGFNFPGRGTTYSNWKWQWFHFDGTDWDQSRSLSRIFKFDGKAWDWEVSSENGNYDYLMYADYDYDHPDVVNEMKKWGVWYANEVGLDGYRLDAVKHIKFQFLKDWVDNARAATGKEMFTVGEYWQNDLGALNNYLAKVNYNQSLFDAPLHYNFYAASTGGGYYDMRNILNNTLVASNPTKAVTLVENHDTQPGQSLESTVQPWFKPLAYAFILTRSGGYPSVFYGDMYGTKGTTTREIPALKSKIEPLLKARVDYAYGTQRDYIDNPDVIGWTREGDSTKAKSGLATVITDGPGGSKRMYVGTSNAGEIWYDLTGNRTDKITIGSDGYATFPVNGGSVSVWVQQ

SEQ ID NO: 39006 - protein, 480 aa, Cytophaga sp.
NGTMIQYFEWYVPNDGQQWNRLRTDAPYLSSVGITAVWTPPAYKGTSQADVGYGPYDLYDLGEFNQKGTVRTKYGTKGELKSAVNTLHSNGIQVYGDVVMNHKAGADYTENVTAVEVNPSNRYQETSGEYNIQAWTGFNFPGRGTTYSNWKWQWFHFDGTDWDQSRSLSRIFKFDGKAWDWEVSSENGNYDYLMYADYDYDHPDVVNEMKKWGVWYANEVGLDGYRLDAVKHIKFQFLKDWVDNARAATGKEMFTVGEYWQNDLGALNNYLAKVNYNQSLFDAPLHYNFYAASTGGGYYDMRNILNNTLVASNPTKAVTLVENHDTQPGQSLESTVQPWFKPLAYAFILTRSGGYPSVFYGDMYGTKGTTTREIPALKSKIEPLLKARKDYAYGTQRDYIDNPDVIGWTREGDSTKAKSGLATVITDGPGGSKRMYVGTSNAGEIWYDLTGNRTDKITIGSDGYATFPVNGGSVSVWVQQ

SEQ ID NO: 39007 - protein, 480 aa, Cytophaga sp.
NGTMMQYFEWYVPNDGQQWNRLRTDAPYLSSVGITAVWTPPAYKGTSEADVGYGPYDLYDLGEFNQKGTVRTKYGTKGELKSAVNTLHSNGIQVYGDVVMNHKAGADYTENVTAVEVNPSNRYQETSGEYNIQAWTGFNFPGRGTTYSNWKWQWFHFDGTDWDQSRSLSRIFKFDGKAWDWEVSSENGNYDYLMYADYDYDHPDVVNEMKKWGVWYANEVGLDGYRLDAVKHIKFQFLKDWVDNARAATGKEMFTVGEYWQNDLGALNNYLAKVNYNQSLFDAPLHYNFYAASTGGGYYDMRNILNNTLVASNPTKAVTLVENHDTQPGQSLESTVQPWFKPLAYAFILTRSGGYPSVFYGDMYGTKGTTTREIPALKSKIEPLLKARKDYAYGTQRDYIDNPDVIGWTREGDSTKAKSGLATVITDGPGGSKRMYVGTSNAGEIWYDLTGNRTDKITIGSDGYATFPVNGGSVSVWVQQ

SEQ ID NO: 39008 - protein, 480 aa, Cytophaga sp.
NGTMMQYFEWYVPNDGQQWNRLRTDAPYLSSVGITAVWTPPAYKGTSQADVGYGPYDLYDLGEFNQKGTVRTKYGTKGELKSAVNTLHSNGIQVYGDVVMNHKAGADYTENVTAVEVNPSNRYQETSGEYNIQAWTGFNFPGRGTTYSNWKWQWFHFDGTDWDQSRSLSRIFKFDGKAWDWEVSSENGNYDYLMYADYDYDHPDVVNEMKKWGVWYANEVGLDGYRLDAVKHIKFQFLKDWVDNARAATGKEMFTVGEYWQNDLGALNNYLAKVNYNQSLFDAPLHYNFYAASTGGGYYDMRNILNNTLVASNPTKAVTLVENHDTQPGQSLESTVQPWFKPLAYAFILTRSGGYPSVFYGDMYGTKGTTTREIPALKSKIEPLLKARKDYAYGTQRDYIDNPDVIGWTREGDSTKAKSGLATVITDGPGGSKRMYVGTSNAGEIWYDLTGNRTDKITIGSDGYATFPVNGGSVSVWVMQ

SEQ ID NO: 39009 - protein, 480 aa, Cytophaga sp.
NGTMMQYFEWYVPNDGQQWNRLRTDAPYLSSVGITAVWTPPAYKGTSQADVGYGPYDLYDLGEFNQKGTVRTKYGTKGELKSAVNTLHSNGIQVYGDVVMNHKAGADYTENVTAVEVNPSNRYQETSGEYNIQAWTGFNFPGRGTTYSNWKWQWFHFDGTDWDQSRSLSRIFKFDGKAWDWEVSSENGNYDYLMYADYDYDHPDVVNEMKKWGVWYANEVGLDGYRLDAVKHIKFQFLKDWVDNARAATGKEMFTVGEYWQNDLGALNNYLAKVNYNQSLFDAPLHYNFYAASTGGGYYDMRNILNNTLVASNPTKAVTLVENHDTQPGQSLESTVQPWFKPLAYAFILTRSGGYPSVFYGDMYGTKGTTTREIPALKSKIEPLLKARKDYAHGTQRDYIDNPDVIGWTREGDSTKAKSGLATVITDGPGGSKRMYVGTSNAGEIWYDLTGNRTDKITIGSDGYATFPVNGGSVSVWVQQ

SEQ ID NO: 39010 - protein, 480 aa, Cytophaga sp.
NGTMMQYFEWYVPNDGQQWNRLRTDAPYLSSVGITAVWTPPAYKGTSQADVGYGPYDLYDLGEFNQKGTVRTKYGTKGELKSAVNTLHSNGIQVYGDVVMNHKAGADYTENVTAVEVNPSNRYQETSGEYNIQAWTGFNFPGRGTTYSNWKWQWFHFDGTDWDQSRSLSRIFKFDGKAWDWEVSSENGNYDYLMYADYDYDHPDVVNEMKKWGVWYANEVGLDGYRLDAVKHIKFQFLKDWVDNARAATGKEMFTVGEYWQNDLGALNNYLAKVNYNQSLFDAPLHYNFYAASTGGGYYDMRNILNNTLVASNPTKAVTLVENHDTQPGQSLESTVQPWFKPLAYAFILTRSGGYPSVFYGDMYGTKGTTTREIPALKSKIEPLLKARKDYAYGTQRDYIDNPDVIGWTREGDSTKAQSGLATVITDGPGGSKRMYVGTSNAGEIWYDLTGNRTDKITIGSDGYATFPVNGGSVSVWVQQ

SEQ ID NO: 39011 - protein, 480 aa, Cytophaga sp.
NGTMMQYFEWYVPNDGQQWNRLRTDAPYLSSVGITAVWTPPAYKGTSQADVGYGPYDLYDLGEFNQKGTVRTKYGTKGELKSAVNTLHSNGIQVYGDVVMNHKAGADYTENVTAVEVNPSNRYQETSGEYNIQAWTGFNFPGRGTTYSNWKWQWFHFDGTDWDQSRSLSRIFKFDGKAWDWEVSSENGNYDYLMYADYDYDHPDVVNEMKKWGVWYANEVGLDGYRLDAVKHIKFQFLKDWVDNARAATGKEMFTVGEYWQNDLGALNNYLAKVNYNQSLFDAPLHYNFYAASTGGGYYDMRNILNNTLVASNPTKAVTLVENHDTQPGQSLESTVQPWFKPLAYAFILTRSGGYPSVFYGDMYGTKGTTTREIPALKSKIEPLLKARKDYAYGTQRDYIDNPDVIGWTREGDSTKAKSGLATVITDGLGGSKRMYVGTSNAGEIWYDLTGNRTDKITIGSDGYATFPVNGGSVSVWVQQ

SEQ ID NO: 39012 - protein, 480 aa, Cytophaga sp.
NGTMMQYFEWYVPNDGQQWNRLRTDAPYLSSVGITAVWTPPAYKGTSQADVGYGPYDLYDLGEFNQKGTVRTKYGTKGELKSAVNTLHSNGIQVYGDVVMNHKAGADYTENVTAVEVNPSNRYQETSGEYNIQAWTGFNFPGRGTTYSNWKWQWFHFDGTDWDQSRSLSRIFKFDGKAWDWEVSSENGNYDYLMYADYDYDHPDVVNEMKKWGVWYANEVGLDGYRLDAVKHIKFQFLKDWVDNARAATGKEMFTVGEYWINDLGALNNYLAKVNYNQSLFDAPLHYNFYAASTGGGYYDMRNILNNTLVASNPTKAVTLVENHDTQPGQSLESTVQPWFKPLAYAFILTRSGGYPSVFYGDMYGTKGTTTREIPALKSKIEPLLKARKDYAYGTQRDYIDNPDVIGWTREGDSTKAKSGLATVITDGPGGSKRMYVGTSNAGEIWYDLTGNRTDKITIGSDGYATFPVNGGSVSVWVQQ

SEQ ID NO: 39013 - protein, 480 aa, Cytophaga sp.
NGTMMQYFEWYVPNDGQQWNRLRTDAPYLSSVGITAVWTPPAYKGTSQADVGYGPYDLYDLGEFNQKGTVRTKYGTKGELKSAVNTLHSNGIQVYGDVVMNHKAGADYTENVTAVEVNPSNRYQETSGEYNIQAWTGFNFPGRGTTYSNWKWQWFHFDGTDWDQSRSLSRIFKFDGKAWDWEVSSENGNYDYLMYADYDYDHPDVVNEMKKWGVWYANEVGLDGYRLDAVKHIKFQFLKDWVDNARAATGKEMFTVGEYWQNDLGALNNYLAKVNYNQSLFDAPLHYNFYAASTGGGYYDMRNILNNTLVASNPTKAVTLVENHDTQPGQSLESTVQPWFKPLAYAFILTRSGGYPSVFYGDMYGTKGTTTREIPALKSKIEPLLKARKDYAYGTQRDYIDNPDVIGWTREGDSTKAKSGLATVITDGPGGSKRMYVGTSNAGEIWYDLTGNRTDKITIGSDGYATFPVNGGSVAVWVQQ

SEQ ID NO: 39014 - protein, 480 aa, Cytophaga sp.
NGTMMQYFEWYVPNDGQQWNRLRTDAPYLSSVGITAVWTPPAYKGTSQADVGYGPYDLYDLGEFNQKGTVRTKYGTKGELKSAVNTLHSNGIQVYGDVVMNHKAGADYTENVTAVEVNPSNRYQETSGEYNIQAWTGFNFPGRGTTYSNWKWQWFHFDGTDWDQSRSLSRIFKFDGKAWDWEVSSENGNYDYLMYADYDYDHPDVVNEMKKWGVWYANEVGLDGYRLDAVKHIKFQFLKDWVDNARAATGKEMFTVGEYWQNDLGALNNYLAKVNYNQSLFDAPLHYNFYAASTGGGYYDMRNILNNTLVASNPTKAVTLVENHDTQPGQSLESTVQPWFKPLAYAFILTRSGGYPSVFYGDMYGTKGTTTREIPALKSKIEPLLKARKDYAYGTQRDYIDNPDVIGWTREGDSTKAKSGLATVITDGPGGSKRMYVGTSNAGEIWYDLTGNRTDKITIGSDGYATFPVNGGSVSVWYQQ

SEQ ID NO: 39015 - protein, 480 aa, Cytophaga sp.
NGTMMQYFEWYVPNDGQQWNRLRTDAPYLSSVGITAVWTPPAYKGTSQADVGYGPYDLYDLGEFNQKGTVRTKYGTKGELKSAVNTLHSNGIQVYGDVVMNHKAGADYTENVTAVEVNPSNRYQETSGHYNIQAWTGFNFPGRGTTYSNFKWQWFHFDGTDWDQSRSLSRIFKFDGKAWDWPVSSENGNYDYLMYADYDYDHPDVVNEMKKWGVWYANEVGLDGYRLDAVKHIKFSFLKDWVDNARAATGKEMFTVGEYWQNDLGALNNYLAYVNYNQSLFDAPLHYNFYAASTGGGYYDMRNILNNTLVASNPTKAVTLVENHDTQPGQSLESTVQPWFKPLAYAFILTRSGGYPSVFYGDMYGTKGTTTREIPALKSKIEPLLKARKDYAYGTQRDYIDNPDVIGWTREGDSTKAKSGLATVITDGPGGSKRMYVGTSNAGEIWYDLTGNRTDKITIGSDGYATFPVNGGSVSVWVQQ

SEQ ID NO: 39016 - protein, 480 aa, Cytophaga sp.
NGTMMQYFEWYVPNDGQQWNRLRTDAPYLSSVGITAVWTPPAYKGTSQADVGYGPYDLYDLGEFNQKGTVRTKYGTKGELKSAVNTLHSNGIQVYGDVVMNHKAGADYTENVTAVEVNPSNRYQETSGHYNIQAWTGFNFPGRGTTYSNFKWQWFHFDGTDWDQSRSLSRIFKFDGKAWDWPVSSENGNYDYLMYADYDYDHPDVVNEMKKWGVWYANEVGLDGYRLDAVKHIKFFFLKDWVDNARAATGKEMFTVGEYWQNDLGALNNYLAKVNYNQSLFDAPLHYNFYAASTGGGYYDMRNILNNTLVASNPTKAVTLVENHDTQPGQSLESTVQPWFKPLAYAFILTRSGGYPSVFYGDMYGTKGTTTREIPALKSKIEPLLKARKDYAYGTQRDYIDNPDVIGWTREGDSTKAKSGLATVITDGPGGSKRMYVGTSNAGEIWYDLTGNRTDKITIGSDGYATFPVNGGSVSVWVQQ

SEQ ID NO: 39017 - protein, 480 aa, Cytophaga sp.
NGTMMQYFEWYVPNDGQQWNRLRTDAPYLSSVGITAWWTPPAYKGTSQADVGYGPYDLYDLGEFNQKGTVRTKYGTKGELKSAVNTLHSNGIQVYGDVVMNHKAGADYTENVTAVEVNPSNRYQETSGEYNIQAWTGFNFPGRGTTYSNWKWQWFHFDGTDWDQSRSLSRIFKFDGKAWDWEVSSENGNYDYLMYADYDYDHPDVVNEMKKWGVWYANEVGLDGYRLDAVKHIKFQFLKDWVDNARAATGKEMFTVGEYWQNDLGALNNYLAKVNYNQSLFDAPLHYNFYAASTGGGYYDMRNILNNTLVASNPTKAVTLVENHDTQPGQSLESTVQPWFKPLAYAFILTRSGGYPSVFYGDMYGTKGTTTREIPALKSKIEPLLKARKDYAYGTQRDYIDNPDVIGWTREGDSTKAKSGLATVITDGPGGSKRMYVGTSNAGEIWYDLTGNRTDKITIGSDGYATFPVNGGSVSVWVQQ

SEQ ID NO: 39018 - protein, 480 aa, Cytophaga sp.
NGTMMQYFEWYVPNDGQQWNRLRTDAPYLSSVGITAVWTPPAYKGTSQADVGYGPYDLYDLGEFNQKGTVRTKYGTKGELKSAVNTLHSNGIQVYGDVVMNHKAGADYTENVTAVEVNPSNRYQETSGEGNIQAWTGFNFPGRGTTYSNWKWQWFHFDGTDWDQSRSLSRIFKFDGKAWDWEVSSENGNYDYLMYADYDYDHPDVVNEMKKWGVWYANEVGLDGYRLDAVKHIKFQFLKDWVDNARAATGKEMFTVGEYWQNDLGALNNYLAKVNYNQSLFDAPLHYNFYAASTGGGYYDMRNILNNTLVASNPTKAVTLVENHDTQPGQSLESTVQPWFKPLAYAFILTRSGGYPSVFYGDMYGTKGTTTREIPALKSKIEPLLKARKDYAYGTQRDYIDNPDVIGWTREGDSTKAKSGLATVITDGPGGSKRMYVGTSNAGEIWYDLTGNRTDKITIGSDGYATFPVNGGSVSVWVQQ

SEQ ID NO: 39019 - protein, 480 aa, Cytophaga sp.
NGTMMQYFEWYVPNDGQQWNRLRTDAPYLSSVGITAVWTPPAYKGTSQADVGYGPYDLYDLGEFNQKGTVRTKYGTKGELKSAVNTLHSNGIQVYGDVVMNHKAGADYTENVTAVEVNPSNRYQETSGEYNIQAWTGFNFPGRGTTYSNWKWQWFHFDGTDWDQSRSLSRIFKFDGKAWDWEVSSENGNYDYLMYADYDYDHPDVVNEMKKWGVWYANEVGLDGYRLDAVKHIKFQFLKDWVDNARAATGKEMFTVGEYWQNDLGALNNYLAKVNYNQSLFDAPLHYNFYAASTGGGYYDMRNILNNTLVASNPTKAVTLVENHDTQPGQSLESTVQPWFKPLAYAFILTRSGGYPSVFYGDMYGTKGTTTREIPALKSKIEPLLKARKDYAYGTQRSYIDNPDVIGWTREGDSTKAKSGLATVITDGPGGSKRMYVGTSNAGEIWYDLTGNRTDKITIGSDGYATFPVNGGSVSVWVQQ

SEQ ID NO: 39020 - protein, 480 aa, Cytophaga sp.
NGTMMQYFEWYVPNDGQQWNRLRTDAPYLSSVGITAVWTPPAYKGTSQADVGYGPYDLYDLGEFNQKGTVRTKYGTKGELKSAVNTLHSNGIQVYGDVVMNHKAGADYTENVTAVEVNPSNRYQETSGEYNIQAWTGFNFPGRGTTYSNWKWQWFHFDGTDWDQSRSLSRIFKFDGKAWDWEVSSENGNYDYLMYADYDYDHPDVVNEMKKWGVWYANEVGLDGYRLDAVKHIKFQFLKDWVDNARAATGKEMFTVGEYWQNDLGALNNYLAKVNYNQSLFDAPLHYNFYAASTGGGYYDMRNIINNTLVASNPTKAVTLVENHDTQPGQSLESTVQPWFKPLAYAFILTRSGGYPSVFYGDMYGTKGTTTREIPALKSKIEPLLKARKDYAYGTQRDYIDNPDVIGWTREGDSTKAKSGLATVITDGPGGSKRMYVGTSNAGEIWYDLTGNRTDKITIGSDGYATFPVNGGSVSVWVQQ

SEQ ID NO: 39021 - protein, 480 aa, Cytophaga sp.
NGTMMQYFEWYVPNDGQQWNRLRTDAPYLSSVGITAVWTPPAYKGTSQADVGYGPYDLYDLGEFNQKGTVRTKYGTKGELKSAVNTLHSNGIQVYGDVVMNHKAGADYTENVTAVEVNPSNRYQETSGEYNIQAWTGFNFPGRGTTYSNWKWQWFHFDGTDWDQSRSLSRIFKFDGKAWDWEVSSENGNYDYLMYADYDYDHPDVVNEMKKWGVWYANEVGLDGYRLDAVKHIKFQFLKDWVDNARAATGKEMFTVGEYWQNDLTALNNYLAKVNYNQSLFDAPLHYNFYAASTGGGYYDMRNILNNTLVASNPTKAVTLVENHDTQPGQSLESTVQPWFKPLAYAFILTRSGGYPSVFYGDMYGTKGTTTREIPALKSKIEPLLKARKDYAYGTQRDYIDNPDVIGWTREGDSTKAKSGLATVITDGPGGSKRMYVGTSNAGEIWYDLTGNRTDKITIGSDGYATFPVNGGSVSVWVQQ

SEQ ID NO: 39022 - protein, 480 aa, Cytophaga sp.
NGTMMQYFEWYVPNDGQQWNRLRTDAPYLSSVGITAVWTPPAYKGTSQADVGYGPYDLYDLGEFNQKGTVRTKYGTKGELKSAVNTLHSNGIQVYGDVVMNHKAGADYTENVTAVEVNPSNRYQETSGAYNIQAWTGFNFPGRGTTYSNWKWQWFHFDGTDWDQSRSLSRIFKFDGKAWDWEVSSENGNYDYLMYADYDYDHPDVVNEMKKWGVWYANEVGLDGYRLDAVKHIKFQFLKDWVDNARAATGKEMFTVGEYWQNDLGALNNYLAKVNYNQSLFDAPLHYNFYAASTGGGYYDMRNILNNTLVASNPTKAVTLVENHDTQPGQSLESTVQPWFKPLAYAFILTRSGGYPSVFYGDMYGTKGTTTREIPALKSKIEPLLKARKDYAYGTQRDYIDNPDVIGWTREGDSTKAKSGLATVITDGPGGSKRMYVGTSNAGEIWYDLTGNRTDKITIGSDGYATFPVNGGSVSVWVQQ

SEQ ID NO: 39023 - protein, 480 aa, Cytophaga sp.
NGTMMQYFEWYVPNDGQQWNRLRTDAPYLSSVGITAVWTPPAYKGTSQADVGYGPYDLYDLGEFNQKGTVRTKYGTKGELKSAVNTLHSNGIQVYGDVVMNHKAGADYTENVTAVEVNPSNRYQETSGEYNIQAWTGFNFPGRGTTYSNWKWQWFHFDGTDWDQSRSLSRIFKFDMKAWDWEVSSENGNYDYLMYADYDYDHPDVVNEMKKWGVWYANEVGLDGYRLDAVKHIKFQFLKDWVDNARAATGKEMFTVGEYWQNDLGALNNYLAKVNYNQSLFDAPLHYNFYAASTGGGYYDMRNILNNTLVASNPTKAVTLVENHDTQPGQSLESTVQPWFKPLAYAFILTRSGGYPSVFYGDMYGTKGTTTREIPALKSKIEPLLKARKDYAYGTQRDYIDNPDVIGWTREGDSTKAKSGLATVITDGPGGSKRMYVGTSNAGEIWYDLTGNRTDKITIGSDGYATFPVNGGSVSVWVQQ

SEQ ID NO: 39024 - protein, 480 aa, Cytophaga sp.
NGTMMQYFEWYVPNDGQQWNRLRTDAPYLSSVGITAVWTPPAYKGTSQADVGYGPYDLYDLGEFNQKGTVRTKYGTKGELKSAVNTLHSNGIQVYGDVVMNHKAGADYTENVTAVEVNPSNRYQETSGEYNIQAWTGFNFPGRGTTYSNWKWQWFHFDGTDWDQSRSLSRIFKFDGKAWDWEVSSENGNYDYLMYADYDYDHPDVVNEMKKWGVWYANEVGLDGYRLDAVKHIKFQFLKDWVDNARAATGKEMFTVGEYWQNDLGALNNYLAKVNYNQYLFDAPLHYNFYAASTGGGYYDMRNILNNTLVASNPTKAVTLVENHDTQPGQSLESTVQPWFKPLAYAFILTRSGGYPSVFYGDMYGTKGTTTREIPALKSKIEPLLKARKDYAYGTQRDYIDNPDVIGWTREGDSTKAKSGLATVITDGPGGSKRMYVGTSNAGEIWYDLTGNRTDKITIGSDGYATFPVNGGSVSVWVQQ

SEQ ID NO: 39025 - protein, 480 aa, Cytophaga sp.
NGTMMQYFEWYVPNDGQQWNRLRTDAPYLSSVGITAVWTPPAYKGTSQADVGYGPYDLYDLGEFNQKGTVRTKYGTKGELKSAVNTLHSNGIQVYGDVVMNHKAGADYTENVTAVEVNPSGRYQETSGEYNIQAWTGFNFPGRGTTYSNWKWQWFHFDGTDWDQSRSLSRIFKFDGKAWDWEVSSENGNYDYLMYADYDYDHPDVVNEMKKWGVWYANEVGLDGYRLDAVKHIKFQFLKDWVDNARAATGKEMFTVGEYWQNDLGALNNYLAKVNYNQSLFDAPLHYNFYAASTGGGYYDMRNILNNTLVASNPTKAVTLVENHDTQPGQSLESTVQPWFKPLAYAFILTRSGGYPSVFYGDMYGTKGTTTREIPALKSKIEPLLKARKDYAYGTQRDYIDNPDVIGWTREGDSTKAKSGLATVITDGPGGSKRMYVGTSNAGEIWYDLTGNRTDKITIGSDGYATFPVNGGSVSVWVQQ

SEQ ID NO: 39026 - protein, 480 aa, Cytophaga sp.
NGTMMQYFEWYVPNDGQQWNRLRTDAPYLSSVGITAVWTPPAYKGTSQADVGYGPYDLYDLGEFNQKGTVRTKYGTKGELKSAVNTLHSNGIQVYGDVVMNHKAGADYTENVTAVEVNPSNRYQETSGEYNIQAWTGFNFPGRGTTYSNWKWQWFHFDGTDWDQSRSLSRIFKFDGKAWDWEVSSENGNYDYLMYADYDYDHPDVVNEMKKWGVWYANEVGLDGYRLDAVKHIKFQFLKDWVDNARAATGKEMFTVGEYWQNDLGALNNYLAKVNYNQSLFDAPLHYNFYAASTGGGYYDMRNILNNTLVASNPTKAVTLVENHDTQPGQSLESTVQPWFKPLAYAFILTRSGGIPSVFYGDMYGTKGTTTREIPALKSKIEPLLKARKDYAYGTQRDYIDNPDVIGWTREGDSTKAKSGLATVITDGPGGSKRMYVGTSNAGEIWYDLTGNRTDKITIGSDGYATFPVNGGSVSVWVQQ

SEQ ID NO: 39027 - protein, 480 aa, Cytophaga sp.
NGTMMQYFEWYVPNDGMQWNRLRTDAPYLSSVGITAVWTPPAYKGTSQADVGYGPYDLYDLGEFNQKGTVRTKYGTKGELKSAVNTLHSNGIQVYGDVVMNHKAGADYTENVTAVEVNPSNRYQETSGEYNIQAWTGFNFPGRGTTYSNWKWQWFHFDGTDWDQSRSLSRIFKFDGKAWDWEVSSENGNYDYLMYADYDYDHPDVVNEMKKWGVWYANEVGLDGYRLDAVKHIKFQFLKDWVDNARAATGKEMFTVGEYWQNDLGALNNYLAKVNYNQSLFDAPLHYNFYAASTGGGYYDMRNILNNTLVASNPTKAVTLVENHDTQPGQSLESTVQPWFKPLAYAFILTRSGGYPSVFYGDMYGTKGTTTREIPALKSKIEPLLKARKDYAYGTQRDYIDNPDVIGWTREGDSTKAKSGLATVITDGPGGSKRMYVGTSNAGEIWYDLTGNRTDKITIGSDGYATFPVNGGSVSVWVQQ

SEQ ID NO: 39028 - protein, 480 aa, Cytophaga sp.
NGTMMQYFEWYVPNDGQQWNRLRTDAPYLSSVGITAVWTPPAYKGTSQADVGYGPYDLYDLGEFNQKGTVRTKYGTKGELKSAVNTLHSNGIQVYGDVVMNHKAGADYTENVTAVEVNPSNRYQETSGEYNIQAWTGFNFPGRGTTYSNWKWQWFHFDGTDWDQSRSLSRIFKFDGKAWDWEVSSENGNYDYLMYADYDYTHPDVVNEMKKWGVWYANEVGLDGYRLDAVKHIKFQFLKDWVDNARAATGKEMFTVGEYWQNDLGALNNYLAKVNYNQSLFDAPLHYNFYAASTGGGYYDMRNILNNTLVASNPTKAVTLVENHDTQPGQSLESTVQPWFKPLAYAFILTRSGGYPSVFYGDMYGTKGTTTREIPALKSKIEPLLKARKDYAYGTQRDYIDNPDVIGWTREGDSTKAKSGLATVITDGPGGSKRMYVGTSNAGEIWYDLTGNRTDKITIGSDGYATFPVNGGSVSVWVQQ

SEQ ID NO: 39029 - protein, 480 aa, Cytophaga sp.
NGTMMQYFEWYVPNDGQQWNRLRTDAPYLSSVGITAVWTPPAYKGTSQADVGYGPYDLYDLGEFNQKGTVRTKYGTKGELKSAVNTLHSNGIQVYGDVVMNHKAGADYTENVTAVEVNPSNRYQETSGEYNIQAWTGFNFPGRGTTYSNWKWQWFHFDGTDWDQSRSLSRIFKFDGKAWDWEVSSENGNYDYLMYADYDYDHPDVVNEMKKWGVWYANEVGLDGYRLDAVKHIKFQFLKDWVDNARAATGKEMFTVGEYWQNDLGALNNYLAKVNYNQSLFDAPLHYNFYAASTGGGYYDMRNILNNTLVASNPTKAVTLVENHDTQPGQSLESTVQPWFKPLAYAFILTRSGGYPSVFYGDMYGTKGTTTREIPALKSKIEPLLKCRKDYAYGTQRDYIDNPDVIGWTREGDSTKAKSGLATVITDGPGGSKRMYVGTSNAGEIWYDLTGNRTDKITIGSDGYATFPVNGGSVSVWVQQ

SEQ ID NO: 39030 - protein, 480 aa, Cytophaga sp.
NGTMMQYFEWYVPNDGQQWNRLRTDAPYLSSVGITAVWTPPAYKGTSQADVGYGPYDLFDLGEFNQKGTVRTKYGTKGELKSAVNTLHSNGIQVYGDVVMNHKAGADYTENVTAVEVNPSNRYQETSGEYNIQAWTGFNFPGRGTTYSNWKWQWFHFDGTDWDQSRSLSRIFKFDGKAWDWEVSSENGNYDYLMYADYDYDHPDVVNEMKKWGVWYANEVGLDGYRLDAVKHIKFQFLKDWVDNARAATGKEMFTVGEYWQNDLGALNNYLAKVNYNQSLFDAPLHYNFYAASTGGGYYDMRNILNNTLVASNPTKAVTLVENHDTQPGQSLESTVQPWFKPLAYAFILTRSGGYPSVFYGDMYGTKGTTTREIPALKSKIEPLLKARKDYAYGTQRDYIDNPDVIGWTREGDSTKAKSGLATVITDGPGGSKRMYVGTSNAGEIWYDLTGNRTDKITIGSDGYATFPVNGGSVSVWVQQ

SEQ ID NO: 39031 - protein, 480 aa, Cytophaga sp.
NGTMMQYFEWYVPNDGQQWNRLRTDAPYLSSVGITAVWTPPAYKGTSQADVGYGPYDLYDLGEFNQKGTVRTKYGTKGELKSAVNTLHSNGIQVYGDVVMNHKAGADYTENVTANEVNPSNRYQETSGEYNIQAWTGFNFPGRGTTYSNWKWQWFHFDGTDWDQSRSLSRIFKFDGKAWDWEVSSENGNYDYLMYADYDYDHPDVVNEMKKWGVWYANEVGLDGYRLDAVKHIKFQFLKDWVDNARAATGKEMFTVGEYWQNDLGALNNYLAKVNYNQSLFDAPLHYNFYAASTGGGYYDMRNILNNTLVASNPTKAVTLVENHDTQPGQSLESTVQPWFKPLAYAFILTRSGGYPSVFYGDMYGTKGTTTREIPALKSKIEPLLKARKDYAYGTQRDYIDNPDVIGWTREGDSTKAKSGLATVITDGPGGSKRMYVGTSNAGEIWYDLTGNRTDKITIGSDGYATFPVNGGSVSVWVQQ

SEQ ID NO: 39032 - protein, 480 aa, Cytophaga sp.
NGTMMQYFEWYVPNDGQQWNRLRTDAPYLSSVGITAVWTPPAYKGTSQADVGYGPYDLYDLGEFNQKGTVRTKYGTKGELKSAVNTLHSNGIQVYGDVVMNHKAGADYTENVTAVEVNPSNRYQETSGEYNIQAWTGFNFPGRGTMYSNWKWQWFHFDGTDWDQSRSLSRIFKFDGKAWDWEVSSENGNYDYLMYADYDYDHPDVVNEMKKWGVWYANEVGLDGYRLDAVKHIKFQFLKDWVDNARAATGKEMFTVGEYWQNDLGALNNYLAKVNYNQSLFDAPLHYNFYAASTGGGYYDMRNILNNTLVASNPTKAVTLVENHDTQPGQSLESTVQPWFKPLAYAFILTRSGGYPSVFYGDMYGTKGTTTREIPALKSKIEPLLKARKDYAYGTQRDYIDNPDVIGWTREGDSTKAKSGLATVITDGPGGSKRMYVGTSNAGEIWYDLTGNRTDKITIGSDGYATFPVNGGSVSVWVQQ

SEQ ID NO: 39033 - protein, 480 aa, Cytophaga sp.
NGTMMQYFEWYVPNDGQQWNRLRTDAPYLSSVGITAVWTPPAYKGTSQADVGYGPYDLYDLGEFNQKGTVRTKYGYKGELKSAVNTLHSNGIQVYGDVVMNHKAGADYTENVTAVEVNPSNRYQETSGEYNIQAWTGFNFPGRGTTYSNWKWQWFHFDGTDWDQSRSLSRIFKFDGKAWDWEVSSENGNYDYLMYADYDYDHPDVVNEMKKWGVWYANEVGLDGYRLDAVKHIKFQFLKDWVDNARAATGKEMFTVGEYWQNDLGALNNYLAKVNYNQSLFDAPLHYNFYAASTGGGYYDMRNILNNTLVASNPTKAVTLVENHDTQPGQSLESTVQPWFKPLAYAFILTRSGGYPSVFYGDMYGTKGTTTREIPALKSKIEPLLKARKDYAYGTQRDYIDNPDVIGWTREGDSTKAKSGLATVITDGPGGSKRMYVGTSNAGEIWYDLTGNRTDKITIGSDGYATFPVNGGSVSVWVQQ

SEQ ID NO: 39034 - protein, 480 aa, Cytophaga sp.
NGTMMQYFEWYVPNDGQQWNRLRTDAPYLSSVGITAVWTPPAYKGTSQADVGYGPYDLYDLGEFNQKGTVRTKYGTKGELKSAVNTLHSNGIQVYGDVVMNHKAGADYTENVTAVEVNPSNRYQETSGEYNIQAWTGFNFPGRGTTYSNWKWQWFHFDGTDWDQSRSLSRIFKFDGKAWDWEVSSENGNYDYLMYADYDYDHPDVVNEMKKWGVWYANEVGLDGYRLDAVKHIKFQFLKDWVDNARAATGKEMFTVGEYWQNDLGALNNYLAKVNYNQSLFDAPLHYNFYAASTGGGYYDMRNILNNTLVASNPTKAVTLVENHDTQPGQSLESTVQPWFKPIAYAFILTRSGGYPSVFYGDMYGTKGTTTREIPALKSKIEPLLKARKDYAYGTQRDYIDNPDVIGWTREGDSTKAKSGLATVITDGPGGSKRMYVGTSNAGEIWYDLTGNRTDKITIGSDGYATFPVNGGSVSVWVQQ

SEQ ID NO: 39035 - protein, 480 aa, Cytophaga sp.
NGTMMQYFEWYVPNDGQQWNRLRTDAPYLSSVGITAVWTPPAYKGTSQADVGYGPYDLYDLGEFNQKGTVRTKYGTKGELKSAVNTLHSNGIQVYGDVVMNHKAGADYTENVTAVEVNPSNRYQETSGEYNIQAWTGFNFPGRGTTYSNWKWQWFHFDGTDWDQSRSLSRIFKFDGAAWDWEVSSENGNYDYLMYADYDYDHPDVVNEMKKWGVWYANEVGLDGYRLDAVKHIKFQFLKDWVDNARAATGKEMFTVGEYWQNDLGALNNYLAKVNYNQSLFDAPLHYNFYAASTGGGYYDMRNILNNTLVASNPTKAVTLVENHDTQPGQSLESTVQPWFKPLAYAFILTRSGGYPSVFYGDMYGTKGTTTREIPALKSKIEPLLKARKDYAYGTQRDYIDNPDVIGWTREGDSTKAKSGLATVITDGPGGSKRMYVGTSNAGEIWYDLTGNRTDKITIGSDGYATFPVNGGSVSVWVQQ

SEQ ID NO: 39036 - protein, 480 aa, Cytophaga sp.
NGTMMQYFEWYVPNDGQQWNRLRTDAPYLSSVGITAVWTPPAYKGTSQADVGYGPYDLYDLGEFNQKGTVRTKYGTKGELKSAVNTLHSNGIQVYGDVVMNHKAGADYTENVTAVEVNPSNRYQETSGEYNIQAWTGFNFPGRGTTYSNWKWQWFHFDGTDWDQSRSLSRIFKFDGKAWDWEVSSENGNYDYLMYADYDYDHPDVVNEMKKWGVWYANEVGLDGYRLDAVKHIKFQFLKDWVDNARAATGKEMFTVGEYWQNDLGALNNYLAKVNYNQSLFDAPLHYNFYAASTGGGYYDMRNILNNTLVASNPTKAVTLVENHDTQPGQSLESTVQPWFKPLAYAFILTRSGGYPSVFYGDMYGTKGTTTREIPALKSKIEPLLKARKDYAYGTQRDYIDNPDVIGWTREGDSTKAKSGLATVITDGPGGSKRMYVGTSNAGEIWYDLTGNRTDKITIGHDGYATFPVNGGSVSVWVQQ

SEQ ID NO: 39037 - protein, 480 aa, Cytophaga sp.
NGTMMQYFEWYVPNDGQQWNRLRTDAPYLSSVGITAVWTPPAYKGTSQADVGYGPYDLYDLGEFNQKGTVRTKYGTKGELKSAVNTLHSNGIQVYGDVVMNHKAGADYTENVTAVEVNPSNRYQETSGHYNIQAWTGFNFPGRGTTYSNFKWQWFHFDGTDWDQSRSLSRIFKFDGKAWDWPVSSENGNYDYLMYADYDYDHPDVVNEMKKWGVWYANEVGLDGYRLDAVKHIKFHFLKDWVDNARAATGKEMFTVGEYWQNDLGALNNYLAKVNYNQSLFDAPLHYNFYAASTGGGYYDMRNILNNTLVASNPTKAVTLVENHDTQPGQSLESTVQPWFKPLAYAFILTRSGGYPSVFYGDMYGTKGTTTREIPALKSKIEPLLKARKDYAYGTQRDYIDNPDVIGWTREGDSTKAKSGLATVITDGPGGSKRMYVGTSNAGEIWYDLTGNRTDKITIGSDGYATFPVNGGSVSVWVQQ

SEQ ID NO: 39038 - protein, 480 aa, Cytophaga sp.
NGTMMQYFEWYVPNDGQQWNRLRTDAPYLSSVGITAVWTPPAYKGTSQADVGYGPYDLYDLGEFNQKGTVRTKYGTKGELKSAVNTLHSNGIQVYGDVVMNHKAGADYTENVTAVEVNPSNRYQETSGEYNIQAWTGFNFPGRGTTYSNWKWQWFHFDGTDWDQSRSLSRIFKFDGKAWDWEVSSENGNYDYLMYADYDYDHPDVVNEMKKWGVWYANEVGLDGYRLDAVKHIKFQFLKDWVDNARAATGKEMFTVGEYWQNDLGALNNYLAKVNYNQSLFDAPLHYNFYAASTGGGYYDMRNILNNTLVASNPTKAVTLVENHDTQPGQSLESTVQPWFKPLAYAFILTRSGGYPSVFYGDMYGTKGTTTREIPALKSKIEPLLKARKDYAYGTQRDYIDNPDVIGWTREGDSTKAKSGLATVITDGPGGSKRMYVGTSNAGEIWYDLTGNRTDKITIGSDGYATFPVNGGSPSVWVQQ

SEQ ID NO: 39039 - protein, 480 aa, Cytophaga sp.
NGTMMQYFEWYVPNDGQQWNRLRTDAPYLSSVGITAVWTPPAYKGTSQADVGYGPYDLYDLGEFNQKGTVRTKYGTKGELKSAVNTLHSNGIQVYGDVVMNHKAGADYTENVTAVEVNPSNRYQETSGEYNIQAWTGFNFPGRGTTYSNWKWQWFHFDGTDWDQSRSLSRIFKFDGKAWDWEVSSENGNYDYLMYADYDYDHPDVVNEMKKWGVWYANEVGLDGYRLDAVKHIKFQFLKMWVDNARAATGKEMFTVGEYWQNDLGALNNYLAKVNYNQSLFDAPLHYNFYAASTGGGYYDMRNILNNTLVASNPTKAVTLVENHDTQPGQSLESTVQPWFKPLAYAFILTRSGGYPSVFYGDMYGTKGTTTREIPALKSKIEPLLKARKDYAYGTQRDYIDNPDVIGWTREGDSTKAKSGLATVITDGPGGSKRMYVGTSNAGEIWYDLTGNRTDKITIGSDGYATFPVNGGSVSVWVQQ

SEQ ID NO: 39040 - protein, 480 aa, Cytophaga sp.
NGTMMQYFEWYVPNDGQQWNRLRTDAPYLSSVGITAVWTPPAYKGTSQADVGYGPYDLYDLGEFNQKGTVRTKYGTKGELKSAVNTLHSNGIQVYGDVVMNHKAGADYTENVTAVEVNPSNRYQETSGEYNIQAWTGFNFPGRGTTYSNWKWQWFHFDGTDWDQSRSLSRIFKFDGKAWDWEVSSENGNYDYLMYADYDYDHPDVVNEMKKWGVWYANEVGLDGYRLDAVKHIKFQFLKDWVDNARAATGKEMFTVGEYWQNDLGALNNYLAKVNYNQSLFDAPLHYNFYAASTGGGYYDMRNILNNTLVASNPTKAVTLVENHDTQPGQSLESTVQPWFKPLAYAFILTRSGGYPSVFYGDMIGTKGTTTREIPALKSKIEPLLKARKDYAYGTQRDYIDNPDVIGWTREGDSTKAKSGLATVITDGPGGSKRMYVGTSNAGEIWYDLTGNRTDKITIGSDGYATFPVNGGSVSVWVQQ

SEQ ID NO: 39041 - protein, 480 aa, Cytophaga sp.
NGTMMQYFEWYVPNDGQQWNRLRTDAPYLSSVGITAVWTPPAYKGTSQADVGYGPYDLYDLGEFNQKGTVRTKYGTKGELKSAVNTLHSNGIQVYGDVVMNHKAGADYTENVTAVEVNPSNRYQETSGEYNIQAWTGFNFPGRGTTYSNWKWQWFHFDGTDWDQSRSLSRIFKFDGKAWDWEVSSENGNYDYLMYADYDYDHPDVVNEMKKWGVWYANEVGLDGYRLDAVKHIKFQFLKDWVDNARAATGKEMFTVGEYWQNDLGALNNYLAKVNYNQSLFDAPLHYNFYAASTGGGYYDMRNILNNTLVASNPTKAVTLVENHDTQPGQSLESTVQPWFKPLAYAFILTRSGGYPSVFYGDMYGTKGTTTREIPALKSKIEPLLKARKDYAYGTQRDYIDNPDVIGWTREGDSTKAKSGLATVITDGPGGSKRMYVGTSNAGEIWYDLTGNRTDKITIGSDGYATFPVNGLSVSVWVQQ

SEQ ID NO: 39042 - protein, 480 aa, Cytophaga sp.
NGTMMQYFEWYVPNDGQQWNRLRTDAPYLSSVGITAVWTPPAYKGTSQADVGYGPYDLYDLGEFNQKGTVRTKYGTKGELKSAVNTLHSNGIQVYGDVVMNHKAGADYTENVTAVEVNPSNRYQETSGHYNIQAWTGFNFPGRGTTYSNFKWQWFHFDGTDWDQSRSLSRIFKFDGKAWDWPVSSENGNYDYLMYADYDYDHPDVVNEMKKWGVWYANEVGLDGYRLDAVKHIKFQFLKDWVDNARAATGKEMFTVGEYWQNDLGALNNYLAKVNYNQSLFDAPLHYNFYAASTGGGYYDMRNILNNTLVASNPTKAVTLVENHDTQPGQSLESTVQPWFKPLAYAFILTRSGGYPSVFYGDMYGTKGTTTREIPALKSKIEPLLKARKDYAYGTQRDYIDNPDVIGWTREGDSTKAKSGLATVITDGPGGSKRMYVGTSNAGEIWYDLTGNRTDKITIGSDGYATFPVNGGSVSVWVQQ

SEQ ID NO: 39043 - protein, 480 aa, Cytophaga sp.
NGTMMQYFEWYVPNDGQQWNRLRTDAPYLSSVGITAVWTPPAYKGTSQADVGYGPYDLYDLGEFNQKGTVRTKYGTKGELKSAVNTLHSNGIQVYGDVVMNHKAGADYTENVTAVEVNPSNRYQETSGEYNIQAWTGFNFPGRGTTYSNWKWQWFHFDGTDWDQSRSLSRIFKFDGKAWDWEVSSKNGNYDYLMYADYDYDHPDVVNEMKKWGVWYANEVGLDGYRLDAVKHIKFQFLKDWVDNARAATGKEMFTVGEYWQNDLGALNNYLAKVNYNQSLFDAPLHYNFYAASTGGGYYDMRNILNNTLVASNPTKAVTLVENHDTQPGQSLESTVQPWFKPLAYAFILTRSGGYPSVFYGDMYGTKGTTTREIPALKSKIEPLLKARKDYAYGTQRDYIDNPDVIGWTREGDSTKAKSGLATVITDGPGGSKRMYVGTSNAGEIWYDLTGNRTDKITIGSDGYATFPVNGGSVSVWVQQ

SEQ ID NO: 39044 - protein, 480 aa, Cytophaga sp.
NGTMMQYFEWYVPNDGQQWNRLRTDAPYLSSVGITAVWTPPAYKGTSQADVGYGPYDLYDLGEFNQKGTVRTKYGTRGELKSAVNTLHSNGIQVYGDVVMNHKAGADYTENVTAVEVNPSNRYQETSGEYNIQAWTGFNFPGRGTTYSNWKWQWFHFDGTDWDQSRSLSRIFKFDGKAWDWEVSSENGNYDYLMYADYDYDHPDVVNEMKKWGVWYANEVGLDGYRLDAVKHIKFQFLKDWVDNARAATGKEMFTVGEYWQNDLGALNNYLAKVNYNQSLFDAPLHYNFYAASTGGGYYDMRNILNNTLVASNPTKAVTLVENHDTQPGQSLESTVQPWFKPLAYAFILTRSGGYPSVFYGDMYGTKGTTTREIPALKSKIEPLLKARKDYAYGTQRDYIDNPDVIGWTREGDSTKAKSGLATVITDGPGGSKRMYVGTSNAGEIWYDLTGNRTDKITIGSDGYATFPVNGGSVSVWVQQ

SEQ ID NO: 39045 - protein, 480 aa, Cytophaga sp.
NGTMMQYFEWYVPNDGQQWNRLRTDAPYLSSVGITAVWTPPAYKGTSQADVGYGPYDLYDLGEFNQKGTVRTKYGTKGELKSAVNTLHSNGIQVYGDVVMNHKAGADYTENVTAVEVNPSNRYQETSGEYNIQVWTGFNFPGRGTTYSNWKWQWFHFDGTDWDQSRSLSRIFKFDGKAWDWEVSSENGNYDYLMYADYDYDHPDVVNEMKKWGVWYANEVGLDGYRLDAVKHIKFQFLKDWVDNARAATGKEMFTVGEYWQNDLGALNNYLAKVNYNQSLFDAPLHYNFYAASTGGGYYDMRNILNNTLVASNPTKAVTLVENHDTQPGQSLESTVQPWFKPLAYAFILTRSGGYPSVFYGDMYGTKGTTTREIPALKSKIEPLLKARKDYAYGTQRDYIDNPDVIGWTREGDSTKAKSGLATVITDGPGGSKRMYVGTSNAGEIWYDLTGNRTDKITIGSDGYATFPVNGGSVSVWVQQ

SEQ ID NO: 39046 - protein, 480 aa, Cytophaga sp.
NGTMMQYFEWYVPNDGQQWNRLRTDAPYLSSVGITAVWTPPAYKGTSQADVGYGPYDLYDLGEFNQKGTVRTKYGTKGELKSAVNTLHSNGIQVYGDVVMNHKAGADYTENVTAVEVNPSNRYQETSGEYNIQAWTGFNFPGRGTTYSNWKWQWFHFDGTDWDQSRSLSRIFKFDGKAWDWEVSSENGNYDYLMYADYDYDHPDVVNEMKKWGVWYANEVGLDGYRLDAVKHIKFQFLKDWVDNARAATGKEMFTVGEYWQNDLGALNNYLAKVNYNQSLFDAPLHYNFYAASTGGGYYDMRNILNNTLVASNPTKAVTLVENHDTQPGQSLESTVQPWFKPLAYAFILTRSGGYPSVFYGDMYGTKGTTTREIPALKSKIEPLLKARKDYAWGTQRDYIDNPDVIGWTREGDSTKAKSGLATVITDGPGGSKRMYVGTSNAGEIWYDLTGNRTDKITIGSDGYATFPVNGGSVSVWVQQ

SEQ ID NO: 39047 - protein, 480 aa, Cytophaga sp.
NGTMMQYFEWYVPNDGQQWNRLRTDAPYLSSVGITAVWTPPAYKGTSQADVGYGPYDLYDLGEFNQKGTVRTKYGTKGELKSAVNTLHSNGIQVYGDVVMNHKAGADYTENVTAVEVNPSNRYQETSGEYNIQAWTGFNFPGRGTTYSNWKWQWFHFDGTDWDQSRSLSRIFKFDGKAWDWEVSSENGNYDYLMYADYDYDHPDVVNEMKKWGVWYANEVGLDGYRLDAVKHIKFQFLKDWVDNARAATGKEMFTVGEYWQSDLGALNNYLAKVNYNQSLFDAPLHYNFYAASTGGGYYDMRNILNNTLVASNPTKAVTLVENHDTQPGQSLESTVQPWFKPLAYAFILTRSGGYPSVFYGDMYGTKGTTTREIPALKSKIEPLLKARKDYAYGTQRDYIDNPDVIGWTREGDSTKAKSGLATVITDGPGGSKRMYVGTSNAGEIWYDLTGNRTDKITIGSDGYATFPVNGGSVSVWVQQ

SEQ ID NO: 39048 - protein, 480 aa, Cytophaga sp.
NGTMMQYFEWYVPNDGQQWNRLRTDAPYLSSVGITAVWTPPAYKGTSQADVGYGPYDLYDLGEFNQKGTVRTKYGTKGELKSAVNTLHSNGIQVYGDVVMNHKAGADYTENVTAVEVNPSNRYQETSGDYNIQAWTGFNFPGRGTTYSNWKWQWFHFDGTDWDQSRSLSRIFKFDGKAWDWEVSSENGNYDYLMYADYDYDHPDVVNEMKKWGVWYANEVGLDGYRLDAVKHIKFQFLKDWVDNARAATGKEMFTVGEYWQNDLGALNNYLAKVNYNQSLFDAPLHYNFYAASTGGGYYDMRNILNNTLVASNPTKAVTLVENHDTQPGQSLESTVQPWFKPLAYAFILTRSGGYPSVFYGDMYGTKGTTTREIPALKSKIEPLLKARKDYAYGTQRDYIDNPDVIGWTREGDSTKAKSGLATVITDGPGGSKRMYVGTSNAGEIWYDLTGNRTDKITIGSDGYATFPVNGGSVSVWVQQ

SEQ ID NO: 39049 - protein, 480 aa, Cytophaga sp.
NGTMMQYFEWYVPNDGQQWNRLRTDAPYLSSVGITAVWTPPAYKGTSQADVGYGPYDLYDLGEFNQKGTVRTKYGTKGELKSAVNTLHSNGIQVYGDVVMNHKAGADYTTNVTAVEVNPSNRYQETSGEYNIQAWTGFNFPGRGTTYSNWKWQWFHFDGTDWDQSRSLSRIFKFDGKAWDWEVSSENGNYDYLMYADYDYDHPDVVNEMKKWGVWYANEVGLDGYRLDAVKHIKFQFLKDWVDNARAATGKEMFTVGEYWQNDLGALNNYLAKVNYNQSLFDAPLHYNFYAASTGGGYYDMRNILNNTLVASNPTKAVTLVENHDTQPGQSLESTVQPWFKPLAYAFILTRSGGYPSVFYGDMYGTKGTTTREIPALKSKIEPLLKARKDYAYGTQRDYIDNPDVIGWTREGDSTKAKSGLATVITDGPGGSKRMYVGTSNAGEIWYDLTGNRTDKITIGSDGYATFPVNGGSVSVWVQQ

SEQ ID NO: 39050 - protein, 480 aa, Cytophaga sp.
NGTMMQYFEWYVPNDGQQWNRLRTDAPYLSSVGITAVWTPPAYKGTSQADVGYGPYDLYDLGEFNQKGTVRTKYGTKGELKSAVNTLHSNGIQVYGDVVMNHKAGADYTENVTAVEVNPSNRYQETSGEYNIQAWTGFNFPGRGTTYSNWKWQWFHFDGTDWDQSRSLSRIFKFDGKAWDWEVSSENGNYDYLMYADYDYDHPDVVNEMKKWGVWIANEVGLDGYRLDAVKHIKFQFLKDWVDNARAATGKEMFTVGEYWQNDLGALNNYLAKVNYNQSLFDAPLHYNFYAASTGGGYYDMRNILNNTLVASNPTKAVTLVENHDTQPGQSLESTVQPWFKPLAYAFILTRSGGYPSVFYGDMYGTKGTTTREIPALKSKIEPLLKARKDYAYGTQRDYIDNPDVIGWTREGDSTKAKSGLATVITDGPGGSKRMYVGTSNAGEIWYDLTGNRTDKITIGSDGYATFPVNGGSVSVWVQQ

SEQ ID NO: 39051 - protein, 480 aa, Cytophaga sp.
NGTMMQYFEWYVPNDGQQWNRLRTDAPYLSSVGITAVWTPPAYKGTSQADVGYGPYDLYDLGEFNQKGTVRTKYGTKGELKSAVNTLHSNGIQVYGDVVMNHKAGADYTENVTAVEVNPSNRYQETSGEYNIQAWTGFNFPGRGTTYSNWKWQWFHFDGTDWDQSRSLSRIFKFDGKAWDWEVSSENGNYDYLMYADYDYDHPDVVNEMKKWGVWYANEVGLDGYRLDAVKHIKFQFLKDWVDNARAATGKEMFTVGEYWQNDLGALNNYLAKVNYNQSLFDAPLHYNFYAASTGGGYYDMRNILNNTLVASNPTKAVTLVENHDTQPGQSLESTVQPWFKPLAYAFILTRSGGYPSVFYGDMYGTKGTTTREIPALKSKIEPLLKARKDYAYGTQRDYIDNPDVIGWTREGDSTKAKSGLATVITDGPGGSKRMYVGTSNAGEIWYDLTGNRTDKITIWSDGYATFPVNGGSVSVWVQQ

SEQ ID NO: 39052 - protein, 480 aa, Cytophaga sp.
NGTMMQYFEWYVPNDGQQWNRLRTDAPYLSSVGITAVWTPPAYKGTSQADVGYGPYDLYDLGEFNQKGTVRTKYGTKGELKSAVNTLHSNGIQVYGDVVMNHKAGADYTENVTAVEVNPSNRYQETSGEYNIQAWTGFNFPGRGTTYSNWKWQWFHFDGTDWDQSRSLSRIFKFDGKAWDWEVSSENGNYDYLMYADYDYDHPDVVNEMKKWGVWYANEVGLDGYRLDAVKHIKFQFLKDWVDNARAATGKEMFTVGEYWQNDLGALNNYLAKVNYNQSLFDAPLHYNFYAASTGGGYYDMRNIENNTLVASNPTKAVTLVENHDTQPGQSLESTVQPWFKPLAYAFILTRSGGYPSVFYGDMYGTKGTTTREIPALKSKIEPLLKARKDYAYGTQRDYIDNPDVIGWTREGDSTKAKSGLATVITDGPGGSKRMYVGTSNAGEIWYDLTGNRTDKITIGSDGYATFPVNGGSVSVWVQQ

SEQ ID NO: 39053 - protein, 480 aa, Cytophaga sp.
NGTMMQYFEWYVPNDGQQWNRLRTDAPYLSSVGITAVWTPPAYKGTSQADVGYGPYDLYDLGEFNQKGTVRTKYGTKGELKSAVNTLHSNGIQVYGDVVMNHKAGADYTENVTAVEVNPSNRYQETSGEYNIQAWTGFNFPGRGTTYSNWKWQWFHFDGTDWDQSRSLSRIFKFDGKAWDWEVSSENGNYDYLMYADYDYDHPDVVNEMKKWGVWYANEVGLDGYRLDAVKHIKFQFLKDWVDNARAATGKEMFTVGEYWQNDLGALNNYLAKVNYNQSLFDAPLHYNFYAASTGGGYYDMRNILNNTLVASNPTKAVTLVENHDTQPGQSLESTVQPWFKPLAYAFILTRSGGYPSVFYGDMYGTKGTTTREIPALKSKIEPLLKARKDYAYGTQRDYIDNPDVIGWTREGDSTKAKSGLATVITDGPGGSKRMYVGTSNAGEIWYDLTGNRTDKITICSDGYATFPVNGGSVSVWVQQ

SEQ ID NO: 39054 - protein, 480 aa, Cytophaga sp.
NGTMMQYFEWYVPNDGQQWNRLRTDAPYLSSVGITAVWTPPAYKGTSQADVGYGPYDLYDLGEFNQKGTVRTKYGTKGELKSAVNTLHSNGIQVYGDVVMNHKAGADYTENVTAVEVNPSNRYQETSGHYNIQAWTGFNFPGRGTTYSNWKWQWFHFDGTDWDQSRSLSRIFKFDGKAWDWEVSSENGNYDYLMYADYDYDHPDVVNEMKKWGVWYANEVGLDGYRLDAVKHIKFQFLKDWVDNARAATGKEMFTVGEYWQNDLGALNNYLFKVNYNQSLFDAPLHYNFYAASTGGGYYDMRNILNNTLVASNPTKAVTLVENHDTQPGQSLESTVQPWFKPLAYAFILTRSGGYPSVFYGDMYGTKGTTTREIPALKSKIEPLLKARKDYAYGTQRDYIDNPDVIGWTREGDSTKAKSGLATVITDGPGGSKRMYVGTSNAGEIWYDLTGNRTDKITIGSDGYATFPVNGGSVSVWVQQ

SEQ ID NO: 39055 - protein, 480 aa, Cytophaga sp.
NGTMMQYFEWYVPNDGQQWNRLRTDAPYLSSVGITAVWTPPAYKGTSQADVGYGPYDLYDLGEFNQKGTVRTKYGTKGELKSAVNTLHSNGIQVYGDVVMNHKAGADYTENVTAVEVNPSNRYQETSGHYNIQAWTGFNFPGRGTTYSNFKWQWFHFDGTDWDQSRSLSRIFKFDGKAWDWPVSSENGNYDYLMYADYDYDHPDVVNEMKKWGVWYANEVGLDGYRLDAVKHIKFSFLKDWVDNARAATGKEMFTVGEYWQNDLGALNNYLAKVNYNQSLFDAPLHYNFYAASTGGGDYDMRNILNNTLVASNPTKAVTLVENHDTQPGQSLESTVQPWFKPLAYAFILTRSGGYPSVFYGDMYGTKGTTTREIPALKSKIEPLLKARKDYAYGTQRDYIDNPDVIGWTREGDSTKAKSGLATVITDGPGGSKRMYVGTSNAGEIWYDLTGNRTDKITIGSDGYATFPVNTESVSVWVQQ

SEQ ID NO: 39056 - protein, 480 aa, Cytophaga sp.
NGTMMQYFEWYVPNDGQQWNRLRTDAPYLSSVGITAVWTPPAYKGTSQADVGYGPYDLYDLGEFNQKGTVRTKYGTKGELKSAVNTLHSNGIQVYGDVVMNHKAGADYTENVTAVEVNPSNRYQETSGEYNIQAWTGFNFPGRGTTYSNWKWQWFHFDGTDWDQSRSLSRIFKFDGKAWDWEVSSENGNYDYLMYADYDYDHPDVVNEMKKWGVWYANEVGLDGYRLDAVKHIKFQFLKDWVDNARAATGKEMFTVGEYWQNDLGALNNYLAKVNYNQSLFDAPLHYNFYAASTGGGYYDMRNILNNTLVASNPTKAVTLVENHDTQPGQSLESTVQPWFKPLAYAFILTRSGGYPSVFYGDMYGTKGTTTREIPALKSKIEPLLKARKDYAYGTQRDYIDNPDVIGWTREGGSTKAKSGLATVITDGPGGSKRMYVGTSNAGEIWYDLTGNRTDKITIGSDGYATFPVNGGSVSVWVQQ

SEQ ID NO: 39057 - protein, 480 aa, Cytophaga sp.
NGTMMQYFEWYVPNDGQQWNRLRTDAPYLSSVGITAVWTPPAYKGTSQADVGYGPYDLYDLGEFNQKGTVRTKYGTKGELKSAVNTLHSNGIQVYGDVVMNHKAGADYTENVTAVEVNPSNRYQETSGEYNIQAWTGFNFPGRGTTYSNWKWQWFHFDGTDWDQSRSLSRIFKFDGKAWDWEVSSENGNYDYLMYADYDYDHPDVVNEMKKWGVWYANEVGLDGYRLDAVKHIKFQFLKDWVDNARAQTGKEMFTVGEYWQNDLGALNNYLAKVNYNQSLFDAPLHYNFYAASTGGGYYDMRNILNNTLVASNPTKAVTLVENHDTQPGQSLESTVQPWFKPLAYAFILTRSGGYPSVFYGDMYGTKGTTTREIPALKSKIEPLLKARKDYAYGTQRDYIDNPDVIGWTREGDSTKAKSGLATVITDGPGGSKRMYVGTSNAGEIWYDLTGNRTDKITIGSDGYATFPVNGGSVSVWVQQ

SEQ ID NO: 39058 - protein, 480 aa, Cytophaga sp.
NGTMMQYFEWYVPNDGQQWNRLRTDAPYLSSVGITAVWTPPAYKGTSQADVGYGPYDLYDLGEFNQKGTVRTKYGTKGELKSAVNTLHSNGIQVYGDVVMNHKAGADYTENVTAVEVNPSNRYQETSGEYNIQAWTGFNFPGRGTTYSNWKWQWFHFDGTDWDQSRSLSRIFKFDGKAWDWEVSSENGNYDYLMYADYDYDHPDVVNEMKKWGVWYANEVGLDGYRLDAVKHIKFQFLKDWVDNARAATGKEMFTVGEYWQNDLGALNNYLAKVNYNQSLFDAPLHYNFYAASTGGGYYDMRNILNNTLVASNPTKAVTLVENHDTQPGQSLESTVQPWFKPLAYAFILTRSGGYPSVFYGDMYGTKGTTTREIPALKSKIEPLLKARKDYAYGTQRDYIDNPDVIGWTREGISTKAKSGLATVITDGPGGSKRMYVGTSNAGEIWYDLTGNRTDKITIGSDGYATFPVNGGSVSVWVQQ

SEQ ID NO: 39059 - protein, 480 aa, Cytophaga sp.
NGTMMQYFEWYVPNDGQQWNRLRTDAPYLSSVGITAVWTPPAYKGTSQADVGYGSYDLYDLGEFNQKGTVRTKYGTKGELKSAVNTLHSNGIQVYGDVVMNHKAGADYTENVTAVEVNPSNRYQETSGEYNIQAWTGFNFPGRGTTYSNWKWQWFHFDGTDWDQSRSLSRIFKFDGKAWDWEVSSENGNYDYLMYADYDYDHPDVVNEMKKWGVWYANEVGLDGYRLDAVKHIKFQFLKDWVDNARAATGKEMFTVGEYWQNDLGALNNYLAKVNYNQSLFDAPLHYNFYAASTGGGYYDMRNILNNTLVASNPTKAVTLVENHDTQPGQSLESTVQPWFKPLAYAFILTRSGGYPSVFYGDMYGTKGTTTREIPALKSKIEPLLKARKDYAYGTQRDYIDNPDVIGWTREGDSTKAKSGLATVITDGPGGSKRMYVGTSNAGEIWYDLTGNRTDKITIGSDGYATFPVNGGSVSVWVQQ

SEQ ID NO: 39060 - protein, 480 aa, Cytophaga sp.
NGTMMQYFEWYVPNDGQQWNRLRTDAPYLSSVGITAVWTPPAYKGTSQADVGYGPYDLYDLGEFNQKGTVRTKYGTKGELKSAVNTLHSNGIQVYGDVVMNHKAGADYTDNVTAVEVNPSNRYQETSGEYNIQAWTGFNFPGRGTTYSNWKWQWFHFDGTDWDQSRSLSRIFKFDGKAWDWEVSSENGNYDYLMYADYDYDHPDVVNEMKKWGVWYANEVGLDGYRLDAVKHIKFQFLKDWVDNARAATGKEMFTVGEYWQNDLGALNNYLAKVNYNQSLFDAPLHYNFYAASTGGGYYDMRNILNNTLVASNPTKAVTLVENHDTQPGQSLESTVQPWFKPLAYAFILTRSGGYPSVFYGDMYGTKGTTTREIPALKSKIEPLLKARKDYAYGTQRDYIDNPDVIGWTREGDSTKAKSGLATVITDGPGGSKRMYVGTSNAGEIWYDLTGNRTDKITIGSDGYATFPVNGGSVSVWVQQ

SEQ ID NO: 39061 - protein, 480 aa, Cytophaga sp.
NGTMMQYFEWYVPNDGQQWNRLRTDAPYLSSVGITAVWTPPAYKGTSQADVGYGPYDLYDLGEFNQKGTVRTKYGTKGELKSAVNTLHSNGIQVYGDVVMNHKAGADYTENVTAVEVNPSNRYQETSGEYNIQAWTGFNFPGRGTTYSNWKWQWFHFDGTDWDQSRSLSRIFKFDGKAWDWEVSSENGNYDYLMYADYDYDHPDVVNEMKKWGVWYANEVGLDGYRLDAVKHIKFQFLKNWVDNARAATGKEMFTVGEYWQNDLGALNNYLAKVNYNQSLFDAPLHYNFYAASTGGGYYDMRNILNNTLVASNPTKAVTLVENHDTQPGQSLESTVQPWFKPLAYAFILTRSGGYPSVFYGDMYGTKGTTTREIPALKSKIEPLLKARKDYAYGTQRDYIDNPDVIGWTREGDSTKAKSGLATVITDGPGGSKRMYVGTSNAGEIWYDLTGNRTDKITIGSDGYATFPVNGGSVSVWVQQ

SEQ ID NO: 39062 - protein, 480 aa, Cytophaga sp.
NGTMMQYFEWYVPNDGQQWNRLRTDAPYLSSVGITAVWTPPAYKGTSQADVGYGPYDLYDLGEFNQKGTVRTKYGTKGELKSAVNTLHSNGIQVYGDVVMNHKAGADYTENVTAVEVNPSNRYQETSGEYNIQAWTGFNFPGRGTTYSNWKWQWFHFDGTDWDQSRSLSRIFKFDGKAWDWEVSSENGNYDYLMYADYDYDHPDNVNEMKKWGVWYANEVGLDGYRLDAVKHIKFQFLKDWVDNARAATGKEMFTVGEYWQNDLGALNNYLAKVNYNQSLFDAPLHYNFYAASTGGGYYDMRNILNNTLVASNPTKAVTLVENHDTQPGQSLESTVQPWFKPLAYAFILTRSGGYPSVFYGDMYGTKGTTTREIPALKSKIEPLLKARKDYAYGTQRDYIDNPDVIGWTREGDSTKAKSGLATVITDGPGGSKRMYVGTSNAGEIWYDLTGNRTDKITIGSDGYATFPVNGGSVSVWVQQ

SEQ ID NO: 39063 - protein, 480 aa, Cytophaga sp.
NGTMMQYFEWYVPNDGQQWNRLRTDAPYLSSVGITAVWTPPAYKGTSQADVGYGPYDLYDLGEFNQKGTVRTKYGTKGELKSAVNTLHSNGIQVYGDCVMNHKAGADYTENVTAVEVNPSNRYQETSGEYNIQAWTGFNFPGRGTTYSNWKWQWFHFDGTDWDQSRSLSRIFKFDGKAWDWEVSSENGNYDYLMYADYDYDHPDVVNEMKKWGVWYANEVGLDGYRLDAVKHIKFQFLKDWVDNARAATGKEMFTVGEYWQNDLGALNNYLAKVNYNQSLFDAPLHYNFYAASTGGGYYDMRNILNNTLVASNPTKAVTLVENHDTQPGQSLESTVQPWFKPLAYAFILTRSGGYPSVFYGDMYGTKGTTTREIPALKSKIEPLLKARKDYAYGTQRDYIDNPDVIGWTREGDSTKAKSGLATVITDGPGGSKRMYVGTSNAGEIWYDLTGNRTDKITIGSDGYATFPVNGGSVSVWVQQ

SEQ ID NO: 39064 - protein, 480 aa, Cytophaga sp.
NGTMMQYFEWYVPNDGQQWNRLRTDAPYLSSVGINAVWTPPAYKGTSQADVGYGPYDLYDLGEFNQKGTVRTKYGTKGELKSAVNTLHSNGIQVYGDVVMNHKAGADYTENVTAVEVNPSNRYQETSGEYNIQAWTGFNFPGRGTTYSNWKWQWFHFDGTDWDQSRSLSRIFKFDGKAWDWEVSSENGNYDYLMYADYDYDHPDVVNEMKKWGVWYANEVGLDGYRLDAVKHIKFQFLKDWVDNARAATGKEMFTVGEYWQNDLGALNNYLAKVNYNQSLFDAPLHYNFYAASTGGGYYDMRNILNNTLVASNPTKAVTLVENHDTQPGQSLESTVQPWFKPLAYAFILTRSGGYPSVFYGDMYGTKGTTTREIPALKSKIEPLLKARKDYAYGTQRDYIDNPDVIGWTREGDSTKAKSGLATVITDGPGGSKRMYVGTSNAGEIWYDLTGNRTDKITIGSDGYATFPVNGGSVSVWVQQ

SEQ ID NO: 39065 - protein, 480 aa, Cytophaga sp.
NGTMMQYFEWYVPNDGQQWNRLRTDAPYLSSVGITAVWTPPAYKGTSQADVGYGPYDLYDLGEFNQKGTVRTKYGTKGELKSAVNTLHSNGIQVYGDVVMNHKAGADYTENVTAVEVNPSNRYQETSGEYNIQAWTGFNFPGRGTTYSNWKWQWFHFDGTDWDQSRSLSRIFKFDGKAWDWEVSSENGNYDYLMYADYDYDHPDVVNEMKKWGVWYANEVGLDGYRLDAVKHIKFQFLKDWVDNARAATGKEMFTVGEYWQNDLGALNNYLAKVNYNQSLFDAPLHYNFYAASTGGGYYDMRNILNNTLVASNPTKAVTLVENHDTQPGQSLESTVQPWFKPLAYAFILTRSGGYPSVFYGDMYGTKGTTTREIPALKSKIEPLLKARKDYALGTQRDYIDNPDVIGWTREGDSTKAKSGLATVITDGPGGSKRMYVGTSNAGEIWYDLTGNRTDKITIGSDGYATFPVNGGSVSVWVQQ

SEQ ID NO: 39066 - protein, 480 aa, Cytophaga sp.
NGTMMQYFEWYVPNDGQQWNRLRTDAPYLSSVGITAVWTPPAYKGTSQADVGYGPYDLYDLGEFNQKGTVRTKYGTKGELKSAVNTLHSNGIQVYGDVVMNHKAGADYTENVTAVEVNPSNRYQETSGEYNIQAWTGFNFPGRGTTYSNWKWQWFHFDGTDWDQSRSLSRIFKFDGKAWDWEVSSENGNYDYLMYADYDYDHPDVVNEMKKWGVWYANEVGLDGYRLDAVKHIKFQFLKDWVDNARAATGKEMFTVGEYWQNDLGALNNYLAKVNYNQSLFDAPLHYNFYAASTGGGYYDMRNILNNTLVASNPTKAVTLVENHDTQPGQSLESTVQPWFKPLAYAFILTRSGGYPSVFYGDMYGTKGTTTREIPALKSKIEPLLKARKDYAYGTQRDYIDNPDVIGWTREGDSTKAKSGLATVITDGPGGSKRMYVGTSNAGEIWYDLTGNRTDKITIKSDGYATFPVNGGSVSVWVQQ

SEQ ID NO: 39067 - protein, 480 aa, Cytophaga sp.
NGTMMQYFEWYVPNDGQQWNRLRTDAPYLSSVGITAVWTPPAYKGTSQADVGYGPYDLYDLGEFNQKGTVRTKYGTKGELKSAVNTLHSNGIQVYGDVVMNHKAGADYTENVTAVEVNPSNRYQETSGEYNIQAWTGFNFPGRGTTYSNWGWQWFHFDGTDWDQSRSLSRIFKFDGKAWDWEVSSENGNYDYLMYADYDYDHPDVVNEMKKWGVWYANEVGLDGYRLDAVKHIKFQFLKDWVDNARAATGKEMFTVGEYWQNDLGALNNYLAKVNYNQSLFDAPLHYNFYAASTGGGYYDMRNILNNTLVASNPTKAVTLVENHDTQPGQSLESTVQPWFKPLAYAFILTRSGGYPSVFYGDMYGTKGTTTREIPALKSKIEPLLKARKDYAYGTQRDYIDNPDVIGWTREGDSTKAKSGLATVITDGPGGSKRMYVGTSNAGEIWYDLTGNRTDKITIGSDGYATFPVNGGSVSVWVQQ

SEQ ID NO: 39068 - protein, 480 aa, Cytophaga sp.
NGTMMQYFEWYVPNDGQQWNRLRTDAPYLSSVGITAVWTPPAYKGTSQADVGYGPYDLYDLGEFNQKGTVRTKYGTKGELKSAVNTLHSNGIQVYGDVVMNHKAGADYTENVTAVEVNPSNRYQETSGEYNIQAWTGFNFPGRGTTYSNWKWQWFHFDGTDWDQSRSLSRIFKFDGKAWDWEVSSENGNYDYLMYADYDYDHPDVVNEMKKWGVWYANEVGLDGYRLDAVKHIKFQFLKDWVDNARAATGKEMFTVGEYWQNDLGALNNYLAKVNYNQSLFDAPLHYNFYAASTGGGYYDMRNILNNTLVASNPTKAVTLVENHDTQPGQSLESTVQPWFKPLAYAFILTRSGGYPSVFYGDMYGTKGTTTREIPALKSKIEPLLKARKDYAYGTQRDNIDNPDVIGWTREGDSTKAKSGLATVITDGPGGSKRMYVGTSNAGEIWYDLTGNRTDKITIGSDGYATFPVNGGSVSVWVQQ

SEQ ID NO: 39069 - protein, 480 aa, Cytophaga sp.
NGTMMQYFEWYVPNDGQQWNRLRTDAPYLSSVGITAVWTPPAYKGTSQADVGYGPYDLYDLGEFNQKGTVRTKYGTKGELKSAVNTLHSNGIQVYGDVVMNHKAGADYTENVTAVEVNPSNRYQETSGEYNIQAWTGFNFPGRGTTYSNWKWQWFHFDGTDWDQSRSLSRIFKFDGKAWDWEVSSENGNYDYLMYADYDYDHPDVVNEMKKWGVWYANEVGLDGYRLDAVKHIKFQFLKDWVDNARAATGKEMFTVGEYWQNDLGALNNYLAKVNYNQSLFDAPLHYNFYAASTGGGYYDMRNILNNTLVASNPTKAVTLVENHDTQPGQSLESTVGPWFKPLAYAFILTRSGGYPSVFYGDMYGTKGTTTREIPALKSKIEPLLKARKDYAYGTQRDYIDNPDVIGWTREGDSTKAKSGLATVITDGPGGSKRMYVGTSNAGEIWYDLTGNRTDKITIGSDGYATFPVNGGSVSVWVQQ

SEQ ID NO: 39070 - protein, 480 aa, Cytophaga sp.
NGTMMQYFEWYVPNDGQQWNRLRTDAPYLSSVGITAVWTPPAYKGTSQADVGYGPYDLYDLGEFNQKGTVRTKYGTKGELKSAVNTLHSNGIQVYGDVVMNHKAGADYTENVTAVEVNPSNRYQETSGHYNIQAWTGFNFPGRGTTYSNFKWQWFHFDGTDWDQSRSLSRIFKFDGKAWDWPVSSENGNYDYLMYADYDYDHPDVVNEMKKWGVWYANEVGLDGYRLDAVKHIKFWFLKDWVDNARAATGKEMFTVGEYWQNDLGALNNYLAKVNYNQSLFDAPLHYNFYAASTGGGYYDMRNILNNTLVASNPTKAVTLVENHDTQPGQSLESTVQPWFKPLAYAFILTRSGGYPSVFYGDMYGTKGTTTREIPALKSKIEPLLKARKDYAYGTQRDYIDNPDVIGWTREGDSTKAKSGLATVITDGPGGSKRMYVGTSNAGEIWYDLTGNRTDKITIGSDGYATFPVNGGSVSVWVQQ

SEQ ID NO: 39071 - protein, 480 aa, Cytophaga sp.
NGTMMQYFEWYVPNDGQQWNRLRTDAPYLSSVGITACWTPPAYKGTSQADVGYGPYDLYDLGEFNQKGTVRTKYGTKGELKSAVNTLHSNGIQVYGDVVMNHKAGADYTENVTAVEVNPSNRYQETSGEYNIQAWTGFNFPGRGTTYSNWKWQWFHFDGTDWDQSRSLSRIFKFDGKAWDWEVSSENGNYDYLMYADYDYDHPDVVNEMKKWGVWYANEVGLDGYRLDAVKHIKFQFLKDWVDNARAATGKEMFTVGEYWQNDLGALNNYLAKVNYNQSLFDAPLHYNFYAASTGGGYYDMRNILNNTLVASNPTKAVTLVENHDTQPGQSLESTVQPWFKPLAYAFILTRSGGYPSVFYGDMYGTKGTTTREIPALKSKIEPLLKARKDYAYGTQRDYIDNPDVIGWTREGDSTKAKSGLATVITDGPGGSKRMYVGTSNAGEIWYDLTGNRTDKITIGSDGYATFPVNGGSVSVWVQQ

SEQ ID NO: 39072 - protein, 480 aa, Cytophaga sp.
NGTMMQYFEWYVPNDGQQWNRLRTDAPYLSSVGITAVWTPPAYKGTSQADVGYGPYDLYDLGEFNQKGTVRTKYGTKGELKSAVNTLHSNGIQVYGDVVMNHKAGADYTENVTAVEVNPSNRYQETSGHYNIQAWTGFNFPGRGTTYSNFKWQWFHFDGTDWDQSRSLSRIFKFDGKAWDWPVSSENGNYDYLMYADYDYDHPDVVNEMKKWGVWYANEVGLDGYRLDAVKHIKFYFLKDWVDNARAATGKEMFTVGEYWQNDLGALNNYLAKVNYNQSLFDAPLHYNFYAASTGGGYYDMRNILNNTLVASNPTKAVTLVENHDTQPGQSLESTVQPWFKPLAYAFILTRSGGYPSVFYGDMYGTKGTTTREIPALKSKIEPLLKARKDYAYGTQRDYIDNPDVIGWTREGDSTKAKSGLATVITDGPGGSKRMYVGTSNAGEIWYDLTGNRTDKITIGSDGYATFPVNGGSVSVWVQQ

SEQ ID NO: 39073 - protein, 480 aa, Cytophaga sp.
NGTMMQYFEWYVPNDGQQWNRLRTDAPYLSSVGITAVWTPPAYKGTSQADVGYGCYDLYDLGEFNQKGTVRTKYGTKGELKSAVNTLHSNGIQVYGDVVMNHKAGADYTENVTAVEVNPSNRYQETSGEYNIQAWTGFNFPGRGTTYSNWKWQWFHFDGTDWDQSRSLSRIFKFDGKAWDWEVSSENGNYDYLMYADYDYDHPDVVNEMKKWGVWYANEVGLDGYRLDAVKHIKFQFLKDWVDNARAATGKEMFTVGEYWQNDLGALNNYLAKVNYNQSLFDAPLHYNFYAASTGGGYYDMRNILNNTLVASNPTKAVTLVENHDTQPGQSLESTVQPWFKPLAYAFILTRSGGYPSVFYGDMYGTKGTTTREIPALKSKIEPLLKARKDYAYGTQRDYIDNPDVIGWTREGDSTKAKSGLATVITDGPGGSKRMYVGTSNAGEIWYDLTGNRTDKITIGSDGYATFPVNGGSVSVWVQQ

SEQ ID NO: 39074 - protein, 480 aa, Cytophaga sp.
NGTMMQYFEWYVPNDGQQWNRLRTDAPYLSSVGITAVWTPPAYKGTSQADVGYGPYDLYDLGEFNQKGTVRTKYGTKGELKSAVNTLHSNGIQVYGDVVMNHKAGADYTENVTAVEVNPSNRYQETSGEYNIQAWTGFNFPGRGTTYSNWKWQWFHFDGTDWDQSRSLSRIFKFDGKAWDWEVSSENGNYDYLMYADYDYDHPDVVNEMKKWGVWYANEVGYDGYRLDAVKHIKFQFLKDWVDNARAATGKEMFTVGEYWQNDLGALNNYLAKVNYNQSLFDAPLHYNFYAASTGGGYYDMRNILNNTLVASNPTKAVTLVENHDTQPGQSLESTVQPWFKPLAYAFILTRSGGYPSVFYGDMYGTKGTTTREIPALKSKIEPLLKARKDYAYGTQRDYIDNPDVIGWTREGDSTKAKSGLATVITDGPGGSKRMYVGTSNAGEIWYDLTGNRTDKITIGSDGYATFPVNGGSVSVWVQQ

SEQ ID NO: 39075 - protein, 480 aa, Cytophaga sp.
NGTMMQYFEWYVPNDGQQWNRLRTDAPYLSSVGITAVWTPPAYKGTSQADVGYGPYDLYDLGEFNQKGTVRTKYGTKGELKSAVNTLHSNGIQVYGDVVMNHKAGADYTENVTAVEVNPSNRYQETSGEYNIQAWTGFNFPGRGTTYSNWKWQWFHFDGTDWDQSRSLSRIFKFDGKAWDWEVSSENGNYDYLMYADYDYDHPDVVNEMKKWGVWYANEVGLDGYRLDAVKHIKFQFLKDWVDNARAATGKEMFTVGEYWQNDLGALNNYLAKVNYNQSLFDAPLHYNFYAASTGGGYYDMSNILNNTLVASNPTKAVTLVENHDTQPGQSLESTVQPWFKPLAYAFILTRSGGYPSVFYGDMYGTKGTTTREIPALKSKIEPLLKARKDYAYGTQRDYIDNPDVIGWTREGDSTKAKSGLATVITDGPGGSKRMYVGTSNAGEIWYDLTGNRTDKITIGSDGYATFPVNGGSVSVWVQQ

SEQ ID NO: 39076 - protein, 480 aa, Cytophaga sp.
NGTMMQYFEWYVPNDGQQWNRLRTDAPYLSSVGITAVWTPPAYKGTSQADVGYGPYDLYDLGEFNQKGTVRTKYGTKGELKSAVNTLHSNGIQVYGDVVMNHKAGADYTENVTAVEVNPSNRYQETSGEYNIQAWTGFNFPGRGTTYSNWKWQWFHFDGTDWDQSRSLSRIFKFDGKAWDWEVSSENGNYDYLMYADYDYDHPDVVNEMKKWGVWYANEVGLDGYRLDAVKHIKFQFLKDWVDNARAATGKEMFTVGEYWQNDLGALNNYLAKVNYNQSLFDAPLHYNFYAASTGGGYYDMRNILNNTLVASNPTKAVTLVENHDTQPGQSLESTVQPWFKPLAYAFILTRSGGYPSVFYGDMYGTKGTTTREIPALKSKIEPLLKARCDYAYGTQRDYIDNPDVIGWTREGDSTKAKSGLATVITDGPGGSKRMYVGTSNAGEIWYDLTGNRTDKITIGSDGYATFPVNGGSVSVWVQQ

SEQ ID NO: 39077 - protein, 480 aa, Cytophaga sp.
NGTMMQYFEWYVPNDGQQWNRLRTDAPYLSSVGITAVWTPPAYKGTSQADVGYGPYDLYDLGEFNQKGTVRTKYGTKGELKSAVNTLHSNGIQVYGDVVMNHKAGADYTENVTAVEVNPSNRYQETSGEYNIQAWTGFNFPGRGTTYSNWKWQWFHFDGTDWDQSRSLSRIFKFDGKAWDWEVSSENGNYDYLMYADYDYDHPDVVNEMKKWGVWYANEVGLDGYRLDAVKHIKFQFLKDWVDNARAATGKEMFTVGEYWQNDLGALNNYLAKVNYNQSLFDAPLHYNFYAASTGGGYYDMRNILNNTLVASNPTKAVTLVENHDTQPGQSLESTVQPWFKPLAYAFILTRSGGYPSVFYGDMYGTKGTTTREIPALKSKIEPLLKARKDYAYGTQRDYIDNPDVIGWTREGDSTKAKSGLATVITDGPGGSKRMYVGTSNAGEIWYDLLGNRTDKITIGSDGYATFPVNGGSVSVWVQQ

SEQ ID NO: 39078 - protein, 480 aa, Cytophaga sp.
NGTMMQYFEWYVPNDGQQWNRLRTDAPYLSSVGITAVWTPPAYKGTSQADVGYGPYDLYDLGEFNQKGTVRTKYGTKGELKSAVNTLHSNGIQVYGDVVMNHKAGADYTENVTAVEVNPSNRYQETSGEYNIQAWTGFNFPGRGTTYSNWKWQWFHFDGTDWDQSRSLSRIFKFDGKAWDWEVSSENGNYDYLMYADYDYDHPDVVNEMKKWGVWYANEVGLDGYRLDAVKHIKFQFLKDWVDNARAITGKEMFTVGEYWQNDLGALNNYLAKVNYNQSLFDAPLHYNFYAASTGGGYYDMRNILNNTLVASNPTKAVTLVENHDTQPGQSLESTVQPWFKPLAYAFILTRSGGYPSVFYGDMYGTKGTTTREIPALKSKIEPLLKARKDYAYGTQRDYIDNPDVIGWTREGDSTKAKSGLATVITDGPGGSKRMYVGTSNAGEIWYDLTGNRTDKITIGSDGYATFPVNGGSVSVWVQQ

SEQ ID NO: 39079 - protein, 480 aa, Cytophaga sp.
NGTMMQYFEWYVPNDGQQWNRLRTDAPYLSSVGITAVWTPPAYKGTSQADVGYGPYDLYDLGEFNQKGTVRTKYGTKGELKSAVNTLHSNGIQVYGDVVMNHKAGADYTENVTAVEVNPSNRYQETSGEYNIQAWTGFNFPGRGTTYSNWKWQWFHFDGTDWDQSRSLSRIFKFDGKAWDWEVSSENGNYDYLMYADYDYDHPDVVNEMKKWGVWYANEVGLDGYRLDAVKHIKFQFLKDWVDNARAATGKEMFTVGEYWQNDLGALNNYLAKVNYNQSLFDAPLHYNFYAASTGGGYYDMRNILNNTLVASNPTKAVTLVENHDTQPGQSLESTVQPWFKPLAYAFILTRSGGYPSVFYGDMYGTKGTTTREIPALKSKIEPLLKARKDYAYGTQRDYIDNPDVIGWTREGDSTKAFSGLATVITDGPGGSKRMYVGTSNAGEIWYDLTGNRTDKITIGSDGYATFPVNGGSVSVWVQQ

SEQ ID NO: 39080 - protein, 480 aa, Cytophaga sp.
NGTMMQYFEWYVPNDGQQWNRLRTDAPYLSSVGITAVWTPPAYKGTSQADVGYGPYDLYDLGEFNQKGTVRTKYGTKGELKSAVNTLHSNGIQVYGDVVMNHKAGADYTENVTAVEVNPSNRYQETSGEYNIQAWTGFNFPGRGTTYSNWKWQWFHFDGTDWDQSRSLSRIFKFDGKAWDWEVSSENGNYDYLMYADYDYDHPDVVNEMKKWGVWYANEVGLDGYRLDAVKHIKFQFLKDWVDNARAATGKEMFTVGEYWQNDLGALNNYLAKVNYNQSLFDAPLHYNFYAASTGGGYYDMRNILNNTLVASNPTKAVTLVENHDTQPGQSLESTVQPWFKPLAYAFILTRSGGYPSVFYGDMYGTKGTTTREIPALMSKIEPLLKARKDYAYGTQRDYIDNPDVIGWTREGDSTKAKSGLATVITDGPGGSKRMYVGTSNAGEIWYDLTGNRTDKITIGSDGYATFPVNGGSVSVWVQQ

SEQ ID NO: 39081 - protein, 480 aa, Cytophaga sp.
NGTMMQYFEWYVPNDGQQWNRLRTDAPYLSSVGITAVWTPPAYKGTSQADVGYGPYDLYDLGEFNQKGTVRTKYGTKGELKSAVNTLHSNGIQVYGDVVMNHKAGADYTENVTAVEVNPSNRYQETSGEYNIQAWTGFNFPGRGTTYSNWKWQWFHFDGTDWDQSRSLSRIFKFDGKAWDWEVSSENGNYDYLMYADYDYDHPDVVNEMKKWGVWYANEVGLDGYRLDAVKHIKFQFLKDWVDNARAATGKEMFTVGEYWQNDLGALNNYLAKVNYNQSLFDAPLHYNFYAASTGGGYYDMRNILNNTLVASNPTKAVTLVENHDTQPGQSLESTVQPWFKPLAYAFILTRSGGYPSVFYGDMYGTKGTTTREIPALKSKIEPLLKARKDYAYGTQRNYIDNPDVIGWTREGDSTKAKSGLATVITDGPGGSKRMYVGTSNAGEIWYDLTGNRTDKITIGSDGYATFPVNGGSVSVWVQQ

SEQ ID NO: 39082 - protein, 480 aa, Cytophaga sp.
NGTMMQYFEWYVPNDGQQWNRLRTDAPYLSSVGITAVWTPPAYKGTSQADVGYGPYDLYDLGEFNQKGTVRTKYGTKGELKSAVNTLHSNGIQVYGDVVMNHKAGADYTENVTAVEVNPSNRYQETSGEYNIQAWTGFNFPGRGTTYSNWKWQWFHFDGTDWDQSRSLSRIFKFDGKAWDWPVSSENGNYDYLMYADYDYDHPDVVNEMKKWGVWYANEVGLDGYRLDAVKHIKFQFLKDWVDNARAATGKEMFTVGEYWQNDLGALNNYLAKVNYNQSLFDAPLHYNFYAASTGGGYYDMRNILNNTLVASNPTKAVTLVENHDTQPGQSLESTVQPWFKPLAYAFILTRSGGYPSVFYGDMYGTKGTTTREIPALKSKIEPLLKARKDYAYGTQRDYIDNPDVIGWTREGDSTKAKSGLATVITDGPGGSKRMYVGTSNAGEIWYDLTGNRTDKITIGSDGYATFPVNGGSVSVWVQQ

SEQ ID NO: 39083 - protein, 480 aa, Cytophaga sp.
NGTMMQYFEWYVPNDGQQWNRLRTDAPYLSSVGITAVWTPPAYKGTSQADVGYGPYDLYDLGEFNQKGTVRTKYGTKGELKSAVNTLHSNGIQVYGDVVMNHKAGADYTENVTAVEVNPSNRYQETSGEYNIQAWTGFNFPGRGTTYSNWKWQWFHFDGTDWDQSRSLSRIFKFDGKAWDWEVSSENGNYDYLMYADYDYDHPDVVNEMKKWGVWYANEVGLDGYRLDAVKHIKFQFLKDWVDNARAATGKEMFTVGEYWQNDLGALNNYLAKVNYNQSLFDAPLHYNFYAASTGGGYYDMRNILNNTLVASNPTKAVTLVENHDTQPGQSLESTVQPWFKPLAYAFILTQSGGYPSVFYGDMYGTKGTTTREIPALKSKIEPLLKARKDYAYGTQRDYIDNPDVIGWTREGDSTKAKSGLATVITDGPGGSKRMYVGTSNAGEIWYDLTGNRTDKITIGSDGYATFPVNGGSVSVWVQQ

SEQ ID NO: 39084 - protein, 480 aa, Cytophaga sp.
NGTMMQYFEWYVPNDGQQWNRLRTDAPYLSSVGITAVWTPPAYKGTSQADVGYGPYDLYDLGEFNQKGTVRTKYGTKGELKSAVNTLHSNGIQVYGDVVMNHKAGADYTENVTAVEVNPSNRYQETSGEYNIQAWTGFNFPGRGTTYSNWKWQWFHFDGTDWDQSRSLSRIFKFDGKAWDWEVSSENGNYDYLMYADYDYDHPDVVNEMKKWGVWYANEVGLDGYRLDAVKHIKFQFLKDWVDNARAATGKEMFTVGEYWQNDLGALNNYLAKVNYNQSLFDAPLHYNFYAASTGGGYYDMRNILNNTLVASNPTKAVTLVENHDTQPGQSLESTVQPWFKPLAYAFILTRSGGYPSVFYGDMYGTKGTTTREIPALKSKIEPLLKARKDYAYGTQRDYIDNPDVIGWTREGDSTKAKSGLATVITDGPGGSKRMYVGTSNYGEIWYDLTGNRTDKITIGSDGYATFPVNGGSVSVWVQQ

SEQ ID NO: 39085 - protein, 480 aa, Cytophaga sp.
NGTMMQYFEWYVPNDGQQWNRLRTDAPYLSSVGITAVWTPPAYKGTSQADVGYGPYDLYDLGEFNQKGTVRTKYGTKGELKSAVNTLHSNGIQVYGDVVMNHKAGADYTENVTAVEVNPSNRYQETSGEYNIQAWTGFNFPGRGTTYSNWKWQWFHFDGTDWDQSRSLSRIFKFDGKAWDWEVSSENGNYDYLMYADYDYDHPDVVNEMKKWGVWYANEVGLDGYRLDAVKHIKFQFLKDWVDNARAATGKEMFTVGEYWQNDLGALNNYLAKVNYNQSLFDAPLHYNFYAASTGGGYYDMRNILNNTLVASNPTKAVTLVENHDTQPGQSLESTVQPWFKPLAYAFILTRSGGYPSVFYGDMYGTKGTTTREIPALKSKIEPLLKARKDYAYGTQRDYIDNPDVIGWTREGDSTKAKNGLATVITDGPGGSKRMYVGTSNAGEIWYDLTGNRTDKITIGSDGYATFPVNGGSVSVWVQQ

SEQ ID NO: 39086 - protein, 480 aa, Cytophaga sp.
NGTMMQYFEWYVPNDGQQWNRLRTDAPYLSSVGITAVWTPPAYKGTSQADVGYGPYDLYDLGEFNQKGTVRTKYGTKGELKSAVNTLHSNGIVVYGDVVMNHKAGADYTENVTAVEVNPSNRYQETSGEYNIQAWTGFNFPGRGTTYSNWKWQWFHFDGTDWDQSRSLSRIFKFDGKAWDWEVSSENGNYDYLMYADYDYDHPDVVNEMKKWGVWYANEVGLDGYRLDAVKHIKFQFLKDWVDNARAATGKEMFTVGEYWQNDLGALNNYLAKVNYNQSLFDAPLHYNFYAASTGGGYYDMRNILNNTLVASNPTKAVTLVENHDTQPGQSLESTVQPWFKPLAYAFILTRSGGYPSVFYGDMYGTKGTTTREIPALKSKIEPLLKARKDYAYGTQRDYIDNPDVIGWTREGDSTKAKSGLATVITDGPGGSKRMYVGTSNAGEIWYDLTGNRTDKITIGSDGYATFPVNGGSVSVWVQQ

SEQ ID NO: 39087 - protein, 480 aa, Cytophaga sp.
NGTMMQYFEWYVPNDGQQWNRLRTDAPYLSSVGITAVWTPPAYKGTSQADVGYGPYDLYDLGEFNQKGTVRTKYGTKGELKSAVNTLHSNGIQVYGDVVMNHKAGADYTENVTAVEVNPSNRYQETSGEYNIQAWTGFNFPGRGTTYSNWKWQWFHFDGTDWDQSRSLSRIFKFDGKAWDWEVSSENGNYDYLMYADYDYDHPDVVNEMKKWGVWYANEVGLDGYRLDAVKHIKFQFLKDWVDNARAATGAEMFTVGEYWQNDLGALNNYLAKVNYNQSLFDAPLHYNFYAASTGGGYYDMRNILNNTLVASNPTKAVTLVENHDTQPGQSLESTVQPWFKPLAYAFILTRSGGYPSVFYGDMYGTKGTTTREIPALKSKIEPLLKARKDYAYGTQRDYIDNPDVIGWTREGDSTKAKSGLATVITDGPGGSKRMYVGTSNAGEIWYDLTGNRTDKITIGSDGYATFPVNGGSVSVWVQQ

SEQ ID NO: 39088 - protein, 480 aa, Cytophaga sp.
NGTMMQYFEWYVPNDGQQWNRLRTDAPYLSSVGITAVWTPPAYKGTSQADVGYGPYDLYDLGEFNQKGTVRTKYGTKGELKSAVNTLHSNGIQVYGDVVMNHKAGADYTENVTAVEVNPSNRYQETSGEYNIQAWTGFNFPGRGTTYSNWKWQWFHFDGTDWDQSRSLSRIFKFDGKAWDWEVSSENGNYDYLMYADYDYDHPDVVNEMKKWGVWYAIEVGLDGYRLDAVKHIKFQFLKDWVDNARAATGKEMFTVGEYWQNDLGALNNYLAKVNYNQSLFDAPLHYNFYAASTGGGYYDMRNILNNTLVASNPTKAVTLVENHDTQPGQSLESTVQPWFKPLAYAFILTRSGGYPSVFYGDMYGTKGTTTREIPALKSKIEPLLKARKDYAYGTQRDYIDNPDVIGWTREGDSTKAKSGLATVITDGPGGSKRMYVGTSNAGEIWYDLTGNRTDKITIGSDGYATFPVNGGSVSVWVQQ

SEQ ID NO: 39089 - protein, 480 aa, Cytophaga sp.
NGTMMQYFEWYVPNDGQQWNRLRTDAPYLSSVGITAVWTPPAYKGTSQADVGYGPYDLYDLGEFNQKGTVRTKYGTKGELKSAVNTLHSNGIQVYGDVVMNHKAGADYTENVTAVEVNPSNRYQETSGEYNIQAWTGFNFPGRGTTYSNWKWQWFHFDGTDWDQSRSLSRIFKFDGKAWDWEVSSENGNYDYLMYADYDYDHPDVVNEMKKWGVWYANEVGLDGYRLDAVKHIKFQFLKDWVDNARAATGKEMFTVGEYWQNDLGALNNYLAKVNYNQSLFDAPLHYNFYAASTGGGYYDMRNILNNTLVASNPTKAVTLVENHDTQPGQSLESTVQPWFKPLAYAFILTRSGGYPSVFYGDMYGTKGTTTREIPALKSKIEPLLKARKDYAYGTQRDYIDNPDVIGWTREGDSTKAKSGLATVITDGPRGSKRMYVGTSNAGEIWYDLTGNRTDKITIGSDGYATFPVNGGSVSVWVQQ

SEQ ID NO: 39090 - protein, 480 aa, Cytophaga sp.
NGTMMQYFEWYVPNDGQQWNRLRTDAPYLSSVGITAVWTPPAYKGTSQADVGYGPYDLYDLGEFNQKGTVRTKYGTCGELKSAVNTLHSNGIQVYGDVVMNHKAGADYTENVTAVEVNPSNRYQETSGEYNIQAWTGFNFPGRGTTYSNWKWQWFHFDGTDWDQSRSLSRIFKFDGKAWDWEVSSENGNYDYLMYADYDYDHPDVVNEMKKWGVWYANEVGLDGYRLDAVKHIKFQFLKDWVDNARAATGKEMFTVGEYWQNDLGALNNYLAKVNYNQSLFDAPLHYNFYAASTGGGYYDMRNILNNTLVASNPTKAVTLVENHDTQPGQSLESTVQPWFKPLAYAFILTRSGGYPSVFYGDMYGTKGTTTREIPALKSKIEPLLKARKDYAYGTQRDYIDNPDVIGWTREGDSTKAKSGLATVITDGPGGSKRMYVGTSNAGEIWYDLTGNRTDKITIGSDGYATFPVNGGSVSVWVQQ

SEQ ID NO: 39091 - protein, 480 aa, Cytophaga sp.
NGTMMQYFEWYVPNDGQQWNRLRTDAPYLSSVGITAVWTPPAYKGTSQADVGYGPYDLYDLGEFNQKGTVRTKYGTKGELKSAVNTLHSNGIQVYGDVVMNHKAGADYTENVTAVEVNPSNRYQETSGGYNIQAWTGFNFPGRGTTYSNWKWQWFHFDGTDWDQSRSLSRIFKFDGKAWDWEVSSENGNYDYLMYADYDYDHPDVVNEMKKWGVWYANEVGLDGYRLDAVKHIKFQFLKDWVDNARAATGKEMFTVGEYWQNDLGALNNYLAKVNYNQSLFDAPLHYNFYAASTGGGYYDMRNILNNTLVASNPTKAVTLVENHDTQPGQSLESTVQPWFKPLAYAFILTRSGGYPSVFYGDMYGTKGTTTREIPALKSKIEPLLKARKDYAYGTQRDYIDNPDVIGWTREGDSTKAKSGLATVITDGPGGSKRMYVGTSNAGEIWYDLTGNRTDKITIGSDGYATFPVNGGSVSVWVQQ

SEQ ID NO: 39092 - protein, 480 aa, Cytophaga sp.
NGTMMQYFEWYVPNDGQQWNRLRTDAPYLSSVGITAVWTPPAYKGTSQADVGYGPYDLYDLGEFNQKGTVRTKYGTKGELKSAVNTLHSNGIQVYGDVVMNHKAGADYTENVTAVEVNPSNRYQETSGEYNIQAWTGFNFPGRGTTYSNWKWQWFHFDGTDWDQSRSLSRIFKFDGKAWDWEVSSENGNYDYLMYADYDYDHPDVVNEMKKWGVWYANEVGLDGYRLDAVKHIKFQVLKDWVDNARAATGKEMFTVGEYWQNDLGALNNYLAKVNYNQSLFDAPLHYNFYAASTGGGYYDMRNILNNTLVASNPTKAVTLVENHDTQPGQSLESTVQPWFKPLAYAFILTRSGGYPSVFYGDMYGTKGTTTREIPALKSKIEPLLKARKDYAYGTQRDYIDNPDVIGWTREGDSTKAKSGLATVITDGPGGSKRMYVGTSNAGEIWYDLTGNRTDKITIGSDGYATFPVNGGSVSVWVQQ

SEQ ID NO: 39093 - protein, 480 aa, Cytophaga sp.
NGTMMQYFEWYVPNDGQQWNRLRTDAPYLSSVGITAVWTPPAYKGTSQADVGYGPYDLYDLGEFNQKGTVRTKYGTKGELKSAVNTLHSNGIQVYGDVVMNHKAGADYTENVTAVEVNPSNRYQETSGEYNIQAWTGFNFPGRGTTYSNWKWQWFHFDGTDWDQSRSLSRIFKFDGKAWDWEVSSENGNYDYLMYADYDYDHPDVVNEMKKWGVWYANEVGLDGYRLDAVKHIKFQFLKDWVDNARAATGKEMFSVGEYWQNDLGALNNYLAKVNYNQSLFDAPLHYNFYAASTGGGYYDMRNILNNTLVASNPTKAVTLVENHDTQPGQSLESTVQPWFKPLAYAFILTRSGGYPSVFYGDMYGTKGTTTREIPALKSKIEPLLKARKDYAYGTQRDYIDNPDVIGWTREGDSTKAKSGLATVITDGPGGSKRMYVGTSNAGEIWYDLTGNRTDKITIGSDGYATFPVNGGSVSVWVQQ

SEQ ID NO: 39094 - protein, 480 aa, Cytophaga sp.
NGTMMQYFEWYVPNDGQQWNRLRTDAPYLSSVGITAVWTPPAYKGTSQADVGYGPYDLYDLGEFNQKGTVRTKYGTKGELKSAVNTLHSNGIQVYGDVVMNHKAGADYTENVTAVEVNPSNRYQETSGEYNIQAWTGFNFPGRGTTYSNWKWQWFHFDGTDWDQSRSLSRIFKFDGKAWDWMVSSENGNYDYLMYADYDYDHPDVVNEMKKWGVWYANEVGLDGYRLDAVKHIKFQFLKDWVDNARAATGKEMFTVGEYWQNDLGALNNYLAKVNYNQSLFDAPLHYNFYAASTGGGYYDMRNILNNTLVASNPTKAVTLVENHDTQPGQSLESTVQPWFKPLAYAFILTRSGGYPSVFYGDMYGTKGTTTREIPALKSKIEPLLKARKDYAYGTQRDYIDNPDVIGWTREGDSTKAKSGLATVITDGPGGSKRMYVGTSNAGEIWYDLTGNRTDKITIGSDGYATFPVNGGSVSVWVQQ

SEQ ID NO: 39095 - protein, 480 aa, Cytophaga sp.
NGTMMQYFEWYVPNDGQQWNRLRTDAPYLSSVGITAVWTPPAYKGTSQADVGYGPYDLYDLGEFNQKGTVRTKYGTKGELKSAVNTLHSNGIQVYGDVVMNHKAGADYTENVTAVEVNPSNRYQETSGEYNIQAWTGFNFPGRGTTYSNWKWQWFHFDGTDWDQSRSLSRIFKFDGKAWDWEVSSENGNYDYLMYADYDYDHPDVVNEMKKWGVWYANEVGLDGYRLDAVKHIKFQFLKDWLDNARAATGKEMFTVGEYWQNDLGALNNYLAKVNYNQSLFDAPLHYNFYAASTGGGYYDMRNILNNTLVASNPTKAVTLVENHDTQPGQSLESTVQPWFKPLAYAFILTRSGGYPSVFYGDMYGTKGTTTREIPALKSKIEPLLKARKDYAYGTQRDYIDNPDVIGWTREGDSTKAKSGLATVITDGPGGSKRMYVGTSNAGEIWYDLTGNRTDKITIGSDGYATFPVNGGSVSVWVQQ

SEQ ID NO: 39096 - protein, 480 aa, Cytophaga sp.
NGTMMQYFEWYVPNDGQQWNRLRTDAPYLSSVGITAVWTPPAYKGTSQADVGYGPYDLYDLGEFNQKGTVRTKYGTKGELKSAVNTLHSNGIQVYGDVVMNHKAGADYTENVTAVEVNPSNRYQETSGEYNIQAWTGFNFPGRGTTYSNWKWQWFHFDGTDWDQSRSLSRIFKFDGKAWDWEVSSENGNYDYLMYADYDYDHPDVVNEMKKWGVWYANEVGLDGYRLDAVKHIKFQFLKDWVDNARAATGKEMFTVGEYWTNDLGALNNYLAKVNYNQSLFDAPLHYNFYAASTGGGYYDMRNILNNTLVASNPTKAVTLVENHDTQPGQSLESTVQPWFKPLAYAFILTRSGGYPSVFYGDMYGTKGTTTREIPALKSKIEPLLKARKDYAYGTQRDYIDNPDVIGWTREGDSTKAKSGLATVITDGPGGSKRMYVGTSNAGEIWYDLTGNRTDKITIGSDGYATFPVNGGSVSVWVQQ

SEQ ID NO: 39097 - protein, 480 aa, Cytophaga sp.
NGTMMQYFEWYVPNDGQQWNRLRTDAPYLSSVGITAVWTPPAYKGTSQADVGYGPYDLYDLGEFNQKGTVRTKYGTKGELKSAVNTLHSNGIQVYGDVVMNHKAGADYNENVTAVEVNPSNRYQETSGEYNIQAWTGFNFPGRGTTYSNWKWQWFHFDGTDWDQSRSLSRIFKFDGKAWDWEVSSENGNYDYLMYADYDYDHPDVVNEMKKWGVWYANEVGLDGYRLDAVKHIKFQFLKDWVDNARAATGKEMFTVGEYWQNDLGALNNYLAKVNYNQSLFDAPLHYNFYAASTGGGYYDMRNILNNTLVASNPTKAVTLVENHDTQPGQSLESTVQPWFKPLAYAFILTRSGGYPSVFYGDMYGTKGTTTREIPALKSKIEPLLKARKDYAYGTQRDYIDNPDVIGWTREGDSTKAKSGLATVITDGPGGSKRMYVGTSNAGEIWYDLTGNRTDKITIGSDGYATFPVNGGSVSVWVQQ

SEQ ID NO: 39098 - protein, 480 aa, Cytophaga sp.
NGTMMQYFEWYVPNDGQQWNRLRTDAPYLSSVGITAVWTPPAYKGTSQADVGYGPYDLYDLGEFNQKGTVRTKYGTKGELKSAVNTLHYNGIQVYGDVVMNHKAGADYTENVTAVEVNPSNRYQETSGEYNIQAWTGFNFPGRGTTYSNWKWQWFHFDGTDWDQSRSLSRIFKFDGKAWDWEVSSENGNYDYLMYADYDYDHPDVVNEMKKWGVWYANEVGLDGYRLDAVKHIKFQFLKDWVDNARAATGKEMFTVGEYWQNDLGALNNYLAKVNYNQSLFDAPLHYNFYAASTGGGYYDMRNILNNTLVASNPTKAVTLVENHDTQPGQSLESTVQPWFKPLAYAFILTRSGGYPSVFYGDMYGTKGTTTREIPALKSKIEPLLKARKDYAYGTQRDYIDNPDVIGWTREGDSTKAKSGLATVITDGPGGSKRMYVGTSNAGEIWYDLTGNRTDKITIGSDGYATFPVNGGSVSVWVQQ

SEQ ID NO: 39099 - protein, 480 aa, Cytophaga sp.
NGTMMQYFEWYVPNDGQQWNRLRTDAPYLSSVGITAVWTPPAYKGTSQADVGYGPYDLYDLGEFNQKGTVRTKYGTKGELKSAVNTLHSNGIQVYGDVVMNHKAGADYTENVTAVEVNPSNRYQETSGEYNIQAWTGFNFPGRGTTYSNWKWQWFHFDGTDWDQSRSLSRIFKFDGKAWDWEVSSENGNYDYLMYADYDYDHPDVVNEMKKWGVWYANEVGLDGYRLDAVKHIKFQFLKDWVDNARAATGKEMFTVGEYWHNDLGALNNYLAKVNYNQSLFDAPLHYNFYAASTGGGYYDMRNILNNTLVASNPTKAVTLVENHDTQPGQSLESTVQPWFKPLAYAFILTRSGGYPSVFYGDMYGTKGTTTREIPALKSKIEPLLKARKDYAYGTQRDYIDNPDVIGWTREGDSTKAKSGLATVITDGPGGSKRMYVGTSNAGEIWYDLTGNRTDKITIGSDGYATFPVNGGSVSVWVQQ

SEQ ID NO: 39100 - protein, 480 aa, Cytophaga sp.
NGTMMQYFEWYVPNDGQQWNRLRTDAPYLSSVGITAVWTPPAYKGTSQADVGYGPYDLYDLGEFNQKGTVRTKYGTKGELKSAVNTLHSNGIQVYGDVVMNHKAGADYTENVTAVEVNPSNRYQETSGEYNIQAWTGFNFPGRGTTYSNWKWQWFHFDGTDWDQSRSLSRIFKFDGKAWDWEVSSENGNYDYLMYADYDYDHPDVVNEMKKWGVWYANEVGLDGYRLDAVKHIKFQFLKDWVDNARAATGKEMFTVGEYWQNDLGALNNYLAKVNYNQSLFDAPLHYNFYAASTGGGYYDMRNILNNTLVASNPTKAVTLVENHDTQPGQSLESTVQPWFKPLAYAFILTRSGGYPSVFYGDMYGTKGTTTREIPALKSKIEPLLKARKDYAYGTQRDYIDNPDVIGWTRLGDSTKAKSGLATVITDGPGGSKRMYVGTSNAGEIWYDLTGNRTDKITIGSDGYATFPVNGGSVSVWVQQ

SEQ ID NO: 39101 - protein, 480 aa, Cytophaga sp.
NGTMMQYFEWYVPNDGKQWNRLRTDAPYLSSVGITAVWTPPAYKGTSQADVGYGPYDLYDLGEFNQKGTVRTKYGTKGELKSAVNTLHSNGIQVYGDVVMNHKAGADYTENVTAVEVNPSNRYQETSGEYNIQAWTGFNFPGRGTTYSNWKWQWFHFDGTDWDQSRSLSRIFKFDGKAWDWEVSSENGNYDYLMYADYDYDHPDVVNEMKKWGVWYANEVGLDGYRLDAVKHIKFQFLKDWVDNARAATGKEMFTVGEYWQNDLGALNNYLAKVNYNQSLFDAPLHYNFYAASTGGGYYDMRNILNNTLVASNPTKAVTLVENHDTQPGQSLESTVQPWFKPLAYAFILTRSGGYPSVFYGDMYGTKGTTTREIPALKSKIEPLLKARKDYAYGTQRDYIDNPDVIGWTREGDSTKAKSGLATVITDGPGGSKRMYVGTSNAGEIWYDLTGNRTDKITIGSDGYATFPVNGGSVSVWVQQ

SEQ ID NO: 39102 - protein, 480 aa, Cytophaga sp.
NGTMMQYFEWYVPNDGQQWNRLRTDAPYLSSVGITAVWTPPAYKGTSQADVGYGPYDLYDLGEFNQKGTVRTKYGTKGELKSAVNTLHSNGIQVYGDVVMNHKAGADYTENVTAVEVNPSNRYQETSGEYNIQAWTGFNFPGRGTTYSNWKWQWFHFDGTDWDQSRSLSRIFKFDGKAWDWEVSSENGNYDYLMYADYDYDHPDVVNEMKKWGVWYANEVGLDGYRLDAVKHIKFQFLKGWVDNARAATGKEMFTVGEYWQNDLGALNNYLAKVNYNQSLFDAPLHYNFYAASTGGGYYDMRNILNNTLVASNPTKAVTLVENHDTQPGQSLESTVQPWFKPLAYAFILTRSGGYPSVFYGDMYGTKGTTTREIPALKSKIEPLLKARKDYAYGTQRDYIDNPDVIGWTREGDSTKAKSGLATVITDGPGGSKRMYVGTSNAGEIWYDLTGNRTDKITIGSDGYATFPVNGGSVSVWVQQ

SEQ ID NO: 39103 - protein, 480 aa, Cytophaga sp.
NGTMMQYFEWYVPNDGQQWNRLRTDAPYLSSVGITAVWTPPAYKGTSQADVGYGPYDLYDLGEFNQKGTVRTKYGTKGELKSAVNTLHSNGIQVYGDVVMNHKAGADYTENVTAVEVNPSNRYQETSGEYNIQAWTGFNFPGRGTTYSNWKWQWFHFDGTDWDQSRSLSRIFKFDGKAWDWEVSSENGNYDYLMYADYDYDHPDVVNEMKKWGVWYANEVGLDGYRLDAVKHIKFQFLKDWVDNARAATGKEMFTVGEYWQNDLGALNNYLAKVNYNQSLFDAPLHYNFYAASTGGGYYDMRNILNNTLVASNPTKAVTLVENHDTQPGQSLESTVQPWFKPLAYAFILTRSGGYPSVFYGDMYGTKGTTTREIPALKSKIEPLLKARKDYAYGTQRDYIDNPDVIGWTREGDSTKAKSGLATVITDGPGGSKRMYVGTSKAGEIWYDLTGNRTDKITIGSDGYATFPVNGGSVSVWVQQ

SEQ ID NO: 39104 - protein, 480 aa, Cytophaga sp.
NGTMMQYFEWYVPNDGQQWNRLRTDAPYLSSVGITAVWTPPAYKGTSQADVGYGPYDLYDLGEFNQKGTVRTKYGTKGELKSAVNTLHSNGIQVYGDVVMNHKAGADYTENVTAVEVNPSNRYQETSGEYNIQAWTGFNFPGRGTTYSNWKWQWFHFDGTDWDQSRSLSRIFKFDGKAWDWEVSSENGNYDYLMYADYDYDHPDVVNEMKKWGVWYANEVGLDGYRLDAVKHIKFQFLKDWVDNARAATGKEMFTVGEYWQNDLGALNNYLAKVNYNQSLFDAPLHYNFYAASTGGGYYDMRNILNNTLVASNPTKAVTLVENHDTQPGQSLESTVQPWFKPLAYAFILTRSGGYPSVFYGDMYGTKGTTTREIPALKSKIEPLLKARKDYAYGTQRDYIDNPDVIGWTREGDSTKAKSGLATVITDGPGGSKRMYVGTSNAGEIWYDLTGNRTDKITIGSDGYATFPVNGGSVSVWRQQ

SEQ ID NO: 39105 - protein, 480 aa, Cytophaga sp.
NGTMMQYFEWYVPNDGQQWNRLRTDAPYLSSVGITAVWTPPAYKGTSQADVGYGPYDLYDLGEFNQKGTVRTKYGTKGELKSAVNTLHSNGIQVYGDVVMNHKAGADYTENVTAVEVNPSNRYQETSGEYNIQAWTGFNFPGRGTTYSNWKWQWFHFDGTDWDQSRSLSRIFKFDGKAWDWEVSDENGNYDYLMYADYDYDHPDVVNEMKKWGVWYANEVGLDGYRLDAVKHIKFQFLKDWVDNARAATGKEMFTVGEYWQNDLGALNNYLAKVNYNQSLFDAPLHYNFYAASTGGGYYDMRNILNNTLVASNPTKAVTLVENHDTQPGQSLESTVQPWFKPLAYAFILTRSGGYPSVFYGDMYGTKGTTTREIPALKSKIEPLLKARKDYAYGTQRDYIDNPDVIGWTREGDSTKAKSGLATVITDGPGGSKRMYVGTSNAGEIWYDLTGNRTDKITIGSDGYATFPVNGGSVSVWVQQ

SEQ ID NO: 39106 - protein, 480 aa, Cytophaga sp.
NGTMMQYFEWYVPNDGQQWNRLRTDAPYLSSVGITAVWTPPAYKGTSQADVGYGPYDLYDLGEFNQKGTVRTKYGTKGELKSAVNTLHSNGIQVYGDVVMNHKAGADYTENVTAVEVNPSNRYQETSGEYNIQAWTGFNFPGRGTTYSNWKWQWFHFDGTDWDQSRSLSRIFKFDGKAWDWEVSSENGNYDYLMYADYDYDHPDVVNEMKKWGVWYANEVGLDGYRLDAVKHIKFQFLKDWVDNARAATGKEMFTVGEYWQNDLGALNNYLAKVNYNQSLFDAPLHYNFYAASTGGGYYDMRNILNNTLVASNPTKAVTLVENHDTQPGQSLESTVQPWFKPQAYAFILTRSGGYPSVFYGDMYGTKGTTTREIPALKSKIEPLLKARKDYAYGTQRDYIDNPDVIGWTREGDSTKAKSGLATVITDGPGGSKRMYVGTSNAGEIWYDLTGNRTDKITIGSDGYATFPVNGGSVSVWVQQ

SEQ ID NO: 39107 - protein, 480 aa, Cytophaga sp.
NGTMMQYFEWYVPNDGQQWNRLRTDAPYLSSVGITAVWTPPAYKGTSQADVGYGPYDLYDLGEFNQKGTVRTKYGTKGELKSAVNTLHSNGIQVYGDVVMNHKAGADYTENVTAVEVNPSNRYQETSGEYNIQAWTGFNFPGRGTTYSNWKWQWFHFDGTDWDQSRSLSRIFKFDGKAWDWEVSSENGNYDYLMYADYDYDHPDVVNEMKKWGVWYANEVGLDGYRLDAVKHIKFQFLKDWVDNARAATGKEMFTVGEYWQNDLGALNNYLAKVNYNQSLFDAPLHYNFYAASTGGGYYDMRNILNNTLVASNPTKAVTLVENHDTQPGQSLESTVQPWFKPTAYAFILTRSGGYPSVFYGDMYGTKGTTTREIPALKSKIEPLLKARKDYAYGTQRDYIDNPDVIGWTREGDSTKAKSGLATVITDGPGGSKRMYVGTSNAGEIWYDLTGNRTDKITIGSDGYATFPVNGGSVSVWVQQ

SEQ ID NO: 39108 - protein, 480 aa, Cytophaga sp.
NGTMMQYFEWYVPNDGQQWNRLRTDAPYLSSVGITAVWTPPAYKGTSQADVGYGPYDLYDLGEFNQKGTVRTKYGTKGELKSAVNTLHSNGIQVYGDVVMNHKAGADYTENVTAVEVNPSNRYQETSGEYNIQAWTGFNFPGRGTTYSNWKWQWFHFDGTDWDQSRSLSRIFKFDGKAWDWEVSSENGNYDYLMYADYDYDHPDVVNEMKKWGVWYANEVGLDGYRLDAVKHIKFQFLKDWVDNARAATGKEMFTVGEYWQNDLGALNNYLAKVNYNQSLFDAPLHYNFYAASTGGGYYDMRNILNNTLVASNPTKAVTLVENHDTQPGQSLESTVQPWFKPLAYAFILTRSGGYPSVFYGDMYGTKGTTTREIPALKSKIEPLLKARKDYAYGTQRDYIDNPDVIGWTREGDSTKAKSGLATVITDGPGGSKRMYVGTSNAGEIWYDLTGNRTDKITIGSDGYATFPVNGGSCSVWVQQ

SEQ ID NO: 39109 - protein, 480 aa, Cytophaga sp.
NGTMMQYFEWYVPNDGQQWNRLRTDAPYLSSVGITAVWTPPAYKGTSQADVGYGPYDLYDLGEFNQKGTVRTKYGTKGELKSAVNTLHSNGIQVYGDVVMNHKAGADYTENVTAVEVNPSNRYQETSGEYNIQAWTGFNFPGRGTTYSNWKWQWFHFDGTDWDQSRSLSRIFKFDGKAWDWEVSSENGNYDYLMYADYDYDHPDVVNEMKKWGVWYANEVGLDGYRLDAVKHIKFQFLKDWVDNARAATGKEMFTVGEYWQNDLGALNNYLAKVNYNQSLFDAPLHYNFYAASTGGGYYDMRNILNNTLVASNPTKAVTLVENHDTQPGQSLESTVQPWFKPLAYAFILTRSGGYPSVFYGDMYGTKGTTTREIPALKSKIEPLLKARKDYHYGTQRDYIDNPDVIGWTREGDSTKAKSGLATVITDGPGGSKRMYVGTSNAGEIWYDLTGNRTDKITIGSDGYATFPVNGGSVSVWVQQ

SEQ ID NO: 39110 - protein, 480 aa, Cytophaga sp.
NGTMMQYFEWYVPNDGQQWNRLRTDAPYLSSVGITAVWTPPAYKGTSQADVGYGPYDLYDLGEFNQKGTVRTKYGTKGELKSAVNTLHSNGIQVYGDVVMNHKAGADYTENVTAVEVNPSNRYQETSGEYNIQAWTGFNFPGRGTTYSNWKWQWFHFDGTDWDQSRSLSRIFKFDGKAWDWEVSSENGNYDYLMYADYDYDHPDVVNEMKKWGVWYANEVGLDGYRLDAVKHIKFQFLKDWVDNARAATGKEMFTVGEYWQNDLGALNNYLAKVNYNQSLFDAPLHYNFYAASTGGGYYDMRNILNNTLVASNPTKAVTLVENHDTQPGQSLESTVQPWFKPLAYAFILTRSGGYPSVFYGDMYGTKGTTTREIPALKSKIEPLLKARKDYAYGTQRDYIDNPDVIGWTREGDSTKAKSGLATVITDGPGGSKRMYVGTSNAGEIWYDLTGNRTDKITIGSDGYATFPVFGGSVSVWVQQ

SEQ ID NO: 39111 - protein, 480 aa, Cytophaga sp.
NGTMMQYFEWYVPNDGQQWNRLRTDAPYLSSVGITAVWTPPAYKGTSQADVGYGPYDLYDLGEFNQKGTVRTKYGTKGELKSAVNTLHSNGIQVYGDVVMNHKAGADYTENVTAVEVNPSNRYQETSGEYNIQAWTGFNFPGRGTTYSNWKWQWFHFDGTDWDQSRSLSRIFKFDGKAWDWEVSSENGNYDYLMYADYDYDHPDVVNEMKKWGVWYANEVGLDGYRLDAVKHIKFQFLKDWVDNARAATGKEMFTVGEYWQNDLGALNNYLAKVNYNQSLFDAPLHYNFYAASTGGGYYDMRNILNNTLVASNPTKAVTLVENHDTQPGQSLESTVQPWFKPLAYAFILTRSGGYPSVFYGDMYGTKGTTTREIPALKSKIEPLLKARKDYAYGTQRDYIDNPDVIGWTREGDSTKAKSGLATVITDGPGGSKKMYVGTSNAGEIWYDLTGNRTDKITIGSDGYATFPVNGGSVSVWVQQ

SEQ ID NO: 39112 - protein, 480 aa, Cytophaga sp.
NGTMMQYFEWYVPNDGQQWNRLRTDAPYLSSVGITAVWTPPAYKGTSQADVGYGPYDLYDLGEFNQKGTVRTKYGTKGELKSAVNTLHSNGIQVYGDVVMNHKAGADYTENVTAVEVNPSNRYQETSGEYNIQAWTGFNFNGRGTTYSNWKWQWFHFDGTDWDQSRSLSRIFKFDGKAWDWEVSSENGNYDYLMYADYDYDHPDVVNEMKKWGVWYANEVGLDGYRLDAVKHIKFQFLKDWVDNARAATGKEMFTVGEYWQNDLGALNNYLAKVNYNQSLFDAPLHYNFYAASTGGGYYDMRNILNNTLVASNPTKAVTLVENHDTQPGQSLESTVQPWFKPLAYAFILTRSGGYPSVFYGDMYGTKGTTTREIPALKSKIEPLLKARKDYAYGTQRDYIDNPDVIGWTREGDSTKAKSGLATVITDGPGGSKRMYVGTSNAGEIWYDLTGNRTDKITIGSDGYATFPVNGGSVSVWVQQ

SEQ ID NO: 39113 - protein, 480 aa, Cytophaga sp.
NGTMMQYFEWYVPNDGQQWNRLRTDAPYLSSVGITAVWTPPAYKGTSQADVGYGPYDLYDLGEFNQKGTVRTKYGTKGELKSAVNTLHSNGIQVYGDVVMNHKAGADYTENVTAVEVNPSNRYQETSGEYNIQAWTGFNFPGRGTTYSNWKWQWFHFDGTDWDQSRSLSRIFKFDGKAWDWEVSSENGNYDYLMYADYDYDHPDVVNEMKKWGVWYANEVGLDGYRLDAVKHIKFQFLKDWVDNARAATGKEMFTVGEYWQNDLGALNNYLAKVNYNQSLFDAPLHYNFYAASTGGGYYDMRNILNNTLVASNPTKAVTLVENHDTQPGQSLESTVQPWFKPLAYAFILTRSGGYPSVFYGDMYGTKGTTTREIPALKSKIEPLLKARKDYAYGTQRDYIDNPDVIGWTREGDSTKAKSGLATVITDGPFGSKRMYVGTSNAGEIWYDLTGNRTDKITIGSDGYATFPVNGGSVSVWVQQ

SEQ ID NO: 39114 - protein, 480 aa, Cytophaga sp.
NGMMMQYFEWYVPNDGQQWNRLRTDAPYLSSVGITAVWTPPAYKGTSQADVGYGPYDLYDLGEFNQKGTVRTKYGTKGELKSAVNTLHSNGIQVYGDVVMNHKAGADYTENVTAVEVNPSNRYQETSGEYNIQAWTGFNFPGRGTTYSNWKWQWFHFDGTDWDQSRSLSRIFKFDGKAWDWEVSSENGNYDYLMYADYDYDHPDVVNEMKKWGVWYANEVGLDGYRLDAVKHIKFQFLKDWVDNARAATGKEMFTVGEYWQNDLGALNNYLAKVNYNQSLFDAPLHYNFYAASTGGGYYDMRNILNNTLVASNPTKAVTLVENHDTQPGQSLESTVQPWFKPLAYAFILTRSGGYPSVFYGDMYGTKGTTTREIPALKSKIEPLLKARKDYAYGTQRDYIDNPDVIGWTREGDSTKAKSGLATVITDGPGGSKRMYVGTSNAGEIWYDLTGNRTDKITIGSDGYATFPVNGGSVSVWVQQ

SEQ ID NO: 39115 - protein, 480 aa, Cytophaga sp.
NGAMMQYFEWYVPNDGQQWNRLRTDAPYLSSVGITAVWTPPAYKGTSQADVGYGPYDLYDLGEFNQKGTVRTKYGTKGELKSAVNTLHSNGIQVYGDVVMNHKAGADYTENVTAVEVNPSNRYQETSGEYNIQAWTGFNFPGRGTTYSNWKWQWFHFDGTDWDQSRSLSRIFKFDGKAWDWEVSSENGNYDYLMYADYDYDHPDVVNEMKKWGVWYANEVGLDGYRLDAVKHIKFQFLKDWVDNARAATGKEMFTVGEYWQNDLGALNNYLAKVNYNQSLFDAPLHYNFYAASTGGGYYDMRNILNNTLVASNPTKAVTLVENHDTQPGQSLESTVQPWFKPLAYAFILTRSGGYPSVFYGDMYGTKGTTTREIPALKSKIEPLLKARKDYAYGTQRDYIDNPDVIGWTREGDSTKAKSGLATVITDGPGGSKRMYVGTSNAGEIWYDLTGNRTDKITIGSDGYATFPVNGGSVSVWVQQ

SEQ ID NO: 39116 - protein, 480 aa, Cytophaga sp.
NGTMMQYFEWYVPNDGQQWNRLRTDAPYLSSVGITAVWTPPAYKGTSQADVGYGPYDLYDLGEFNQKGTVRTKYGTKGELKSAVNTLHSNGIQVYGDVVMNHKAGADYTENVTAVEVNPSNRYQETSGEYNIQAWTGFNFPGRGTNYSNWKWQWFHFDGTDWDQSRSLSRIFKFDGKAWDWEVSSENGNYDYLMYADYDYDHPDVVNEMKKWGVWYANEVGLDGYRLDAVKHIKFQFLKDWVDNARAATGKEMFTVGEYWQNDLGALNNYLAKVNYNQSLFDAPLHYNFYAASTGGGYYDMRNILNNTLVASNPTKAVTLVENHDTQPGQSLESTVQPWFKPLAYAFILTRSGGYPSVFYGDMYGTKGTTTREIPALKSKIEPLLKARKDYAYGTQRDYIDNPDVIGWTREGDSTKAKSGLATVITDGPGGSKRMYVGTSNAGEIWYDLTGNRTDKITIGSDGYATFPVNGGSVSVWVQQ

SEQ ID NO: 39117 - protein, 480 aa, Cytophaga sp.
NGTMMQYFEWYVPNDGQQWNRLRTDAPYLSSVGITAVWTPPAYKGTSQADVGYGPYDLYDLGEFNQKGTVRTKYGTKGELKSAVNTLHSNGIQVYGDVVMNHKAGADYTENVTAVEVNPSNRYQETSGEYNIQAWTGFNFPGRGTTYSNWKWQWFHFDGTDWDQSRSLSRIFKWDGKAWDWEVSSENGNYDYLMYADYDYDHPDVVNEMKKWGVWYANEVGLDGYRLDAVKHIKFQFLKDWVDNARAATGKEMFTVGEYWQNDLGALNNYLAKVNYNQSLFDAPLHYNFYAASTGGGYYDMRNILNNTLVASNPTKAVTLVENHDTQPGQSLESTVQPWFKPLAYAFILTRSGGYPSVFYGDMYGTKGTTTREIPALKSKIEPLLKARKDYAYGTQRDYIDNPDVIGWTREGDSTKAKSGLATVITDGPGGSKRMYVGTSNAGEIWYDLTGNRTDKITIGSDGYATFPVNGGSVSVWVQQ

SEQ ID NO: 39118 - protein, 480 aa, Cytophaga sp.
NGTMMQYFEWYVPNDGQQWNRLRTDAPYLSSVGITAIWTPPAYKGTSQADVGYGPYDLYDLGEFNQKGTVRTKYGTKGELKSAVNTLHSNGIQVYGDVVMNHKAGADYTENVTAVEVNPSNRYQETSGEYNIQAWTGFNFPGRGTTYSNWKWQWFHFDGTDWDQSRSLSRIFKFDGKAWDWEVSSENGNYDYLMYADYDYDHPDVVNEMKKWGVWYANEVGLDGYRLDAVKHIKFQFLKDWVDNARAATGKEMFTVGEYWQNDLGALNNYLAKVNYNQSLFDAPLHYNFYAASTGGGYYDMRNILNNTLVASNPTKAVTLVENHDTQPGQSLESTVQPWFKPLAYAFILTRSGGYPSVFYGDMYGTKGTTTREIPALKSKIEPLLKARKDYAYGTQRDYIDNPDVIGWTREGDSTKAKSGLATVITDGPGGSKRMYVGTSNAGEIWYDLTGNRTDKITIGSDGYATFPVNGGSVSVWVQQ

SEQ ID NO: 39119 - protein, 480 aa, Cytophaga sp.
NGTMMQYFEWYVPNDGQQWNRLRTDAPYLSSVGITAVWTPPAYKGTSQADVGYGPYDLYDLGEFNQKGTVRTKYGTKGELKSAVNTLHSNGIQVYGDVVMNHKAGADYTENVTAVEVNPSNRYQETSGEYNIQAWTGFNFPGRGTTYSNWKWQWFHFDGTDWDQSRSLSRIFKFDGKAWDWEVSSENGNYDYLMYADYDYDHPDVVNEMKKWGVWYANEVGLDGYRLDAVKHIKFQFLKDWVDNARAATGKEMFTVGEYWQNDLGALNNYLAKVNYNQSLFDAPLHYNFYAASTGGGYYDMRNILNNTLVASNPTKAVTLVENHDTQPGQSLESTVQPWFKPLAYAFILTRSGGYPSVFYGDMYGTKGTTTREIPASKSKIEPLLKARKDYAYGTQRDYIDNPDVIGWTREGDSTKAKSGLATVITDGPGGSKRMYVGTSNAGEIWYDLTGNRTDKITIGSDGYATFPVNGGSVSVWVQQ

SEQ ID NO: 39120 - protein, 480 aa, Cytophaga sp.
NGTMMQYFEWYVPNDGQQWNRLRTDAPYLSSVGITAVWTPPAYKGTSQADVGYGPYDLYDLGEFNQKGTVRTKYGTKGELKSAVNTLHSNGIQVYGDVVMNHKAGADYTENVTAVEVNPSNRYQETSGELNIQAWTGFNFPGRGTTYSNWKWQWFHFDGTDWDQSRSLSRIFKFDGKAWDWEVSSENGNYDYLMYADYDYDHPDVVNEMKKWGVWYANEVGLDGYRLDAVKHIKFQFLKDWVDNARAATGKEMFTVGEYWQNDLGALNNYLAKVNYNQSLFDAPLHYNFYAASTGGGYYDMRNILNNTLVASNPTKAVTLVENHDTQPGQSLESTVQPWFKPLAYAFILTRSGGYPSVFYGDMYGTKGTTTREIPALKSKIEPLLKARKDYAYGTQRDYIDNPDVIGWTREGDSTKAKSGLATVITDGPGGSKRMYVGTSNAGEIWYDLTGNRTDKITIGSDGYATFPVNGGSVSVWVQQ

SEQ ID NO: 39121 - protein, 480 aa, Cytophaga sp.
NGTMMQYFEWYVPNDGQQWNRLRTDAPYLSSVGITAVWTPPAYKGTSQADVGYGPYDLYDLGEFNQKGTVRTKYGTKGELKSAVNTLHSNGIQVYGDVVMNHKAGADYTENVTAVEVNPSNRYQETSGEYNIQAWTGFNFPGRGTTYSNFKWQWFHFDGTDWDQSRSLSRIFKFDGKAWDWPVSSENGNYDYLMYADYDYDHPDVVNEMKKWGVWYANEVGLDGYRLDAVKHIKFSFLKDWVDNARAATGKEMFTVGEYWQNDLGALNNYLAKVNYNQSLFDAPLHYNFYAASTGGGDYDMRNILNNTLVASNPTKAVTLVENHDTQPGQSLESTVQPWFKPLAYAFILTRSGGYPSVFYGDMYGTKGTTTREIPALKSKIEPLLKARKDYAYGTQRDYIDNPDVIGWTREGDSTKAKSGLATVITDGPGGSKRMYVGTSNAGEIWYDLTGNRTDKITIGSDGYATFPVEGQSVSVWVQQ

SEQ ID NO: 39122 - protein, 480 aa, Cytophaga sp.
NGTMMQYFEWYVPNDGQQWNRLRTDAPYLSSVGITAVWTPPAYKGTSQADVGYGPYDLYDLGEFNQKGTVRTKYGTKGELKSAVNTLHSNGIQVYGDVVMNHKAGADYTENVTAVEVNPSNRYQETSGEYNIQAWTGFNFPGRGTTYSNWKWQWFHFDGTDWDQSRSLSRIFKFDGKAWDWEVSSENGNYDYLMYADYDYDHPDVVNEMKKWGVWYANEVGLDGYRLDAVKHIKFQFLKDWVDNARAATGKEMFTVGEYWQNDLGALNNYLAKVNYNQSLFDAPLHYNFYAASTGGGYYDMRNILNNTLVASNPTKAVTLVENHDTQPGQSLESTVQPWFKPLAYAFILTRSGGYPSVFYGDMYGTKGTTTREIPALKSKIEPLLKARKDYAYGTQRDYIDNDDVIGWTREGDSTKAKSGLATVITDGPGGSKRMYVGTSNAGEIWYDLTGNRTDKITIGSDGYATFPVNGGSVSVWVQQ

SEQ ID NO: 39123 - protein, 480 aa, Cytophaga sp.
NGTMMQYFEWYVPNDGQQWNRLRTDAPYLSSVGITAVWTPPAYKGTSQADVGYGPYDLYDLGEFNQKGTVRTKYGTKGELKSAVNTLHSNGIQVYGDVVMNHKAGADYTENVTAVEVNPSNRYQETSGEYNIQAWTGFNFPGRGTTYSNWKWQWFHFDGTDWDQSRSLSRIFKFDGKAWDWEVSSENGNYDYLMYADYDYDHPDVVNEMKKWGVWYANEVGLDGYRLDAVKHIKFQFLKDWVDNARAATGKEMFTVGEYWQNDLGALNNYLAKVNYNQSLFDAPLHYNFYAASTGGGYYDMRNILNNTLVASNPTKAVTLVENHDTQPGQSLESTVQPWFKPLAYAFILTRSGGYPSVFYGDMYGTKGTTTREIPALKSKIEPLLKARYDYAYGTQRDYIDNPDVIGWTREGDSTKAKSGLATVITDGPGGSKRMYVGTSNAGEIWYDLTGNRTDKITIGSDGYATFPVNGGSVSVWVQQ

SEQ ID NO: 39124 - protein, 480 aa, Cytophaga sp.
NGTMMQYFEWYVPNDGQQWNRLRTDAPYLSSVGITAVWTPPAYKGTSQADVGYGPYDLYDLGEFNQKGTVRTKYGTKGELKSAVNTLHSNGIQVYGDVVMNHKAGADYTENVTAVEVNPSNRYQETSGEYNIQAWTGFNFPGRGTTYSNWKWQWFHFDGTDWDQSRSLSRIFKFDGKAWDWEVSSENGNYDYLMYADYDYDHPDVVNEMKKWGVWYANEVGLDGYRLDAVKHIKFQFLKDWVDNARAATGKEMFTVGEYWQNDLGALNNYLAKVNYNQSLFDAPLHYNFYAASTGGGYYDMRNILNNTLVASNPTKAVTLVENHDTQPGQSLESTVQPWFKPLAYAFILTRSGGYPSVFYGDMYGTKGTTTREIPALKSKIEPLLKARKDYAYGTQRDYIDNPDVIGWTREGDSTKAKSGLATVICDGPGGSKRMYVGTSNAGEIWYDLTGNRTDKITIGSDGYATFPVNGGSVSVWVQQ

SEQ ID NO: 39125 - protein, 480 aa, Cytophaga sp.
NGTMMQYFEWYVPNDGQQWNRLRTDAPYLSSVGITAVWTPPAYKGTSQADVGYGPYDLYDLGEFNQKGTVRTKYGTKGELKSAVNTLHSNGIQVYGDVVMNHKAGADYTENITAVEVNPSNRYQETSGEYNIQAWTGFNFPGRGTTYSNWKWQWFHFDGTDWDQSRSLSRIFKFDGKAWDWEVSSENGNYDYLMYADYDYDHPDVVNEMKKWGVWYANEVGLDGYRLDAVKHIKFQFLKDWVDNARAATGKEMFTVGEYWQNDLGALNNYLAKVNYNQSLFDAPLHYNFYAASTGGGYYDMRNILNNTLVASNPTKAVTLVENHDTQPGQSLESTVQPWFKPLAYAFILTRSGGYPSVFYGDMYGTKGTTTREIPALKSKIEPLLKARKDYAYGTQRDYIDNPDVIGWTREGDSTKAKSGLATVITDGPGGSKRMYVGTSNAGEIWYDLTGNRTDKITIGSDGYATFPVNGGSVSVWVQQ

SEQ ID NO: 39126 - protein, 480 aa, Cytophaga sp.
NGTMMQYFEWYVPNDGQQWNRLRTDAPYLSSVGITAVWTPPAYKGTSQADVGYGPYDLYDLGEFNQKGTVRTKYGTKGELKSAVNTLHSNGIQVYGDVVMNHKAGADYTENVTAVEVNPSNRYQETSGEYNIQAWTGFNFPGRGTTYSNWKWQWFHFDGTDWDQSRSLSRIFKFDGKAWDWEVSSENGNYDYLMYADYDYDHPDVVNEMKKWGVWYANEVGLDGYRLDAVKHIKFQFLKDWVDNARAATGKEMFTVGEYWQNDLGALNNYLAKVNYNQSLFDAPLHYNFYAASTGGGYYDMRNILNNTLVASNPTKAVTLVENHDTQPGQSLESTVQPWFKPLAYAFILTRSGGYPSVFYGDMYGTKGTTTREIPALKSKIEPLLKARKDYAYGTQRDYIDNPDVIGWTREGDSTKAKSGLATVITDGPGGSKRMYVGTSNAGEIWYDLTGNRTDKITIGSDGYATFPVNGQSVSVWVQQ

SEQ ID NO: 39127 - protein, 480 aa, Cytophaga sp.
NGTMMQYFEWYVPNDGQQWNRLRTDAPYLSSVGITAVWTPPAYKGTSQADVGYGPYDLYDLGEFNQKGTVRTKYGTKGELKSAVNTLHSNGIQVYGDVVMNHKAGADYTENVTAVEVNPSNRYQETSGEYNIQAWTGFNFPGRGTTYSNWKWQWFHFDGTDHDQSRSLSRIFKFDGKAWDWEVSSENGNYDYLMYADYDYDHPDVVNEMKKWGVWYANEVGLDGYRLDAVKHIKFQFLKDWVDNARAATGKEMFTVGEYWQNDLGALNNYLAKVNYNQSLFDAPLHYNFYAASTGGGYYDMRNILNNTLVASNPTKAVTLVENHDTQPGQSLESTVQPWFKPLAYAFILTRSGGYPSVFYGDMYGTKGTTTREIPALKSKIEPLLKARKDYAYGTQRDYIDNPDVIGWTREGDSTKAKSGLATVITDGPGGSKRMYVGTSNAGEIWYDLTGNRTDKITIGSDGYATFPVNGGSVSVWVQQ

SEQ ID NO: 39128 - protein, 480 aa, Cytophaga sp.
NGTMMQYFEWYVPNDGQQWNRLRTDAPYLSSVGITAVWTPPAYKGTSQADVGYGPYDLYDLGEFNQKGTVRTKYGTKGELKSAVNTLHSNGIQVYGDVVMNHKAGADYTENVTAVEVNPSNRYQETSGEYNIQAWTGFNFPGRGTTYSNWKWQWFHFDGTDWDQSRSLSRIFKFDGKAWDWEVSSENGNYDYLMYADYDYDHPDVVNEMKKWGVWYANEVGLDGYRLDAVKHIKFQFLKDWVDNARAATGKEMFTVGEYWQNDLGALNNYLAKVNYNQSLFDAPLHYNFYAASTGGGYYDMRNILNNTLVASNPTKAVTLVENHDTQPGQSLESTVQPWFKPLAYAFILTRSGGYPSVFYGDMYGTKGTTTREIPALKSKIEPLLKARKDYAYGTQRDYIDNLDVIGWTREGDSTKAKSGLATVITDGPGGSKRMYVGTSNAGEIWYDLTGNRTDKITIGSDGYATFPVNGGSVSVWVQQ

SEQ ID NO: 39129 - protein, 480 aa, Cytophaga sp.
NGTMMQYFEWYVPNDGQQWNRLRTDAPYLSSVGITAVWTPPAYKGTSQADVGYGPYDLYDLGEFNQKGTVRTKYGTKGELKSAVNTLHSNGIQVYGDVVMNHKAGADYLENVTAVEVNPSNRYQETSGEYNIQAWTGFNFPGRGTTYSNWKWQWFHFDGTDWDQSRSLSRIFKFDGKAWDWEVSSENGNYDYLMYADYDYDHPDVVNEMKKWGVWYANEVGLDGYRLDAVKHIKFQFLKDWVDNARAATGKEMFTVGEYWQNDLGALNNYLAKVNYNQSLFDAPLHYNFYAASTGGGYYDMRNILNNTLVASNPTKAVTLVENHDTQPGQSLESTVQPWFKPLAYAFILTRSGGYPSVFYGDMYGTKGTTTREIPALKSKIEPLLKARKDYAYGTQRDYIDNPDVIGWTREGDSTKAKSGLATVITDGPGGSKRMYVGTSNAGEIWYDLTGNRTDKITIGSDGYATFPVNGGSVSVWVQQ

SEQ ID NO: 39130 - protein, 480 aa, Cytophaga sp.
NGTMMQYFEWYVPNDGQQWNRLRTDAPYLSSVGITAVWTPPAYKGTSQADVGYGPYDLYDLGEFNQKGTVRTKYGTKGELKSAVNTLHSNGIQVYGDVVMNHKAGADYTENVTAVEVNPSNRYQETSGEYNIQAWTGFNFPGRGTTYSNWKWQWFHFDGTDWDQSRSLSRIFKFDGKAWDWEVSSENGNYDYLMYADYDYDHPDVVNEMKKWGVWYANEVGLDGYRLDAVKHIKFQFLKDWVDNARAATGKEMFTVGEYWQNDLGALNNYLAKVNYNQSLFDAPLHYNFYAASTGGGYYDMRNILNNTLVASNPTKAVTLVENHDTQPGQSLESTVQPWFKPLAYAFILTRSGGYPSVFYGDMYGTKGTTTREIPALKSKIEPLLKARIDYAYGTQRDYIDNPDVIGWTREGDSTKAKSGLATVITDGPGGSKRMYVGTSNAGEIWYDLTGNRTDKITIGSDGYATFPVNGGSVSVWVQQ

SEQ ID NO: 39131 - protein, 480 aa, Cytophaga sp.
NGTMMQYFEWYVPNDGQQWNRLRTDAPYLSSVGITAVWTPPAYKGTSCADVGYGPYDLYDLGEFNQKGTVRTKYGTKGELKSAVNTLHSNGIQVYGDVVMNHKAGADYTENVTAVEVNPSNRYQETSGEYNIQAWTGFNFPGRGTTYSNWKWQWFHFDGTDWDQSRSLSRIFKFDGKAWDWEVSSENGNYDYLMYADYDYDHPDVVNEMKKWGVWYANEVGLDGYRLDAVKHIKFQFLKDWVDNARAATGKEMFTVGEYWQNDLGALNNYLAKVNYNQSLFDAPLHYNFYAASTGGGYYDMRNILNNTLVASNPTKAVTLVENHDTQPGQSLESTVQPWFKPLAYAFILTRSGGYPSVFYGDMYGTKGTTTREIPALKSKIEPLLKARKDYAYGTQRDYIDNPDVIGWTREGDSTKAKSGLATVITDGPGGSKRMYVGTSNAGEIWYDLTGNRTDKITIGSDGYATFPVNGGSVSVWVQQ

SEQ ID NO: 39132 - protein, 480 aa, Cytophaga sp.
NGTMMQYFEWYVPNDGQQWNRLRTDAPYLSSVGITAVWTPPAYKGTSQADVGYGPYDLYDLGEFNQKGTVRTKYGTKGELKSAVNTLHSNGIQVYGDVVMNHKAGADYTENVTAVEVNPSNRYQETSGEYNIQAWTGFNFPGRGTTYSNWKWQWFHFDGTDWDQSRSLSRIFKFDGKAWDWEVSSSNGNYDYLMYADYDYDHPDVVNEMKKWGVWYANEVGLDGYRLDAVKHIKFQFLKDWVDNARAATGKEMFTVGEYWQNDLGALNNYLAKVNYNQSLFDAPLHYNFYAASTGGGYYDMRNILNNTLVASNPTKAVTLVENHDTQPGQSLESTVQPWFKPLAYAFILTRSGGYPSVFYGDMYGTKGTTTREIPALKSKIEPLLKARKDYAYGTQRDYIDNPDVIGWTREGDSTKAKSGLATVITDGPGGSKRMYVGTSNAGEIWYDLTGNRTDKITIGSDGYATFPVNGGSVSVWVQQ

SEQ ID NO: 39133 - protein, 480 aa, Cytophaga sp.
NGTMMQYFEWYVPNDGCQWNRLRTDAPYLSSVGITAVWTPPAYKGTSQADVGYGPYDLYDLGEFNQKGTVRTKYGTKGELKSAVNTLHSNGIQVYGDVVMNHKAGADYTENVTAVEVNPSNRYQETSGEYNIQAWTGFNFPGRGTTYSNWKWQWFHFDGTDWDQSRSLSRIFKFDGKAWDWEVSSENGNYDYLMYADYDYDHPDVVNEMKKWGVWYANEVGLDGYRLDAVKHIKFQFLKDWVDNARAATGKEMFTVGEYWQNDLGALNNYLAKVNYNQSLFDAPLHYNFYAASTGGGYYDMRNILNNTLVASNPTKAVTLVENHDTQPGQSLESTVQPWFKPLAYAFILTRSGGYPSVFYGDMYGTKGTTTREIPALKSKIEPLLKARKDYAYGTQRDYIDNPDVIGWTREGDSTKAKSGLATVITDGPGGSKRMYVGTSNAGEIWYDLTGNRTDKITIGSDGYATFPVNGGSVSVWVQQ

SEQ ID NO: 39134 - protein, 480 aa, Cytophaga sp.
NGTMMQYFEWYVPNDGQQWNRLRTDAPYLSSVGITAVWTPPAYKGTSQADVGYGPYDLYDLGEFNQKGTVRTKYGTKGELKSAVNTLHSNGIQVYGDVVMNHKAGADYTENATAVEVNPSNRYQETSGEYNIQAWTGFNFPGRGTTYSNWKWQWFHFDGTDWDQSRSLSRIFKFDGKAWDWEVSSENGNYDYLMYADYDYDHPDVVNEMKKWGVWYANEVGLDGYRLDAVKHIKFQFLKDWVDNARAATGKEMFTVGEYWQNDLGALNNYLAKVNYNQSLFDAPLHYNFYAASTGGGYYDMRNILNNTLVASNPTKAVTLVENHDTQPGQSLESTVQPWFKPLAYAFILTRSGGYPSVFYGDMYGTKGTTTREIPALKSKIEPLLKARKDYAYGTQRDYIDNPDVIGWTREGDSTKAKSGLATVITDGPGGSKRMYVGTSNAGEIWYDLTGNRTDKITIGSDGYATFPVNGGSVSVWVQQ

SEQ ID NO: 39135 - protein, 480 aa, Cytophaga sp.
NGTMMQYFEWYVPNDGQQWNRLRTDAPYLSSVGITAVWTPPAYKGTSQADVGYGPYDLYDLGEFNQKGTVRTKYGTKGELKSAVNTLHSNGIQVYGDVVMNHKAGADYTENVTAVEVNPSNRYQETSGEYNIQAWTGFNFPGRGTTYSNWKWQWFHFDGTDWDQSRSLSRIFKFDGKAWDWEVSSENGNYDYLMYADYDYDHPDVVNEMKKWGVWYANEVGIDGYRLDAVKHIKFQFLKDWVDNARAATGKEMFTVGEYWQNDLGALNNYLAKVNYNQSLFDAPLHYNFYAASTGGGYYDMRNILNNTLVASNPTKAVTLVENHDTQPGQSLESTVQPWFKPLAYAFILTRSGGYPSVFYGDMYGTKGTTTREIPALKSKIEPLLKARKDYAYGTQRDYIDNPDVIGWTREGDSTKAKSGLATVITDGPGGSKRMYVGTSNAGEIWYDLTGNRTDKITIGSDGYATFPVNGGSVSVWVQQ

SEQ ID NO: 39136 - protein, 480 aa, Cytophaga sp.
NGTMMQYFEWYVPNDGQQWNRLRTDAPYLSSVGITAVWTPPAYKGTSQADVGYGPYDLYDLGEFNQKGTVRTKYGTKGELKSAVNTLHSNGIQVYGDVVMNHKAGADYTENVTAVEVNPSNRYQETSGHYNIQAWTGFNFPGRGTTYSNFKWQWFHFDGTDWDQSRSLSRIFKFDGKAWDWPVSSENGNYDYLMYADYDYDHPDVVNEMKKWGVWYANEVGLDGYRLDAVKHIKFSFLKDWVDNARAATGKEMFTVGEYWQNDLGALNNYLAWVNYNQSLFDAPLHYNFYAASTGGGYYDMRNILNNTLVASNPTKAVTLVENHDTQPGQSLESTVQPWFKPLAYAFILTRSGGYPSVFYGDMYGTKGTTTREIPALKSKIEPLLKARKDYAYGTQRDYIDNPDVIGWTREGDSTKAKSGLATVITDGPGGSKRMYVGTSNAGEIWYDLTGNRTDKITIGSDGYATFPVNGGSVSVWVQQ

SEQ ID NO: 39137 - protein, 480 aa, Cytophaga sp.
NGTMMQYFEWYVPNDGQQWNRLRTDAPYLSSVGITAVWTPPAYKGTSQADVGYGPYDLYDLGEFNQKGTVRTKYGTKGELKSAVNTLHSNGIQVYGDVVMNHKAGADYTENVTAVEVNPSNRYQETSGEYNIQAWTGFNFPGRGTTYSNWKWQWFHFDGTDWDQSRSLSRIFKFDGKAWDWEVSSENGNYDYLMYADYDYDHPDVVNEMKKWGVWYANEVGLDGYRLDAVKHIKFQFLKDWVDNARAATGKEMFTVGEYWQNDLGALNNYLAKVNYNQSLFDAPLHYNFYAASTGGGYYDMRNILNNTLVASNPTKAVTLVENHDTQPGQSLESTVQPWFKPLAYAFILTRSGGYPSVFYGDMYGTKGTTTREIPALKSKIEPLLKARKDYAYGTQRDYIDNPDVIGWTREGDSTKAKSGLATVITDGPGGSKRMYVGTSNAGEIWYDLTGNRTDKITIGSEGYATFPVNGGSVSVWVQQ

SEQ ID NO: 39138 - protein, 480 aa, Cytophaga sp.
NGTMMQYFEWYVPNDGQQWNRLRTDAPYLSSVGITAVWTPPAYKGTSQADVGYGPYDLYDLGEFNQKGTVRTKYGTKGELKSAVNTLHSNGIQVYGDVVMNHKAGADYTENVTAVEVNPSNRYQETSGEYNIQAWTGFNFPGRGTTYSNWKWQWFHFDGTDWDQSRSLSRIFKFDGKAWDWEVSSENGNYDYLMYADYDYDHPDVVNEMKKWGVWYANEVGLDGYRLDAVKHIKFQFLKDWVDNARAATGKEMFTVGEYWQNDLGALNNYLAKVNYNQSLFDAPLHYNFYAASTGGGYYDMRNILNNTLVASNPTKAVTLVENHDTQPGQSLESTVQPWFKPLAYAFILTRSGGYPSVFYGDMYGTKGTTTREIPALKSKIEPLLKAREDYAYGTQRDYIDNPDVIGWTREGDSTKAKSGLATVITDGPGGSKRMYVGTSNAGEIWYDLTGNRTDKITIGSDGYATFPVNGGSVSVWVQQ

SEQ ID NO: 39139 - protein, 480 aa, Cytophaga sp.
NGTMMQYFEWYVPNDGQQWNRLRTDAPYLSSVGITAVWTPPAYKGTSQADVGYGPYDLYDLGEFNQKGTVRTKYGTKGELKSAVNTLHSNGIQVYGDVVMNHKAGADYTENVTAVEVNPSNRYQETSGEYNIQAWTGFNFPGRGTTYSNWKWQWFHFDGTDWDQSRSLSRIFKFDGKAWDWEVSSENGNYDYLMYADYDYDHPDAVNEMKKWGVWYANEVGLDGYRLDAVKHIKFQFLKDWVDNARAATGKEMFTVGEYWQNDLGALNNYLAKVNYNQSLFDAPLHYNFYAASTGGGYYDMRNILNNTLVASNPTKAVTLVENHDTQPGQSLESTVQPWFKPLAYAFILTRSGGYPSVFYGDMYGTKGTTTREIPALKSKIEPLLKARKDYAYGTQRDYIDNPDVIGWTREGDSTKAKSGLATVITDGPGGSKRMYVGTSNAGEIWYDLTGNRTDKITIGSDGYATFPVNGGSVSVWVQQ

SEQ ID NO: 39140 - protein, 480 aa, Cytophaga sp.
NGTMMQYFEWYVPNDGQQWNRLRTDAPYLSSVGITAVWTPPAYKGTSQADVGYGPYDLYDLGEFNQKGTVRTKYGTKGELKSAVNTLHSNGIQVYGDVVMNHKAGADYTENVTAVEVNPSNRYQETSGEYNIQAWTGFNFPGRGTTYSNWKWQWFHFDGTDWDQSRSLSRIFKFDGPAWDWEVSSENGNYDYLMYADYDYDHPDVVNEMKKWGVWYANEVGLDGYRLDAVKHIKFQFLKDWVDNARAATGKEMFTVGEYWQNDLGALNNYLAKVNYNQSLFDAPLHYNFYAASTGGGYYDMRNILNNTLVASNPTKAVTLVENHDTQPGQSLESTVQPWFKPLAYAFILTRSGGYPSVFYGDMYGTKGTTTREIPALKSKIEPLLKARKDYAYGTQRDYIDNPDVIGWTREGDSTKAKSGLATVITDGPGGSKRMYVGTSNAGEIWYDLTGNRTDKITIGSDGYATFPVNGGSVSVWVQQ

SEQ ID NO: 39141 - protein, 480 aa, Cytophaga sp.
NGTMMQYFEWYVPNDGQQWNRLRTDAPYLSSVGITAVWTPPAYKGTSQADVGYGPYDLYDLGEFNQKGTVRTKYGTKGELKSAVNTLHSNGIQVYGDVVMNHKAGADYTENVTAVEVNPSNRYQETSGEYNIQAWTGFNFPGRGTTYSNWKWQWFHFDGTDWDQSRSLSRIFKFDGKAWDWEVSSENGNYDYLMYADYDYDHPDVVNEMKKWGVWYANEVGLDGYRLDAVKHIKFQFLKDWVDNARAATGKEMFTVGEYWQNDLGALNNYLAKVNYNQSLFDAPLHYNFYAASTGGGYYDMRNILNNTLVASNPTKAVTLVENHDTQPGQSLESTVQPWFKPLAYAFILTRSGGYPSVFYGDMYGTKGTTTREIPALKSKIEPLLKARKDNAYGTQRDYIDNPDVIGWTREGDSTKAKSGLATVITDGPGGSKRMYVGTSNAGEIWYDLTGNRTDKITIGSDGYATFPVNGGSVSVWVQQ

SEQ ID NO: 39142 - protein, 480 aa, Cytophaga sp.
NGTMMQYFEWYVPNDGQQWNRLRTDAPYLSSVGITAVWTPPAYKGTSQADVGYGPYDLYDLGEFNQKGTVRTKYGTKGELKSAVNTLHSNGIQVYGDVVMNHKAGADYTENVTAVEVNPSNRYQETSGEYNIQAWTGFNFPGRGTTYSNWKWQWFHFDGTDWDQSRSLSRIFKFDGKAWDWEVSSENGNYDYLMYADYDYDHPDVVNEMKKWGVWYANEVGLDGYRLDAVKHIKFQFLKDWVDNARAATGKQMFTVGEYWQNDLGALNNYLAKVNYNQSLFDAPLHYNFYAASTGGGYYDMRNILNNTLVASNPTKAVTLVENHDTQPGQSLESTVQPWFKPLAYAFILTRSGGYPSVFYGDMYGTKGTTTREIPALKSKIEPLLKARKDYAYGTQRDYIDNPDVIGWTREGDSTKAKSGLATVITDGPGGSKRMYVGTSNAGEIWYDLTGNRTDKITIGSDGYATFPVNGGSVSVWVQQ

SEQ ID NO: 39143 - protein, 480 aa, Cytophaga sp.
NGTMMQYFEWYVPNDGQQWNRLRTDAPYLSSVGITAVWTPPAYKGTSQADVGYGPYDLYDLGEFNQKGTVRTKYGTKGELKSAVNTLHSNGIQVYGDVVMNHKAGADYTENVTAVEVNPSNRYQETSGEYNIQAWTGFNFPGRGTTYSNWKWQWFHFDGTDWDQSRSLSRIFKFDGKAWDWEVSSENGNYDYLMYADYDYDHPDVVNEMKKWGVWYANEVGLDGYRLDAVKHIKFQFLKDWVDNARAATGKEMFTVGEYWQNDLGALNNYLAKVNYNQSLFDAPLHYNFYAASTGGGYYDMRNILNNTLVASNPTKAVTLVENHDTQPGQSLESTVQPWFKPLAYAFILTRSGGYPSVFYGDMYGTKGTTTREIPALKSKIEPLLKARKDYAYGTQRDYIDNPDVIGWTREGDSTKAKSGLATVITDGPGGSKRMYVGTSNAGEIWYDLTGNRTDKITIGSDGYATFPVNGGSVSVWIQQ

SEQ ID NO: 39144 - protein, 480 aa, Cytophaga sp.
NGTMMQYFEWYVPNDGQQWNRLRTDAPYLSSVGITAVWTPPAYKGTSQADVGYGPYDLYDLGEFNQKGTVRTKYGTKGELKSAVNTLHSNGIQVYGDVVMNHKAGADYTENVTAVEVNPSNRYQETSGEYNIQAWTGFNFPGRGTTYSNWKWQWFHFDGTDWDQSRSLSRIFKFDGKAWDWEVSSENGNYDYLMYADYDYDHEDVVNEMKKWGVWYANEVGLDGYRLDAVKHIKFQFLKDWVDNARAATGKEMFTVGEYWQNDLGALNNYLAKVNYNQSLFDAPLHYNFYAASTGGGYYDMRNILNNTLVASNPTKAVTLVENHDTQPGQSLESTVQPWFKPLAYAFILTRSGGYPSVFYGDMYGTKGTTTREIPALKSKIEPLLKARKDYAYGTQRDYIDNPDVIGWTREGDSTKAKSGLATVITDGPGGSKRMYVGTSNAGEIWYDLTGNRTDKITIGSDGYATFPVNGGSVSVWVQQ

SEQ ID NO: 39145 - protein, 480 aa, Cytophaga sp.
NGTMMQYFEWYVPNDGQQWNRLRTDAPYLSSVGITAVWTPPAYKGTSQADVGYGPYDLYDLGEFNQKGTVRTKYGTKGELKSAVNTLHSNGIQVYGDVVMNHKAGADYTENVTAVEVNPSNRYQETSGEYNIQAWTGFNFPGRGTTYSNWKWQWFHFDGTDWDQSRSLSRIFKFDGKAWDWEVSSENGNYDYLMYADYDYDHPDVVNEMKKWGVWYANEVGLDGYRLDAVKHIKFQFLKDWVDNARAATGKEMFTVGEYWQNDLGALNNYLAKVNYNQSLFDAPLHYNFYAASTGGGYFDMRNILNNTLVASNPTKAVTLVENHDTQPGQSLESTVQPWFKPLAYAFILTRSGGYPSVFYGDMYGTKGTTTREIPALKSKIEPLLKARKDYAYGTQRDYIDNPDVIGWTREGDSTKAKSGLATVITDGPGGSKRMYVGTSNAGEIWYDLTGNRTDKITIGSDGYATFPVNGGSVSVWVQQ

SEQ ID NO: 39146 - protein, 480 aa, Cytophaga sp.
NGTMMQYFEWYVPNDGQQWNRLRTDAPYLSSVGITAVWTPPAYKGTSQADVGYGPYDLYDLGEFNQRGTVRTKYGTKGELKSAVNTLHSNGIQVYGDVVMNHKAGADYTENVTAVEVNPSNRYQETSGEYNIQAWTGFNFPGRGTTYSNWKWQWFHFDGTDWDQSRSLSRIFKFDGKAWDWEVSSENGNYDYLMYADYDYDHPDVVNEMKKWGVWYANEVGLDGYRLDAVKHIKFQFLKDWVDNARAATGKEMFTVGEYWQNDLGALNNYLAKVNYNQSLFDAPLHYNFYAASTGGGYYDMRNILNNTLVASNPTKAVTLVENHDTQPGQSLESTVQPWFKPLAYAFILTRSGGYPSVFYGDMYGTKGTTTREIPALKSKIEPLLKARKDYAYGTQRDYIDNPDVIGWTREGDSTKAKSGLATVITDGPGGSKRMYVGTSNAGEIWYDLTGNRTDKITIGSDGYATFPVNGGSVSVWVQQ

SEQ ID NO: 39147 - protein, 480 aa, Cytophaga sp.
NGTMMQYFEWYVPNDGQQWNRLRTDAPYLSSVGITAVWTPPAYKGTSQADVGYGPYDLYDLGEFNQKGTVRTKYGTKGELKSAVNTLHSNGIQVYGDVVMNHKAGADYTENVTAVEVNPSNRYYETSGEYNIQAWTGFNFPGRGTTYSNWKWQWFHFDGTDWDQSRSLSRIFKFDGKAWDWEVSSENGNYDYLMYADYDYDHPDVVNEMKKWGVWYANEVGLDGYRLDAVKHIKFQFLKDWVDNARAATGKEMFTVGEYWQNDLGALNNYLAKVNYNQSLFDAPLHYNFYAASTGGGYYDMRNILNNTLVASNPTKAVTLVENHDTQPGQSLESTVQPWFKPLAYAFILTRSGGYPSVFYGDMYGTKGTTTREIPALKSKIEPLLKARKDYAYGTQRDYIDNPDVIGWTREGDSTKAKSGLATVITDGPGGSKRMYVGTSNAGEIWYDLTGNRTDKITIGSDGYATFPVNGGSVSVWVQQ

SEQ ID NO: 39148 - protein, 480 aa, Cytophaga sp.
NGTMMQYFEWYVPNDGQQWNRLRTDAPYLSSVGITAVWTPPAYKGTSQADVGYGPYDLYDLGEFNQKGTVRTKYGTKGELKSAVNTLHLNGIQVYGDVVMNHKAGADYTENVTAVEVNPSNRYQETSGEYNIQAWTGFNFPGRGTTYSNWKWQWFHFDGTDWDQSRSLSRIFKFDGKAWDWEVSSENGNYDYLMYADYDYDHPDVVNEMKKWGVWYANEVGLDGYRLDAVKHIKFQFLKDWVDNARAATGKEMFTVGEYWQNDLGALNNYLAKVNYNQSLFDAPLHYNFYAASTGGGYYDMRNILNNTLVASNPTKAVTLVENHDTQPGQSLESTVQPWFKPLAYAFILTRSGGYPSVFYGDMYGTKGTTTREIPALKSKIEPLLKARKDYAYGTQRDYIDNPDVIGWTREGDSTKAKSGLATVITDGPGGSKRMYVGTSNAGEIWYDLTGNRTDKITIGSDGYATFPVNGGSVSVWVQQ

SEQ ID NO: 39149 - protein, 480 aa, Cytophaga sp.
NGTMMQYFEWYVPNDGQQWNRLRTDAPYLSSVGITAVWTPPAYKGTSQADVGYGPYDLYDLGEFNQKGTVRTKYGTKGELKSAVNTLHSNGIQVYGDVVMNHKAGADYTENVTAVEVNPSNRYQETSGEYNIQAWTGFNFPGRGTTYSNWKWQWFHFDGTDWDQSRSLSRIFKFDGKAWDWEVSSENGNYDYLMYADYDYDHPDVVNEMKKWGVWYANEVGLDGYRLDAVKHIKFQFLKDWVDNARAATGKEMFTVGEYWQNDLGALNNYLAKVNYNQSLFDAPLHYNFYQASTGGGYYDMRNILNNTLVASNPTKAVTLVENHDTQPGQSLESTVQPWFKPLAYAFILTRSGGYPSVFYGDMYGTKGTTTREIPALKSKIEPLLKARKDYAYGTQRDYIDNPDVIGWTREGDSTKAKSGLATVITDGPGGSKRMYVGTSNAGEIWYDLTGNRTDKITIGSDGYATFPVNGGSVSVWVQQ

SEQ ID NO: 39150 - protein, 480 aa, Cytophaga sp.
NGTMMQYFEWYVPNDGQQWNRLRTDAPYLSSVGITAVWTPPAYKGTSQADVGYGPYDLYDLGEFNQKGTVRTKYGTKGELKSAVNTLHSNGIQVYGDVVMNHKAGADYTENVTAVEVNPSRRYQETSGEYNIQAWTGFNFPGRGTTYSNWKWQWFHFDGTDWDQSRSLSRIFKFDGKAWDWEVSSENGNYDYLMYADYDYDHPDVVNEMKKWGVWYANEVGLDGYRLDAVKHIKFQFLKDWVDNARAATGKEMFTVGEYWQNDLGALNNYLAKVNYNQSLFDAPLHYNFYAASTGGGYYDMRNILNNTLVASNPTKAVTLVENHDTQPGQSLESTVQPWFKPLAYAFILTRSGGYPSVFYGDMYGTKGTTTREIPALKSKIEPLLKARKDYAYGTQRDYIDNPDVIGWTREGDSTKAKSGLATVITDGPGGSKRMYVGTSNAGEIWYDLTGNRTDKITIGSDGYATFPVNGGSVSVWVQQ

SEQ ID NO: 39151 - protein, 480 aa, Cytophaga sp.
NGTMMQYFEWYVPNDGQQWNRLRTDAPYLSSVGITAVWTPPAYKGTSQADVGYGPYDLYDLGEFNQKGTVRTKYGTKGELKSAVNTLHSNGIQVYGDVVMNHKAGADYTENVTAVEVNPSNRYQETSGEYNIQAWTGFNFPGRGTTYSNWKWQWFHFDGTDWDQSRSLSRIFKFDGKAWDWEVSSENGNYDYLMYADYDYMHPDVVNEMKKWGVWYANEVGLDGYRLDAVKHIKFQFLKDWVDNARAATGKEMFTVGEYWQNDLGALNNYLAKVNYNQSLFDAPLHYNFYAASTGGGYYDMRNILNNTLVASNPTKAVTLVENHDTQPGQSLESTVQPWFKPLAYAFILTRSGGYPSVFYGDMYGTKGTTTREIPALKSKIEPLLKARKDYAYGTQRDYIDNPDVIGWTREGDSTKAKSGLATVITDGPGGSKRMYVGTSNAGEIWYDLTGNRTDKITIGSDGYATFPVNGGSVSVWVQQ

SEQ ID NO: 39152 - protein, 480 aa, Cytophaga sp.
NGTMMQYFEWYVPNDGQQWNRLRTDAPYLSSVGITAVWTPPAYKGTSQADVGYGPYDLYDLGEFNQKGTVRTKYGTKGELKSAVNTLHSNGIQVYGDVVMNHKAGADYTENVTAVEVNPSNRYQETSGEYNIQAWTGFNFPGRGTTYSNWKWQWFHFDGTDWDQSRSLSRIFKFDGKAWDWEVSSENGNYDYLMYADYDYDHPDVVNEMKKWGVWYANEVGLDGYRLDAVKHIKFQFLKDWVDNARAATGKSMFTVGEYWQNDLGALNNYLAKVNYNQSLFDAPLHYNFYAASTGGGYYDMRNILNNTLVASNPTKAVTLVENHDTQPGQSLESTVQPWFKPLAYAFILTRSGGYPSVFYGDMYGTKGTTTREIPALKSKIEPLLKARKDYAYGTQRDYIDNPDVIGWTREGDSTKAKSGLATVITDGPGGSKRMYVGTSNAGEIWYDLTGNRTDKITIGSDGYATFPVNGGSVSVWVQQ

SEQ ID NO: 39153 - protein, 480 aa, Cytophaga sp.
NGTMMQYFEWYVPNDGQQWNRLRTDAPYLSSVGITAVWTPPAYKGTSQADVGYGPYDLYDLGEFNQKGTVRTKYGTKGELKSAVNTLHSNGIQVYGDVVMNHKAGADYTENVTAVEVNPSNRYQETSGEYNIQAWTGFNFPGRGTTYSNWKWQWFHFDGTDWDQSRSLSRIFKFDGKAWDWEVSSENGNYDYLMYADYDYDHPDVVNEMKKWGVWYANEVGLDGYRLDAVKHIKFQFLKDWVDNARAATGKEMFTVGEYWQNDLGALNNYLAKVNYNQSLFDAPLHYNFYAASTGGGYYDMRNILNNTLVASNPTKAVTLVENHDTQPGQSLESTVQPWFKPLAYAFILTRSGGYPSVFYGDMYGTKGTTTREIPALKSKIEPLLKARKDYAYGTQRDYCDNPDVIGWTREGDSTKAKSGLATVITDGPGGSKRMYVGTSNAGEIWYDLTGNRTDKITIGSDGYATFPVNGGSVSVWVQQ

SEQ ID NO: 39154 - protein, 480 aa, Cytophaga sp.
NGTMMQYFEWYVPNDGQQWNRLRTDAPYLSSVGITAVWTPPAYKGTSQADVGYGPYDLYDLGEFNQKGTVRTKYGTVGELKSAVNTLHSNGIQVYGDVVMNHKAGADYTENVTAVEVNPSNRYQETSGEYNIQAWTGFNFPGRGTTYSNWKWQWFHFDGTDWDQSRSLSRIFKFDGKAWDWEVSSENGNYDYLMYADYDYDHPDVVNEMKKWGVWYANEVGLDGYRLDAVKHIKFQFLKDWVDNARAATGKEMFTVGEYWQNDLGALNNYLAKVNYNQSLFDAPLHYNFYAASTGGGYYDMRNILNNTLVASNPTKAVTLVENHDTQPGQSLESTVQPWFKPLAYAFILTRSGGYPSVFYGDMYGTKGTTTREIPALKSKIEPLLKARKDYAYGTQRDYIDNPDVIGWTREGDSTKAKSGLATVITDGPGGSKRMYVGTSNAGEIWYDLTGNRTDKITIGSDGYATFPVNGGSVSVWVQQ

SEQ ID NO: 39155 - protein, 480 aa, Cytophaga sp.
NGTMMQYFEWYVPNDGQQWNRLRTDAPYLSSVGITAVWTPPAYKGTSQADVGYGPYDLYDLGEFNQKGTVRTKYGTKGELKSAVNTLHSNGIQVYGDVVMNHKAGADYTENVTAVEVNPSNRYQETSGEYNIQAWTGFNFPGRGTTYSNWKWQWFHFDGTDWDQARSLSRIFKFDGKAWDWEVSSENGNYDYLMYADYDYDHPDVVNEMKKWGVWYANEVGLDGYRLDAVKHIKFQFLKDWVDNARAATGKEMFTVGEYWQNDLGALNNYLAKVNYNQSLFDAPLHYNFYAASTGGGYYDMRNILNNTLVASNPTKAVTLVENHDTQPGQSLESTVQPWFKPLAYAFILTRSGGYPSVFYGDMYGTKGTTTREIPALKSKIEPLLKARKDYAYGTQRDYIDNPDVIGWTREGDSTKAKSGLATVITDGPGGSKRMYVGTSNAGEIWYDLTGNRTDKITIGSDGYATFPVNGGSVSVWVQQ

SEQ ID NO: 39156 - protein, 480 aa, Cytophaga sp.
NGTMMQYFEWYVPNDGQQWNRLRTDAPYLSSVGITAVWTPPAYKGTSQADVGYGPYDLYDLGEFNQKGTVRTKYGTKGELKSAVNTLHSNGIQVYGDVVMNHKAGADYTQNVTAVEVNPSNRYQETSGEYNIQAWTGFNFPGRGTTYSNWKWQWFHFDGTDWDQSRSLSRIFKFDGKAWDWEVSSENGNYDYLMYADYDYDHPDVVNEMKKWGVWYANEVGLDGYRLDAVKHIKFQFLKDWVDNARAATGKEMFTVGEYWQNDLGALNNYLAKVNYNQSLFDAPLHYNFYAASTGGGYYDMRNILNNTLVASNPTKAVTLVENHDTQPGQSLESTVQPWFKPLAYAFILTRSGGYPSVFYGDMYGTKGTTTREIPALKSKIEPLLKARKDYAYGTQRDYIDNPDVIGWTREGDSTKAKSGLATVITDGPGGSKRMYVGTSNAGEIWYDLTGNRTDKITIGSDGYATFPVNGGSVSVWVQQ

SEQ ID NO: 39157 - protein, 480 aa, Cytophaga sp.
NGTMMQYFEWYVPNDGQQWNRLRTDAPYLSSVGITAVWTPPAYKGTSQADVGYGPYDLYDLGEFNQKGTVRTKYGTKGELKSAVNTLHSNGIQVYGDVVMNHKAGADYTENVTAVEVNPSNRYQETSGEYNIQAWTGFNFPGRGTTYSNWKWQWFHFDGTDWDQSRSLSRIFKFDGKAWDWEVSSENGNYDYLMYMDYDYDHPDVVNEMKKWGVWYANEVGLDGYRLDAVKHIKFQFLKDWVDNARAATGKEMFTVGEYWQNDLGALNNYLAKVNYNQSLFDAPLHYNFYAASTGGGYYDMRNILNNTLVASNPTKAVTLVENHDTQPGQSLESTVQPWFKPLAYAFILTRSGGYPSVFYGDMYGTKGTTTREIPALKSKIEPLLKARKDYAYGTQRDYIDNPDVIGWTREGDSTKAKSGLATVITDGPGGSKRMYVGTSNAGEIWYDLTGNRTDKITIGSDGYATFPVNGGSVSVWVQQ

SEQ ID NO: 39158 - protein, 480 aa, Cytophaga sp.
NGTMMQYFEWYVPNDGQQWNRLRTDAPYLSSVGITAVWTPPAYKGTSQADVGYGPYDLYDLGEFNQKGTVRTKYGTKGELKSAVNTLHSNGIQVYGDVVMNHKAGADYTENVTAVEVNPSNRYQETSGEYNIQAWTGFNFPGRGTTYSNWKWQWFHFDGTDWDQSRSLSRIFKFDGKAWDWEVSSENGNYDYLMYADYDYDHPDVVNEMKKWGVWYANEVGLDGYRLDAVKHIKFQFLKDWVDNARAATGKEMFTVGEYWQNDLGALNNYLAKVNYNQSLFDAPLHYNFYAASTGGGYYDMRNILNNTLVASNPTKAVTLVENHDTQPGQSLESTVQPWFKPLAYAFILTRSGGYPSVFYGDMYGTKGTTTREIPALKSKIEPLLKARKDYAYGTQRDYIDNPDVIGWTREGDSTKAKSGLATVITDGPGGSKRMYVGTSNAGEIWYDLTGNRTDKITIGSDGYATFPVSGGSVSVWVQQ

SEQ ID NO: 39159 - protein, 480 aa, Cytophaga sp.
NGTMMQYFEWYVPNDGQQWNRLRTDAPYLSSVGITAVWTPPAYKGTSQADVGYGPYDLYDLGEFNQKGTVRTKYGTKGELKSAVNTLHSNGIQVYGDVVMNHKAGADYTENVTAVEVNPSNRYQETSGEYNIQAWTGFNFPGRGTTYSNWKWQWFHFDGTDWDQSRSLSRIFKFDGKAWDWEVSSENGNYDYLMYADYDYDHPDVVNEMKKWGVWYANEVGLDGYRLDAVKHIKFQFLKDWVDNARAATGKEMFTVGEYWQNDLGALNNYLAKVNYSQSLFDAPLHYNFYAASTGGGYYDMRNILNNTLVASNPTKAVTLVENHDTQPGQSLESTVQPWFKPLAYAFILTRSGGYPSVFYGDMYGTKGTTTREIPALKSKIEPLLKARKDYAYGTQRDYIDNPDVIGWTREGDSTKAKSGLATVITDGPGGSKRMYVGTSNAGEIWYDLTGNRTDKITIGSDGYATFPVNGGSVSVWVQQ

SEQ ID NO: 39160 - protein, 479 aa, Bacillus licheniformis
LNGTLMQYFEWYTPNDGQHWNRLRNDSAYLKEHGITAVWIPPAYKGASQNDVGYGAYDLYDLGEFNQKGTVRTKYGTKGQLQSAINSLKSNGINVYGDVVINHKGGADATELVRAVEVNPANRNQEISGEYLIEAYTYFDFPGRGSTHSNFKWRWYHFDGVDWDQSRRLNNRIYKFRGKAWDWEVDTEFGNYDYLTYADIDYDHPDVAAEIRNWGTWYANTLQLDGFRLDAVKHIKYSFLRDWVNHVRSATGKNMFTVAEFWKNDLGALENYLNKTNFNHSVFDVPLHYQFYAASKQGGGYDMQNLLNGTVVSKHPLHSVTFVDNHDTQPEEALESTVEEWFKPLAYAFILTRESGYPQVFYGDMYGIPTHGVPALKHKIEPILEARQKYAYGRQNDYFDHHDIVGWTREGNSSHANSGLAALITDGPGGAKWMYVGRQKAGQTWSDITGNRSGPVVINSEGWGNFSVNGGSVSIYVQR

SEQ ID NO: 39161 - protein, 479 aa, Bacillus sp.
NGTMMQYFEWYLPNDGNHWNRLNSDASNLKSKGITAVWIPPAWKGSQNDVGYGAYDLYDLGEFNQKGTVRTKYGTRSQLQAAVTSLKNNGIQVYGDVVMNHKGGADATEMVRAVEVNPNNRNQEVTGEYTIEAWTRFDFPGRGNTHSSFKWRWYHFDGVDWDQSRDLTNRIYKFRGHGKAWDWEVDTEFGNYDYLMYADYDMDHPEVVNELRNWGVWYTNTLGLDGFRIDAVKHIKYSFTRDWINHVRSATGKNMFAVAEFWKNDLGAIENYLQKTNWNHSVFDVPLHYNLYNASKSGGNYDMRNIFNGTVVQRHPSHAVTFVDNHDSQPEEALESFVEEWFKPLAYALTLTREQGYPSVFYGDYYGIPTHGVPAMRSKIDPILEARQKYAYGPQHDYLDHPDVIGWTREGDSSHPKSGLATLITDGPGGSKRMYAGLKNAGETWYDITGNRSDTVKIGSDGWGEFHVNDGSVSIYVQK

SEQ ID NO: 39162 - protein, 480 aa, Bacillus sp.
NGTIMQYFEWNVPNDGQHWNRLHNNAQNLKNAGITAIWIPPAWKGTSQNDVGYGAYDLYDLGEFNQKGTVRTKYGTKAELERAIRSLKANGIQVYGDVVMNHKGGADFTERVQAVEVNPQNRNQEVSGTYQIEAWTGFNFPGRGNQHSSFKWRWYHFDGTDWDQSRQLANRIYKFRGDGKAWDWEVDTENGNYDYLMYADVDMDHPEVINELNRWGVWYANTLNLDGFRLDAVKHIKFSFMRDWLGHVRGQTGKNLFAVAEYWKNDLGALENYLSKTNWTMSAFDVPLHYNLYQASNSSGNYDMRNLLNGTLVQRHPSHAVTFVDNHDTQPGEALESFVQGWFKPLAYATILTREQGYPQVFYGDYYGIPSDGVPSYRQQIDPLLKARQQYAYGPQHDYLDHPDVIGWTREGDSSHPKSGLATLITDGPGGSKRMYAGLKNAGETWYDITGNRSDTVKIGSDGWGEFHVSDGSVSIYVQK

SEQ ID NO: 39163 - protein, 480 aa, Bacillus sp.
NGTIMQYFEWNVPNDGQHWNRLHNNAQNLKNAGITAIWIPPAWKGTSQNDVGYGAYDLYDLGEFNQKGTVRTKYGTKAELERAIRSLKANGIQVYGDVVMNHKGGADFTERVQAVEVNPQNRNQEVSGTYEIEAWTGFNFPGRGNQHSSFKWRWYHFDGTDWDQSRQLSNRIYKFRGDGKAWDWEVDTENGNYDYLMYADVDMDHPEVINELNRWGVWYANTLNLDGFRLDAVKHIQFSFMRNWLGHVRGQTGKNLFAVAEYWKNDLGALENYLSKTNWTMSAFDVPLHYNLYQASNSGGNYDMRNLLNGTLVQRHPSHAVTFVDNHDTQPGEALESFVQGWFKPLAYATILTREQGYPQVFYGDYYGIPSDGVPSYRQQIDPLLKARQKYAYGPQHDYLDHPDVIGWTREGDSSHPKSGLATLITDGPGGSKRMYAGLKNAGETWYDITGNRSDTVKIGSDGWGEFHVNDGSVSIYVQK

SEQ ID NO: 39164 - protein, 480 aa, Bacillus sp.
NGTIMQYFEWNVPNDGQHWNRLHNNAQNLKNAGITAIWIPPAWKGTSQNDVGYGAYDLYDLGEFNQKGTVRTKYGTKAELERAIRSLKANGIQVYGDVVMNHKAGADFTERVQAVEVNPQNRNQEVSGTYEIEAWTGFNFPGRGNQHSSFKWRWYHFDGTDWDQSRQLSNRIYKFRGDGKAWDWEVDTENGNYDYLMYADVDMNHPEVINELNRWGVWYANTLNLDGFRLDAVKHIQFSFMRNWLGHVRGQTGKNLFAVAEYWKNDLGALENYLSKTNWTMSAFDVPLHYNLYQASNSGGNYDMRNLLNGTLVQRHPSHAVTFVDNHDTQPGEALESFVQGWFKPLAYATILTREQGYPQVFYGDYYGIPSDGVPSYRQQIDPLLKARQKYAYGPQHDYLDHPDVIGWTREGDSSHPKSGLATLITDGPGGSKRMYAGLKNAGETWYDITGNRSDTVKIGSDGWGEFHVNDGSVSIYVQK

SEQ ID NO: 39165 - protein, 475 aa, Bacillus sp.
NETMMQYFEWDLPNDGTLWNRLHNNAQNLKNAGITALWLPPAYKGTSQSDVGYGVYDLYDLGEFNQKGTIRTKYGTKTQLERAIRSLKANGIQVYADVVFNHKAGADGTEFVDAVEVDPSNRNQEVSGTYQIEAWTKFDFPGRGNTYSSFKWRWYHFDGTDWDESRKLNRIYKFRGKAWDWEVDTENGNYDYLMFADLDMDHPEVVTELKNWGTWYVNTTNIDGFRLDAVKHIKFSFMRDWLTYVRNQTGKNLFAVGEFWKNDLGALENYITKTNGSMSLFDAPLHNNFYTASKSSGYFDMRNLLNGTLVQRHPSHAVTLVDNHDTQPGQSLQSWVEPWFKPLAYAFILTRQEGYPCVFYGDYYGIPKYNIPGLKSKIDPLLEARRDYAYGTQRDYIDHQDIIGWTREGIDTKPNSGLAALITDGPGGSKWMYVGKKHAGKVFKDITGNRSDTVTINADGWGEFKVNGGSVSIWV

SEQ ID NO: 39166 - protein, 477 aa, Bacillus sp.
NGTMMQYFEWYLPNDGNHWNRLNSDASNLKSKGITAVWIPPAWKGTSQNDVGYGAYDLYDLGEFNQKGTVRTKYGTRSQLQAAVTSLKNNGIQVYGDVVMNHKGGADATEMVRAVEVNPNNRNQEVTGEYTIEAWTRFDFPGRGNTHSSFKWRWYHFDGVDWDQSRNNNRIYKFRGKAWDWEVDTEFGNYDYLMYADYDMDHPEVVNELRNWGVWYTNTLGLDGFRIDAVKHIKYSFTRDWINHVRSATGKNMFAVAEFWKNDLGAIENYLQKTNWNHSVFDVPLHYNLYNASKSGGNYDMRNIFNGTVVQRHPSHAVTFVDNHDSQPEEALESFVEEWFKPLAYALTLTREQGYPSVFYGDYYGIPTHGVPAMRSKIDPILEARQKYAYGPQHDYLDHPDVIGWTREGDSSHPKSGLATLITDGPGGSKRMYAGLKNAGETWYDITGNRSDTVKIGSDGWGEFHVNDGSVSIYVQK

SEQ ID NO: 39167 - protein, 477 aa, Bacillus sp.
NGTMMQYFEWYLPNDGNHWNRLNSDASNLKSKGITAVWIPPAWKGASQNDVGYGAYDLYDLGEFNQKGTVRTKYGTRSQLQAAVTSLKNNGIQVYGDVVMNHKGGADATEMVRAVEVNPNNRNQEVTGEYTIEAWTRFDFPGRGNTHSSFKWRWYHFDGVDWDQSRQLNRIYKFRGKAWDWEVDTEFGNYDYLMYADYDMDHPEVVNELRNWGVWYTNTLGLDGFRIDAVKHIKYSFTRDWINHVRSATGKNMFAVAEFWKNDLGAIENYLQKTNWNHSVFDVPLHYNLYNASKSGGNYDMRNIFNGTVVQRHPSHAVTFVDNHDSQPEEALESFVEEWFKPLAYALTLTREQGYPSVFYGDYYGIPTHGVPAMRSKIDPILEARQKYAYGPQHDYLDHPDVIGWTREGDSSHPKSGLATLITDGPGGSKRMYAGLKNAGETWYDITGNRSDTVKIGSDGWGEFHVNDGSVSIYVQK

SEQ ID NO: 39168 - protein, 478 aa, Bacillus sp.
NGTMMQYFEWYLPNDGNHWNRLNSDASNLKSKGITAVWIPPAWKGASQNDVGYGAYDLYDLGEFNQKGTVRTKYGTRSQLQAAVTSLKNNGIQVYGDVVMNHKGGADATEMVRAVEVNPNNRNQEVTGEYTIEAWTRFDFPGRGNTHSSFKWRWYHFDGVDWDQSRRLNNRIYKFRGKAWDWEVDTEFGNYDYLMYADYDMDHPEVVNELRNWGVWYTNTLGLDGFRIDAVKHIKYSFTRDWINHVRSATGKNMFAVAEFWKNDLGAIENYLQKTNWNHSVFDVPLHYNLYNASKSGGNYDMRNIFNGTVVQRHPSHAVTFVDNHDSQPEEALESFVEEWFKPLAYALTLTREQGYPSVFYGDYYGIPTHGVPAMRSKIDPILEARQKYAYGPQHDYLDHPDVIGWTREGDSSHPKSGLATLITDGPGGSKRMYAGLKNAGETWYDITGNRSDTVKIGSDGWGEFHVNDGSVSIYVQK

SEQ ID NO: 39169 - protein, 477 aa, Bacillus sp.
NGTMMQYFEWYLPNDGNHWNRLNSDASNLKSKGITAVWIPPAWKGVSQNDVGYGAYDLYDLGEFNQKGTVRTKYGTRSQLQAAVTSLKNNGIQVYGDVVMNHKGGADATEMVRAVEVNPNNRNQEVTGEYTIEAWTRFDFPGRGNTHSSFKWRWYHFDGVDWDQSRELNRIYKFRGKAWDWEVDTEFGNYDYLMYADYDMDHPEVVNELRNWGVWYTNTLGLDGFRIDAVKHIKYSFTRDWINHVRSATGKNMFAVAEFWKNDLGAIENYLQKTNWNHSVFDVPLHYNLYNASKSGGNYDMRNIFNGTVVQRHPSHAVTFVDNHDSQPEEALESFVEEWFKPLAYALTLTREQGYPSVFYGDYYGIPTHGVPAMRSKIDPILEARQKYAYGPQHDYLDHPDVIGWTREGDSSHPKSGLATLITDGPGGSKRMYAGLKNAGETWYDITGNRSDTVKIGSDGWGEFHVNDGSVSIYVQK

SEQ ID NO: 39170 - protein, 478 aa, Synthetic construct
NGTMMQYFEWYLPNDGNHWNRLNSDASNLKSKGITAVWIPPAWKGASQNDVGYGAYDLYDLGEFNQKGTVRTKYGTRSQLQAAVTSLKNNGIQVYGDVVMNHKGGADATEMVRAVEVNPNNRNQEVTGEYTIEAWTRFDFPGRGNTHSSFKWRWYHFDGVDWDQSRRLNNRIYKFRGKAWDWEVDTENGNYDYLMYADIDMDTPEVVNELRNWGVWYTNTLGLDGFRIDAVKHIKYSFTRDWINHVRSATGKNMFAVAEFWKNDLGAIENYLQKTNWNHSVFDVPLHYNLYNASKSGGNYDMRNIFNGTVVQRHPSHAVTFVDNHDSQPEEALESFVEEWFKPLAYALTLTREQGYPSVFYGDYYGIPTHGVPAMRSKIDPILEARQKYAYGPQHDYLDHPDVIGWTREGDSSHPKSGLATLITDGPGGSKRMYAGLKNAGETWYDITGNRSDTVKIGSDGWGEFHVNDGSVSIYVQK

SEQ ID NO: 39171 - protein, 478 aa, Bacillus sp.
NGTMMQYFEWYLPNDGNHWNRLNSDASNLKSKGITAVWIPPAWKGASQNDVGYGAYDLYDLGEFNQKGTVRTKYGTRSQLQAAVTSLKNNGIQVYGDVVMNHKGGADATEMVRAVEVNPNNRNQEVTGEYTIEAWTRFDFPGRGNTHSSFKWRWYHFDGVDWDQSRQVNNRIYKFRGKAWDWEVDTEFGNYDYLMYADYDMDHPEVVNELRNWGVWYTNTLGLDGFRIDAVKHIKYSFTRDWINHVRSATGKNMFAVAEFWKNDLGAIENYLQKTNWNHSVFDVPLHYNLYNASKSGGNYDMRNIFNGTVVQRHPSHAVTFVDNHDSQPEEALESFVEEWFKPLAYALTLTREQGYPSVFYGDYYGIPTHGVPAMRSKIDPILEARQKYAYGPQHDYLDHPDVIGWTREGDSSHPKSGLATLITDGPGGSKRMYAGLKNAGETWYDITGNRSDTVKIGSDGWGEFHVNDGSVSIYVQK

SEQ ID NO: 39172 - protein, 478 aa, Bacillus sp.
NGTMMQYFEWYLPNDGNHWNRLNSDASNLKSKGITAVWIPPAWKGASQNDVGYGAYDLYDLGEFNQKGTVRTKYGTRSQLQAAVTSLKNNGIQVYGDVVMNHKGGADATEMVRAVEVNPNNRNQEVTGEYTIEAWTRFDFPGRGNTHSSFKWRWYHFDGVDWDQSRRLNNRIYKFRGKAWDWEVDTEFGNYDYLMYADYDMDHPEVVNELRNWGVWYTNTLGLDGFRIDAVKHIKYSFTRDWINHVRSATGKNMFAVAEFWKNDLGAIENYLQKTNWNHSVFDVPLHYNLYNASKSGGNYDMRNIFNGTVVQRHPSHAVTFVDNHDSQPEEALESFVEEWFKPLAYALTLTREQGYPSVFYGDYYGIPTHGVPAMRSKIDPILSARQKYAYGPQHDYLDHPDVIGWTREGDSSHPKSGLATLITDGPGGSKRMYAGLKNAGETWYDITGNRSDTVKIGSDGWGEFHVNDGSVSIYVQK

SEQ ID NO: 39173 - protein, 478 aa, Bacillus sp.
NGTMMQYFEWYLPNDGNHWNRLNSDASNLKSKGITAVWIPPAWKGVSQNDVGYGAYDLYDLGEFNQKGTVRTKYGTRSQLQAAVTSLKNNGIQVYGDVVMNHKGGADATEMVRAVEVNPNNRNQEVTGEYTIEAWTRFDFPGRGNTHSSFKWRWYHFDGVDWDQSRELSNRIYKFRGKAWDWEVDTEFGNYDYLMYADYDYDHPESTNEMRNWGVWYTNTLGLDGFRIDAVKHIKYSFTRDWINHVRSATGKNMFAVAEFWKNDLGAIENYLQKTNWNHSVFDVPLHYNLYNASKSGGNYDMRNIFNGTVVQRHPSHAVTFVDNHDSQPEEALESFVEEWFKPLAYALTLTREQGYPSVFYGDYYGIPTHGVPAMRSKIDPILEARQKYAYGPQHDYLDHPDVIGWTREGDSSHPKSGLATLITDGPGGSKRMYAGLKNAGETWYDITGNRSDTVKIGSDGWGEFHVNDGSVSIYVQK

SEQ ID NO: 39174 - protein, 478 aa, Bacillus sp.
NGTMMQYFEWYLPNDGNHWNRLNSDASNLKSKGITAVWIPPAWKGASQNDVGYGAYDLYDLGEFNQKGTVRTKYGTRSQLQAAVTSLKNNGIQVYGDVVMNHKGGADATEMVRAVEVNPNNRNQEVTGEYTIEAWTRFDFPGRGNTHSSFKWRWYHFDGVDWDQSRNLDNRIYKFRGKAWDWEVDTEFGNYDYLMYADYDMDHPEVVNELRNWGVWYTNTLGLDGFRIDAVKHIKYSFTRDWINHVRSATGKNMFAVAEFWKNDLGAIENYLQKTNWNHSVFDVPLHYNLYNASKSGGNYDMRNIFNGTVVQRHPSHAVTFVDNHDSQPEEALESFVEEWFKPLAYALTLTREQGYPSVFYGDYYGIPTHGVPAMRSKIDPILEARQKYAYGPQHDYLDHPDVIGWTREGDSSHPKSGLATLITDGPGGSKRMYAGLKNAGETWYDITGNRSDTVKIGSDGWGEFHVNDGSVSIYVQK

SEQ ID NO: 39175 - protein, 478 aa, Bacillus sp.
NGTMMQYFEWYLPNDGNHWNRLNSDASNLKSKGITAVWIPPAWKGASQNDVGYGAYDLYDLGEFNQKGTVRTKYGTRSQLQAAVTSLKNNGIQVYGDVVMNHKGGADATEMVRAVEVNPNNRNQEVTGEYTIEAWTRFDFPGRGNTHSSFKWRWYHFDGVDWDQSRRLNNRIYKFRGKAWDWEVDTEFGNYDYLMYADYDMDHPEVVNELRNWGVWYTNTLGLDGFRIDAVKHIKYSFTRDWINHVRSATGKNMFAVAEFWLNDLGGIENYLQKTNWNHSVFDVPLHYNLYNASKSGGNYDMRNIFNGTVVQRHPSHAVTFVDNHDSQPEEALESFVEEWFKPLAYALTLTREQGYPSVFYGDYYGIPTHGVPAMRSKIDPILEARQKYAYGPQHDYLDHPDVIGWTREGDSSHPKSGLATLITDGPGGSKRMYAGLKNAGETWYDITGNRSDTVKIGSDGWGEFHVNDGSVSIYVQK

SEQ ID NO: 39176 - protein, 478 aa, Synthetic construct
NGTMMQYFEWYLPNDGNHWNRLNSDASNLKSKGITAVWIPPAWKGASQNDVGYGAYDLYDLGEFNQKGTVRTKYGTRSQLQAAVTSLKNNGIQVYGDVVMNHKGGADATEMVRAVEVNPNNRNQEVTGEYTIEAWTRFDFPGRGNTHSSFKWRWYHFDGVDWDQSRRLNNRIYKFRGKAWDWEVDTENGNYDYLMYADIDMDMPEVVNELRNWGVWYTNTLGLDGFRIDAVKHIKYSFTRDWINHVRSATGKNMFAVAEFWKNDLGAIENYLQKTNWNHSVFDVPLHYNLYNASKSGGNYDMRNIFNGTVVQRHPSHAVTFVDNHDSQPEEALESFVEEWFKPLAYALTLTREQGYPSVFYGDYYGIPTHGVPAMRSKIDPILEARQKYAYGPQHDYLDHPDVIGWTREGDSSHPKSGLATLITDGPGGSKRMYAGLKNAGETWYDITGNRSDTVKIGSDGWGEFHVNDGSVSIYVQK

SEQ ID NO: 39177 - protein, 478 aa, Bacillus sp.
NGTMMQYFEWYLPNDGNHWNRLNSDASNLKSKGITAVWIPPAWKATSQNDVGYGAYDLYDLGEFNQKGTVRTKYGTRSQLQAAVTSLKNNGIQVYGDVVMNHKGGADATEMVRAVEVNPNNRNQEVTGEYTIEAWTRFDFPGRGNTHSSFKWRWYHFDGVDWDQSRRFSNRIYKFRGKAWDWEVDTEFGNYDYLMYADYDMDHPEVVNELRNWGVWYTNTLGLDGFRIDAVKHIKYSFTRDWINHVRSATGKNMFAVAEFWKNDLGAIENYLQKTNWNHSVFDVPLHYNLYNASKSGGNYDMRNIFNGTVVQRHPSHAVTFVDNHDSQPEEALESFVEEWFKPLAYALTLTREQGYPSVFYGDYYGIPTHGVPAMRSKIDPILEARQKYAYGPQHDYLDHPDVIGWTREGDSSHPKSGLATLITDGPGGSKRMYAGLKNAGETWYDITGNRSDTVKIGSDGWGEFHVNDGSVSIYVQK

SEQ ID NO: 39178 - protein, 478 aa, Bacillus sp.
NGTMMQYFEWYLPNDGNHWNRLNSDASNLKSKGITAVWIPPAWKAASQNDVGYGAYDLYDLGEFNQKGTVRTKYGTRSQLQAAVTSLKNNGIQVYGDVVMNHKGGADATEMVRAVEVNPNNRNQEVTGEYTIEAWTRFDFPGRGNTHSSFKWRWYHFDGVDWDQSRKLNNRIYKFRGKAWDWEVDTEFGNYDYLMYADYDMDHPEVVNELRNWGVWYTNTLGLDGFRIDAVKHIKYSFTRDWINHVRSATGKNMFAVAEFWKNDLGAIENYLQKTNWNHSVFDVPLHYNLYNASKSGGNYDMRNIFNGTVVQRHPSHAVTFVDNHDSQPEEALESFVEEWFKPLAYALTLTREQGYPSVFYGDYYGIPTHGVPAMRSKIDPILEARQKYAYGPQHDYLDHPDVIGWTREGDSSHPKSGLATLITDGPGGSKRMYAGLKNAGETWYDITGNRSDTVKIGSDGWGEFHVNDGSVSIYVQK

SEQ ID NO: 39179 - protein, 478 aa, Bacillus sp.
NGTMMQYFEWYLPNDGNHWNRLNSDASNLKSKGITAVWIPPAWKGASQNDVGYGAYDLYDLGEFNQKGTVRTKYGTRSQLQAAVTSLKNNGIQVYGDVVMNHKGGADATEMVRAVEVNPNNRNQEVTGEYTIEAWTRFDFPGRGNTHSSFKWRWYHFDGVDWDQSRRLNNRIYKFRGKAWDWEVDTEFGNYDYLMYADYDMDHPEVVNELRNWGVWYTNTLGLDGFRIDAVKHIKYSFTRDWINHVRSATGKNMFAVAEFWKNDLGAIENYLQKTNWNHSVFDVPLHYNLYNASKSGGNYDMRWIFNGTVVQRHPSHAVTFVDNHDSQPEEALESFVEEWFKPLAYALTLTREQGYPSVFYGDYYGIPTHGVPAMRSKIDPILEARQKYAYGPQHDYLDHPDVIGWTREGDSSHPKSGLATLITDGPGGSKRMYAGLKNAGETWYDITGNRSDTVKIGSDGWGEFHVNDGSVSIYVQK

SEQ ID NO: 39180 - protein, 478 aa, Bacillus sp.
NGTMMQYFEWYLPNDGNHWNRLNSDASNLKSKGITAVWIPPAWKGASQNDVGYGAYDLYDLGEFNQKGTVRTKYGTRSQLQAAVTSLKNNGIQVYGDVVMNHKGGADATEMVRAVEVNPNNRNQEVTGEYTIEAWTRFDFPGRGNTHSSFKWRWYHFDGVDWDQSREFNNRIYKFRGKAWDWEVDTEFGNYDYLMYADYDMDHPEVVNELRNWGVWYTNTLGLDGFRIDAVKHIKYSFTRDWINHVRSATGKNMFAVAEFWKNDLGAIENYLQKTNWNHSVFDVPLHYNLYNASKSGGNYDMRNIFNGTVVQRHPSHAVTFVDNHDSQPEEALESFVEEWFKPLAYALTLTREQGYPSVFYGDYYGIPTHGVPAMRSKIDPILEARQKYAYGPQHDYLDHPDVIGWTREGDSSHPKSGLATLITDGPGGSKRMYAGLKNAGETWYDITGNRSDTVKIGSDGWGEFHVNDGSVSIYVQK

SEQ ID NO: 39181 - protein, 478 aa, Bacillus sp.
NGTMMQYFEWYLPNDGNHWNRLNSDASNLKSKGITAVWIPPAWKGVSQNDVGYGAYDLYDLGEFNQKGTVRTKYGTRSQLQAAVTSLKNNGIQVYGDVVMNHKGGADATEMVRAVEVNPNNRNQEVTGEYTIEAWTRFDFPGRGNTHSSFKWRWYHFDGVDWDQSRDFNNRIYKFRGKAWDWEVDTEFGNYDYLMYADYDMDHPEVVNELRNWGVWYTNTLGLDGFRIDAVKHIKYSFTRDWINHVRSATGKNMFAVAEFWKNDLGAIENYLQKTNWNHSVFDVPLHYNLYNASKSGGNYDMRNIFNGTVVQRHPSHAVTFVDNHDSQPEEALESFVEEWFKPLAYALTLTREQGYPSVFYGDYYGIPTHGVPAMRSKIDPILEARQKYAYGPQHDYLDHPDVIGWTREGDSSHPKSGLATLITDGPGGSKRMYAGLKNAGETWYDITGNRSDTVKIGSDGWGEFHVNDGSVSIYVQK

SEQ ID NO: 39182 - protein, 478 aa, Bacillus sp.
NGTMMQYFEWYLPNDGNHWNRLNSDASNLKSKGITAVWIPPAWKGASQNDVGYGAYDLYDLGEFNQKGTVRTKYGTRSQLQAAVTSLKNNGIQVYGDVVMNHKGGADATEMVRAVEVNPNNRNQEVTGEYTIEAWTRFDFPGRGNTHSSFKWRWYHFDGVDWDQSRRLNNRIYKFRGKAWDWEVDTEFGNYDYLMYADYDMDHPEVVNELRNWGVWYTNTLGLDGFRIDAVKHIKYSFTRDWINHVRSATGKNMFAVAEFWKNDLGAIENYLQKTNWNHSVFDVPLHYNLYNASKSGGNYDMRNIFNGTVVQRHPSHAVTFVDNHDSQPEEALESFVEEWFKPLAYALTLTREAGYPSVFYGDYYGIPTHGVPAMRSKIDPILEARQKYAYGPQHDYLDHPDVIGWTREGDSSHPKSGLATLITDGPGGSKRMYAGLKNAGETWYDITGNRSDTVKIGSDGWGEFHVNDGSVSIYVQK

SEQ ID NO: 39183 - protein, 478 aa, Bacillus sp.
NGTMMQYFEWYLPNDGNHWNRLNSDASNLKSKGITAVWIPPAWKGASQNDVGYGAYDLYDLGEFNQKGTVRTKYGTRSQLQAAVTSLKNNGIQVYGDVVMNHKGGADATEMVRAVEVNPNNRNQEVTGEYTIEAWTRFDFPGRGNTHSSFKWRWYHFDGVDWDQSRRLNNRIYKFRGKAWDWEVDTEFGNYDYLMYADYDMDHPEVVNELRNWGVWYTNTLGLDGFRIDAVKHIKYSFTRDWINHVRSATGKNMFAVAEFWKNDLGAIENYLRKTNWNHSVFDVPLHYNLYNASKSGGNYDMRNIFNGTVVQRHPSHAVTFVDNHDSQPEEALESFVEEWFKPLAYALTLTREQGYPSVFYGDYYGIPTHGVPAMRSKIDPILEARQKYAYGPQHDYLDHPDVIGWTREGDSSHPKSGLATLITDGPGGSKRMYAGLKNAGETWYDITGNRSDTVKIGSDGWGEFHVNDGSVSIYVQK

SEQ ID NO: 39184 - protein, 478 aa, Synthetic construct
NGTMMQYFEWYLPNDGNHWNRLNSDASNLKSKGITAVWIPPAWKGASQNDVGYGAYDLYDLGEFNQKGTVRTKYGTRSQLQAAVTSLKNNGIQVYGDVVMNHKGGADATEMVRAVEVNPNNRNQEVTGEYTIEAWTRFDFPGRGNTHSSFKWRWYHFDGVDWDQSRRLNNRIYKFRGKAWDWEVDTENGNYDYLMYADIDMDHQEVVNELRNWGVWYTNTLGLDGFRIDAVKHIKYSFTRDWINHVRSATGKNMFAVAEFWKNDLGAIENYLQKTNWNHSVFDVPLHYNLYNASKSGGNYDMRNIFNGTVVQRHPSHAVTFVDNHDSQPEEALESFVEEWFKPLAYALTLTREQGYPSVFYGDYYGIPTHGVPAMRSKIDPILEARQKYAYGPQHDYLDHPDVIGWTREGDSSHPKSGLATLITDGPGGSKRMYAGLKNAGETWYDITGNRSDTVKIGSDGWGEFHVNDGSVSIYVQK

SEQ ID NO: 39185 - protein, 478 aa, Bacillus sp.
NGTMMQYFEWYLPNDGNHWNRLNSDASNLKSKGITAVWIPPAWKATSQNDVGYGAYDLYDLGEFNQKGTVRTKYGTRSQLQAAVTSLKNNGIQVYGDVVMNHKGGADATEMVRAVEVNPNNRNQEVTGEYTIEAWTRFDFPGRGNTHSSFKWRWYHFDGVDWDQSRDLSNRIYKFRGKAWDWEVDTEFGNYDYLMYADYDMDHPEVVNELRNWGVWYTNTLGLDGFRIDAVKHIKYSFTRDWINHVRSATGKNMFAVAEFWKNDLGAIENYLQKTNWNHSVFDVPLHYNLYNASKSGGNYDMRNIFNGTVVQRHPSHAVTFVDNHDSQPEEALESFVEEWFKPLAYALTLTREQGYPSVFYGDYYGIPTHGVPAMRSKIDPILEARQKYAYGPQHDYLDHPDVIGWTREGDSSHPKSGLATLITDGPGGSKRMYAGLKNAGETWYDITGNRSDTVKIGSDGWGEFHVNDGSVSIYVQK

SEQ ID NO: 39186 - protein, 478 aa, Synthetic construct
NGTMMQYFEWYLPNDGNHWNRLNSDASNLKSKGITAVWIPPAWKGASQNDVGYGAYDVYDLGEFNQKGTVRTKYGTRSQLQAAVTSLKNNGIQVYGDVVMNHKGGADATEMVRAVEVNPNNRNQEVTGEYTIEAWTRFDFPGRGNTHSSFKWRWYHFDGVDWDQSRRLNNRIYKFRGKAWDWEVDTENGNYDYLMYADLDMDHPEVVNEVRNWGVWYTNTLGLDGFRIDAVKHIKYSFTRDWINHVRSATGKNMFAVAEFWKNDLGAIENYLQKTNWNHSVFDVPLHYNLYNASKSGGNYDMRNIFNGTVVQRHPSHAVTFVDNHDSQPEEALESFVEEWFKPLAYALTLTREQGYPSVFYGDYYGIPTHGVPAMRSKIDPILEARQKYAYGPQHDYLDHPDVIGWTREGDSSHPKSGLATLITDGPGGSKRMYAGLKNAGETWYDITGNRSDTVKIGSDGWGEFHVNDGSVSIYVQK

SEQ ID NO: 39187 - protein, 478 aa, Bacillus sp.
NGTMMQYFEWYLPNDGNHWNRLNSDASNLKSKGITAVWIPPAWKGASQNDVGYGAYDLYDLGEFNQKGTVRTKYGTRSQLQAAVTSLKNNGIQVYGDVVMNHKGGADATEMVRAVEVNPNNRNQEVTGEYTIEAWTRFDFPGRGNTHSSFKWRWYHFDGVDWDQSRRLNNRIYKFRGKAWDWEVDTEFGNYDYLMYADYDMDHPEVVNELRNWGVWYTNTLGLDGFRIDAVKHIKYSFTRDWINHVRSATGKNMFAVAEFWKNDLGLIENYLQKTNWNHSVFDVPLHYNLYNASKSGGNYDMRNIFNGTVVQRHPSHAVTFVDNHDSQPEEALESFVEEWFKPLAYALTLTREQGYPSVFYGDYYGIPTHGVPAMRSKIDPILEARQKYAYGPQHDYLDHPDVIGWTREGDSSHPKSGLATLITDGPGGSKRMYAGLKNAGETWYDITGNRSDTVKIGSDGWGEFHVNDGSVSIYVQK

SEQ ID NO: 39188 - protein, 478 aa, Synthetic construct
NGTMMQYFEWYLPNDGNHWNRLNSDASNLKSKGITAVWIPPAWKGASQNDVGYGAYDLYDLGEFNQKGTVRTKYGTRSQLQAAVTSLKNNGIQVYGDVVMNHKGGADWTEMVRAVEVNPNNRNQEVTGEYTIEAWTRFDFPGRGNTHSSFKWRWYHFDGVDWDQSRRLNNRIYKFRGKAWDWEVDTENGNYDYLMYADIDMDHPEVVNELRNWGVWYTNTLGLDGFRIDAVKHIKYSFTRDWINHVRSATGKNMFAVAEFWKNDLGAIENYLQKTNWNHSVFDVPLHYNLYNASKSGGNYDMRNIFNGTVVQRHPSHAVTFVDNHDSQPEEALESFVEEWFKPLAYALTLTREQGYPSVFYGDYYGIPTHGVPAMRSKIDPILEARQKYAYGPQHDYLDHPDVIGWTREGDSSHPKSGLATLITDGPGGSKRMYAGLKNAGETWYDITGNRSDTVKIGSDGWGEFHVNDGSVSIYVQK

SEQ ID NO: 39189 - protein, 478 aa, Bacillus sp.
NGTMMQYFEWYLPNDGNHWNRLNSDASNLKSKGITAVWIPPAWKGASQNDVGYGAYDLYDLGEFNQKGTVRTKYGTRSQLQAAVTSLKNNGIQVYGDVVMNHKGGADATEMVRAVEVNPNNRNQEVTGEYTIEAWTRFDFPGRGNTHSSFKWRWYHFDGVDWDQSRRLNNRIYKFRGKAWDWEVDTEFGNYDYLMYADYDADHPEVVNELRNWGVWYTNTLGLDGFRIDAVKHIKYSFTRDWINHVRSATGKNMFAVAEFWKNDLGAIENYLQKTNWNHSVFDVPLHYNLYNASKSGGNYDMRNIFNGTVVQRHPSHAVTFVDNHDSQPEEALESFVEEWFKPLAYALTLTREQGYPSVFYGDYYGIPTHGVPAMRSKIDPILEARQKYAYGPQHDYLDHPDVIGWTREGDSSHPKSGLATLITDGPGGSKRMYAGLKNAGETWYDITGNRSDTVKIGSDGWGEFHVNDGSVSIYVQK

SEQ ID NO: 39190 - protein, 478 aa, Bacillus sp.
NGTMMQYFEWYLPNDGNHWNRLNSDASNLKSKGITAVWIPPAWKGVSQNDVGYGAYDLYDLGEFNQKGTVRTKYGTRSQLQAAVTSLKNNGIQVYGDVVMNHKGGADATEMVRAVEVNPNNRNQEVTGEYTIEAWTRFDFPGRGNTHSSFKWRWYHFDGVDWDQSRQLSNRIYKFRGKAWDWEVDTEFGNYDYLMYVDYDMDHPEVVNELRNWGVWYTNTLGLDGFRIDAVKHIKYSFTRDWINHVRSATGKNMFAVAEFWKNDLGAIENYLQKTNWNHSVFDVPLHYNLYNASKSGGNYDMRNIFNGTVVQRHPSHAVTFVDNHDSQPEEALESFVEEWFKPLAYALTLTREQGYPSVFYGDYYGIPTHGVPAMRSKIDPILEARQKYAYGPQHDYLDHPDVIGWTREGDSSHPKSGLATLITDGPGGSKRMYAGLKNAGETWYDITGNRSDTVKIGSDGWGEFHVNDGSVSIYVQK

SEQ ID NO: 39191 - protein, 478 aa, Synthetic construct
NGTMMQYFEWYLPNDGNHWNRLNSDASNLKSKGITAVWIPPAWKGASQNDVGYGAYDLYDLGEFNQKGTVRTKYGTRSQLQAAVTSLKNNGIQVYGDVVMNHKGGADATEMVRAVEVNPNNRNQEVTGEYTIEAWTRFDFPGRGNTHSSFKWRWYHFDGVDWDQSRRLNNRIYKFRGKAWDWEVDTEYGNYDYLMYADYDMDHPEVVNELRNWGVWYTNTLGLDGFRIDAVKHIKYSFTRDWINHVRSATGKNMFAVAEFWKNDLGAIENYLQKTNWNHSVFDVPLHYNLYNASKSGGNYDMRNIFNGTVVQRHPSHAVTFVDNHDSQPEEALESFVEEWFKPLAYALTLTREQGYPSVFYGDYYGIPTHGVPAMRSKIDPILEARQKYAYGPQHDYLDHPDVIGWTREGDSSHPKSGLATLITDGPGGSKRMYAGLKNAGETWYDITGNRSDTVKIGSDGWGEFHVNDGSVSIYVQK

SEQ ID NO: 39192 - protein, 478 aa, Synthetic construct
NGTMMQYFEWYLPNDGNHWNRLNSDASNLKSKGITAVWIPPAWKGASQNDVGYGAYDLYDLGEFNQKGTVRTKYGTRSQLQAAVTSLKNNGIQVYGDVVMNHKGGADATEMVRAVEVNPNNRNQEVTGEYTIEAWTRFDFPGRGNTHSSFKWRWYHFDGVDWDQSRRLNNRIYKFRGKSWDWEVDTENGNYDYLMYADIDMDHPEVVNELRNWGVWYTNTLGLDGFRIDAVKHIKYSFTRDWINHVRSATGKNMFAVAEFWKNDLGAIENYLQKTNWNHSVFDVPLHYNLYNASKSGGNYDMRNIFNGTVVQRHPSHAVTFVDNHDSQPEEALESFVEEWFKPLAYALTLTREQGYPSVFYGDYYGIPTHGVPAMRSKIDPILEARQKYAYGPQHDYLDHPDVIGWTREGDSSHPKSGLATLITDGPGGSKRMYAGLKNAGETWYDITGNRSDTVKIGSDGWGEFHVNDGSVSIYVQK

SEQ ID NO: 39193 - protein, 478 aa, Bacillus sp.
NGTMMQYFEWYLPNDGNHWNRLNSDASNLKSKGITAVWIPPAWKGASQNDVGYGAYDLYDLGEFNQKGTVRTKYGTRSQLQAAVTSLKNNGIQVYGDVVMNHKGGADATEMVRAVEVNPNNRNQEVTGEYTIEAWTRFDFPGRGNTHSSFKWRWYHFDGVDWDQSRRLNNRIYKFRGKAWDWEVDTEFGNYDYLMYADYDMDHPEVVNELRNWGVWYTNTLGLDGFRIDAVKHIKYSFTRDWINHVRSATGKNMFAVAEFWKNDLGAIENYLSKTNWNHSVFDVPLHYNLYNASKSGGNYDMRNIFNGTVVQRHPSHAVTFVDNHDSQPEEALESFVEEWFKPLAYALTLTREQGYPSVFYGDYYGIPTHGVPAMRSKIDPILEARQKYAYGPQHDYLDHPDVIGWTREGDSSHPKSGLATLITDGPGGSKRMYAGLKNAGETWYDITGNRSDTVKIGSDGWGEFHVNDGSVSIYVQK

SEQ ID NO: 39194 - protein, 478 aa, Bacillus sp.
NGTMMQYFEWYLPNDGNHWNRLNSDASNLKSKGITAVWIPPAWKGASQNDVGYGAYDLYDLGEFNQKGTVRTKYGTRSQLQAAVTSLKNNGIQVYGDVVMNHKGGADATEMVRAVEVNPNNRNQEVTGEYTIEAWTRFDFPGRGNTHSSFKWRWYHFDGVDWDQSRRLNNRIYKFRGKAWDWEVDTEFGNYDYLMYADYDMDHPEVVNELRNWGVWYTNTLGLDGFRIDAVKHIKYSFTRDWINHVRSATGKNMFAVAEFWVNDLGYIENYLQKTNWNHSVFDVPLHYNLYNASKSGGNYDMRNIFNGTVVQRHPSHAVTFVDNHDSQPEEALESFVEEWFKPLAYALTLTREQGYPSVFYGDYYGIPTHGVPAMRSKIDPILEARQKYAYGPQHDYLDHPDVIGWTREGDSSHPKSGLATLITDGPGGSKRMYAGLKNAGETWYDITGNRSDTVKIGSDGWGEFHVNDGSVSIYVQK

SEQ ID NO: 39195 - protein, 478 aa, Bacillus sp.
NGTMMQYFEWYLPNDGNHWNRLNSDASNLKSKGITAVWIPPAWKGTSQNDVGYGAYDLYDLGEFNQKGTVRTKYGTRSQLQAAVTSLKNNGIQVYGDVVMNHKGGADATEMVRAVEVNPNNRNQEVTGEYTIEAWTRFDFPGRGNTHSSFKWRWYHFDGVDWDQSRDLQNRIYKFRGKAWDWEVDTEFGNYDYLMYADYDMDHPEVVNELRNWGVWYTNTLGLDGFRIDAVKHIKYSFTRDWINHVRSATGKNMFAVAEFWKNDLGAIENYLQKTNWNHSVFDVPLHYNLYNASKSGGNYDMRNIFNGTVVQRHPSHAVTFVDNHDSQPEEALESFVEEWFKPLAYALTLTREQGYPSVFYGDYYGIPTHGVPAMRSKIDPILEARQKYAYGPQHDYLDHPDVIGWTREGDSSHPKSGLATLITDGPGGSKRMYAGLKNAGETWYDITGNRSDTVKIGSDGWGEFHVNDGSVSIYVQK

SEQ ID NO: 39196 - protein, 478 aa, Synthetic construct
NGTMMQYFEWYLPNDGNHWNRLNSDASNLKSKGITAVWIPPAWKGASQNDVGYGAYDLYDLGEFNQKGTVRTKYGTRSQLQAAVTSLKNNGIQVYGDVVMNHKGGADATEMVRAVEVNPNNRNQEVTGEYTIEAWTRFDFPGRGNTHSSFKWRWYHFDGVDWDQSRRLNNRIYKFRGKAWDWEVDTENGNYDYLMYADIDMDHPEVTNELRNWGVWYTNTLGLDGFRIDAVKHIKYSFTRDWINHVRSATGKNMFAVAEFWKNDLGAIENYLQKTNWNHSVFDVPLHYNLYNASKSGGNYDMRNIFNGTVVQRHPSHAVTFVDNHDSQPEEALESFVEEWFKPLAYALTLTREQGYPSVFYGDYYGIPTHGVPAMRSKIDPILEARQKYAYGPQHDYLDHPDVIGWTREGDSSHPKSGLATLITDGPGGSKRMYAGLKNAGETWYDITGNRSDTVKIGSDGWGEFHVNDGSVSIYVQK

SEQ ID NO: 39197 - protein, 478 aa, Bacillus sp.
NGTMMQYFEWYLPNDGNHWNRLNSDASNLKSKGITAVWIPPAWKGASQNDVGYGAYDLYDLGEFNQKGTVRTKYGTRSQLQAAVTSLKNNGIQVYGDVVMNHKGGADATEMVRAVEVNPNNRNQEVTGEYTIEAWTRFDFPGRGNTHSSFKWRWYHFDGVDWDQSRQFTNRIYKFRGKAWDWEVDTEFGNYDYLMYADYDMDHPEVVNELRNWGVWYTNTLGLDGFRIDAVKHIKYSFTRDWINHVRSATGKNMFAVAEFWKNDLGAIENYLQKTNWNHSVFDVPLHYNLYNASKSGGNYDMRNIFNGTVVQRHPSHAVTFVDNHDSQPEEALESFVEEWFKPLAYALTLTREQGYPSVFYGDYYGIPTHGVPAMRSKIDPILEARQKYAYGPQHDYLDHPDVIGWTREGDSSHPKSGLATLITDGPGGSKRMYAGLKNAGETWYDITGNRSDTVKIGSDGWGEFHVNDGSVSIYVQK

SEQ ID NO: 39198 - protein, 478 aa, Bacillus sp.
NGTMMQYFEWYLPNDGNHWNRLNSDASNLKSKGITAVWIPPAWKAVSQNDVGYGAYDLYDLGEFNQKGTVRTKYGTRSQLQAAVTSLKNNGIQVYGDVVMNHKGGADATEMVRAVEVNPNNRNQEVTGEYTIEAWTRFDFPGRGNTHSSFKWRWYHFDGVDWDQSRNLSNRIYKFRGKAWDWEVDTEFGNYDYLMYADYDMDHPEVVNELRNWGVWYTNTLGLDGFRIDAVKHIKYSFTRDWINHVRSATGKNMFAVAEFWKNDLGAIENYLQKTNWNHSVFDVPLHYNLYNASKSGGNYDMRNIFNGTVVQRHPSHAVTFVDNHDSQPEEALESFVEEWFKPLAYALTLTREQGYPSVFYGDYYGIPTHGVPAMRSKIDPILEARQKYAYGPQHDYLDHPDVIGWTREGDSSHPKSGLATLITDGPGGSKRMYAGLKNAGETWYDITGNRSDTVKIGSDGWGEFHVNDGSVSIYVQK

SEQ ID NO: 39199 - protein, 478 aa, Bacillus sp.
NGTMMQYFEWYLPNDGNHWNRLNSDASNLKSKGITAVWIPPAWKGASQNDVGYGAYDLYDLGEFNQKGTVRTKYGTRSQLQAAVTSLKNNGIQVYGDVVMNHKGGADATEMVRAVEVNPNNRNQEVTGEYTIEAWTRFDFPGRGNTHSSFKWRWYHFDGVDWDQSRQLDNRIYKFRGKAWDWEVDTEFGNYDYLMYADYDMDHPEVVNELRNWGVWYTNTLGLDGFRIDAVKHIKYSFTRDWINHVRSATGKNMFAVAEFWKNDLGAIENYLQKTNWNHSVFDVPLHYNLYNASKSGGNYDMRNIFNGTVVQRHPSHAVTFVDNHDSQPEEALESFVEEWFKPLAYALTLTREQGYPSVFYGDYYGIPTHGVPAMRSKIDPILEARQKYAYGPQHDYLDHPDVIGWTREGDSSHPKSGLATLITDGPGGSKRMYAGLKNAGETWYDITGNRSDTVKIGSDGWGEFHVNDGSVSIYVQK

SEQ ID NO: 39200 - protein, 478 aa, Bacillus sp.
NGTMMQYFEWYLPNDGNHWNRLNSDASNLKSKGITAVWIPPAWKGASQNDVGYGAYDLYDLGEFNQKGTVRTKYGTRSQLQAAVTSLKNNGIQVYGDVVMNHKGGADATEMVRAVEVNPNNRNQEVTGEYTIEAWTRFDFPGRGNTHSSFKWRWYHFDGVDWDQSRRVTNRIYKFRGKAWDWEVDTEFGNYDYLMYADYDMDHPEVVNELRNWGVWYTNTLGLDGFRIDAVKHIKYSFTRDWINHVRSATGKNMFAVAEFWKNDLGAIENYLQKTNWNHSVFDVPLHYNLYNASKSGGNYDMRNIFNGTVVQRHPSHAVTFVDNHDSQPEEALESFVEEWFKPLAYALTLTREQGYPSVFYGDYYGIPTHGVPAMRSKIDPILEARQKYAYGPQHDYLDHPDVIGWTREGDSSHPKSGLATLITDGPGGSKRMYAGLKNAGETWYDITGNRSDTVKIGSDGWGEFHVNDGSVSIYVQK

SEQ ID NO: 39201 - protein, 478 aa, Bacillus sp.
NGTMMQYFEWYLPNDGNHWNRLNSDASNLKSKGITAVWIPPAWKAASQNDVGYGAYDLYDLGEFNQKGTVRTKYGTRSQLQAAVTSLKNNGIQVYGDVVMNHKGGADATEMVRAVEVNPNNRNQEVTGEYTIEAWTRFDFPGRGNTHSSFKWRWYHFDGVDWDQSRELSNRIYKFRGKAWDWEVDTEFGNYDYLMYADYDMDHPEVVNELRNWGVWYTNTLGLDGFRIDAVKHIKYSFTRDWINHVRSATGKNMFAVAEFWKNDLGAIENYLQKTNWNHSVFDVPLHYNLYNASKSGGNYDMRNIFNGTVVQRHPSHAVTFVDNHDSQPEEALESFVEEWFKPLAYALTLTREQGYPSVFYGDYYGIPTHGVPAMRSKIDPILEARQKYAYGPQHDYLDHPDVIGWTREGDSSHPKSGLATLITDGPGGSKRMYAGLKNAGETWYDITGNRSDTVKIGSDGWGEFHVNDGSVSIYVQK

SEQ ID NO: 39202 - protein, 478 aa, Bacillus sp.
NGTMMQYFEWYLPNDGNHWNRLNSDASNLKSKGITAVWIPPAWKGASQNDVGYGAYDLYDLGEFNQKGTVRTKYGTRSQLQAAVTSLKNNGIQVYGDVVMNHKGGADATEMVRAVEVNPNNRNQEVTGEYTIEAWTRFDFPGRGNTHSSFKWRWYHFDGVDWDQSRRLNNRIYKFRGKAWDWEVDTEFGNYDYLMYADYDMDHPEVVNELRNWGVWYTNTLGLDGFRIDAVKHIKYSFTRDWINHVRSATGKNMFAVAEFWKNDLGAIENYLQKTQWNHSVFDVPLHYNLYNASKSGGNYDMRNIFNGTVVQRHPSHAVTFVDNHDSQPEEALESFVEEWFKPLAYALTLTREQGYPSVFYGDYYGIPTHGVPAMRSKIDPILEARQKYAYGPQHDYLDHPDVIGWTREGDSSHPKSGLATLITDGPGGSKRMYAGLKNAGETWYDITGNRSDTVKIGSDGWGEFHVNDGSVSIYVQK

SEQ ID NO: 39203 - protein, 478 aa, Synthetic construct
NGTMMQYFEWYLPNDGNHWNRLNSDASNLKSKGITAVWIPPAWKGASQNDVGYGAYDLYDLGEFNQKGTVRTKYGTRSQLQAAVTSLKNNGIQVYGDVVMNHKGGADATEMVRAVEVNPNNRNQEVTGEYTIEAWTRFDFPGRGNTHSSFKWRWYHFDGVDWDQSRRLNNRIYKFRGKAWDWEVDTENGNYDYLMYADIDMDHPEVVNELRNWGVWYTNTLGLDGFRIDAVKHIKYSFTRDWINHVRSATGKNMFAVAEFWKNDLGAIENYLQKTNWNHSVFDVPLHYNLYNASKSGGNYDMRNIFNGTVVQRHPSHAVTFVDNHDSQPEEALESFVEEWFKPLAYALTLTREQGYPSVFYGDYYGIPTHGVPAMRSKIDPILEARQKYAYGPQHDYLDHPDVIGWTREGDMSHPKSGLATLITDGPGGSKRMYAGLKNAGETWYDITGNRSDTVKIGSDGWGEFHVNDGSVSIYVQK

SEQ ID NO: 39204 - protein, 478 aa, Synthetic construct
NGTMMQYFEWYLPNDGNHWNRLNSDASNLKSKGITAVWIPPAWKGASQNDVGYGAYDLYDLGEFNQKGTVRTKYGTRSQLQAAVTSLKNNGIQVYGDVVMNHKGGADATEMVRAVEVNPNNRNQEVTGEYTIEAWTRFDFPGRGNTHSSFKWRWYHFDGVDWDQSRRLNNRIYKFRGKAWDWEVDTENGNYDYLMYADLDMDFPEVVNEIRNWGVWYTNTLGLDGFRIDAVKHIKYSFTRDWINHVRSATGKNMFAVAEFWKNDLGAIENYLQKTNWNHSVFDVPLHYNLYNASKSGGNYDMRNIFNGTVVQRHPSHAVTFVDNHDSQPEEALESFVEEWFKPLAYALTLTREQGYPSVFYGDYYGIPTHGVPAMRSKIDPILEARQKYAYGPQHDYLDHPDVIGWTREGDSSHPKSGLATLITDGPGGSKRMYAGLKNAGETWYDITGNRSDTVKIGSDGWGEFHVNDGSVSIYVQK

SEQ ID NO: 39205 - protein, 478 aa, Bacillus sp.
NGTMMQYFEWYLPNDGNHWNRLNSDASNLKSKGITAVWIPPAWKGASQNDVGYGAYDLYDLGEFNQKGTVRTKYGTRSQLQAAVTSLKNNGIQVYGDVVMNHKGGADATEMVRAVEVNPNNRNQEVTGEYTIEAWTRFDFPGRGNTHSSFKWRWYHFDGVDWDQSRRLGNRIYKFRGKAWDWEVDTEFGNYDYLMYADYDMDHPEVVNELRNWGVWYTNTLGLDGFRIDAVKHIKYSFTRDWINHVRSATGKNMFAVAEFWKNDLGAIENYLQKTNWNHSVFDVPLHYNLYNASKSGGNYDMRNIFNGTVVQRHPSHAVTFVDNHDSQPEEALESFVEEWFKPLAYALTLTREQGYPSVFYGDYYGIPTHGVPAMRSKIDPILEARQKYAYGPQHDYLDHPDVIGWTREGDSSHPKSGLATLITDGPGGSKRMYAGLKNAGETWYDITGNRSDTVKIGSDGWGEFHVNDGSVSIYVQK

SEQ ID NO: 39206 - protein, 478 aa, Bacillus sp.
NGTMMQYFEWYLPNDGNHWNRLNSDASNLKSKGITAVWIPPAWKGASQNDVGYGAYDLYDLGEFNQKGTVRTKYGTRSQLQAAVTSLKNNGIQVYGDVVMNHKGGADATEMVRAVEVNPNNRNQEVTGEYTIEAWTRFDFPGRGNTHSSFKWRWYHFDGVDWDQSRRLNNRIYKFRGKAWDWEVDTENGNYDYLMYADIDMDYPEVVSELRMWGVWYTNTLGLDGFRIDAVKHIKYSFTRDWINHVRSATGKNMFAVAEFWKNDLGAIENYLQKTNWNHSVFDVPLHYNLYNASKSGGNYDMRNIFNGTVVQRHPSHAVTFVDNHDSQPEEALESFVEEWFKPLAYALTLTREQGYPSVFYGDYYGIPTHGVPAMRSKIDPILEARQKYAYGPQHDYLDHPDVIGWTREGDSSHPKSGLATLITDGPGGSKRMYAGLKNAGETWYDITGNRSDTVKIGSDGWGEFHVNDGSVSIYVQK

SEQ ID NO: 39207 - protein, 478 aa, Bacillus sp.
NGTMMQYFEWYLPNDGNHWNRLNSDASNLKSKGITAVWIPPAWKGASQNDVGYGAYDLYDLGEFNQKGTVRTKYGTRSQLQAAVTSLKNNGIQVYGDVVMNHKGGADATEMVSAVEVNPNNRNQEVTGEYTIEAWTRFDFPGRGNTHSSFKWRWYHFDGVDWDQSRRLNNRIYKFRGKAWDWEVDTEFGNYDYLMYADYDMDHPEVVNELRNWGVWYTNTLGLDGFRIDAVKHIKYSFTRDWINHVRSATGKNMFAVAEFWKNDLGAIENYLQKTNWNHSVFDVPLHYNLYNASKSGGNYDMRNIFNGTVVQRHPSHAVTFVDNHDSQPEEALESFVEEWFKPLAYALTLTREQGYPSVFYGDYYGIPTHGVPAMRSKIDPILEARQKYAYGPQHDYLDHPDVIGWTREGDSSHPKSGLATLITDGPGGSKRMYAGLKNAGETWYDITGNRSDTVKIGSDGWGEFHVNDGSVSIYVQK

SEQ ID NO: 39208 - protein, 478 aa, Bacillus sp.
NGTMMQYFEWYLPNDGNHWNRLNSDASNLKSKGITAVWIPPAWKGASQNDVGYGAYDLYDLGEFNQKGTVRTKYGTRSQLQAAVTSLKNNGIQVYGDVVMNHKGGADATEMVRAVEVNPNNRNQEVTGEYTIEAWTRFDFPGRGNTHSSFKWRWYHFDGVDWDHSRRFNNRIYKFRGKAWDWEVDTEFGNYDYLMYADYDMDHPEVVNELRNWGVWYTNTLGLDGFRIDAVKHIKYSFTRDWINHVRSATGKNMFAVAEFWKNDLGAIENYLQKTNWNHSVFDVPLHYNLYNASKSGGNYDMRNIFNGTVVQRHPSHAVTFVDNHDSQPEEALESFVEEWFKPLAYALTLTREQGYPSVFYGDYYGIPTHGVPAMRSKIDPILEARQKYAYGPQHDYLDHPDVIGWTREGDSSHPKSGLATLITDGPGGSKRMYAGLKNAGETWYDITGNRSDTVKIGSDGWGEFHVNDGSVSIYVQK

SEQ ID NO: 39209 - protein, 478 aa, Bacillus sp.
NGTMMQYFEWYLPNDGNHWNRLNSDASNLKSKGITAVWIPPAWKGASQNDVGYGAYDLYDLGEFNQKGTVRTKYGTRSQLQAAVTSLKNNGIQVYGDVVMNHKGGADATEMVRAVEVNPNNRNQEVTGEYTIEAWTRFDFPGRGNTHSSFKWRWYHFDGVDWDQSRRLNNRIYKFRGKAWDWEVDTEFGNYDYLMYADYDMDHPEVVNELRNWGVWYTNTLGLDGFRIDAVKHIKGSFTRDWINHVRSATGKNMFAVAEFWKNDLGAIENYLQKTNWNHSVFDVPLHYNLYNASKSGGNYDMRNIFNGTVVQRHPSHAVTFVDNHDSQPEEALESFVEEWFKPLAYALTLTREQGYPSVFYGDYYGIPTHGVPAMRSKIDPILEARQKYAYGPQHDYLDHPDVIGWTREGDSSHPKSGLATLITDGPGGSKRMYAGLKNAGETWYDITGNRSDTVKIGSDGWGEFHVNDGSVSIYVQK

SEQ ID NO: 39210 - protein, 478 aa, Bacillus sp.
NGTMMQYFEWYLPNDGNHWNRLNSDASNLKSKGITAVWIPPAWKGASQNDVGYGAYDLYDLGEFNQKGTVRTKYGTRSQLQAAVTSLKNNGIQVYGDVVMNHKGGADATEMVPAVEVNPNNRNQEVTGEYTIEAWTRFDFPGRGNTHSSFKWRWYHFDGVDWDQSRRLNNRIYKFRGKAWDWEVDTEFGNYDYLMYADYDMDHPEVVNELRNWGVWYTNTLGLDGFRIDAVKHIKYSFTRDWINHVRSATGKNMFAVAEFWKNDLGAIENYLQKTNWNHSVFDVPLHYNLYNASKSGGNYDMRNIFNGTVVQRHPSHAVTFVDNHDSQPEEALESFVETWFKPLAYALTLTREQGYPSVFYGDYYGIPTHGVPAMRSKIDPILEARQKYAYGPQHDYLDHPDVIGWTREGDSSHPKSGLATLITDGPGGSKRMYAGLKNAGETWYDITGNRSDTVKIGSDGWGEFHVNDASVSIYVQK

SEQ ID NO: 39211 - protein, 478 aa, Synthetic construct
NGTMMQYFEWYLPNDGNHWNRLNSDASNLKSKGITAVWIPPAWKGASQNDVGYGAYDLYDLGEFNQKGTVRTKYGTRSQLQAAVTSLKNNGIQVYGDVVMNHKGGADATEMVRAVEVNPNNRNQEVTGEYTIEAWTRFDFPGRGNTHSSFKWRWYHFDGVDWDQSRRLNNRIYKFRGKAWDWEVDTENGNYDYLMYADIDMDHMEVVNELRNWGVWYTNTLGLDGFRIDAVKHIKYSFTRDWINHVRSATGKNMFAVAEFWKNDLGAIENYLQKTNWNHSVFDVPLHYNLYNASKSGGNYDMRNIFNGTVVQRHPSHAVTFVDNHDSQPEEALESFVEEWFKPLAYALTLTREQGYPSVFYGDYYGIPTHGVPAMRSKIDPILEARQKYAYGPQHDYLDHPDVIGWTREGDSSHPKSGLATLITDGPGGSKRMYAGLKNAGETWYDITGNRSDTVKIGSDGWGEFHVNDGSVSIYVQK

SEQ ID NO: 39212 - protein, 478 aa, Synthetic construct
NGTMMQYFEWYLPNDGNHWNRLNSDASNLKSKGITAVWIPPAWKGASQNDVGYGAYDLYDLGEFNQKGTVRTKYGTRSQLQAAVTSLKNNGIQVYGDVVMNHKGGADATEMVRAVEVNPNNRNQEVTGEYTIEAWTRFDFPGRGNTHSSFKWRWYHFDGVDWDQSRRLNNRIYKFRGKAWDWEVDTEHGNYDYLMYADIDMDHPEVVNELRNWGVWYTNTLGLDGFRIDAVKHIKYSFTRDWINHVRSATGKNMFAVAEFWKNDLGAIENYLQKTNWNHSVFDVPLHYNLYNASKSGGNYDMRNIFNGTVVQRHPSHAVTFVDNHDSQPEEALESFVEEWFKPLAYALTLTREQGYPSVFYGDYYGIPTHGVPAMRSKIDPILEARQKYAYGPQHDYLDHPDVIGWTREGDSSHPKSGLATLITDGPGGSKRMYAGLKNAGETWYDITGNRSDTVKIGSDGWGEFHVNDGSVSIYVQK

SEQ ID NO: 39213 - protein, 478 aa, Bacillus sp.
NGTMMQYFEWYLPNDGNHWNRLNSDASNLKSKGITAVWIPPAWKGASQNDVGYGAYDLYDLGEFNQKGTVRTKYGTRSQLQAAVTSLKNNGIQVYGDVVMNHKGGADATEMVRAVEVNPNNRNQEVTGEYTIEAWTRFDFPGRGNTHSSFKWRWYHFDGVDWDQSRRLNNRIYKFRGKAWDWEVDMEFGNYDYLMYADYDMDHPEVVNELRNWGVWYTNTLGLDGFRIDAVKHIKYSFTRDWINHVRSATGKNMFAVAEFWKNDLGAIENYLQKTNWNHSVFDVPLHYNLYNASKSGGNYDMRNIFNGTVVQRHPSHAVTFVDNHDSQPEEALESFVEEWFKPLAYALTLTREQGYPSVFYGDYYGIPTHGVPAMRSKIDPILEARQKYAYGPQHDYLDHPDVIGWTREGDSSHPKSGLATLITDGPGGSKRMYAGLKNAGETWYDITGNRSDTVKIGSDGWGEFHVNDGSVSIYVQK

SEQ ID NO: 39214 - protein, 478 aa, Bacillus sp.
NGTMMQYFEWYLPNDGNHWNRLNSDASNLKSKGITAVWIPPAWKGASQNDVGYGAYDLYDLGEFNQKGTVRTKYGTRSQLQAAVTSLKNNGIQVYGDVVMNHKGGADATEMVRAVEVNPNNRNQEVTGEYTIEAWTRFDFPGRGNTHSSFKWRWYHFDGVDWDQSRRLNNRIYKFRGKAWDWEVDTENGFYDYLMYADIDMDHPEVVNELRNWGVWYTNTLGLDGFRIDAVKHIKYSFTRDWINHVRSATGKNMFAVAEFWKNDLGAIENYLQKTNWNHSVFDVPLHYNLYNASKSGGNYDMRNIFNGTVVQRHPSHAVTFVDNHDSQPEEALESFVEEWFKPLAYALTLTREQGYPSVFYGDYYGIPTHGVPAMRSKIDPILEARQKYAYGPQHDYLDHPDVIGWTREGDSSHPKSGLATLITDGPGGSKRMYAGLKNAGETWYDITGNRSDTVKIGSDGWGEFHVNDGSVSIYVQK

SEQ ID NO: 39215 - protein, 478 aa, Bacillus sp.
NGTMMQYFEWYLPNDGNHWNRLNSDASNLKSKGITAVWIPPAWKGASQNDVGYGAYDLYDLGEFNQKGTVRTKYGTRSQLQAAVTSLKNNGIQVYGDVVINHKGGADATEMVRAVEVNPNNRNQEVTGEYTIEAWTRFDFPGRGNTHSSFKWRWYHFDGVDWDQSRRLNNRIYKFRGKAWDWEVDTENGNYDYLMYADIDYDYPEVVNELRIWGVWYTNTLGLDGFRIDAVKHIKYSFTRVWINHVRSATGKNMFAVAEFWKNDLGAIENYLQKTNWNHSVFDVPLHYNLYNASKSGGNYDMRNIFNGTVVQRHPSHAVTFVDNHDSQPEEALESFVEEWFKPLAYALTLTREQGYPSVFYGDYYGIPTHGVPAMRSKIDPILEARQKYAYGPQHDYLDHPDVIGWTREGDSSHPKSGLATLITDGPGGSKRMYAGLKNAGETWYDITGNRSDTVKIGSDGWGEFHVNDGSVSIYVQK

SEQ ID NO: 39216 - protein, 478 aa, Bacillus sp.
NGTMMQYFEWYLPNDGNHWNRLNSDASNLKSKGITAVWIPPAWKGASQNDVGYGAYDLYDLGEFNQKGTVRTKYGTRSQLQAAVTSLKNNGIQVYGDVVMNHKGGADATEMVRAVEVNPNNRNQEVTGEYTIEAWTRFDFPGRGNTHSSFKWRWYHFDGVDWDQSRRLNNRIYKFRGKAWDWEVDTEFGNYDYLMYADYDMDHPEVVNELRNWGVWYTNTLGLDGFRIDAVKHIKYSFTRDWINHVRSATGKNMFAVAEFWKNDLGAIENYLQKTNWNHSVFDVPLHYNLYGASKSGGNYDMRNIFNGTVVQRHPSHAVTFVDNHDSQPEEALESFVEEWFKPLAYALTLTREQGYPSVFYGDYYGIPTHGVPAMRSKIDPILEARQKYAYGPQHDYLDHPDVIGWTREGDSSHPKSGLATLITDGPGGSKRMYAGLKNAGETWYDITGNRSDTVKIGSDGWGEFHVNDGSVSIYVQK

SEQ ID NO: 39217 - protein, 478 aa, Bacillus sp.
NGTMMQYFEWYLPNDGNHWNRLNSDASNLKSKGITAVWIPPAWKAASQNDVGYGAYDLYDLGEFNQKGTVRTKYGTRSQLQAAVTSLKNNGIQVYGDVVMNHKGGADATEMVRAVEVNPNNRNQEVTGEYTIEAWTRFDFPGRGNTHSSFKWRWYHFDGVDWDQSRETSNRIYKFRGKAWDWEVDTEFGNYDYLMYADYDMDHPEVVNELRNWGVWYTNTLGLDGFRIDAVKHIKYSFTRDWINHVRSATGKNMFAVAEFWKNDLGAIENYLQKTNWNHSVFDVPLHYNLYNASKSGGNYDMRNIFNGTVVQRHPSHAVTFVDNHDSQPEEALESFVEEWFKPLAYALTLTREQGYPSVFYGDYYGIPTHGVPAMRSKIDPILEARQKYAYGPQHDYLDHPDVIGWTREGDSSHPKSGLATLITDGPGGSKRMYAGLKNAGETWYDITGNRSDTVKIGSDGWGEFHVNDGSVSIYVQK

SEQ ID NO: 39218 - protein, 478 aa, Bacillus sp.
NGTMMQYFEWYLPNDGNHWNRLNSDASNLKSKGITAVWIPPAWKGASQNDVGYGAYDLYDLGEFNQKGTVRTKYGTRSQLQAAVTSLKNNGIQVYGDVVMNHKGGADATEMVRAVEVNPNNRNQEVTGEYTIEAWTRFDFPGRGNTHSSFKWRWYHFDGVDWDQSRLLNNRIYKFRGKAWDWEVDTEFGNYDYLMYADYDMDHPEVVNELRNWGVWYTNTLGLDGFRIDAVKHIKYSFTRDWINHVRSATGKNMFAVAEFWKNDLGAIENYLQKTNWNHSVFDVPLHYNLYNASKSGGNYDMRNIFNGTVVQRHPSHAVTFVDNHDSQPEEALESFVEEWFKPLAYALTLTREQGYPSVFYGDYYGIPTHGVPAMRSKIDPILEARQKYAYGPQHDYLDHPDVIGWTREGDSSHPKSGLATLITDGPGGSKRMYAGLKNAGETWYDITGNRSDTVKIGSDGWGEFHVNDGSVSIYVQK

SEQ ID NO: 39219 - protein, 478 aa, Bacillus sp.
NGTMMQYFEWYLPNDGNHWNRLNSDASNLKSKGITAVWIPPAWKGASQNDVGYGAYDLYDLGEFNQKGTVRTKYGTRSQLQAAVTSLKNNGIQVYGDVVMNHKGGADATEMVRAVEVNPNNRNQEVTGEYTIEAWTRFDFPGRGNTHSSFKWRWYHFDGVDWDQSRNVNNRIYKFRGKAWDWEVDTEFGNYDYLMYADYDMDHPEVVNELRNWGVWYTNTLGLDGFRIDAVKHIKYSFTRDWINHVRSATGKNMFAVAEFWKNDLGAIENYLQKTNWNHSVFDVPLHYNLYNASKSGGNYDMRNIFNGTVVQRHPSHAVTFVDNHDSQPEEALESFVEEWFKPLAYALTLTREQGYPSVFYGDYYGIPTHGVPAMRSKIDPILEARQKYAYGPQHDYLDHPDVIGWTREGDSSHPKSGLATLITDGPGGSKRMYAGLKNAGETWYDITGNRSDTVKIGSDGWGEFHVNDGSVSIYVQK

SEQ ID NO: 39220 - protein, 478 aa, Synthetic construct
NGTMMQYFEWYLPNDGNHWNRLNSDASNLKSKGITAVWIPPAWKGASQNDVGYGAYDLYDLGEFNQKGTVRTKYGTRSQLQAAVTSLKNNGIQVYGDVVMNHKGGADATEMVRAVEVNPNNRNQEVTGEYTIEAWTRFDFPGRGNTHSSFKWRWYHFDGVDWDQSRRLNNRIYKFRGKAWDWEVDTEFGNYDYLMYADYDMDHPEVVNEVRNWGVWYTNTLGLDGFRIDAVKHIKYSFTRDWINHVRSATGKNMFAVAEFWKNDLGAIENYLQKTNWNHSVFDVPLHYNLYNASKSGGNYDMRNIFNGTVVQRHPSHAVTFVDNHDSQPEEALESFVEEWFKPLAYALTLTREQGYPSVFYGDYYGIPTHGVPAMRSKIDPILEARQKYAYGPQHDYLDHPDVIGWTREGDSSHPKSGLATLITDGPGGSKRMYAGLKNAGETWYDITGNRSDTVKIGSDGWGEFHVNDGSVSIYVQK

SEQ ID NO: 39221 - protein, 478 aa, Bacillus sp.
NGTMMQYFEWYLPNDGNHWNRLNSDASNLKSKGITAVWIPPAWKGASQNDVGYGAYDLYDLGEFNQKGTVRTKYGTRSQLQAAVTSLKNNGIQVYGDVVMNHKGGADATEMVRAVEVNPNNRNQEVTGEYTIEAWTRFDFPGRGNTHSSFKWRWYHFDGVDWDQSRRTSNRIYKFRGKAWDWEVDTEFGNYDYLMYVDYDMDHPEVVNELRNWGVWYTNTLGLDGFRIDAVKHIKYSFTRDWINHVRKATGKNMFAVAEFWKNDLGAIENYLQKTNWNHSVFDVPLHYNLYNASKSGGNYDMRNIFNGTVVQRHPSHAVTFVDNHDSQPEEALESFVEEWFKPLAYALTLTREQGYPSVFYGDYYGIPTHGVPAMRSKIDPILEARQKYAYGPQHDYLDHPDVIGWTREGDSSHPKSGLATLITDGPGGSKRMYAGLKNAGETWYDITGNRSDTVKIGSDGWGEFHVNDGSVSIYVQK

SEQ ID NO: 39222 - protein, 478 aa, Synthetic construct
NGTMMQYFEWYLPNDGNHWNRLNSDASNLKSKGITAVWIPPAWKGASQNDVGYGAYDLYDLGEFNQKGTVRTKYGTRSQLQAAVTSLKNNGIQVYGDVVMNHKGGADATEMVRAVEVNPNNRNQEVTGEYTIEAWTRFDFPGRGNTHSSFKWRWYHFDGVDWDQSRRLNNRIYKFRGKAWDWEVDTEFGNYDYLMYADHDMDHPEVVNELRNWGVWYTNTLGLDGFRIDAVKHIKYSFTRDWINHVRSATGKNMFAVAEFWKNDLGAIENYLQKTNWNHSVFDVPLHYNLYNASKSGGNYDMRNIFNGTVVQRHPSHAVTFVDNHDSQPEEALESFVEEWFKPLAYALTLTREQGYPSVFYGDYYGIPTHGVPAMRSKIDPILEARQKYAYGPQHDYLDHPDVIGWTREGDSSHPKSGLATLITDGPGGSKRMYAGLKNAGETWYDITGNRSDTVKIGSDGWGEFHVNDGSVSIYVQK

SEQ ID NO: 39223 - protein, 478 aa, Bacillus sp.
NGTMMQYFEWYLPNDGNHWNRLNSDASNLKSKGITAVWIPPAWKGASQNDVGYGAYDLYDLGEFNQKGTVRTKYGTRSQLQAAVTSLKNNGIQVYGDVVMNHKGGADATEMVRAVEVNPNNRNQEVTGEYTIEAWTRFDFPGRGNTHSSFKWRWYHFDGVDWDQSRKFNNRIYKFRGKAWDWEVDTEFGNYDYLMYTDYDMDHPEVVNELRNWGVWYTNTLGLDGFRIDAVKHIKYSFTRDWINHVRSATGKNMFAVAEFWKNDLGAIENYLQKTNWNHSVFDVPLHYNLYNASKSGGNYDMRNIFNGTVVQRHPSHAVTFVDNHDSQPEEALESFVEEWFKPLAYALTLTREQGYPSVFYGDYYGIPTHGVPAMRSKIDPILEARQKYAYGPQHDYLDHPDVIGWTREGDSSHPKSGLATLITDGPGGSKRMYAGLKNAGETWYDITGNRSDTVKIGSDGWGEFHVNDGSVSIYVQK

SEQ ID NO: 39224 - protein, 478 aa, Bacillus sp.
NGTMMQYFEWYLPNDGNHWNRLNSDASNLKSKGITAVWIPPAWKGASQNDVGYGAYDLYDLGEFNQKGTVRTKYGTRSQLQAAVTSLKNNGIQVYGDVVMNHKGGADATEMVRAVEVNPNNRNQEVTGEYTIEAWTRFDFPGRGNTHSSFKWRWYHFDGVDWDQSRRLNNRIYKFRGKAWDWEVDTENGFYDYLMYADIDYDYPEVVNELRNWGVWYTNTLGLDGFRIDAVKHIKYSFTRDWINHVRSATGKNMFAVAEFWKNDLGAIENYLQKTNWNHSVFDVPLHYNLYNASKSGGNYDMRNIFNGTVVQRHPSHAVTFVDNHDSQPEEALESFVEEWFKPLAYALTLTREQGYPSVFYGDYYGIPTHGVPAMRSKIDPILEARQKYAYGPQHDYLDHPDVIGWTREGDSSHPKSGLATLITDGPGGSKRMYAGLKNAGETWYDITGNRSDTVKIGSDGWGEFHVNDGSVSIYVQK

SEQ ID NO: 39225 - protein, 478 aa, Bacillus sp.
NGTMMQYFEWYLPNDGNHWNRLNSDASNLKSKGITAVWIPPAWKAASQNDVGYGAYDLYDLGEFNQKGTVRTKYGTRSQLQAAVTSLKNNGIQVYGDVVMNHKGGADATEMVRAVEVNPNNRNQEVTGEYTIEAWTRFDFPGRGNTHSSFKWRWYHFDGVDWDQSREVSNRIYKFRGKAWDWEVDTEFGNYDYLMYADYDMDHPEVVNELRNWGVWYTNTLGLDGFRIDAVKHIKYSFTRDWINHVRSATGKNMFAVAEFWKNDLGAIENYLQKTNWNHSVFDVPLHYNLYNASKSGGNYDMRNIFNGTVVQRHPSHAVTFVDNHDSQPEEALESFVEEWFKPLAYALTLTREQGYPSVFYGDYYGIPTHGVPAMRSKIDPILEARQKYAYGPQHDYLDHPDVIGWTREGDSSHPKSGLATLITDGPGGSKRMYAGLKNAGETWYDITGNRSDTVKIGSDGWGEFHVNDGSVSIYVQK

SEQ ID NO: 39226 - protein, 478 aa, Bacillus sp.
NGTMMQYFEWYLPNDGNHWNRLNSDASNLKSKGITAVWIPPAWKGASQNDVGYGAYDLYDLGEFNQKGTVRTKYGTRSQLQAAVTSLKNNGIQVYGDVVMNHKGGADATEMVRAVEVNPNNRNQEVTGEYTIEAWTRFDFPGRGNTHSSFKWRWYHFDGVDWDQSRRLNNRIYKFRGKAWDWEVDTEFGNYDYLMYADYDMDHPEVVNELRNWGVWYTNTLGLDGFRIDAVKHIKYSFTRDWINHVRSATGKNMFAVAEFWKNDLGAIENYLQKTNWNHSVFDVPLHYNLYNASKSGGNYDMRNIFNGTVVQRHPSHAVTFVDNHDSQPEEALESFVEGWFKPLAYALTLTREQGYPSVFYGDYYGIPTHGVPAMRSKIDPILEARQKYAYGPQHDYLDHPDVIGWTREGDSSHPKSGLATLITDGPGGSKRMYAGLKNAGETWYDITGNRSDTVKIGSDGWGEFHVNDGSVSIYVQK

SEQ ID NO: 39227 - protein, 478 aa, Synthetic construct
NGTMMQYFEWYLPNDGNHWNRLNSDASNLKSKGITAVWIPPAWKGASQNDVGYGAYDLYDLGEFNQKGTVRTKYGTRSQLQAAVTSLKNNGIQVYGDVVMNHKGGADATEMVRAVEVNPNNRNQEVTGEYTIEAWTRFDFPGRGNTHSSFKWRWYHFDGVDWDQSRRLNNRIYKFRGKAWDWEVDDEFGNYDYLMYADIDMDHPEVVNELRNWGVWYTNTLGLDGFRIDAVKHIKYSFTRDWINHVRSATGKNMFAVAEFWKNDLGAIENYLQKTNWNHSVFDVPLHYNLYNASKSGGNYDMRNIFNGTVVQRHPSHAVTFVDNHDSQPEEALESFVEEWFKPLAYALTLTREQGYPSVFYGDYYGIPTHGVPAMRSKIDPILEARQKYAYGPQHDYLDHPDVIGWTREGDSSHPKSGLATLITDGPGGSKRMYAGLKNAGETWYDITGNRSDTVKIGSDGWGEFHVNDGSVSIYVQK

SEQ ID NO: 39228 - protein, 478 aa, Synthetic construct
NGTMMQYFEWYLPNDGNHWNRLNSDASNLKSKGITAVWIPPAWKGASQNDVGYGAYDLYDLGEFNQKGTVRTKYGTRSQLQAAVTSLKNNGIQVYGDVVMNHKGGADATEMVRAVEVNPNNRNQEVTGEYTIEAWTRFDFPGRGNTHSSFKWRWYHFDGVDWDQSRRLNNRIYKFRGKAWDWEVDTEYGNYDYLMYADFDMDHPEVVNELRNWGVWYTNTLGLDGFRIDAVKHIKYSFTRDWINHVRSATGKNMFAVAEFWKNDLGAIENYLQKTNWNHSVFDVPLHYNLYNASKSGGNYDMRNIFNGTVVQRHPSHAVTFVDNHDSQPEEALESFVEEWFKPLAYALTLTREQGYPSVFYGDYYGIPTHGVPAMRSKIDPILEARQKYAYGPQHDYLDHPDVIGWTREGDSSHPKSGLATLITDGPGGSKRMYAGLKNAGETWYDITGNRSDTVKIGSDGWGEFHVNDGSVSIYVQK

SEQ ID NO: 39229 - protein, 478 aa, Bacillus sp.
NGTMMQYFEWYLPNDGNHWNRLNSDASNLKSKGITAVWIPPAWKGASQNDVGYGAYDLYDLGEFNQKGTVRTKYGTRSQLQAAVTSLKNNGIQVYGDVVMNHKGGADATEMVRAVEVNPNNRNQEVTGEYTIEAWTRFDFPGRGNTHSSFKWRWYHFDGVDWDQSRRVNNRIYKFRGKAWDWEVDTEFGNYDYLMYADYDMDHPEVVNELRNWGVWYTNTLGLDGFRIDAVKHIKYSFTRDWINHVRSATGKNMFAVAEFWKNDLGAIENYLQKTNWNHSVFDVPLHYNLYNASKSGGNYDMRNIFNGTVVQRHPSHAVTFVDNHDSQPEEALESFVEEWFKPLAYALTLTREQGYPSVFYGDYYGIPTHGVPAMRSKIDPILEARQKYAYGPQHDYLDHPDVIGWTREGDSSHPKSGLATLITDGPGGSKRMYAGLKNAGETWYDITGNRSDTVKIGSDGWGEFHVNDGSVSIYVQK

SEQ ID NO: 39230 - protein, 478 aa, Bacillus sp.
NGTMMQYFEWYLPNDGNHWNRLNSDASNLKSKGITAVWIPPAWKGASQNDVGYGAYDLYDLGEFNQKGTVRTKYGTRSQLQAAVTSLKNNGIQVYGDVVMNHKGGADATEMVRAVEVNPNNRNQEVTGEYTIEAWTRFDFPGRGNTHSSFKWRWYHFDGVDWDQSRRLNNRIYKFRGKAWEWEVDTENGFYDYLMYADIDYDHPEVVNELRNWGVWYTNTLGLDGFRIDAVKHIKYSFTRDWINHVRSATGKNMFAVAEFWKNDLGAIENYLQKTNWNHSVFDVPLHYNLYNASKSGGNYDMRNIFNGTVVQRHPSHAVTFVDNHDSQPEEALESFVEEWFKPLAYALTLTREQGYPSVFYGDYYGIPTHGVPAMRSKIDPILEARQKYAYGPQHDYLDHPDVIGWTREGDSSHPKSGLATLITDGPGGSKRMYAGLKNAGETWYDITGNRSDTVKIGSDGWGEFHVNDGSVSIYVQK

SEQ ID NO: 39231 - protein, 478 aa, Synthetic construct
NGTMMQYFEWYLPNDGNHWNRLNSDASNLKSKGITAVWIPPAWKGASQNDVGYGAYDLYDLGEFNQKGTVRTKYGTRSQLQAAVTSLKNNGIQVYGDVVMNHKGGADATEMVRAVEVNPNNRNQEVTGEYTIEAWTRFDFPGRGNTHSSFKWRWYHFDGVDWDQSRRLNNRIYKFRGKAWDWEVDTENGNYDYLMYADIDMDHPEAVNELRNWGVWYTNTLGLDGFRIDAVKHIKYSFTRDWINHVRSATGKNMFAVAEFWKNDLGAIENYLQKTNWNHSVFDVPLHYNLYNASKSGGNYDMRNIFNGTVVQRHPSHAVTFVDNHDSQPEEALESFVEEWFKPLAYALTLTREQGYPSVFYGDYYGIPTHGVPAMRSKIDPILEARQKYAYGPQHDYLDHPDVIGWTREGDSSHPKSGLATLITDGPGGSKRMYAGLKNAGETWYDITGNRSDTVKIGSDGWGEFHVNDGSVSIYVQK

SEQ ID NO: 39232 - protein, 478 aa, Synthetic construct
NGTMMQYFEWYLPNDGNHWNRLNSDASNLKSKGITAVWIPPAWKGASQNDVGYGAYDLYDLGEFNQKGTVRTKYGTRSQLQAAVTSLKNNGIQVYGDVVMNHKGGADATEMVRAVEVNPNNRNQEVTGEYTIEAWTRFDFPGRGNTHSSFKWRWYHFDGVDWDQSRRLNNRIYKFRGKQWDWEVDTENGNYDYLMYADIDMDHPEVVNELRNWGVWYTNTLGLDGFRIDAVKHIKYSFTRDWINHVRSATGKNMFAVAEFWKNDLGAIENYLQKTNWNHSVFDVPLHYNLYNASKSGGNYDMRNIFNGTVVQRHPSHAVTFVDNHDSQPEEALESFVEEWFKPLAYALTLTREQGYPSVFYGDYYGIPTHGVPAMRSKIDPILEARQKYAYGPQHDYLDHPDVIGWTREGDSSHPKSGLATLITDGPGGSKRMYAGLKNAGETWYDITGNRSDTVKIGSDGWGEFHVNDGSVSIYVQK

SEQ ID NO: 39233 - protein, 478 aa, Bacillus sp.
NGTMMQYFEWYLPNDGNHWNRLNSDASNLKSKGIIAVWIPPAWKGLSQNDVGYGAYDLYDLGEFNQKGTVRTKYGTRSQLQAAVTSLKNNGIQVYGDVVMNHKGGADATEMVRAVEVNPNNRNQEVTGEYTIEAWTRFDFPGRGNTHSSFKWRWYHFDGVDWDQSRDFNNRIYKFRGKAWDWEVDTEFGNYDYLMYADYDMDHPEVVNELRNWGVWYTNTLGLDGFRIDAVKHIKYSFTRDWINHVRSATGKNMFAVAEFWKNDLGAIENYLQKTNWNHSVFDVPLHYNLYNASKSGGNYDMRNIFNGTVVQRHPSHAVTFVDNHDSQPEEALESFVEEWFKPLAYALTLTREQGYPSVFYGDYYGIPTHGVPAMRSKIDPILEARQKYAYGPQHDYLDHPDVIGWTREGDSSHPKSGLATLITDGPGGSKRMYAGLKNAGETWYDITGNRSDTVKIGSDGWGEFHVNDGSVSIYVQK

SEQ ID NO: 39234 - protein, 478 aa, Bacillus sp.
NGTMMQYFEWYLPNDGNHWNRLNSDASNLKSKGITAVWIPPAWKGASQNDVGYGAYDLYDLGEFNQKGTVRTKYGTRSQLQAAVTSLKNNGIQVYGDVVMNHKGGADATEMVRAVEVNPNNRNQEVTGEYTIEAWTRFDFPGRGNTHSSFKWRWYHFDGVDWDQSRRLNNRIYKFRGKAWDWEVDTEFGNYDYLMYADYDMDHPEVVNELRNWGVWYTNTLGLDGFRIDAVKHIKYSFTRDWINHVRSATGKNMFAVAEFWKNDLGAIENYLQKTNWNHSVFDVPLHYNLYNASKSGGNYDMRNIFNGTVVQRHPSHAVTFVDNHDSQPEEALESFVETWFKPLAYALTLTREQGYPSVFYGDYYGIPTHGVPAMRSKIDPILEARQKYAYGPQHDYLDHPDVIGWTREGDSSHPKSGLATLITDGPGGSKRMYAGLKNAGETWYDITGNRSDTVKIGSDGWGEFHVNDKSVSIYVQK

SEQ ID NO: 39235 - protein, 478 aa, Bacillus sp.
NGTMMQYFEWYLPNDGNHWNRLNSDASNLKSKGITAVWIPPAWKGASQNDVGYGAYDLYDLGEFNQKGTVRTKYGTRSQLQAAVTSLKNNGIQVYGDVVMNHKGGADATEMVRAVEVNPNNRNQEVTGEYTIEAWTRFDFPGRGNTHSSFKWRWYHFDGVDWDQSRRLNNRIYKFRGKAWDWEVDTEFGNYDYLMYADYDMDHPEVVNELRNWGVWYTNTLGLDGFRIDAVKHIKYSFTRDWINHVRSATGKNMFAVAEFWINDLGAIENYLQKTNWNHSVFDVPLHYNLYNASKSGGNYDMRNIFNGTVVQRHPSHAVTFVDNHDSQPEEALESFVEEWFKPLAYALTLTREQGYPSVFYGDYYGIPTHGVPAMRSKIDPILEARQKYAYGPQHDYLDHPDVIGWTREGDSSHPKSGLATLITDGPGGSKRMYAGLKNAGETWYDITGNRSDTVKIGSDGWGEFHVNDGSVSIYVQK

SEQ ID NO: 39236 - protein, 478 aa, Synthetic construct
NGTMMQYFEWYLPNDGNHWNRLNSDASNLKSKGITAVWIPPAWKGASQNDVGYGAYDLYDLGEFNQKGTVRTKYGTRSQLQAAVTSLKNNGIQVYGDVVMNHKGGADATEMVRAVEVNPNNRNEEVTGEYTIEAWTRFDFPGRGNTHSSFKWRWYHFDGVDWDQSRRLNNRIYKFRGKAWDWEVDTENGNYDYLMYADIDMDHPEVVNELRNWGVWYTNTLGLDGFRIDAVKHIKYSFTRDWINHVRSATGKNMFAVAEFWKNDLGAIENYLQKTNWNHSVFDVPLHYNLYNASKSGGNYDMRNIFNGTVVQRHPSHAVTFVDNHDSQPEEALESFVEEWFKPLAYALTLTREQGYPSVFYGDYYGIPTHGVPAMRSKIDPILEARQKYAYGPQHDYLDHPDVIGWTREGDSSHPKSGLATLITDGPGGSKRMYAGLKNAGETWYDITGNRSDTVKIGSDGWGEFHVNDGSVSIYVQK

SEQ ID NO: 39237 - protein, 478 aa, Synthetic construct
NGTMMQYFEWYLPNDGNHWNRLNSDASNLKSKGITAVWIPPAWKGASQNDVGYGAYDLYDLGEFNQKGTVRTKYGTRSQLQAAVTSLKNNGIQVYGDVVMNHKGGADATEMVRAVEVNPNNRNQEVTGEYTIEAWTRFDFPGRGNTHSSFKWRWYHFDGVDWDQSRRLNNRIYKFRGKAWDWEVDTENGNYDYLMYADYDMDHPEGVNELRNWGVWYTNTLGLDGFRIDAVKHIKYSFTRDWINHVRSATGKNMFAVAEFWKNDLGAIENYLQKTNWNHSVFDVPLHYNLYNASKSGGNYDMRNIFNGTVVQRHPSHAVTFVDNHDSQPEEALESFVEEWFKPLAYALTLTREQGYPSVFYGDYYGIPTHGVPAMRSKIDPILEARQKYAYGPQHDYLDHPDVIGWTREGDSSHPKSGLATLITDGPGGSKRMYAGLKNAGETWYDITGNRSDTVKIGSDGWGEFHVNDGSVSIYVQK

SEQ ID NO: 39238 - protein, 478 aa, Synthetic construct
NGTMMQYFEWYLPNDGNHWNRLNSDASNLKSKGITAVWIPPAWKGASQNDVGYGAYDLYDLGEFNQKGTVRTKYGTRSQLQAAVTSLKNNGIQVYGDVVMNHKGGADATEMVRAVEVNPNNRNQEVTGEYTIEAWTRFDFPGRGNTHSSFKWRWYHFDGVDWDQSRRLNNRIYKFRGKAWDWEVDTENGNYDYLMYADFDMDYPEVVNEMRNWGVWYTNTLGLDGFRIDAVKHIKYSFTRDWINHVRSATGKNMFAVAEFWKNDLGAIENYLQKTNWNHSVFDVPLHYNLYNASKSGGNYDMRNIFNGTVVQRHPSHAVTFVDNHDSQPEEALESFVEEWFKPLAYALTLTREQGYPSVFYGDYYGIPTHGVPAMRSKIDPILEARQKYAYGPQHDYLDHPDVIGWTREGDSSHPKSGLATLITDGPGGSKRMYAGLKNAGETWYDITGNRSDTVKIGSDGWGEFHVNDGSVSIYVQK

SEQ ID NO: 39239 - protein, 478 aa, Synthetic construct
NGTMMQYFEWYLPNDGNHWNRLNSDASNLKSKGITAVWIPPAWKGASQNDVGYGAYDLYDLGEFNQKGTVRTKYGTRSQLQAAVTSLKNNGIQVYGDVVMNHKGGADATEMVRAVEVNPNNRNQEVTGEYTIEAWTRFDFPGRGNTHSSFKWRWYHFDGVDWDQSRRLNNRIYKFRGKAWDWEVDTENGNYDYLMYADFDMDYPEVVNEVRNWGVWYTNTLGLDGFRIDAVKHIKYSFTRDWINHVRSATGKNMFAVAEFWKNDLGAIENYLQKTNWNHSVFDVPLHYNLYNASKSGGNYDMRNIFNGTVVQRHPSHAVTFVDNHDSQPEEALESFVEEWFKPLAYALTLTREQGYPSVFYGDYYGIPTHGVPAMRSKIDPILEARQKYAYGPQHDYLDHPDVIGWTREGDSSHPKSGLATLITDGPGGSKRMYAGLKNAGETWYDITGNRSDTVKIGSDGWGEFHVNDGSVSIYVQK

SEQ ID NO: 39240 - protein, 478 aa, Bacillus sp.
NGTMMQYFEWYLPNDGNHWNRLNSDASNLKSKGITAVWIPPAWKGASQNDVGYGAYDLYDLGEFNQKGTVRTKYGTRSQLQAAVTSLKNNGIQVYGDVVMNHKGGADATEMVRAVEVNPNNRNQEVTGEYTIEAWTRFDFPGRGNTHSSFKWRWYHFDGVDWDQSREFDNRIYKFRGKAWDWEVDTEFGNYDYLMYADYDMDHPEVVNELRNWGVWYTNTLGLDGFRIDAVKHIKYSFTRDWINHVRSATGKNMFAVAEFWKNDLGAIENYLQKTNWNHSVFDVPLHYNLYNASKSGGNYDMRNIFNGTVVQRHPSHAVTFVDNHDSQPEEALESFVEEWFKPLAYALTLTREQGYPSVFYGDYYGIPTHGVPAMRSKIDPILEARQKYAYGPQHDYLDHPDVIGWTREGDSSHPKSGLATLITDGPGGSKRMYAGLKNAGETWYDITGNRSDTVKIGSDGWGEFHVNDGSVSIYVQK

SEQ ID NO: 39241 - protein, 478 aa, Bacillus sp.
NGTMMQYFEWYLPNDGNHWNRLNSDASNLKSKGITAVWIPPAWKGISQNDVGYGAYDLYDLGEFNQKGTVRTKYGTRSQLQAAVTSLKNNGIQVYGDVVMNHKGGADATEMVRAVEVNPNNRNQEVTGEYTIEAWTRFDFPGRGNTHSSFKWRWYHFDGVDWDQSRDLNNRIYKFRGKAWDWEVDTEFGNYDYLMYADYDMDHPEVVNELRNWGVWYTNTLGLDGFRIDAVKHIKYSFTRDWINHVRSATGKNMFAVAEFWKNDLGAIENYLQKTNWNHSVFDVPLHYNLYNASKSGGNYDMRNIFNGTVVQRHPSHAVTFVDNHDSQPEEALESFVEEWFKPLAYALTLTREQGYPSVFYGDYYGIPTHGVPAMRSKIDPILEARQKYAYGPQHDYLDHPDVIGWTREGDSSHPKSGLATLITDGPGGSKRMYAGLKNAGETWYDITGNRSDTVKIGSDGWGEFHVNDGSVSIYVQK

SEQ ID NO: 39242 - protein, 478 aa, Bacillus sp.
NGTMMQYFEWYLPNDGNHWNRLNSDASNLKSKGITAVWIPPAWKGASQNDVGYGAYDVYDLGEFNQKGTVRTKYGTRSQLQAAVTSLKNNGIQVYGDVVMNHKGGADATEMVRAVEVNPNNRNQEVTGEYTIEAWTRFDFPGRGNTHSSFKWRWYHFDGVDWDQSRRLNNRIYKFRGKAWDWEVDTENGNYDYLMYADIDYDHPEVVNELRNWGVWYTNTLGLDGFRIDAVKHIKYSFTRVWINHVRSATGKNMFAVAEFWKNDLGAIENYLQKTNWNHSVFDVPLHYNLYNASKSGGNYDMRNIFNGTVVQRHPSHAVTFVDNHDSQPEEALESFVEEWFKPLAYALTLTREQGYPSVFYGDYYGIPTHGVPAMRSKIDPILEARQKYAYGPQHDYLDHPDVIGWTREGDSSHPKSGLATLITDGPGGSKRMYAGLKNAGETWYDITGNRSDTVKIGSDGWGEFHVNDGSVSIYVQK

SEQ ID NO: 39243 - protein, 478 aa, Synthetic construct
NGTMMQYFEWYLPNDGNHWNRLNSDASNLKSKGITAVWIPPAWKGASQNDVGYGAYDLYDLGEFNQKGTVRTKYGTRSQLQAAVTSLKNNGIQVYGDVVMNHKGGADATEMVRAVEVNPNNRNQEVTGEYTIEAWTRFDFPGRGNTHSSFKWRWYHFDGVDWDQSRQFQNRIYKFRGKAWDWEVDTENGNYDYLMYADIDMDHPETVNELRNWGVWYTNTLGLDGFRIDAVKHIKYSFTRDWINHVRSATGKNMFAVAEFWKNDLGAIENYLQKTNWNHSVFDVPLHYNLYNASKSGGNYDMRNIFNGTVVQRHPSHAVTFVDNHDSQPEEALESFVEEWFKPLAYALTLTREQGYPSVFYGDYYGIPTHGVPAMRSKIDPILEARQKYAYGPQHDYLDHPDVIGWTREGDSSHPKSGLATLITDGPGGSKRMYAGLKNAGETWYDITGNRSDTVKIGSDGWGEFHVNDGSVSIYVQK

SEQ ID NO: 39244 - protein, 478 aa, Bacillus sp.
NGTMMQYFEWYLPNDGNHWNRLNSDASNLKSKGITAVWIPPAWKGASQNDVGYGAYDLYDLGEFNQKGTVRTKYGTRSQLQAAVTSLKNNGIQVYGDVVMNHKGGADATEMVRAVEVNPNNRNQEVTGEYTIEAWTRFDFPGRGNTHSSFKWRWYHFDGVDWDQSRRFDNRIYKFRGKAWDWEVDTEFGNYDYLMYADYDMDHPEVVNELRNWGVWYTNTLGLDGFRIDAVKHIKYSFTRDWINHVRSATGKNMFAVAEFWKNDLGAIENYLQKTNWNHSVFDVPLHYNLYNASKSGGNYDMRNIFNGTVVQRHPSHAVTFVDNHDSQPEEALESFVEEWFKPLAYALTLTREQGYPSVFYGDYYGIPTHGVPAMRSKIDPILEARQKYAYGPQHDYLDHPDVIGWTREGDSSHPKSGLATLITDGPGGSKRMYAGLKNAGETWYDITGNRSDTVKIGSDGWGEFHVNDGSVSIYVQK

SEQ ID NO: 39245 - protein, 478 aa, Bacillus sp.
NGTMMQYFEWYLPNDGNHWNRLNSDASNLKSKGITAVWIPPAWKGASQNDVGYGAYDLYDLGEFNQKGTVRTKYGTRSQLQAAVTSLKNNGIQVYGDVVMNHKGGADATEMVRAVEVNPNNRNQEVTGEYTIEAWTRFDFPGRGNTHSSFKWRWYHFDGVDWDQSRRLNNRIYKFRGKAWDWEVDTEFGNYDYLMYADYDMDHPEVVNELRNWGVWYTNTLGLDGFRIDAVKHIKYSFTRDWINHVRSATGKNMFAVAEFWKNDLGAIENYLQKTNWNHSVFDVPLHYNLYNASKSGGNYDMRNIFNGTVVQRHPSHAVTFVDNHDSQPEEALESFVEEWFKPLAYALTLTREQGYPSVFYGDYYGIPTHGVPAMRSKIDPILTARQKYAYGPQHDYLDHPDVIGWTREGDSSHPKSGLATLITDGPGGSKRMYAGLKNAGETWYDITGNRSDTVKIGSDGWGEFHVNDGSVSIYVQK

SEQ ID NO: 39246 - protein, 478 aa, Bacillus sp.
NGTMMQYFEWYLPNDGNHWNRLNSDASNLKSKGITAVWIPPAWKGASQNDVGYGAYDLYDLGEFNQKGTVRTKYGTRSQLQAAVTSLKNNGIQVYGDVVMNHKGGADATEMVRAVEVNPNNRNQEVTGEYTIEAWTRFDFPGRGNTHSSFKWRWYHFDGVDWDQSRRLNNRIYKFRGKAWDWEVDTEFGNYDYLMYADYDMDHPEVVNELRNWGVWYTNTLGLDGFRIDAVKHIKYSFTRDWINHVRSATGKNMFAVAEFWLNDLGAIENYLQKTNWNHSVFDVPLHYNLYNASKSGGNYDMRNIFNGTVVQRHPSHAVTFVDNHDSQPEEALESFVEEWFKPLAYALTLTREQGYPSVFYGDYYGIPTHGVPAMRSKIDPILEARQKYAYGPQHDYLDHPDVIGWTREGDSSHPKSGLATLITDGPGGSKRMYAGLKNAGETWYDITGNRSDTVKIGSDGWGEFHVNDGSVSIYVQK

SEQ ID NO: 39247 - protein, 478 aa, Bacillus sp.
NGTMMQYFEWYLPNDGNHWNRLNSDASNLKSKGITAVWIPPAWKGASQNDVGYGAYDLYDLGEFNQKGTVRTKYGTRSQLQAAVTSLKNNGIQVYGDVVMNHKGGADATEMVRAVEVNPNNRNQEVTGEYTIEAWTRFDFPGRGNTHSSFKWGWYHFDGVDWDQSRRLENRIYKFRGKAWDWEVDTEFGNYDYLMYADYDMDHPEVVNELRNWGVWYTNTLGLDGFRIDAVKHIKYSFTRDWINHVRSATGKNMFAVAEFWKNDLGAIENYLQKTNWNHSVFDVPLHYNLYNASKSGGNYDMRNIFNGTVVQRHPSHAVTFVDNHDSQPEEALESFVEEWFKPLAYALTLTREQGYPSVFYGDYYGIPTHGVPAMRSKIDPILEARQKYAYGPQHDYLDHPDVIGWTREGDSSHPKSGLATLITDGPGGSKRMYAGLKNAGETWYDITGNRSDTVKIGSDGWGEFHVNDGSVSIYVQK

SEQ ID NO: 39248 - protein, 478 aa, Bacillus sp.
NGTMMQYFEWYLPNDGNHWNRLNSDASNLKSKGITAVWIPPAWKGASQNDVGYGAYDLYDLGEFNQKGTVRTKYGTRSQLQAAVTSLKNNGIQVYGDVVMNHKGGADATEMVRAVEVNPNNRNQEVTGEYTIEAWTRFDFPGRGNTHSSFKWRWYHFDGVDWDQSRRLYNRIYKFRGKAWDWEVDTEFGNYDYLMYADYDMDHPEVVNELRNWGVWYTNTLGLDGFRIDAVKHIKYSFTRDWINHVRSATGKNMFAVAEFWKNDLGAIENYLQKTNWNHSVFDVPLHYNLYNASKSGGNYDMRNIFNGTVVQRHPSHAVTFVDNHDSQPEEALESFVEEWFKPLAYALTLTREQGYPSVFYGDYYGIPTHGVPAMRSKIDPILEARQKYAYGPQHDYLDHPDVIGWTREGDSSHPKSGLATLITDGPGGSKRMYAGLKNAGETWYDITGNRSDTVKIGSDGWGEFHVNDGSVSIYVQK

SEQ ID NO: 39249 - protein, 478 aa, Bacillus sp.
NGTMMQYFEWYLPNDGNHWNRLNSDASNLKSKGITAVWIPPAWKGASQNDVGYGAYDLYDLGEFNQKGTVRTKYGTRSQLQAAVTSLKNNGIQVYGDVVMNHKGGADATEMVRAVEVNPNNRNQEVTGEYTIEAWTRFDFPGRGNTHSSFKWRWYHFDGVDWDQSRRLNNRIYKFRGKAWDWEVDTEFGNYDYLMYADYDMDHPEVVNELRNWGVWYTNTLGLDGFRIDAVKHIKYSFTRDWINHVRSATGKNMFAVAEFWKNDLGAIENYLQKTNWNHSVFDVPLHYNLYNASRSGGNYDMRNIFNGTVVQRHPSHAVTFVDNHDSQPEEALESFVEEWFKPLAYALTLTREQGYPSVFYGDYYGIPTHGVPAMRSKIDPILEARQKYAYGPQHDYLDHPDVIGWTREGDSSHPKSGLATLITDGPGGSKRMYAGLKNAGETWYDITGNRSDTVKIGSDGWGEFHVNDGSVSIYVQK

SEQ ID NO: 39250 - protein, 478 aa, Bacillus sp.
NGTMMQYFEWYLPNDGNHWNRLNSDASNLKSKGITAVWIPPAWKGASQNDVGYGAYDLYDLGEFNQKGTVRTKYGTRSQLQAAVTSLKNNGIQVYGDVVMNHKGGADATEMVRAVEVNPNNRNQEVTGEYTIEAWTRFDFPGRGNTHSSFKWRWYHFDGVDWDQSRRLNNRIYKFRGKAWDWEVDTEFGNYDYLMYADYDMDHPEVVNELRNWGVWYTNTLGLDGFRIDAVKHIKYSFTRDWINHVRSATGKNMFAVAEFWKNDLGAIENYLQKTNWNHSVFDVPLHYNLYNASKSGGNYDMRNIFNGTVVQRHPSWAVTFVDNHDSQPEEALESFVEEWFKPLAYALTLTREQGYPSVFYGDYYGIPTHGVPAMRSKIDPILEARQKYAYGPQHDYLDHPDVIGWTREGDSSHPKSGLATLITDGPGGSKRMYAGLKNAGETWYDITGNRSDTVKIGSDGWGEFHVNDGSVSIYVQK

SEQ ID NO: 39251 - protein, 478 aa, Synthetic construct
NGTMMQYFEWYLPNDGNHWNRLNSDASNLKSKGITAVWIPPAWKGASQNDVGYGAYDLYDLGEFNQKGTVRTKYGTRSQLQAAVTSLKNNGIQVYGDVVMNHKGGADRTEMVRAVEVNPNNRNQEVTGEYTIEAWTRFDFPGRGNTHSSFKWRWYHFDGVDWDQSRRLNNRIYKFRGKAWDWEVDTENGNYDYLMYADIDMDHPEVVNELRNWGVWYTNTLGLDGFRIDAVKHIKYSFTRDWINHVRSATGKNMFAVAEFWKNDLGAIENYLQKTNWNHSVFDVPLHYNLYNASKSGGNYDMRNIFNGTVVQRHPSHAVTFVDNHDSQPEEALESFVEEWFKPLAYALTLTREQGYPSVFYGDYYGIPTHGVPAMRSKIDPILEARQKYAYGPQHDYLDHPDVIGWTREGDSSHPKSGLATLITDGPGGSKRMYAGLKNAGETWYDITGNRSDTVKIGSDGWGEFHVNDGSVSIYVQK

SEQ ID NO: 39252 - protein, 478 aa, Bacillus sp.
NGTMMQYFEWYLPNDGNHWNRLNSDASNLKSKGITAVWIPPAWKGASQNDVGYGAYDLYDLGEFNQKGTVRTKYGTRSQLQAAVTSLKNNGIQVYGDVVMNHKGGADATEMVRAVEVNPNNRNQEVTGEYTIEAWTRFDFPGRGNTHSSFKWRWYHFDGVDWDQSRRLENRIYKFRGKAWDWEVDTEFGNYDYLMYADYDMDHPEVVNELRNWGVWYTNTLGLDGFRIDAVKHIKYSFTRDWINHVRSATGKNMFAVAEFWKNDLGAIENYLQKTNWNHSVFDVPLHYNLYNASKSGGNYDMRNIFNGTVVQRHPSHAVTFVDNHDSQPEEALESFVEEWFKPLAYALTLTREQGYPSVFYGDYYGIPTHGVPAMRSKIDPILEARQKYAYGPQHDYLDHPDVIGWTREGDSSHPKSGLATLITDGPGGSKRMYAGLKNAGETWYDITGNRSDTVKIGSDGWGEFHVNDGSVSIYVQK

SEQ ID NO: 39253 - protein, 478 aa, Bacillus sp.
NGTMMQYFEWYLPNDGNHWNRLNSDASNLKSKGITAVWIPPAWKGASQNDVGYGAYDLYDLGEFNQKGTVRTKYGTRSQLQAAVTSLKNNGIQVYGDVVFNHKGGADATEMVRAVEVNPNNRNQEVTGEYTIEAWTRFDFPGRGNTHSSFKWRWYHFDGVDWDQSRRLNNRIYKFRGKAWDWEVDTENGNYDYLMYADIDYDYPEVVNELRVWGVWYTNTLGLDGFRIDAVKHIKYSFTRVWINHVRSATGKNMFAVAEFWKNDLGAIENYLQKTNWNHSVFDVPLHYNLYNASKSGGNYDMRNIFNGTVVQRHPSHAVTFVDNHDSQPEEALESFVEEWFKPLAYALTLTREQGYPSVFYGDYYGIPTHGVPAMRSKIDPILEARQKYAYGPQHDYLDHPDVIGWTREGDSSHPKSGLATLITDGPGGSKRMYAGLKNAGETWYDITGNRSDTVKIGSDGWGEFHVNDGSVSIYVQK

SEQ ID NO: 39254 - protein, 478 aa, Bacillus sp.
NGTMMQYFEWYLPNDGNHWNRLNSDASNLKSKGITAVWIPPAWKGASQNDVGYGAYDLYDLGEFNQKGTVRTKYGTRSQLQAAVTSLKNNGIQVYGDVVMNHKGGADATEMVRAVEVNPNNRNQEVTGEYTIEAWTRFDFPGRGNTHSSFKWRWYHFDGVDWDQSRRLNNRIYKFRGKAWDWEVETEFGNYDYLMYADYDMDHPEVVNELRNWGVWYTNTLGLDGFRIDAVKHIKYSFTRDWINHVRSATGKNMFAVAEFWKNDLGAIENYLQKTNWNHSVFDVPLHYNLYNASKSGGNYDMRNIFNGTVVQRHPSHAVTFVDNHDSQPEEALESFVEEWFKPLAYALTLTREQGYPSVFYGDYYGIPTHGVPAMRSKIDPILEARQKYAYGPQHDYLDHPDVIGWTREGDSSHPKSGLATLITDGPGGSKRMYAGLKNAGETWYDITGNRSDTVKIGSDGWGEFHVNDGSVSIYVQK

SEQ ID NO: 39255 - protein, 478 aa, Bacillus sp.
NGTMMQYFEWYLPNDGNHWNRLNSDASNLKSKGITAVWIPPAWKGASQNDVGYGAYDLYDLGEFNQKGTVRTKYGTRSQLQAAVTSLKNNGIQVYGDVVMNHKGGADATEMVRAVEVNPNNRNQEVTGEYTIEAWTRFDFPGRGNTHSSFKWRWYHFDGVDWDKSRRLNNRIYKFRGKAWDWEVDTEFGNYDYLMYADYDMDHPEVVNELRNWGVWYTNTLGLDGFRIDAVKHIKYSFTRDWINHVRSATGKNMFAVAEFWKNDLGAIENYLQKTNWNHSVFDVPLHYNLYNASKSGGNYDMRNIFNGTVVQRHPSHAVTFVDNHDSQPEEALESFVEEWFKPLAYALTLTREQGYPSVFYGDYYGIPTHGVPAMRSKIDPILEARQKYAYGPQHDYLDHPDVIGWTREGDSSHPKSGLATLITDGPGGSKRMYAGLKNAGETWYDITGNRSDTVKIGSDGWGEFHVNDGSVSIYVQK

SEQ ID NO: 39256 - protein, 478 aa, Bacillus sp.
NGTMMQYFEWYLPNDGNHWNRLNSDASNLKSKGITAVWIPPAWKGASQNDVGYGAYDLYDLGEFNQKGTVRTKYGTRSQLQAAVTSLKNNGIQVYGDVVMNHKGGADATEMVRAVEVNPNNRNQEVTGEYTIEAWTRFDFPGRGNTHSSFKWRWYHFDGVDWDQSRQLENRIYKFRGKAWDWEVDTEFGNYDYLMYADYDMDHPEVVNELRNWGVWYTNTLGLDGFRIDAVKHIKYSFTRDWINHVRSATGKNMFAVAEFWKNDLGAIENYLQKTNWNHSVFDVPLHYNLYNASKSGGNYDMRNIFNGTVVQRHPSHAVTFVDNHDSQPEEALESFVEEWFKPLAYALTLTREQGYPSVFYGDYYGIPTHGVPAMRSKIDPILEARQKYAYGPQHDYLDHPDVIGWTREGDSSHPKSGLATLITDGPGGSKRMYAGLKNAGETWYDITGNRSDTVKIGSDGWGEFHVNDGSVSIYVQK

SEQ ID NO: 39257 - protein, 478 aa, Bacillus sp.
NGTMMQYFEWYLPNDGNHWNRLNSDASNLKSKGITAVWIPPAWKGTSQNDVGYGAYDLYDLGEFNQKGTVRTKYGTRSQLQAAVTSLKNNGIQVYGDVVMNHKGGADATEMVRAVEVNPNNRNQEVTGEYTIEAWTRFDFPGRGNTHSSFKWRWYHFDGVDWDQSRQLNNRIYKFRGKAWDWEVDTEFGNYDYLMYADYDMDHPEVVNELRNWGVWYTNTLGLDGFRIDAVKHIKYSFTRDWINHVRSATGKNMFAVAEFWKNDLGAIENYLQKTNWNHSVFDVPLHYNLYNASKSGGNYDMRNIFNGTVVQRHPSHAVTFVDNHDSQPEEALESFVEEWFKPLAYALTLTREQGYPSVFYGDYYGIPTHGVPAMRSKIDPILEARQKYAYGPQHDYLDHPDVIGWTREGDSSHPKSGLATLITDGPGGSKRMYAGLKNAGETWYDITGNRSDTVKIGSDGWGEFHVNDGSVSIYVQK

SEQ ID NO: 39258 - protein, 478 aa, Bacillus sp.
NGTMMQYFEWYLPNDGNHWNRLNSDASNLKSKGITAVWIPPAWKGISQNDVGYGAYDLYDLGEFNQKGTVRTKYGTRSQLQAAVTSLKNNGIQVYGDVVMNHKGGADATEMVRAVEVNPNNRNQEVTGEYTIEAWTRFDFPGRGNTHSSFKWRWYHFDGVDWDQSRNLQNRIYKFRGKAWDWEVDTEFGNYDYLMYADYDMDHPEVVNELRNWGVWYTNTLGLDGFRIDAVKHIKYSFTRDWINHVRSATGKNMFAVAEFWKNDLGAIENYLQKTNWNHSVFDVPLHYNLYNASKSGGNYDMRNIFNGTVVQRHPSHAVTFVDNHDSQPEEALESFVEEWFKPLAYALTLTREQGYPSVFYGDYYGIPTHGVPAMRSKIDPILEARQKYAYGPQHDYLDHPDVIGWTREGDSSHPKSGLATLITDGPGGSKRMYAGLKNAGETWYDITGNRSDTVKIGSDGWGEFHVNDGSVSIYVQK

SEQ ID NO: 39259 - protein, 478 aa, Bacillus sp.
NGTMMQYFEWYLPNDGNHWNRLNSDASNLKSKGITAVWIPPAWKGASQNDVGYGAYDLYDLGEFNQKGTVRTKYGTRSQLQAAVTSLKNNGIQVYGDVVMNHKGGADATEMVRAVEVNPNNRNQEVTGEYTIEAWTRFDFPGRGNTHSSFKWRWYHFDGVDWDQSREFQNRIYKFRGKAWDWEVDTEFGNYDYLMYADYDMDHPEVVNELRNWGVWYTNTLGLDGFRIDAVKHIKYSFTRDWINHVRSATGKNMFAVAEFWKNDLGAIENYLQKTNWNHSVFDVPLHYNLYNASKSGGNYDMRNIFNGTVVQRHPSHAVTFVDNHDSQPEEALESFVEEWFKPLAYALTLTREQGYPSVFYGDYYGIPTHGVPAMRSKIDPILEARQKYAYGPQHDYLDHPDVIGWTREGDSSHPKSGLATLITDGPGGSKRMYAGLKNAGETWYDITGNRSDTVKIGSDGWGEFHVNDGSVSIYVQK

SEQ ID NO: 39260 - protein, 478 aa, Synthetic construct
NGTMMQYFEWYLPNDGNHWNRLNSDASNLKSKGITAVWIPPAWKGASQNDVGYGAYDLYDLGEFNQKGTVRTKYGTRSQLQAAVTSLKNNGIQVYGDVVMNHKGGADATEMVRAVEVNPNNRNQEVTGEYTIEAWTRFDFPGRGNTHSSFKWRWYHFDGVDWDQSRRLNNRIYKFRGKAWDWEVDTENGNYDYLMYADIDMDHPETVNELRNWGVWYTNTLGLDGFRIDAVKHIKYSFTRDWINHVRSATGKNMFAVAEFWKNDLGAIENYLQKTNWNHSVFDVPLHYNLYNASKSGGNYDMRNIFNGTVVQRHPSHAVTFVDNHDSQPEEALESFVEEWFKPLAYALTLTREQGYPSVFYGDYYGIPTHGVPAMRSKIDPILEARQKYAYGPQHDYLDHPDVIGWTREGDSSHPKSGLATLITDGPGGSKRMYAGLKNAGETWYDITGNRSDTVKIGSDGWGEFHVNDGSVSIYVQK

SEQ ID NO: 39261 - protein, 478 aa, Synthetic construct
NGTMMQYFEWYLPNDGNHWNRLNSDASNLKSKGITAVWIPPAWKGASQNDVGYGAYDLYDLGEFNQKGTVRTKYGTRSQLQAAVTSLKNNGIQVYGDVVMNHKGGADATEMVRAVEVNPNNRNQEVTGEYTIEAWTRFDFPGRGNTHSSFKWRWYHFDGVDWDQSRRLNNRIYKFRGKAWDWEVDTENGNYDYLMYADYDMDFPEVVNEVRNWGVWYTNTLGLDGFRIDAVKHIKYSFTRDWINHVRSATGKNMFAVAEFWKNDLGAIENYLQKTNWNHSVFDVPLHYNLYNASKSGGNYDMRNIFNGTVVQRHPSHAVTFVDNHDSQPEEALESFVEEWFKPLAYALTLTREQGYPSVFYGDYYGIPTHGVPAMRSKIDPILEARQKYAYGPQHDYLDHPDVIGWTREGDSSHPKSGLATLITDGPGGSKRMYAGLKNAGETWYDITGNRSDTVKIGSDGWGEFHVNDGSVSIYVQK

SEQ ID NO: 39262 - protein, 478 aa, Bacillus sp.
NGTMMQYFEWYLPNDGNHWNRLNSDASNLKSKGITAVWIPPAWKGASQNDVGYGAYDLYDLGEFNQKGTVRTKYGTRSQLQAAVTSLKNNGIQVYGDVVMNHKGGADATEMVRAVEVNPNNRNQEVTGEYTIEAWTRFDFPGRGNTHSSFKWRWYHFDGVDWDQSRRLNNRIYKFRGKAWDWEVDTEFGNYDYLMYADYDVDHPEVVNELRNWGVWYTNTLGLDGFRIDAVKHIKYSFTRDWINHVRSATGKNMFAVAEFWKNDLGAIENYLQKTNWNHSVFDVPLHYNLYNASKSGGNYDMRNIFNGTVVQRHPSHAVTFVDNHDSQPEEALESFVEEWFKPLAYALTLTREQGYPSVFYGDYYGIPTHGVPAMRSKIDPILEARQKYAYGPQHDYLDHPDVIGWTREGDSSHPKSGLATLITDGPGGSKRMYAGLKNAGETWYDITGNRSDTVKIGSDGWGEFHVNDGSVSIYVQK

SEQ ID NO: 39263 - protein, 478 aa, Bacillus sp.
NGTMMQYFEWYLPNDGNHWNRLNSDASNLKSKGITAVWIPPAWKGASQNDVGYGAYDLYDLGEFNQKGTVRTKYGTRSQLQAAVTSLKNNGIQVYGDVVMNHKGGADATEMVRAVEVNPNNRNQEVTGEYTIEAWTRFDFPGRGNTHSSFKWRWYHFDGVDWDQSRRLNNRIYKFRGKAWDWEVDTEFGNYDYLMYADYDMDHPEVVNELREWGVWYTNTLGLDGFRIDAVKHIKYSFTRDWINHVRSATGKNMFAVAEFWKNDLGAIENYLQKTNWNHSVFDVPLHYNLYNASKSGGNYDMRNIFNGTVVQRHPSHAVTFVDNHDSQPEEALESFVEEWFKPLAYALTLTREQGYPSVFYGDYYGIPTHGVPAMRSKIDPILEARQKYAYGPQHDYLDHPDVIGWTREGDSSHPKSGLATLITDGPGGSKRMYAGLKNAGETWYDITGNRSDTVKIGSDGWGEFHVNDGSVSIYVQK

SEQ ID NO: 39264 - protein, 478 aa, Bacillus sp.
NGTMMQYFEWYLPNDGNHWNRLNSDASNLKSKGITAVWIPPAWKGASQNDVGYGAYDLYDLGEFNQKGTVRTKYGTRSQLQAAVTSLKNNGIQVYGDVVMNHKGGADATEMVRAVEVNPNNRNQEVTGEYTIEAWTRFDFPGRGNTHSSFKWRWYHFDGVDWDQSRRLNNRIYKFRGKAWDWEVDTENGNYDYLMYADIDMDHPEVVPLLRNWGVWYTNTLGLDGFRIDAVKHIKYSFTRDWINHVRSATGKNMFAVAEFWKNDLGAIENYLQKTNWNHSVFDVPLHYNLYNASKSGGNYDMRNIFNGTVVQRHPSHAVTFVDNHDSQPEEALESFVEEWFKPLAYALTLTREQGYPSVFYGDYYGIPTHGVPAMRSKIDPILEARQKYAYGPQHDYLDHPDVIGWTREGDSSHPKSGLATLITDGPGGSKRMYAGLKNAGETWYDITGNRSDTVKIGSDGWGEFHVNDGSVSIYVQK

SEQ ID NO: 39265 - protein, 478 aa, Bacillus sp.
NGTMMQYFEWYLPNDGNHWNRLNSDASNLKSKGITAVWIPPAWKGASQNDVGYGAYDLYDLGEFNQKGTVRTKYGTRSQLQAAVTSLKNNGIQVYGDVVMNHKGGADATEMVRAVEVNPNNRNQEVTGEYTIEAWTRFDFPGRGNTHSSFKWRWYHFDGVDWDQSRNVNNRIYKFRGKAWDWEVDTEFGNYDYLMYADYDMDHPEVVNELRNWGVWYTNTLGLDGFRIDAVKHIKYSFTRDWINHVRSATGKNMFAVAEFWKNDLGAIENYLQKTNWNHSVFDVPLHYNLYNASKSGGNYDMRNIFNGTVVQRHPSHAVTFVDNHDSQPEEALESFVETWFKPLAYALTLTREQGYPSVFYGDYYGIPTHGVPAMRSKIDPILEARQKYAYGPQHDYLDHPDVIGWTREGDSSHPKSGLATLITDGPGGSKRMYAGLKNAGETWYDITGNRSDTVKIGSDGWGEFHVNDASVSIYVQK

SEQ ID NO: 39266 - protein, 478 aa, Synthetic construct
NGTMMQYFEWYLPNDGNHWNRLNSDASNLKSKGITAVWIPPAWKGASQNDVGYGAYDLYDLGEFNQKGTVRTKYGTRSQLQAAVTSLKNNGIQVYGDVVMNHKGGADATEMVRAVEVNPNNRNQEVTGEYTIEAWTRFDFPGRGNTHSSFKWRWYHFDGVDWDQSRRLNNRIYKFRGKAWDWEVDTENGNYDYLMYADIDMDAPEVVNELRNWGVWYTNTLGLDGFRIDAVKHIKYSFTRDWINHVRSATGKNMFAVAEFWKNDLGAIENYLQKTNWNHSVFDVPLHYNLYNASKSGGNYDMRNIFNGTVVQRHPSHAVTFVDNHDSQPEEALESFVEEWFKPLAYALTLTREQGYPSVFYGDYYGIPTHGVPAMRSKIDPILEARQKYAYGPQHDYLDHPDVIGWTREGDSSHPKSGLATLITDGPGGSKRMYAGLKNAGETWYDITGNRSDTVKIGSDGWGEFHVNDGSVSIYVQK

SEQ ID NO: 39267 - protein, 478 aa, Bacillus sp.
NGTMMQYFEWYLPNDGNHWNRLNSDASNLKSKGITAVWIPPAWKAASQNDVGYGAYDLYDLGEFNQKGTVRTKYGTRSQLQAAVTSLKNNGIQVYGDVVMNHKGGADATEMVRAVEVNPNNRNQEVTGEYTIEAWTRFDFPGRGNTHSSFKWRWYHFDGVDWDQSRRVSNRIYKFRGKAWDWEVDTEFGNYDYLMYADYDMDHPEVVNELRNWGVWYTNTLGLDGFRIDAVKHIKYSFTRDWINHVRSATGKNMFAVAEFWKNDLGAIENYLQKTNWNHSVFDVPLHYNLYNASKSGGNYDMRNIFNGTVVQRHPSHAVTFVDNHDSQPEEALESFVEEWFKPLAYALTLTREQGYPSVFYGDYYGIPTHGVPAMRSKIDPILEARQKYAYGPQHDYLDHPDVIGWTREGDSSHPKSGLATLITDGPGGSKRMYAGLKNAGETWYDITGNRSDTVKIGSDGWGEFHVNDGSVSIYVQK

SEQ ID NO: 39268 - protein, 478 aa, Bacillus sp.
NGTMMQYFEWYLPNDGNHWNRLNSDASNLKSKGITAVWIPPAWKGASQNDVGYGAYDLYDLGEFNQKGTVRTKYGTRSQLQAAVTSLKNNGIQVYGDVVMNHKGGADATEMVRAVEVNPNNRNQEVTGEYTIEAWTRFDFPGRGNTHSSFKWRWYHFDGVDWDQSRDVDNRIYKFRGKAWDWEVDTEFGNYDYLMYADYDMDHPEVVNELRNWGVWYTNTLGLDGFRIDAVKHIKYSFTRDWINHVRSATGKNMFAVAEFWKNDLGAIENYLQKTNWNHSVFDVPLHYNLYNASKSGGNYDMRNIFNGTVVQRHPSHAVTFVDNHDSQPEEALESFVEEWFKPLAYALTLTREQGYPSVFYGDYYGIPTHGVPAMRSKIDPILEARQKYAYGPQHDYLDHPDVIGWTREGDSSHPKSGLATLITDGPGGSKRMYAGLKNAGETWYDITGNRSDTVKIGSDGWGEFHVNDGSVSIYVQK

SEQ ID NO: 39269 - protein, 478 aa, Synthetic construct
NGTMMQYFEWYLPNDGNHWNRLNSDASNLKSKGITAVWIPPAWKGASQNDVGYGAYDVYDLGEFNQKGTVRTKYGTRSQLQAAVTSLKNNGIQVYGDVVMNHKGGADATEMVRAVEVNPNNRNQEVTGEYTIEAWTRFDFPGRGNTHSSFKWRWYHFDGVDWDQSRRLNNRIYKFRGKAWDWEVDTENGNYDYLMYADIDMDHPEVVNELRNWGVWYTNTLGLDGFRIDAVKHIKYSFTRDWINHVRSATGKNMFAVAEFWKNDLGAIENYLQKTNWNHSVFDVPLHYNLYNASKSGGNYDMRNIFNGTVVQRHPSHAVTFVDNHDSQPEEALESFVEEWFKPLAYALTLTREQGYPSVFYGDYYGIPTHGVPAMRSKIDPILEARQKYAYGPQHDYLDHPDVIGWTREGDSSHPKSGLATLITDGPGGSKRMYAGLKNAGETWYDITGNRSDTVKIGSDGWGEFHVNDGSVSIYVQK

SEQ ID NO: 39270 - protein, 478 aa, Bacillus sp.
NGTMMQYFEWYLPNDGNHWNRLNSDASNLKSKGITAVWIPPAWKGASQNDVGYGAYDLYDLGEFNQKGTVRTKYGTRSQLQAAVTSLKNNGIQVYGDVVMNHKGGADATEMVRAVEVNPNNRNQEVTGEYTIEAWTRFDFPGRGNTHSSFKWRWYHFDGVDWDQSRKLNNRIYKFRGKAWDWEVDTEFGNYDYLMYADYDYDHPETTNEMRNWGVWYTNTLGLDGFRIDAVKHIKYSFTRDWINHVRSATGKNMFAVAEFWKNDLGAIENYLQKTNWNHSVFDVPLHYNLYNASKSGGNYDMRNIFNGTVVQRHPSHAVTFVDNHDSQPEEALESFVEEWFKPLAYALTLTREQGYPSVFYGDYYGIPTHGVPAMRSKIDPILEARQKYAYGPQHDYLDHPDVIGWTREGDSSHPKSGLATLITDGPGGSKRMYAGLKNAGETWYDITGNRSDTVKIGSDGWGEFHVNDGSVSIYVQK

SEQ ID NO: 39271 - protein, 478 aa, Synthetic construct
NGTMMQYFEWYLPNDGNHWNRLNSDASNLKSKGITAVWIPPAWKGASQNDVGYGAYDIYDLGEFNQKGTVRTKYGTRSQLQAAVTSLKNNGIQVYGDVVMNHKGGADATEMVRAVEVNPNNRNQEVTGEYTIEAWTRFDFPGRGNTHSSFKWRWYHFDGVDWDQSRRLNNRIYKFRGKAWDWEVDTENGNYDYLMYADYDMDHPEVVNELRNWGVWYTNTLGLDGFRIDAVKHIKYSFTRDWINHVRSATGKNMFAVAEFWKNDLGAIENYLQKTNWNHSVFDVPLHYNLYNASKSGGNYDMRNIFNGTVVQRHPSHAVTFVDNHDSQPEEALESFVEEWFKPLAYALTLTREQGYPSVFYGDYYGIPTHGVPAMRSKIDPILEARQKYAYGPQHDYLDHPDVIGWTREGDSSHPKSGLATLITDGPGGSKRMYAGLKNAGETWYDITGNRSDTVKIGSDGWGEFHVNDGSVSIYVQK

SEQ ID NO: 39272 - protein, 478 aa, Synthetic construct
NGTMMQYFEWYLPNDGNHWNRLNSDASNLKSKGITAVWIPPAWKGASQNDVGYGAYDVYDLGEFNQKGTVRTKYGTRSQLQAAVTSLKNNGIQVYGDVVMNHKGGADATEMVRAVEVNPNNRNQEVTGEYTIEAWTRFDFPGRGNTHSSFKWRWYHFDGVDWDQSRRLNNRIYKFRGKAWDWEVDTENGNYDYLMYADYDMDHPEVVNEIRNWGVWYTNTLGLDGFRIDAVKHIKYSFTRDWINHVRSATGKNMFAVAEFWKNDLGAIENYLQKTNWNHSVFDVPLHYNLYNASKSGGNYDMRNIFNGTVVQRHPSHAVTFVDNHDSQPEEALESFVEEWFKPLAYALTLTREQGYPSVFYGDYYGIPTHGVPAMRSKIDPILEARQKYAYGPQHDYLDHPDVIGWTREGDSSHPKSGLATLITDGPGGSKRMYAGLKNAGETWYDITGNRSDTVKIGSDGWGEFHVNDGSVSIYVQK

SEQ ID NO: 39273 - protein, 478 aa, Bacillus sp.
NGTMMQYFEWYLPNDGNHWNRLNSDASNLKSKGITAVWIPPAWKGASQNDVGYGAYDLYDLGEFNQKGTVRTKYGTRSQLQAAVTSLKNNGIQVYGDVVMNHKGGADATEMVRAVEVNPNNRNQEVTGEYTIEAWTRFDFPGRGNTHSSFKWRWYHFDGVDWDQSRRLQNRIYKFRGKAWDWEVDTEFGNYDYLMYADYDMDHPEVVNELRNWGVWYTNTLGLDGFRIDAVKHIKYSFTRDWINHVRSATGKNMFAVAEFWKNDLGAIENYLQKTNWNHSVFDVPLHYNLYNASKSGGNYDMRNIFNGTVVQRHPSHAVTFVDNHDSQPEEALESFVEEWFKPLAYALTLTREQGYPSVFYGDYYGIPTHGVPAMRSKIDPILEARQKYAYGPQHDYLDHPDVIGWTREGDSSHPKSGLATLITDGPGGSKRMYAGLKNAGETWYDITGNRSDTVKIGSDGWGEFHVNDGSVSIYVQK

SEQ ID NO: 39274 - protein, 478 aa, Bacillus sp.
NGTMMQYFEWYLPNDGNHWNRLNSDASNLKSKGITAVWIPPAWKGASQNDVGYGAYDLYDLGEFNQKGTVRTKYGTRSQLQAAVTSLKNNGIQVYGDVVMNHKGGADATEMVRAVEVNPNNRNQEVTGEYTIEAWTRFDFPGRGNTHSSFKWRWYHFDGVDWDQSRRLNNRIYKFRGKAWDWEVDTEFGNYDYLMYADYDMDHPEVVNELRNWGVWYTNTLGLDGFRIDAVKHIKYSFTRDWINHVRSATGKNMFAVAEFWHNDLGWIENYLQKTNWNHSVFDVPLHYNLYNASKSGGNYDMRNIFNGTVVQRHPSHAVTFVDNHDSQPEEALESFVEEWFKPLAYALTLTREQGYPSVFYGDYYGIPTHGVPAMRSKIDPILEARQKYAYGPQHDYLDHPDVIGWTREGDSSHPKSGLATLITDGPGGSKRMYAGLKNAGETWYDITGNRSDTVKIGSDGWGEFHVNDGSVSIYVQK

SEQ ID NO: 39275 - protein, 478 aa, Synthetic construct
NGTMMQYFEWYLPNDGNHWNRLNSDASNLKSKGITAVWIPPAWKGASQNDVGYGAYDLYDLGEFNQKGTVRTKYGTRSQLQAAVTSLKNNGIQVYGDVVMNHKGGADATEMVRAVEVNPNNRNQEVTGEYTIEAWTRFDFPGRGNTHSSFKWRWYHFDGVDWDQSRRLNNRIYKFRGKAWDWEVDTENGNYDYLMYADIDMDNPEVVNELRNWGVWYTNTLGLDGFRIDAVKHIKYSFTRDWINHVRSATGKNMFAVAEFWKNDLGAIENYLQKTNWNHSVFDVPLHYNLYNASKSGGNYDMRNIFNGTVVQRHPSHAVTFVDNHDSQPEEALESFVEEWFKPLAYALTLTREQGYPSVFYGDYYGIPTHGVPAMRSKIDPILEARQKYAYGPQHDYLDHPDVIGWTREGDSSHPKSGLATLITDGPGGSKRMYAGLKNAGETWYDITGNRSDTVKIGSDGWGEFHVNDGSVSIYVQK

SEQ ID NO: 39276 - protein, 478 aa, Bacillus sp.
NGTMMQYFEWYLPNDGNHWNRLNSDASNLKSKGITAVWIPPAWKGASQNDVGYGAYDVYDLGEFNQKGTVRTKYGTRSQLQAAVTSLKNNGIQVYGDVVMNHKGGADATEMVRAVEVNPNNRNQEVTGEYTIEAWTRFDFPGRGNTHSSFKWRWYHFDGVDWDQSRRLNNRIYKFRGKAWDWEVDTENGNYDYLMYADIDFDHPEVVNELRNWGVWYTNTLGLDGFRIDAVKHIKYSFTRDWINHVRSATGKNMFAVAEFWKNDLGAIENYLQKTNWNHSVFDVPLHYNLYNASKSGGNYDMRNIFNGTVVQRHPSHAVTFVDNHDSQPEEALESFVEEWFKPLAYALTLTREQGYPSVFYGDYYGIPTHGVPAMRSKIDPILEARQKYAYGPQHDYLDHPDVIGWTREGDSSHPKSGLATLITDGPGGSKRMYAGLKNAGETWYDITGNRSDTVKIGSDGWGEFHVNDGSVSIYVQK

SEQ ID NO: 39277 - protein, 478 aa, Synthetic construct
NGTMMQYFEWYLPNDGNHWNRLNSDASNLKSKGITAVWIPPAWKGASQNDVGYGAYDLYDLGEFNQKGTVRTKYGTRSQLQAAVTSLKNNGIQVYGDVVMNHKGGADATEMVRAVEVNPNNRNQEVTGEYTIEAWTRFDFPGRGNTHSSFKWRWYHFDGVDWDQSRRLNNRIYKFRGKAWDWEVDTENGNYDYLMYADIDMDDPEVVNELRNWGVWYTNTLGLDGFRIDAVKHIKYSFTRDWINHVRSATGKNMFAVAEFWKNDLGAIENYLQKTNWNHSVFDVPLHYNLYNASKSGGNYDMRNIFNGTVVQRHPSHAVTFVDNHDSQPEEALESFVEEWFKPLAYALTLTREQGYPSVFYGDYYGIPTHGVPAMRSKIDPILEARQKYAYGPQHDYLDHPDVIGWTREGDSSHPKSGLATLITDGPGGSKRMYAGLKNAGETWYDITGNRSDTVKIGSDGWGEFHVNDGSVSIYVQK

SEQ ID NO: 39278 - protein, 478 aa, Bacillus sp.
NGTMMQYFEWYLPNDGNHWNRLNSDASNLKSKGITAVWIPPAWKGASQNDVGYGAYDLYDLGEFNQKGTVRTKYGTRSQLQAAVTSLKNNGIQVYGDVVMNHKGGADATEMVRAVEVNPNNRNQEVTGEYTIEAWTRFDFPGRGNTHSSFKWRWYHFDGVDWDQSRRLNNRIYKFRGKAWDWEVDTEFGNYDYLMYADYDMDHPEVVNELRNWGVWYTNTLGLDGFRIDAVKHIKYSFTRDWINHVRSATGKNMFAVAEFWKNDLGAIENYLQKTNWNHSVFDVPLHNNLYNASKSGGNYDMRNIFNGTVVQRHPSHAVTFVDNHDSQPEEALESFVEEWFKPLAYALTLTREQGYPSVFYGDYYGIPTHGVPAMRSKIDPILEARQKYAYGPQHDYLDHPDVIGWTREGDSSHPKSGLATLITDGPGGSKRMYAGLKNAGETWYDITGNRSDTVKIGSDGWGEFHVNDGSVSIYVQK

SEQ ID NO: 39279 - protein, 478 aa, Bacillus sp.
NGTMMQYFEWYLPNDGNHWNRLNSDASNLKSKGITAVWIPPAWKATSQNDVGYGAYDLYDLGEFNQKGTVRTKYGTRSQLQAAVTSLKNNGIQVYGDVVMNHKGGADATEMVRAVEVNPNNRNQEVTGEYTIEAWTRFDFPGRGNTHSSFKWRWYHFDGVDWDQSRELSNRIYKFRGKAWDWEVDTEFGNYDYLMYADYDMDHPEVVNELRNWGVWYTNTLGLDGFRIDAVKHIKYSFTRDWINHVRSATGKNMFAVAEFWKNDLGAIENYLQKTNWNHSVFDVPLHYNLYNASKSGGNYDMRNIFNGTVVQRHPSHAVTFVDNHDSQPEEALESFVEEWFKPLAYALTLTREQGYPSVFYGDYYGIPTHGVPAMRSKIDPILEARQKYAYGPQHDYLDHPDVIGWTREGDSSHPKSGLATLITDGPGGSKRMYAGLKNAGETWYDITGNRSDTVKIGSDGWGEFHVNDGSVSIYVQK

SEQ ID NO: 39280 - protein, 478 aa, Bacillus sp.
NGTMMQYFEWYLPNDGNHWNRLNSDASNLKSKGITAVWIPPAWKGVSQNDVGYGAYDLYDLGEFNQKGTVRTKYGTRSQLQAAVTSLKNNGIQVYGDVVMNHKGGADATEMVRAVEVNPNNRNQEVTGEYTIEAWTRFDFPGRGNTHSSFKWRWYHFDGVDWDQSRDLNNRIYKFRGKAWDWEVDTEFGNYDYLMYADYDMDHPEVVNELRNWGVWYTNTLGLDGFRIDAVKHIKYSFTRDWINHVRSATGKNMFAVAEFWKNDLGAIENYLQKTNWNHSVFDVPLHYNLYNASKSGGNYDMRNIFNGTVVQRHPSHAVTFVDNHDSQPEEALESFVEEWFKPLAYALTLTREQGYPSVFYGDYYGIPTHGVPAMRSKIDPILEARQKYAYGPQHDYLDHPDVIGWTREGDSSHPKSGLATLITDGPGGSKRMYAGLKNAGETWYDITGNRSDTVKIGSDGWGEFHVNDGSVSIYVQK

SEQ ID NO: 39281 - protein, 478 aa, Bacillus sp.
NGTMMQYFEWYLPNDGNHWNRLNSDASNLKSKGIKAVWIPPAWKGASQNDVGYGAYDLYDLGEFNQKGTVRTKYGTRSQLQAAVTSLKNNGIQVYGDVVMNHKGGADATEMVRAVEVNPNNRNQEVTGEYTIEAWTRFDFPGRGNTHSSFKWRWYHFDGVDWDQSRRLNNRIYKFRGKAWDWEVDTEFGNYDYLMYADYDMDHPEVVNELRNWGVWYTNTLGLDGFRIDAVKHIKYSFTRDWINHVRSATGKNMFAVAEFWKNDLGAIENYLQKTNWNHSVFDVPLHYNLYNASKSGGNYDMRNIFNGTVVQRHPSHAVTFVDNHDSQPEEALESFVETWFKPLAYALTLTREQGYPSVFYGDYYGIPTHGVPAMRSKIDPILEARQKYAYGPQHDYLDHPDVIGWTREGDSSHPKSGLATLITDGPGGSKRMYAGLKNAGETWYDITGNRSDTVKIGSDGWGEFHVNDGSVSIYVQK

SEQ ID NO: 39282 - protein, 478 aa, Bacillus sp.
NGTMMQYFEWYLPNDGNHWNRLNSDASNLKSKGITAVWIPPAWKGASQNDVGYGAYDLYDLGEFNQKGTVRTKYGTRSQLQAAVTSLKNNGIQVYGDVVMNHKGGADATEMVRAVEVNPNNRNQEVTGEYTIEAWTRFDFPGRGNTHSSFKWAWYHFDGVDWDQSRRLNNRIYKFRGKAWDWEVDTEFGNYDYLMYADYDMDHPEVVNELRNWGVWYTNTLGLDGFRIDAVKHIKYSFTRDWINHVRSATGKNMFAVAEFWKNDLGAIENYLQKTNWNHSVFDVPLHYNLYNASKSGGNYDMRNIFNGTVVQRHPSHAVTFVDNHDSQPEEALESFVEEWFKPLAYALTLTREQGYPSVFYGDYYGIPTHGVPAMRSKIDPILEARQKYAYGPQHDYLDHPDVIGWTREGDSSHPKSGLATLITDGPGGSKRMYAGLKNAGETWYDITGNRSDTVKIGSDGWGEFHVNDGSVSIYVQK

SEQ ID NO: 39283 - protein, 478 aa, Bacillus sp.
NGTMMQYFEWYLPNDGNHWNRLNSDASNLKSKGITAVWIPPAWKGASQNDVGYGAYDLYDLGEFNQKGTVRTKYGTRSQLQAAVTSLKNNGIQVYGDVVMNHKGGADATEMVRAVEVNPNNRNQEVTGEYTIEAWTRFDFPGRGNTHSSFKWRWYHFDGVDWDQSRRLNNRIYKFRGKAWDWEVDTEFGNYDYLMYADYDMDHPEVVNELRNWGVWYTNTLGLDGFRIDAVKHIKYSFTRDWINHVRSATGKNMFAVAEFWKNDLGAIENYLQKTNWNHSVFDVPLHYNLYNASKSGGNYDMRNIFNGTVVQRHPSHAVTFVDNHDSQPEEALESFVEEWFKPLAYALTLTREQGYPSVFYGDYYGIPTHGVPAMRSKIDPILLARQKYAYGPQHDYLDHPDVIGWTREGDSSHPKSGLATLITDGPGGSKRMYAGLKNAGETWYDITGNRSDTVKIGSDGWGEFHVNDGSVSIYVQK

SEQ ID NO: 39284 - protein, 478 aa, Bacillus sp.
NGTMMQYFEWYLPNDGNHWNRLNSDASNLKSKGITAVWIPPAWKGASQNDVGYGAYDLYDLGEFNQKGTVRTKYGTRSQLQAAVTSLKNNGIQVYGDVVMNHKGGADATEMVRAVEVNPNNRNQEVTGEYTIEAWTRFDFPGRGNTHSSFKWRWYHFDGVDWDQSRRLNNRIYKFRGKAWDWEVDTEFGNYDYLMYADYDMDHPEVVNELRNWGVWYTNTLGLDGFRIDAVKHIKLSFTRDWINHVRSATGKNMFAVAEFWKNDLGAIENYLQKTNWNHSVFDVPLHYNLYNASKSGGNYDMRNIFNGTVVQRHPSHAVTFVDNHDSQPEEALESFVEEWFKPLAYALTLTREQGYPSVFYGDYYGIPTHGVPAMRSKIDPILEARQKYAYGPQHDYLDHPDVIGWTREGDSSHPKSGLATLITDGPGGSKRMYAGLKNAGETWYDITGNRSDTVKIGSDGWGEFHVNDGSVSIYVQK

SEQ ID NO: 39285 - protein, 478 aa, Bacillus sp.
NGTMMQYFEWYLPNDGNHWNRLNSDASNLKSKGITAVWIPPAWKGASQNDVGYGAYDLYDLGEFNQKGTVRTKYGTRSQLQAAVTSLKNNGIQVYGDVVMNHKGGADATEMVRAVEVNPNNRNQEVTQEYTIEAWTRFDFPGRGNTHSSFKWRWYHFDGVDWDQSRRLNNRIYKFRGKAWDWEVDTEFGNYDYLMYADYDMDHPEVVNELRNWGVWYTNTLGLDGFRIDAVKHIKYSFTRDWINHVRSATGKNMFAVAEFWKNDLGAIENYLQKTNWNHSVFDVPLHYNLYNASKSGGNYDMRNIFNGTVVQRHPSHAVTFVDNHDSQPEEALESFVEEWFKPLAYALTLTREQGYPSVFYGDYYGIPTHGVPAMRSKIDPILEARQKYAYGPQHDYLDHPDVIGWTREGDSSHPKSGLATLITDGPGGSKRMYAGLKNAGETWYDITGNRSDTVKIGSDGWGEFHVNDGSVSIYVQK

SEQ ID NO: 39286 - protein, 478 aa, Bacillus sp.
NGTMMQYFEWYLPNDGNHWNRLNSDASNLKSKGITAVWIPPAWKGASQNDVGYGAYDLYDLGEFNQKGTVRTKYGTRSQLQAAVTSLKNNGIQVYGDVVMNHKGGADATEMVRAVEVNPNNRNQEVTGEYTIEAWTRFDFPGRGNTHSSFKWRWYHFDGVDWDQSRALNNRIYKFRGKAWDWEVDTEFGNYDYLMYADYDMDHPEVVNELRNWGVWYTNTLGLDGFRIDAVKHIKYSFTRDWINHVRSATGKNMFAVAEFWKNDLGAIENYLQKTNWNHSVFDVPLHYNLYNASKSGGNYDMRNIFNGTVVQRHPSHAVTFVDNHDSQPEEALESFVEEWFKPLAYALTLTREQGYPSVFYGDYYGIPTHGVPAMRSKIDPILEARQKYAYGPQHDYLDHPDVIGWTREGDSSHPKSGLATLITDGPGGSKRMYAGLKNAGETWYDITGNRSDTVKIGSDGWGEFHVNDGSVSIYVQK

SEQ ID NO: 39287 - protein, 478 aa, Bacillus sp.
NGTMMQYFEWYLPNDGNHWNRLNSDASNLKSKGITAVWIPPAWKGASQNDVGYGAYDLYDLGEFNQKGTVRTKYGTRSQLQAAVTSLKNNGIQVYGDVVMNHKGGADATEMVRAVEVNPNNRNQEVTGEYTIEAWTRFDFPGRGNTHSSFKWRWYHFDGVDWDQSRPLNNRIYKFRGKAWDWEVDTEFGNYDYLMYADYDMDHPEVVNELRNWGVWYTNTLGLDGFRIDAVKHIKYSFTRDWINHVRSATGKNMFAVAEFWKNDLGAIENYLQKTNWNHSVFDVPLHYNLYNASKSGGNYDMRNIFNGTVVQRHPSHAVTFVDNHDSQPEEALESFVEEWFKPLAYALTLTREQGYPSVFYGDYYGIPTHGVPAMRSKIDPILEARQKYAYGPQHDYLDHPDVIGWTREGDSSHPKSGLATLITDGPGGSKRMYAGLKNAGETWYDITGNRSDTVKIGSDGWGEFHVNDGSVSIYVQK

SEQ ID NO: 39288 - protein, 478 aa, Bacillus sp.
NGTMMQYFEWYLPNDGNHWNRLNSDASNLKSKGITAVWIPPAWKGASQNDVGYGAYDLYDLGEFNQKGTVRTKYGTRSQLQAAVTSLKNNGIQVYGDVVMNHKGGADATEMVRAVEVNPNNRNQEVTGEYTIEAWTRFDFPGRGNTHSSFKWRWYHFDGVDWDQSRDLTNRIYKFRGKAWDWEVDTEFGNYDYLMYADYDMDHPEVVNELRNWGVWYTNTLGLDGFRIDAVKHIKYSFTRDWINHVRSATGKNMFAVAEFWKNDLGAIENYLQKTNWNHSVFDVPLHYNLYNASKSGGNYDMRNIFNGTVVQRHPSHAVTFVDNHDSQPEEALESFVEEWFKPLAYALTLTREQGYPSVFYGDYYGIPTHGVPAMRSKIDPILEARQKYAYGPQHDYLDHPDVIGWTREGDSSHPKSGLATLITDGPGGSKRMYAGLKNAGETWYDITGNRSDTVKIGSDGWGEFHVNDGSVSIYVQK

SEQ ID NO: 39289 - protein, 478 aa, Bacillus sp.
NGTMMQYFEWYLPNDGNHWNRLNSDASNLKSKGITAVWIPPAWKGASQNDVGYGAYDLYDLGEFNQKGTVRTKYGTRSQLQAAVTSLKNNGIQVYGDVVMNHKGGADATEMVRAVEVNPNNRNQEVTGEYTIEAWTRFDFPGRGNTHSSFKWRWYHFDGVDWDQSRRLNNRIYKFRGKAWDWEVDTEFGNYDYLMYADYDMDHPEVVNELRNWGVWYTNTLGLDGFRIDAVKHIKYSFTRDWINHVRSATGKNMFAVAEFWKNDLGAIENYLQKTNWNHSVFDVPLHYNLYNASKSGGNYDMRDIFNGTVVQRHPSHAVTFVDNHDSQPEEALESFVEEWFKPLAYALTLTREQGYPSVFYGDYYGIPTHGVPAMRSKIDPILEARQKYAYGPQHDYLDHPDVIGWTREGDSSHPKSGLATLITDGPGGSKRMYAGLKNAGETWYDITGNRSDTVKIGSDGWGEFHVNDGSVSIYVQK

SEQ ID NO: 39290 - protein, 478 aa, Bacillus sp.
NGTMMQYFEWYLPNDGNHWNRLNSDASNLKSKGITAVWIPPAWKGASQNDVGYGAYDLYDLGEFNQKGTVRTKYGTRSQLQAAVTSLKNNGIQVYGDVVMNHKGGADATEMVRAVEVNPNNRNQEVTGEYTIEAWTRFDFPGRGNTHSSFKWRWYHFDGVDWDQSRSLNNRIYKFRGKAWDWEVDTEFGNYDYLMYADYDMDHPEVVNELRNWGVWYTNTLGLDGFRIDAVKHIKYSFTRDWINHVRSATGKNMFAVAEFWKNDLGAIENYLQKTNWNHSVFDVPLHYNLYNASKSGGNYDMRNIFNGTVVQRHPSHAVTFVDNHDSQPEEALESFVEEWFKPLAYALTLTREQGYPSVFYGDYYGIPTHGVPAMRSKIDPILEARQKYAYGPQHDYLDHPDVIGWTREGDSSHPKSGLATLITDGPGGSKRMYAGLKNAGETWYDITGNRSDTVKIGSDGWGEFHVNDGSVSIYVQK

SEQ ID NO: 39291 - protein, 478 aa, Bacillus sp.
NGTMMQYFEWYLPNDGNHWNRLNSDASNLKSKGITAVWIPPAWKGASQNDVGYGAYDLYDLGEFNQKGTVRTKYGTRSQLQAAVTSLKNNGIQVYGDVVMNHKGGADATEMVRAVEVNPNNRNQEVTGEYTIEAWTRFDFPGRGNTHSSFKWRWYHFDGVDWDQSRQLQNRIYKFRGKAWDWEVDTEFGNYDYLMYADYDMDHPEVVNELRNWGVWYTNTLGLDGFRIDAVKHIKYSFTRDWINHVRSATGKNMFAVAEFWKNDLGAIENYLQKTNWNHSVFDVPLHYNLYNASKSGGNYDMRNIFNGTVVQRHPSHAVTFVDNHDSQPEEALESFVEEWFKPLAYALTLTREQGYPSVFYGDYYGIPTHGVPAMRSKIDPILEARQKYAYGPQHDYLDHPDVIGWTREGDSSHPKSGLATLITDGPGGSKRMYAGLKNAGETWYDITGNRSDTVKIGSDGWGEFHVNDGSVSIYVQK

SEQ ID NO: 39292 - protein, 478 aa, Synthetic construct
NGTMMQYFEWYLPNDGNHWNRLNSDASNLKSKGITAVWIPPAWKGASQNDVGYGAYDLYDLGEFNQKGTVRTKYGTRSQLQAAVTSLKNNGIQVYGDVVMNHKGGADATEMVRAVEVNPNNRNQEVTGEYTIEAWTRFDFPGRGNTHSSFKWRWYHFDGVDWDQSRRLNNRIYKFRGKAWDWEVDTENGNYDYLMYADIDMDHPEPVNELRNWGVWYTNTLGLDGFRIDAVKHIKYSFTRDWINHVRSATGKNMFAVAEFWKNDLGAIENYLQKTNWNHSVFDVPLHYNLYNASKSGGNYDMRNIFNGTVVQRHPSHAVTFVDNHDSQPEEALESFVEEWFKPLAYALTLTREQGYPSVFYGDYYGIPTHGVPAMRSKIDPILEARQKYAYGPQHDYLDHPDVIGWTREGDSSHPKSGLATLITDGPGGSKRMYAGLKNAGETWYDITGNRSDTVKIGSDGWGEFHVNDGSVSIYVQK

SEQ ID NO: 39293 - protein, 478 aa, Bacillus sp.
NGTMMQYFEWYLPNDGNHWNRLNSDASNLKSKGITAVWIPPAWKGASQNDVGYGAYDLYDLGEFNQKGTVRTKYGTRSQLQAAVTSLKNNGIQVYGDVVMNHKGGADATEMVRAVEVNPNNRNQEVTGEYTIEAWTRFDFPGRGNTHSSFKWRWYHFDGVDWDQSRRLNNRIYKFRGKAWDWEVDTEFGNYDYLMYADYDMDHPEVVNELRNWGVWYTNTLGLDGFRIDAVKHIKYSFTRDWINHVRSATGKNMFAVAEFWANDLGAIENYLQKTNWNHSVFDVPLHYNLYNASKSGGNYDMRNIFNGTVVQRHPSHAVTFVDNHDSQPEEALESFVEEWFKPLAYALTLTREQGYPSVFYGDYYGIPTHGVPAMRSKIDPILEARQKYAYGPQHDYLDHPDVIGWTREGDSSHPKSGLATLITDGPGGSKRMYAGLKNAGETWYDITGNRSDTVKIGSDGWGEFHVNDGSVSIYVQK

SEQ ID NO: 39294 - protein, 478 aa, Bacillus sp.
NGTMMQYFEWYLPNDGNHWNRLNSDASNLKSKGITAVWIPPAWKGASQNDVGYGAYDLYDLGEFNQKGTVRTKYGTRSQLQAAVTSLKNNGIQVYGDVVMNHKGGADATEMVRAVEVNPNNRNQEVTGEYTIEAWTRFDFPGRGNTHSSFKWRWYHFDGVDWDQSRRLNNRIYKFRGKAWDWEVDTEFGNYDYLMYADYDMDHPEVVNELRNWGVWYTNTLGLDGFRIDAVKHIKYSFTRDWINHVRSATGKNMFAVAEFWKNDLGAIENYLQKTNWNHSVFDVPLHYNLYNASKSGGNYDMRNIFNGTVVQRHPSHAVTFVDNHDSQPEEALESFVEAWFKPLAYALTLTREQGYPSVFYGDYYGIPTHGVPAMRSKIDPILEARQKYAYGPQHDYLDHPDVIGWTREGDSSHPKSGLATLITDGPGGSKRMYAGLKNAGETWYDITGNRSDTVKIGSDGWGEFHVNDGSVSIYVQK

SEQ ID NO: 39295 - protein, 478 aa, Bacillus sp.
NGTMMQYFEWYLPNDGNHWNRLNSDASNLKSKGITAVWIPPAWKGASQNDVGYGAYDLYDLGEFNQKGTVRTKYGTRSQLQAAVTSLKNNGIQVYGDVVMNHKGGADATEMVRAVEVNPNNRNQEVTGEYTIEAWTRFDFPGRGNTHSSFKWRWYHFDGVDWDQSRRLNNRIYKFRGKAWDWEVDTEFGNYDYLMYADYDMDHPEVVNELRNWGVWYTNTLGLDGFRIDAVKHIKYSFTRDWINHVRSATGKNMFAVAEFWKNDLGAIENYLQKTNWNHSVFDVPLHYNLYNASKSGGNYDMRLIFNGTVVQRHPSHAVTFVDNHDSQPEEALESFVEEWFKPLAYALTLTREQGYPSVFYGDYYGIPTHGVPAMRSKIDPILEARQKYAYGPQHDYLDHPDVIGWTREGDSSHPKSGLATLITDGPGGSKRMYAGLKNAGETWYDITGNRSDTVKIGSDGWGEFHVNDGSVSIYVQK

SEQ ID NO: 39296 - protein, 478 aa, Bacillus sp.
NGTMMQYFEWYLPNDGNHWNRLNSDASNLKSKGITAVWIPPAWKGASQNDVGYGAYDLYDLGEFNQKGTVRTKYGTRSQLQAAVTSLKNNGIQVYGDVVMNHKGGADATEMVRAVEVNPNNRNQEVTGEYTIEAWTRFDFPGRGNTHSSFKWRWYHFDGVDWDQSRDVNNRIYKFRGKAWDWEVDTEFGNYDYLMYADYDMDHPEVVNELRNWGVWYTNTLGLDGFRIDAVKHIKYSFTRDWINHVRSATGKNMFAVAEFWKNDLGAIENYLQKTNWNHSVFDVPLHYNLYNASKSGGNYDMRNIFNGTVVQRHPSHAVTFVDNHDSQPEEALESFVEEWFKPLAYALTLTREQGYPSVFYGDYYGIPTHGVPAMRSKIDPILEARQKYAYGPQHDYLDHPDVIGWTREGDSSHPKSGLATLITDGPGGSKRMYAGLKNAGETWYDITGNRSDTVKIGSDGWGEFHVNDGSVSIYVQK

SEQ ID NO: 39297 - protein, 478 aa, Synthetic construct
NGTMMQYFEWYLPNDGNHWNRLNSDASNLKSKGITAVWIPPAWKGASQNDVGYGAYDLYDLGEFNQKGTVRTKYGTRSQLQAAVTSLKNNGIQVYGDVVMNHKGGADATEMVRAVEVNPNNRNQEVTGEYTIEAWTRFDFPGRGNTHSSFKWRWYHFDGVDWDQSRRLNNRIYKFRGKAWDWPVDTENGNYDYLMYADIDMDHPEVVNELRNWGVWYTNTLGLDGFRIDAVKHIKYSFTRDWINHVRSATGKNMFAVAEFWKNDLGAIENYLQKTNWNHSVFDVPLHYNLYNASKSGGNYDMRNIFNGTVVQRHPSHAVTFVDNHDSQPEEALESFVEEWFKPLAYALTLTREQGYPSVFYGDYYGIPTHGVPAMRSKIDPILEARQKYAYGPQHDYLDHPDVIGWTREGDSSHPKSGLATLITDGPGGSKRMYAGLKNAGETWYDITGNRSDTVKIGSDGWGEFHVNDGSVSIYVQK

SEQ ID NO: 39298 - protein, 478 aa, Bacillus sp.
NGTMMQYFEWYLPNDGNHWNRLNSDASNLKSKGITAVWIPPAWKGTSQNDVGYGAYDLYDLGEFNQKGTVRTKYGTRSQLQAAVTSLKNNGIQVYGDVVMNHKGGADATEMVRAVEVNPNNRNQEVTGEYTIEAWTRFDFPGRGNTHSSFKWRWYHFDGVDWDQSRRTSNRIYKFRGKAWDWEVDTEFGNYDYLMYTDYDMDHPEVVNELRNWGVWYTNTLGLDGFRIDAVKHIKYSFTRDWINHVRSATGKNMFAVAEFWKNDLGAIENYLQKTNWNHSVFDVPLHYNLYNASKSGGNYDMRNIFNGTVVQRHPSHAVTFVDNHDSQPEEALESFVEEWFKPLAYALTLTREQGYPSVFYGDYYGIPTHGVPAMRSKIDPILEARQKYAYGPQHDYLDHPDVIGWTREGDSSHPKSGLATLITDGPGGSKRMYAGLKNAGETWYDITGNRSDTVKIGSDGWGEFHVNDGSVSIYVQK

SEQ ID NO: 39299 - protein, 478 aa, Bacillus sp.
NGTMMQYFEWYLPNDGNHWNRLNSDASNLKSKGITAVWIPPAWKGASQNDVGYGAYDLYDLGEFNQKGTVRTKYGTRSQLQAAVTSLKNNGIQVYGDVVMNHKGGADATEMVRAVEVNPNNRNQEVTGEYTIEAWTRFDFPGRGNTHSSFKWRWYHFDGVDWDQSRRLNNRIYKFRGKAWDWEVDTEFGNYDYLMYADYDMDHPEVVNELRNWGVWYTNTLGLDGFRIDAVKHIKYSFTRDWINHVRSATGKNMFAVAEFWRNDLGGIENYLQKTNWNHSVFDVPLHYNLYNASKSGGNYDMRNIFNGTVVQRHPSHAVTFVDNHDSQPEEALESFVEEWFKPLAYALTLTREQGYPSVFYGDYYGIPTHGVPAMRSKIDPILEARQKYAYGPQHDYLDHPDVIGWTREGDSSHPKSGLATLITDGPGGSKRMYAGLKNAGETWYDITGNRSDTVKIGSDGWGEFHVNDGSVSIYVQK

SEQ ID NO: 39300 - protein, 478 aa, Bacillus sp.
NGTMMQYFEWYLPNDGNHWNRLNSDASNLKSKGITAVWIPPAWKGASQNDVGYGAYDLYDLGEFNQKGTVRTKYGTRSQLQAAVTSLKNNGIQVYGDVVMNHKGGADATEMVRAVEVNPNNRNQEVTGEYTIEAWTRFDFPGRGNTHSSFKWRWYHFDGVDWDQSRRFNNRIYKFRGKAWDWEVDTEFGNYDYLMYADYDMDHPEVVNELRNWGVWYTNTLGLDGFRIDAVKHIKYSFTRDWINHVRSATGKNMFAVAEFWKNDLGAIENYLQKTNWNHSVFDVPLHYNLYNASKSGGNYDMRNIFNGTVVQRHPSHAVTFVDNHDSQPEEALESFVEEWFKPLAYALTLTREQGYPSVFYGDYYGIPTHGVPAMRSKIDPILEARQKYAYGPQHDYLDHPDVIGWTREGDSSHPKSGLATLITDGPGGSKRMYAGLKNAGETWYDITGNRSDTVKIGSDGWGEFHVNDGSVSIYVQK

SEQ ID NO: 39301 - protein, 478 aa, Bacillus sp.
NGTMMQYFEWYLPNDGNHWNRLNSDASNLKSKGITAVWIPPAWKGASQNDVGYGAYDLYDLGEFNQKGTVRTKYGTRSQLQAAVTSLKNNGIQVYGDVVMNHKGGADATEMVRAVEVNPNNRNQEVTGEYTIEAWTRFDFPGRGNTHSSFKWRWYHFDGVDWDQSRRLNNRIYKFRGKAWDWEVDTEFGNYDYLMYADYDWDHPEVVNELRNWGVWYTNTLGLDGFRIDAVKHIKYSFTRDWINHVRSATGKNMFAVAEFWKNDLGAIENYLQKTNWNHSVFDVPLHYNLYNASKSGGNYDMRNIFNGTVVQRHPSHAVTFVDNHDSQPEEALESFVEEWFKPLAYALTLTREQGYPSVFYGDYYGIPTHGVPAMRSKIDPILEARQKYAYGPQHDYLDHPDVIGWTREGDSSHPKSGLATLITDGPGGSKRMYAGLKNAGETWYDITGNRSDTVKIGSDGWGEFHVNDGSVSIYVQK

SEQ ID NO: 39302 - protein, 478 aa, Bacillus sp.
NGTMMQYFEWYLPNDGNHWNRLNSDASNLKSKGITAVWIPPAWKGASQNDVGYGAYDLYDLGEFNQKGTVRTKYGTRSQLQAAVTSLKNNGIQVYGDVVMNHKGGADATEMVRAVEVNPNNRNQEVTGEYTIEAWTRFDFPGRGNTHSSFKWRWYHFDGVDWDQSRRLNNRIYKFRGKAWDWEVDTEFGNYDYLMYADYDMDHPEVVNEFRNWGVWYTNTLGLDGFRIDAVKHIKYSFTRDWINHVRSATGKNMFAVAEFWKNDLGAIENYLQKTNWNHSVFDVPLHYNLYNASKSGGNYDMRNIFNGTVVQRHPSHAVTFVDNHDSQPEEALESFVEEWFKPLAYALTLTREQGYPSVFYGDYYGIPTHGVPAMRSKIDPILEARQKYAYGPQHDYLDHPDVIGWTREGDSSHPKSGLATLITDGPGGSKRMYAGLKNAGETWYDITGNRSDTVKIGSDGWGEFHVNDGSVSIYVQK

SEQ ID NO: 39303 - protein, 478 aa, Bacillus sp.
NGTMMQYFEWYLPNDGNHWNRLNSDASNLKSKGITAVWIPPAWKGISQNDVGYGAYDLYDLGEFNQKGTVRTKYGTRSQLQAAVTSLKNNGIQVYGDVVMNHKGGADATEMVRAVEVNPNNRNQEVTGEYTIEAWTRFDFPGRGNTHSSFKWRWYHFDGVDWDQSRRFNNRIYKFRGKAWDWEVDTEFGNYDYLMYADYDMDHPEVVNELRNWGVWYTNTLGLDGFRIDAVKHIKYSFTRDWINHVRSATGKNMFAVAEFWKNDLGAIENYLQKTNWNHSVFDVPLHYNLYNASKSGGNYDMRNIFNGTVVQRHPSHAVTFVDNHDSQPEEALESFVEEWFKPLAYALTLTREQGYPSVFYGDYYGIPTHGVPAMRSKIDPILEARQKYAYGPQHDYLDHPDVIGWTREGDSSHPKSGLATLITDGPGGSKRMYAGLKNAGETWYDITGNRSDTVKIGSDGWGEFHVNDGSVSIYVQK

SEQ ID NO: 39304 - protein, 478 aa, Synthetic construct
NGTMMQYFEWYLPNDGNHWNRLNSDASNLKSKGITAVWIPPAWKGASQNDVGYGAYDLYDLGEFNQKGTVRTKYGTRSQLQAAVTSLKNNGIQVYGDVVMNHKGGADATEMVRAVEVNPNNRNQEVTGEYTIEAWTRFDFPGRGNTHSSFKWRWYHFDGVDWDQSRRLNNRIYKFRGKAWDWEVDTENGNYDYLMYADIDMDHPELVNELRNWGVWYTNTLGLDGFRIDAVKHIKYSFTRDWINHVRSATGKNMFAVAEFWKNDLGAIENYLQKTNWNHSVFDVPLHYNLYNASKSGGNYDMRNIFNGTVVQRHPSHAVTFVDNHDSQPEEALESFVEEWFKPLAYALTLTREQGYPSVFYGDYYGIPTHGVPAMRSKIDPILEARQKYAYGPQHDYLDHPDVIGWTREGDSSHPKSGLATLITDGPGGSKRMYAGLKNAGETWYDITGNRSDTVKIGSDGWGEFHVNDGSVSIYVQK

SEQ ID NO: 39305 - protein, 478 aa, Bacillus sp.
NGTMMQYFEWYLPNDGNHWNRLNSDASNLKSKGITAVWIPPAWKGTSQNDVGYGAYDLYDLGEFNQKGTVRTKYGTRSQLQAAVTSLKNNGIQVYGDVVMNHKGGADATEMVRAVEVNPNNRNQEVTGEYTIEAWTRFDFPGRGNTHSSFKWRWYHFDGVDWDQSRQTNNRIYKFRGKAWDWEVDTEFGNYDYLMYADYDMDHPEVVNELRNWGVWYTNTLGLDGFRIDAVKHIKYSFTRDWINHVRSATGKNMFAVAEFWKNDLGAIENYLQKTNWNHSVFDVPLHYNLYNASKSGGNYDMRNIFNGTVVQRHPSHAVTFVDNHDSQPEEALESFVEEWFKPLAYALTLTREQGYPSVFYGDYYGIPTHGVPAMRSKIDPILEARQKYAYGPQHDYLDHPDVIGWTREGDSSHPKSGLATLITDGPGGSKRMYAGLKNAGETWYDITGNRSDTVKIGSDGWGEFHVNDGSVSIYVQK

SEQ ID NO: 39306 - protein, 478 aa, Synthetic construct
NGTMMQYFEWYLPNDGNHWNRLNSDASNLKSKGITAVWIPPAWKGASQNDVGYGAYDLYDLGEFNQKGTVRTKYGTRSQLQAAVTSLKNNGIQVYGDVVMNHKGGADATEMVRAVEVNPNNRNQEVTGEYTIEAWTRFDFPGRGNTHSSFKWRWYHFDGVDWDQSRRLNNRIYKFRGKAWDWEVDTENGNYDYLMYADYDMDYPEVVNELRNWGVWYTNTLGLDGFRIDAVKHIKYSFTRDWINHVRSATGKNMFAVAEFWKNDLGAIENYLQKTNWNHSVFDVPLHYNLYNASKSGGNYDMRNIFNGTVVQRHPSHAVTFVDNHDSQPEEALESFVEEWFKPLAYALTLTREQGYPSVFYGDYYGIPTHGVPAMRSKIDPILEARQKYAYGPQHDYLDHPDVIGWTREGDSSHPKSGLATLITDGPGGSKRMYAGLKNAGETWYDITGNRSDTVKIGSDGWGEFHVNDGSVSIYVQK

SEQ ID NO: 39307 - protein, 478 aa, Bacillus sp.
NGTMMQYFEWYLPNDGNHWNRLNSDASNLKSKGITAVWIPPAWKGASQNDVGYGAYDLYDLGEFNQKGTVRTKYGTRSQLQAAVTSLKNNGIQVYGDVVMNHKGGADATEMVRAVEVNPNNRNQEVTGEYTIEAWTRFDFPGRGNTHSSFKWRWYHFDGVDWDQSRRLNNRIYKFRGKAWDWEVDTEFGNYDYLMYADYDMDHPEVVNELRNWGVWYTNTLGLDGFRIDAVKHIKYSFTRDWINHVRSATGKNMFAVAEFWKNDLGGIENYLQKTNWNHSVFDVPLHYNLYNASKSGGNYDMRNIFNGTVVQRHPSHAVTFVDNHDSQPEEALESFVEEWFKPLAYALTLTREQGYPSVFYGDYYGIPTHGVPAMRSKIDPILEARQKYAYGPQHDYLDHPDVIGWTREGDSSHPKSGLATLITDGPGGSKRMYAGLKNAGETWYDITGNRSDTVKIGSDGWGEFHVNDGSVSIYVQK

SEQ ID NO: 39308 - protein, 478 aa, Bacillus sp.
NGTMMQYFEWYLPNDGNHWNRLNSDASNLKSKGITAVWIPPAWKGASQNDVGYGAYDLYDLGEFNQKGTVRTKYGTRSQLQAAVTSLKNNGIQVYGDVVMNHKGGADATEMVRAVEVNPNNRNQEVTGEYTIEAWTRFDFPGRGNTHSSFKWRWYHFDGVDWDQSRRLNNRIYKFRGKAWDWEVDTEFGNYDYLMYADYDMDHPEVVNELRNWGVWYTNTLGLDGFRIDAVKHIKYSFTRDWINHVRSATGKNMFAVAEFWKNDLGAIENYLQKTNWNHSVFDVPLHYNLYNASKSGGNYDMRNIFNGTVVQRHPSHAVTFVDNHDSQPEEALESFVETWFKPLAYALTLTREQGYPSVFYGDYYGIPTHGVPAMRSKIDPILEARQKYAYGPQHDYLDHPDVIGWTREGDSSHPKSGLATLITDGPGGSKRMYAGLKNAGETWYDITGNRSDTVKIGSDGWGEFHVNDASVSIYVQK

SEQ ID NO: 39309 - protein, 478 aa, Bacillus sp.
NGTMMQYFEWYLPNDGNHWNRLNSDASNLKSKGITAVWIPPAWKGASQNDVGYGAYDLYDLGEFNQKGTVRTKYGTRSQLQAAVTSLKNNGIQVYGDVVMNHKGGADATEMVRAVEVNPNNRNQEVTGEYTIEAWTRFDFPGRGNTHSSFKWRWYHFDGVDWDQSRRLNNRIYKFRGKAWDWEVDTEFGNYDYLMYADYDMDHPEVVNELRNWGVWYTNTLGLDGFRIDAVKHIKYSFTRDWINHVRSATGKNMFAVAEFWNNDLGAIENYLQKTNWNHSVFDVPLHYNLYNASKSGGNYDMRNIFNGTVVQRHPSHAVTFVDNHDSQPEEALESFVEEWFKPLAYALTLTREQGYPSVFYGDYYGIPTHGVPAMRSKIDPILEARQKYAYGPQHDYLDHPDVIGWTREGDSSHPKSGLATLITDGPGGSKRMYAGLKNAGETWYDITGNRSDTVKIGSDGWGEFHVNDGSVSIYVQK

SEQ ID NO: 39310 - protein, 478 aa, Bacillus sp.
NGTMMQYFEWYLPNDGNHWNRLNSDASNLKSKGITAVWIPPAWKAASQNDVGYGAYDLYDLGEFNQKGTVRTKYGTRSQLQAAVTSLKNNGIQVYGDVVMNHKGGADATEMVRAVEVNPNNRNQEVTGEYTIEAWTRFDFPGRGNTHSSFKWRWYHFDGVDWDQSRQINNRIYKFRGKAWDWEVDTEFGNYDYLMYADYDMDHPEVVNELRNWGVWYTNTLGLDGFRIDAVKHIKYSFTRDWINHVRSATGKNMFAVAEFWKNDLGAIENYLQKTNWNHSVFDVPLHYNLYNASKSGGNYDMRNIFNGTVVQRHPSHAVTFVDNHDSQPEEALESFVEEWFKPLAYALTLTREQGYPSVFYGDYYGIPTHGVPAMRSKIDPILEARQKYAYGPQHDYLDHPDVIGWTREGDSSHPKSGLATLITDGPGGSKRMYAGLKNAGETWYDITGNRSDTVKIGSDGWGEFHVNDGSVSIYVQK

SEQ ID NO: 39311 - protein, 478 aa, Bacillus sp.
NGTMMQYFEWYLPNDGNHWNRLNSDASNLKSKGITAVWIPPAWKGISQNDVGYGAYDLYDLGEFNQKGTVRTKYGTRSQLQAAVTSLKNNGIQVYGDVVMNHKGGADATEMVRAVEVNPNNRNQEVTGEYTIEAWTRFDFPGRGNTHSSFKWRWYHFDGVDWDQSRELTNRIYKFRGKAWDWEVDTEFGNYDYLMYADYDMDHPEVVNELRNWGVWYTNTLGLDGFRIDAVKHIKYSFTRDWINHVRSATGKNMFAVAEFWKNDLGAIENYLQKTNWNHSVFDVPLHYNLYNASKSGGNYDMRNIFNGTVVQRHPSHAVTFVDNHDSQPEEALESFVEEWFKPLAYALTLTREQGYPSVFYGDYYGIPTHGVPAMRSKIDPILEARQKYAYGPQHDYLDHPDVIGWTREGDSSHPKSGLATLITDGPGGSKRMYAGLKNAGETWYDITGNRSDTVKIGSDGWGEFHVNDGSVSIYVQK

SEQ ID NO: 39312 - protein, 478 aa, Bacillus sp.
NGTMMQYFEWYLPNDGNHWNRLNSDASNLKSKGITAVWIPPAWKGASQNDVGYGAYDLYDLGEFNQKGTVRTKYGTRSQLQAAVTSLKNNGIQVYGDVVMNHKGGADATEMVRAVEVNPNNRNQEVTGEYTIEAWTRFDFPGRGNTHSSFKWRWYHFDGVDWDQSRRLNNRIYKFGGKAWDWEVDTEFGNYDYLMYADYDMDHPEVVNELRNWGVWYTNTLGLDGFRIDAVKHIKYSFTRDWINHVRSATGKNMFAVAEFWKNDLGAIENYLQKTNWNHSVFDVPLHYNLYNASKSGGNYDMRNIFNGTVVQRHPSHAVTFVDNHDSQPEEALESFVEEWFKPLAYALTLTREQGYPSVFYGDYYGIPTHGVPAMRSKIDPILEARQKYAYGPQHDYLDHPDVIGWTREGDSSHPKSGLATLITDGPGGSKRMYAGLKNAGETWYDITGNRSDTVKIGSDGWGEFHVNDGSVSIYVQK

SEQ ID NO: 39313 - protein, 478 aa, Bacillus sp.
NGTMMQYFEWYLPNDGNHWNRLNSDASNLKSKGITAVWIPPAWKAASQNDVGYGAYDLYDLGEFNQKGTVRTKYGTRSQLQAAVTSLKNNGIQVYGDVVMNHKGGADATEMVRAVEVNPNNRNQEVTGEYTIEAWTRFDFPGRGNTHSSFKWRWYHFDGVDWDQSRRTSNRIYKFRGKAWDWEVDTEFGNYDYLMYADYDMDHPEVVNELRNWGVWYTNTLGLDGFRIDAVKHIKYSFTRDWINHVRSATGKNMFAVAEFWKNDLGAIENYLQKTNWNHSVFDVPLHYNLYNASKSGGNYDMRNIFNGTVVQRHPSHAVTFVDNHDSQPEEALESFVEEWFKPLAYALTLTREQGYPSVFYGDYYGIPTHGVPAMRSKIDPILEARQKYAYGPQHDYLDHPDVIGWTREGDSSHPKSGLATLITDGPGGSKRMYAGLKNAGETWYDITGNRSDTVKIGSDGWGEFHVNDGSVSIYVQK

SEQ ID NO: 39314 - protein, 478 aa, Synthetic construct
NGTMMQYFEWYLPNDGNHWNRLNSDASNLKSKGITAVWIPPAWKGASQNDVGYGAYDLYDLGEFNQKGTVRTKYGTRSQLQAAVTSLKNNGIQVYGDVVMNHKGGADATEMVRAVEVNPNNRNQEVTGEYTIEAWTRFDFPGRGNTHSSFKWRWYHFDGVDWDQSRRLNNRIYKFRGKAWDWEVDTENGNYDYLMYTDIDMDHPEVVNELRNWGVWYTNTLGLDGFRIDAVKHIKYSFTRDWINHVRSATGKNMFAVAEFWKNDLGAIENYLQKTNWNHSVFDVPLHYNLYNASKSGGNYDMRNIFNGTVVQRHPSHAVTFVDNHDSQPEEALESFVEEWFKPLAYALTLTREQGYPSVFYGDYYGIPTHGVPAMRSKIDPILEARQKYAYGPQHDYLDHPDVIGWTREGDSSHPKSGLATLITDGPGGSKRMYAGLKNAGETWYDITGNRSDTVKIGSDGWGEFHVNDGSVSIYVQK

SEQ ID NO: 39315 - protein, 478 aa, Bacillus sp.
NGTMMQYFEWYLPNDGNHWNRLNSDASNLKSKGITAVWIPPAWKGASQNDVGYGAYDIYDLGEFNQKGTVRTKYGTRSQLQAAVTSLKNNGIQVYGDVVMNHKGGADATEMVRAVEVNPNNRNQEVTGEYTIEAWTRFDFPGRGNTHSSFKWRWYHFDGVDWDQSRRLNNRIYKFRGKAWDWEVDTENGFYDYLMYADIDYDHPSVVNELRNWGVWYTNTLGLDGFRIDAVKHIKYSFTRDWINHVRSATGKNMFAVAEFWKNDLGAIENYLQKTNWNHSVFDVPLHYNLYNASKSGGNYDMRNIFNGTVVQRHPSHAVTFVDNHDSQPEEALESFVEEWFKPLAYALTLTREQGYPSVFYGDYYGIPTHGVPAMRSKIDPILEARQKYAYGPQHDYLDHPDVIGWTREGDSSHPKSGLATLITDGPGGSKRMYAGLKNAGETWYDITGNRSDTVKIGSDGWGEFHVNDGSVSIYVQK

SEQ ID NO: 39316 - protein, 478 aa, Synthetic construct
NGTMMQYFEWYLPNDGNHWNRLNSDASNLKSKGITAVWIPPAWKGASQNDVGYGAYDLYDLGEFNQKGTVRTKYGTRSQLQAAVTSLKNNGIQVYGDVVMNHKGGADITEMVRAVEVNPNNRNQEVTGEYTIEAWTRFDFPGRGNTHSSFKWRWYHFDGVDWDQSRRLNNRIYKFRGKAWDWEVDTENGNYDYLMYADIDMDHPEVVNELRNWGVWYTNTLGLDGFRIDAVKHIKYSFTRDWINHVRSATGKNMFAVAEFWKNDLGAIENYLQKTNWNHSVFDVPLHYNLYNASKSGGNYDMRNIFNGTVVQRHPSHAVTFVDNHDSQPEEALESFVEEWFKPLAYALTLTREQGYPSVFYGDYYGIPTHGVPAMRSKIDPILEARQKYAYGPQHDYLDHPDVIGWTREGDSSHPKSGLATLITDGPGGSKRMYAGLKNAGETWYDITGNRSDTVKIGSDGWGEFHVNDGSVSIYVQK

SEQ ID NO: 39317 - protein, 478 aa, Synthetic construct
NGTMMQYFEWYLPNDGNHWNRLNSDASNLKSKGITAVWIPPAWKGASQNDVGYGAYDLYDLGEFNQKGTVRTKYGTRSQLQAAVTSLKNNGIQVYGDVVMNHKGGADATEMVRAVEVNPNNRNQEVTGEYTIETWTRFDFPGRGNTHSSFKWRWYHFDGVDWDQSRRLNNRIYKFRGKAWDWEVDTENGNYDYLMYADIDMDHPEVVNELRNWGVWYTNTLGLDGFRIDAVKHIKYSFTRDWINHVRSATGKNMFAVAEFWKNDLGAIENYLQKTNWNHSVFDVPLHYNLYNASKSGGNYDMRNIFNGTVVQRHPSHAVTFVDNHDSQPEEALESFVEEWFKPLAYALTLTREQGYPSVFYGDYYGIPTHGVPAMRSKIDPILEARQKYAYGPQHDYLDHPDVIGWTREGDSSHPKSGLATLITDGPGGSKRMYAGLKNAGETWYDITGNRSDTVKIGSDGWGEFHVNDGSVSIYVQK

SEQ ID NO: 39318 - protein, 478 aa, Bacillus sp.
NGTMMQYFEWYLPNDGNHWNRLNSDASNLKSKGITAVWIPPAWKGASQNDVGYGAYDLYDLGEFNQKGTVRTKYGTRSQLQAAVTSLKNNGIQVYGDVVMNHKGGADATEMVRAVEVNPNNRNQEVTGEYTIEAWTRFDFPGRGNTHSSFKWRWYHFDGVDWDQSRRLNNRIYKFRGKAWDWEVDTEFGNYDYLMYADYDMDHPEVVNELRSWGVWYTNTLGLDGFRIDAVKHIKYSFTRDWINHVRSATGKNMFAVAEFWKNDLGAIENYLQKTNWNHSVFDVPLHYNLYNASKSGGNYDMRNIFNGTVVQRHPSHAVTFVDNHDSQPEEALESFVEEWFKPLAYALTLTREQGYPSVFYGDYYGIPTHGVPAMRSKIDPILEARQKYAYGPQHDYLDHPDVIGWTREGDSSHPKSGLATLITDGPGGSKRMYAGLKNAGETWYDITGNRSDTVKIGSDGWGEFHVNDGSVSIYVQK

SEQ ID NO: 39319 - protein, 478 aa, Synthetic construct
NGTMMQYFEWYLPNDGNHWNRLNSDASNLKSKGITAVWIPPAWKGASQNDVGYGAYDVYDLGEFNQKGTVRTKYGTRSQLQAAVTSLKNNGIQVYGDVVMNHKGGADATEMVRAVEVNPNNRNQEVTGEYTIEAWTRFDFPGRGNTHSSFKWRWYHFDGVDWDQSRRLNNRIYKFRGKAWDWEVDTENGNYDYLMYADYDMDHPEVVNELRNWGVWYTNTLGLDGFRIDAVKHIKYSFTRDWINHVRSATGKNMFAVAEFWKNDLGAIENYLQKTNWNHSVFDVPLHYNLYNASKSGGNYDMRNIFNGTVVQRHPSHAVTFVDNHDSQPEEALESFVEEWFKPLAYALTLTREQGYPSVFYGDYYGIPTHGVPAMRSKIDPILEARQKYAYGPQHDYLDHPDVIGWTREGDSSHPKSGLATLITDGPGGSKRMYAGLKNAGETWYDITGNRSDTVKIGSDGWGEFHVNDGSVSIYVQK

SEQ ID NO: 39320 - protein, 478 aa, Bacillus sp.
NGTMMQYFEWYLPNDGNHWNRLNSDASNLKSKGITAVWIPPAWKGASQNDVGYGAYDLYDLGEFNQKGTVRTKYGTRSQLQAAVTSLKNNGIQVYGDVVMNHKGGADATEMVRAVEVNPNNRNQEVTGEYTIEAWTRFDFPGRGNTHSSFKWRWYHFDGVDWDQSRRLNNRIYKFRGKAWDWEVDTEFGNYDYLMYADYDMDHPEVVGELRNWGVWYTNTLGLDGFRIDAVKHIKYSFTRDWINHVRSATGKNMFAVAEFWKNDLGAIENYLQKTNWNHSVFDVPLHYNLYNASKSGGNYDMRNIFNGTVVQRHPSHAVTFVDNHDSQPEEALESFVEEWFKPLAYALTLTREQGYPSVFYGDYYGIPTHGVPAMRSKIDPILEARQKYAYGPQHDYLDHPDVIGWTREGDSSHPKSGLATLITDGPGGSKRMYAGLKNAGETWYDITGNRSDTVKIGSDGWGEFHVNDGSVSIYVQK

SEQ ID NO: 39321 - protein, 478 aa, Bacillus sp.
NGTMMQYFEWYLPNDGNHWNRLNSDASNLKSKGITAVWIPPAWKGASQNDVGYGAYDLYDLGEFNQKGTVRTKYGTRSQLQAAVTSLKNNGIQVYGDVVMNHKGGADATEMVRAVEVNPNNRNQEVTGEYTIEAWTRFDFPGRGNTHSSFKWRWYHFDGVDWDQSRRLNNRIYKFRGKAWDWEVDTEFGNYDYLMYADYDMDHPEVVNEMRNWGVWYTNTLGLDGFRIDAVKHIKYSFTRDWINHVRSATGKNMFAVAEFWKNDLGAIENYLQKTNWNHSVFDVPLHYNLYNASKSGGNYDMRNIFNGTVVQRHPSHAVTFVDNHDSQPEEALESFVEEWFKPLAYALTLTREQGYPSVFYGDYYGIPTHGVPAMRSKIDPILEARQKYAYGPQHDYLDHPDVIGWTREGDSSHPKSGLATLITDGPGGSKRMYAGLKNAGETWYDITGNRSDTVKIGSDGWGEFHVNDGSVSIYVQK

SEQ ID NO: 39322 - protein, 478 aa, Synthetic construct
NGTMMQYFEWYLPNDGNHWNRLNSDASNLKSKGITAVWIPPAWKGASQNDVGYGAYDLYDLGEFNQKGTVRTKYGTRSQLQAAVTSLKNNGIQVYGDVVMNHKGGADATEMVRAVEVNPNNRNQEVTGEYTIEAWTRFDFPGRGNTHSSFKWRWYHFDGVDWDQSRRLNNRIYKFRGKAWDWEVDTENGNYDYLMYADIDMDHPEVVNELRNWGVWYTNTLGLDGFRIDAVKHIKYSFTRDWINHVRSATGKNMFAVAEFWKNDLGAIENYLQKTNWNHSVFDVPLHYNLYNASKSGGNYDMRNIFNGTVVQRHPSHAVTFVDNHDSQPEEALESFVEEWFKPLAYALTLTREQGYPSVFYGDYYGIPTHGVPAMRSKIDPILEARQKYAYGPQHDYLDHPDVIGWTREGDSSHPKSGLATLITDGPGGSKRMYAGLKNAGETWYDITGNRSDTVKIGSDGWGEFHVNDGSVSIWVQK

SEQ ID NO: 39323 - protein, 478 aa, Synthetic construct
NGTMMQYFEWYLPNDGNHWNRLNSDASNLKSKGITAVWIPPAWKGASQNDVGYGAYDLYDLGEFNQKGTVRTKYGTRSQLQAAVTSLKNNGIQVYGDVVMNHKGGADATEMVRAVEVNPNNRNQEVTGEYTIEAWTRFDFPGRGNTHSSFKWRWYHFDGVDWDQSRRLNNRIYKFRGKAWDWEVDTEFGNYDYLMYADIDMDHPEVVNELRNWGVWYTNTLGLDGFRIDAVKHIKYSFTRDWINHVRSATGKNMFAVAEFWKNDLGAIENYLQKTNWNHSVFDVPLHYNLYNASKSGGNYDMRNIFNGTVVQRHPSHAVTFVDNHDSQPEEALESFVEEWFKPLAYALTLTREQGYPSVFYGDYYGIPTHGVPAMRSKIDPILEARQKYAYGPQHDYLDHPDVIGWTREGDSSHPKSGLATLITDGPGGSKRMYAGLKNAGETWYDITGNRSDTVKIGSDGWGEFHVNDGSVSIYVQK

SEQ ID NO: 39324 - protein, 478 aa, Bacillus sp.
NGTMMQYFEWYLPNDGNHWNRLNSDASNLKSKGITAVWIPPAWKAASQNDVGYGAYDLYDLGEFNQKGTVRTKYGTRSQLQAAVTSLKNNGIQVYGDVVMNHKGGADATEMVRAVEVNPNNRNQEVTGEYTIEAWTRFDFPGRGNTHSSFKWRWYHFDGVDWDQSRDTSNRIYKFRGKAWDWEVDTEFGNYDYLMYADYDMDHPEVVNELRNWGVWYTNTLGLDGFRIDAVKHIKYSFTRDWINHVRSATGKNMFAVAEFWKNDLGAIENYLQKTNWNHSVFDVPLHYNLYNASKSGGNYDMRNIFNGTVVQRHPSHAVTFVDNHDSQPEEALESFVEEWFKPLAYALTLTREQGYPSVFYGDYYGIPTHGVPAMRSKIDPILEARQKYAYGPQHDYLDHPDVIGWTREGDSSHPKSGLATLITDGPGGSKRMYAGLKNAGETWYDITGNRSDTVKIGSDGWGEFHVNDGSVSIYVQK

SEQ ID NO: 39325 - protein, 478 aa, Bacillus sp.
NGTMMQYFEWYLPNDGNHWNRLNSDASNLKSKGITAVWIPPAWKGASQNDVGYGAYDLYDLGEFNQKGTVRTKYGTRSQLQAAVTSLKNNGIQVYGDVVMNHKGGADATEMVRAVEVNPNNRNQEVTGEYTIEAWTRFDFPGRGNTHSSFKWRWYHFDGMDWDQSRRLNNRIYKFRGKAWDWEVDTEFGNYDYLMYADYDMDHPEVVNELRNWGVWYTNTLGLDGFRIDAVKHIKYSFTRDWINHVRSATGKNMFAVAEFWKNDLGAIENYLQKTNWNHSVFDVPLHYNLYNASKSGGNYDMRNIFNGTVVQRHPSHAVTFVDNHDSQPEEALESFVEEWFKPLAYALTLTREQGYPSVFYGDYYGIPTHGVPAMRSKIDPILEARQKYAYGPQHDYLDHPDVIGWTREGDSSHPKSGLATLITDGPGGSKRMYAGLKNAGETWYDITGNRSDTVKIGSDGWGEFHVNDGSVSIYVQK

SEQ ID NO: 39326 - protein, 478 aa, Bacillus sp.
NGTMMQYFEWYLPNDGNHWNRLNSDASNLKSKGITAVWIPPAWKATSQNDVGYGAYDLYDLGEFNQKGTVRTKYGTRSQLQAAVTSLKNNGIQVYGDVVMNHKGGADATEMVRAVEVNPNNRNQEVTGEYTIEAWTRFDFPGRGNTHSSFKWRWYHFDGVDWDQSREINNRIYKFRGKAWDWEVDTEFGNYDYLMYADYDMDHPEVVNELRNWGVWYTNTLGLDGFRIDAVKHIKYSFTRDWINHVRSATGKNMFAVAEFWKNDLGAIENYLQKTNWNHSVFDVPLHYNLYNASKSGGNYDMRNIFNGTVVQRHPSHAVTFVDNHDSQPEEALESFVEEWFKPLAYALTLTREQGYPSVFYGDYYGIPTHGVPAMRSKIDPILEARQKYAYGPQHDYLDHPDVIGWTREGDSSHPKSGLATLITDGPGGSKRMYAGLKNAGETWYDITGNRSDTVKIGSDGWGEFHVNDGSVSIYVQK

SEQ ID NO: 39327 - protein, 478 aa, Synthetic construct
NGTMMQYFEWYLPNDGNHWNRLNSDASNLKSKGITAVWIPPAWKGASQNDVGYGAYDLYDLGEFNQKGTVRTKYGTRSQLQAAVTSLKNNGIQVYGDVVMNHKGGADATEMVRAVEVNPNNRNQEVTGEYTIEAWTRFDFPGRGNTHSSFKWRWYHFDGVDWDQSRRLNNRIYKFRGKAWDWEVDTENGNYDYLMYADIDMDHREVVNELRNWGVWYTNTLGLDGFRIDAVKHIKYSFTRDWINHVRSATGKNMFAVAEFWKNDLGAIENYLQKTNWNHSVFDVPLHYNLYNASKSGGNYDMRNIFNGTVVQRHPSHAVTFVDNHDSQPEEALESFVEEWFKPLAYALTLTREQGYPSVFYGDYYGIPTHGVPAMRSKIDPILEARQKYAYGPQHDYLDHPDVIGWTREGDSSHPKSGLATLITDGPGGSKRMYAGLKNAGETWYDITGNRSDTVKIGSDGWGEFHVNDGSVSIYVQK

SEQ ID NO: 39328 - protein, 478 aa, Bacillus sp.
NGTMMQYFEWYLPNDGNHWNRLNSDASNLKSKGITAVWIPPAWKGASQNDVGYGAYDLYDLGEFNQKGTVRTKYGTRSQLQAAVTSLKNNGIQVYGDVVMNHKGGADATEMVRAVEVNPNNRNQEVTGEYTIEAWTRFDFPGRGNTHSSFKWRWYHFDGVDWDQSRETSNRIYKFRGKAWDWEVDTEFGNYDYLMYTDYDMDHPEVVNELRNWGVWYTNTLGLDGFRIDAVKHIKYSFTRDWINHVRSATGKNMFAVAEFWKNDLGAIENYLQKTNWNHSVFDVPLHYNLYNASKSGGNYDMRNIFNGTVVQRHPSHAVTFVDNHDSQPEEALESFVEEWFKPLAYALTLTREQGYPSVFYGDYYGIPTHGVPAMRSKIDPILEARQKYAYGPQHDYLDHPDVIGWTREGDSSHPKSGLATLITDGPGGSKRMYAGLKNAGETWYDITGNRSDTVKIGSDGWGEFHVNDGSVSIYVQK

SEQ ID NO: 39329 - protein, 478 aa, Bacillus sp.
NGTMMQYFEWYLPNDGNHWNRLNSDASNLKSKGITAVWIPPAWKGASQNDVGYGAYDLYDLGEFNQKGTVRTKYGTRSQLQAAVTSLKNNGIQVYGDVVMNHKGGADATEMVRAVEVNPNNRNQEVTGEYTIEAWTRFDFPGRGNTHSSFKWRWYHFDGVDWDQSRRLNNRIYKFRGKAWDWEVDTENGNYDYLMYADIDFDYPEVVNELRVWGVWYTNTLGLDGFRIDAVKHIKYSFTRDWINHVRSATGKNMFAVAEFWKNDLGAIENYLQKTNWNHSVFDVPLHYNLYNASKSGGNYDMRNIFNGTVVQRHPSHAVTFVDNHDSQPEEALESFVEEWFKPLAYALTLTREQGYPSVFYGDYYGIPTHGVPAMRSKIDPILEARQKYAYGPQHDYLDHPDVIGWTREGDSSHPKSGLATLITDGPGGSKRMYAGLKNAGETWYDITGNRSDTVKIGSDGWGEFHVNDGSVSIYVQK

SEQ ID NO: 39330 - protein, 478 aa, Bacillus sp.
NGTMMQYFEWYLPNDGNHWNRLNSDASNLKSKGITAVWIPPAWKGASQNDVGYGAYDLYDLGEFNQKGTVRTKYGTRSQLQAAVTSLKNNGIQVYGDVVMNHKGGADATEMVRAVEVNPNNRNQEVTGEYTIEAWTRFDFPGRGNTHSSFKWRWYHFDGVDWDQSRRLNNRIYKFRGKAWDWEVDTEFGNYDYLMYADYDMDHPEVVNELRNWGVWYTNTLGLDGFRIDAVKHIKYSFTRDWINHVRSATGKNMFAVAEFWKNDLGAIENYLQKTNWNHSVFDVPLHYNLYNASASGGNYDMRNIFNGTVVQRHPSHAVTFVDNHDSQPEEALESFVEEWFKPLAYALTLTREQGYPSVFYGDYYGIPTHGVPAMRSKIDPILEARQKYAYGPQHDYLDHPDVIGWTREGDSSHPKSGLATLITDGPGGSKRMYAGLKNAGETWYDITGNRSDTVKIGSDGWGEFHVNDGSVSIYVQK

SEQ ID NO: 39331 - protein, 478 aa, Bacillus sp.
NGTMMQYFEWYLPNDGNHWNRLNSDASNLKSKGITAVWIPPAWKGASQNDVGYGAYDLYDLGEFNQKGTVRTKYGTRSQLQAAVTSLKNNGIQVYGDVVMNHKGGADATEMVKAVEVNPNNRNQEVTGEYTIEAWTRFDFPGRGNTHSSFKWRWYHFDGVDWDQSRRLNNRIYKFRGKAWDWEVDTEFGNYDYLMYADYDMDHPEVVNELRNWGVWYTNTLGLDGFRIDAVKHIKYSFTRDWINHVRSATGKNMFAVAEFWKNDLGAIENYLQKTNWNHSVFDVPLHYNLYNASKSGGNYDMRNIFNGTVVQRHPSHAVTFVDNHDSQPEEALESFVEEWFKPLAYALTLTREQGYPSVFYGDYYGIPTHGVPAMRSKIDPILEARQKYAYGPQHDYLDHPDVIGWTREGDSSHPKSGLATLITDGPGGSKRMYAGLKNAGETWYDITGNRSDTVKIGSDGWGEFHVNDGSVSIYVQK

SEQ ID NO: 39332 - protein, 478 aa, Bacillus sp.
NGTMMQYFEWYLPNDGNHWNRLNSDASNLKSKGITAVWIPPAWKGASQNDVGYGAYDLYDLGEFNQKGTVRTKYGTRSQLQAAVTSLKNNGIQVYGDVVMNHKGGADATEMVRAVEVNPNNRNQEVTGEYTIEAWTRFDFPGRGNTHSSFKWRWYHFDGVDWDQSRRLNNRIYKFRGKAWDWEVDTEFGNYDYLMYADYDMDHPEVVNELRNWGVWYTNTLGLDGFRIDAVKHIKYSFTRDWINHVRSATGKNMFAVAEFWKNDLGAIENYLQKTNWNHSVFDVPLHYNLYNASKSGGNYDMRNIFNGTVVQRHPWHAVTFVDNHDSQPEEALESFVEEWFKPLAYALTLTREQGYPSVFYGDYYGIPTHGVPAMRSKIDPILEARQKYAYGPQHDYLDHPDVIGWTREGDSSHPKSGLATLITDGPGGSKRMYAGLKNAGETWYDITGNRSDTVKIGSDGWGEFHVNDGSVSIYVQK

SEQ ID NO: 39333 - protein, 478 aa, Synthetic construct
NGTMMQYFEWYLPNDGNHWNRLNSDASNLKSKGITAVWIPPAWKGASQNDVGYGAYDLYDLGEFNQKGTVRTKYGTRSQLQAAVTSLKNNGIQVYGDVVMNHKGGADATEMVRAVEVNPNNRNQEVTGEYTIEAWTRFDFPGRGNTHSSFKWRWYHFDGVDWDQSRRLNNRIYKFRGKAWDWEVDTENGNYDYLMYADIDMDSPEVVNELRNWGVWYTNTLGLDGFRIDAVKHIKYSFTRDWINHVRSATGKNMFAVAEFWKNDLGAIENYLQKTNWNHSVFDVPLHYNLYNASKSGGNYDMRNIFNGTVVQRHPSHAVTFVDNHDSQPEEALESFVEEWFKPLAYALTLTREQGYPSVFYGDYYGIPTHGVPAMRSKIDPILEARQKYAYGPQHDYLDHPDVIGWTREGDSSHPKSGLATLITDGPGGSKRMYAGLKNAGETWYDITGNRSDTVKIGSDGWGEFHVNDGSVSIYVQK

SEQ ID NO: 39334 - protein, 478 aa, Synthetic construct
NGTMMQYFEWYLPNDGNHWNRLNSDASNLKSKGITAVWIPPAWKGASQNDVGYGAYDLYDLGEFNQKGTVRTKYGTRSQLQAAVTSLKNNGIQVYGDVVMNHKGGADATEMVRAVEVNPNNRNQEVTGEYTIEAWTRFDFPGRGNTHSSFKWRWYHFDGVDWDQSRRLNNRIYKFRGKAWDWEVDTEKGNYDYLMYADIDMDHPEVVNELRNWGVWYTNTLGLDGFRIDAVKHIKYSFTRDWINHVRSATGKNMFAVAEFWKNDLGAIENYLQKTNWNHSVFDVPLHYNLYNASKSGGNYDMRNIFNGTVVQRHPSHAVTFVDNHDSQPEEALESFVEEWFKPLAYALTLTREQGYPSVFYGDYYGIPTHGVPAMRSKIDPILEARQKYAYGPQHDYLDHPDVIGWTREGDSSHPKSGLATLITDGPGGSKRMYAGLKNAGETWYDITGNRSDTVKIGSDGWGEFHVNDGSVSIYVQK

SEQ ID NO: 39335 - protein, 478 aa, Bacillus sp.
NGTMMQYFEWYLPNDGNHWNRLNSDASNLKSKGITAVWIPPAWKGASQNDVGYGAYDLYDLGEFNQKGTVRTKYGTRSQLQAAVTSLKNNGIQVYGDVVMNHKGGADATEMVGAVEVNPNNRNQEVTGEYTIEAWTRFDFPGRGNTHSSFKWRWYHFDGVDWDQSRRLNNRIYKFRGKAWDWEVDTEFGNYDYLMYADYDMDHPEVVNELRNWGVWYTNTLGLDGFRIDAVKHIKYSFTRDWINHVRSATGKNMFAVAEFWKNDLGAIENYLQKTNWNHSVFDVPLHYNLYNASKSGGNYDMRNIFNGTVVQRHPSHAVTFVDNHDSQPEEALESFVEEWFKPLAYALTLTREQGYPSVFYGDYYGIPTHGVPAMRSKIDPILEARQKYAYGPQHDYLDHPDVIGWTREGDSSHPKSGLATLITDGPGGSKRMYAGLKNAGETWYDITGNRSDTVKIGSDGWGEFHVNDGSVSIYVQK

SEQ ID NO: 39336 - protein, 478 aa, Synthetic construct
NGTMMQYFEWYLPNDGNHWNRLNSDASNLKSKGITAVWIPPAWKGASQNDVGYGAYDLYDLGEFNQKGTVRTKYGTRSQLQAAVTSLKNNGIQVYGDVVMNHKGGADATEMVRAVEVNPNNRNQEVTGEYTIEAWTRFDFPGRGNTHSSFKWRWYHFDGVDWDQSRRLNNRIYKFRGKAWDWEVDTENGNYDYLMYADYDMDLPEVVNELRNWGVWYTNTLGLDGFRIDAVKHIKYSFTRDWINHVRSATGKNMFAVAEFWKNDLGAIENYLQKTNWNHSVFDVPLHYNLYNASKSGGNYDMRNIFNGTVVQRHPSHAVTFVDNHDSQPEEALESFVEEWFKPLAYALTLTREQGYPSVFYGDYYGIPTHGVPAMRSKIDPILEARQKYAYGPQHDYLDHPDVIGWTREGDSSHPKSGLATLITDGPGGSKRMYAGLKNAGETWYDITGNRSDTVKIGSDGWGEFHVNDGSVSIYVQK

SEQ ID NO: 39337 - protein, 478 aa, Bacillus sp.
NGTMMQYFEWYLPNDGNHWNRLNSDASNLKSKGITAVWIPPAWKGASQNDVGYGAYDLYDLGEFNQKGTVRTKYGTRSQLQAAVTSLKNNGIQVYGDVVMNHKGGADATEMVRAVEVNPNNRNQEVTGEYTIEAWTRFDFPGRGNTHSSFKWRWYHFDGVDWDQSRRLNNRIYKFRGKAWDWEVDTEFGNYDYLMYADYDMDHPEVVNELRNWGVWYTNTLGLDGFRIDAVKHIKYSFTRDWINHVRSATGKNMFAVAEFWVNDLGAIENYLQKTNWNHSVFDVPLHYNLYNASKSGGNYDMRNIFNGTVVQRHPSHAVTFVDNHDSQPEEALESFVEEWFKPLAYALTLTREQGYPSVFYGDYYGIPTHGVPAMRSKIDPILEARQKYAYGPQHDYLDHPDVIGWTREGDSSHPKSGLATLITDGPGGSKRMYAGLKNAGETWYDITGNRSDTVKIGSDGWGEFHVNDGSVSIYVQK

SEQ ID NO: 39338 - protein, 478 aa, Bacillus sp.
NGTMMQYFEWYLPNDGNHWNRLNSDASNLKSKGITAVWIPPAWKGASQNDVGYGAYDLYDLGEFNQKGTVRTKYGTRSQLQAAVTSLKNNGIQVYGDVVMNHKGGADATEMVDAVEVNPNNRNQEVTGEYTIEAWTRFDFPGRGNTHSSFKWRWYHFDGVDWDQSRRLNNRIYKFRGKAWDWEVDTEFGNYDYLMYADYDMDHPEVVNELRNWGVWYTNTLGLDGFRIDAVKHIKYSFTRDWINHVRSATGKNMFAVAEFWKNDLGAIENYLQKTNWNHSVFDVPLHYNLYNASKSGGNYDMRNIFNGTVVQRHPSHAVTFVDNHDSQPEEALESFVEEWFKPLAYALTLTREQGYPSVFYGDYYGIPTHGVPAMRSKIDPILEARQKYAYGPQHDYLDHPDVIGWTREGDSSHPKSGLATLITDGPGGSKRMYAGLKNAGETWYDITGNRSDTVKIGSDGWGEFHVNDGSVSIYVQK

SEQ ID NO: 39339 - protein, 478 aa, Bacillus sp.
NGTMMQYFEWYLPNDGNHWNRLNSDASNLKSKGITAVWIPPAWKGISQNDVGYGAYDLYDLGEFNQKGTVRTKYGTRSQLQAAVTSLKNNGIQVYGDVVMNHKGGADATEMVRAVEVNPNNRNQEVTGEYTIEAWTRFDFPGRGNTHSSFKWRWYHFDGVDWDQSRKVHNRIYKFRGKAWDWEVDTEFGNYDYLMYADYDMDHPEVVNELRNWGVWYTNTLGLDGFRIDAVKHIKYSFTRDWINHVRSATGKNMFAVAEFWKNDLGAIENYLQKTNWNHSVFDVPLHYNLYNASKSGGNYDMRNIFNGTVVQRHPSHAVTFVDNHDSQPEEALESFVEEWFKPLAYALTLTREQGYPSVFYGDYYGIPTHGVPAMRSKIDPILEARQKYAYGPQHDYLDHPDVIGWTREGDSSHPKSGLATLITDGPGGSKRMYAGLKNAGKTWYDITGNRSDTVKIGSDGWGEFHVNDGSVSIYVQK

SEQ ID NO: 39340 - protein, 478 aa, Synthetic construct
NGTMMQYFEWYLPNDGNHWNRLNSDASNLKSKGITAVWIPPAWKGASQNDVGYGAYDLYDLGEFNQKGTVRTKYGTRSQLQAAVTSLKNNGIQVYGDVVFNHKGGADATEMVRAVEVNPNNRNQEVTGEYTIEAWTRFDFPGRGNTHSSFKWRWYHFDGVDWDQSRRLNNRIYKFRGKAWDWEVDTENGNYDYLMYADYDMDYPEVVNEVRNWGVWYTNTLGLDGFRIDAVKHIKYSFVRDWINHVRSATGKNMFAVAEFWKNDLGAIENYLQKTNWNHSVFDVPLHYNLYNASKSGGNYDMRNIFNGTVVQRHPSHAVTFVDNHDSQPEEALESFVEEWFKPLAYALTLTREQGYPSVFYGDYYGIPTHGVPAMRSKIDPILEARQKYAYGPQHDYLDHPDVIGWTREGDSSHPKSGLATLITDGPGGSKRMYAGLKNAGETWYDITGNRSDTVKIGSDGWGEFHVNDGSVSIYVQK

SEQ ID NO: 39341 - protein, 478 aa, Bacillus sp.
NGTMMQYFEWYLPNDGNHWNRLNSDASNLKSKGITAVWIPPAWKGASQNDVGYGAYDLYDLGEFNQKGTVRTKYGTRSQLQAAVTSLKNNGIQVYGDVVMNHKGGADATEMVRAVEVNPNNRNQEVTGEYTIEAWTRFDFPGRGNTHSSFKWRWYHFDGVDWDQSRRLNNRIYKFRGKAWDWEVDTEFGNYDYLMYADYDMDHPEVVNELRNWGVWYTNTLGLDGFRIDAVKHIKYSFTRDWINHVRSATGKNMFAVAEFWKNDLGAIENYLQKTNWNHSVFDVPLHYNLYNASKSGGNYDMRNIFNGTVVQRHPSHAVTFVDNHDSQPEEALESFVDPWFKPLAYALTLTREQGYPSVFYGDYYGIPTHGVPAMRSKIDPILEARQKYAYGPQHDYLDHPDVIGWTREGDSSHPKSGLATLITDGPGGSKRMYAGLKNAGETWYDITGNRSDTVKIGSDGWGEFHVNDGSVSIYVQK

SEQ ID NO: 39342 - protein, 478 aa, Bacillus sp.
NGTMMQYFEWYLPNDGNHWNRLNSDASNLKSKGITAVWIPPAWKGVSQNDVGYGAYDLYDLGEFNQKGTVRTKYGTRSQLQAAVTSLKNNGIQVYGDVVMNHKGGADATEMVRAVEVNPNNRNQEVTGEYTIEAWTRFDFPGRGNTHSSFKWRWYHFDGVDWDQSRQTNNRIYKFRGKAWDWEVDTEFGNYDYLMYADYDMDHPEVVNELRNWGVWYTNTLGLDGFRIDAVKHIKYSFTRDWINHVRSATGKNMFAVAEFWKNDLGAIENYLQKTNWNHSVFDVPLHYNLYNASKSGGNYDMRNIFNGTVVQRHPSHAVTFVDNHDSQPEEALESFVEEWFKPLAYALTLTREQGYPSVFYGDYYGIPTHGVPAMRSKIDPILEARQKYAYGPQHDYLDHPDVIGWTREGDSSHPKSGLATLITDGPGGSKRMYAGLKNAGETWYDITGNRSDTVKIGSDGWGEFHVNDGSVSIYVQK

SEQ ID NO: 39343 - protein, 478 aa, Synthetic construct
NGTMMQYFEWYLPNDGNHWNRLNSDASNLKSKGITAVWIPPAWKGASQNDVGYGAYDLYDLGEFNQKGTVRTKYGTRSQLQAAVTSLKNNGIQVYGDVVMNHKGGADATEMVRAVEVNPNNRNQEVTGEYTIEAWTRFDFPGRGNTHSSFKWRWYHFDGVDWDQSRRLNNRIYKFRGKAWDWEVDTENGNYDYLMYADYDMDYPEVVNEVRNWGVWYTNTLGLDGFRIDAVKHIKYSFVRDWINHVRSATGKNMFAVAEFWKNDLGAIENYLQKTNWNHSVFDVPLHYNLYNASKSGGNYDMRNIFNGTVVQRHPSHAVTFVDNHDSQPEEALESFVEEWFKPLAYALTLTREQGYPSVFYGDYYGIPTHGVPAMRSKIDPILEARQKYAYGPQHDYLDHPDVIGWTREGDSSHPKSGLATLITDGPGGSKRMYAGLKNAGETWYDITGNRSDTVKIGSDGWGEFHVNDGSVSIYVQK

SEQ ID NO: 39344 - protein, 478 aa, Bacillus sp.
NGTMMQYFEWYLPNDGNHWNRLNSDASNLKSKGITAVWIPPAWKGASQNDVGYGAYDLYDLGEFNQKGTVRTKYGTRSQLQAAVTSLKNNGIQVYGDVVMNHKGGADATEMVRAVEVNPNNRNQEVTGEYTIEAWTRFDFPGRGNTHSSFKWRWYHFDGVDWDQSRDFDNRIYKFRGKAWDWEVDTEFGNYDYLMYADYDMDHPEVVNELRNWGVWYTNTLGLDGFRIDAVKHIKYSFTRDWINHVRSATGKNMFAVAEFWKNDLGAIENYLQKTNWNHSVFDVPLHYNLYNASKSGGNYDMRNIFNGTVVQRHPSHAVTFVDNHDSQPEEALESFVEEWFKPLAYALTLTREQGYPSVFYGDYYGIPTHGVPAMRSKIDPILEARQKYAYGPQHDYLDHPDVIGWTREGDSSHPKSGLATLITDGPGGSKRMYAGLKNAGETWYDITGNRSDTVKIGSDGWGEFHVNDGSVSIYVQK

SEQ ID NO: 39345 - protein, 478 aa, Synthetic construct
NGTMMQYFEWYLPNDGNHWNRLNSDASNLKSKGITAVWIPPAWKGASQNDVGYGAYDLYDLGEFNQKGTVRTKYGTRSQLQAAVTSLKNNGIQVYGDVVMNHKGGADATEMVRAVEVNPNNRNQEVTGEYTIEAWTRFDFPGRGNTHSSFKWRWYHFDGVDWDQSRRLNNRIYKFRGKAWDWEVDTENGNYDYLMYADIDMDHPEVVNELRNWGVWYTNTLGLDGFRIDAVKHIKYQFTRDWINHVRSATGKNMFAVAEFWKNDLGAIENYLQKTNWNHSVFDVPLHYNLYNASKSGGNYDMRNIFNGTVVQRHPSHAVTFVDNHDSQPEEALESFVEEWFKPLAYALTLTREQGYPSVFYGDYYGIPTHGVPAMRSKIDPILEARQKYAYGPQHDYLDHPDVIGWTREGDSSHPKSGLATLITDGPGGSKRMYAGLKNAGETWYDITGNRSDTVKIGSDGWGEFHVNDGSVSIYVQK

SEQ ID NO: 39346 - protein, 478 aa, Bacillus sp.
NGTMMQYFEWYLPNDGNHWNRLNSDASNLKSKGITAVWIPPAWKGASQNDVGYGAYDLYDLGEFNQKGTVRTKYGTRSQLQAAVTSLKNNGIQVYGDVVMNHKGGADATEMVRAVEVNPNNRNQEVTGEYTIEAWTRFDFPGRGNTHSSFKWRWYHFDGVDWDQSRELTNRIYKFRGKAWDWEVDTEFGNYDYLMYADYDMDHPEVVNELRNWGVWYTNTLGLDGFRIDAVKHIKYSFTRDWINHVRSATGKNMFAVAEFWKNDLGAIENYLQKTNWNHSVFDVPLHYNLYNASKSGGNYDMRNIFNGTVVQRHPSHAVTFVDNHDSQPEEALESFVEEWFKPLAYALTLTREQGYPSVFYGDYYGIPTHGVPAMRSKIDPILEARQKYAYGPQHDYLDHPDVIGWTREGDSSHPKSGLATLITDGPGGSKRMYAGLKNAGETWYDITGNRSDTVKIGSDGWGEFHVNDGSVSIYVQK

SEQ ID NO: 39347 - protein, 478 aa, Bacillus sp.
NGTMMQYFEWYLPNDGNHWNRLNSDASNLKSKGITAVWIPPAWKGASQNDVGYGAYDLYDLGEFNQKGTVRTKYGTRSQLQAAVTSLKNNGIQVYGDVVMNHKGGADATEMVRAVEVNPNNRNQEVTGEYTIEAWTRFDFPGRGNTHSSFKWRWYHFDGVDWDQSRKFQNRIYKFRGKAWDWEVDTEFGNYDYLMYVDYDMDHPEVVNELRNWGVWYTNTLGLDGFRIDAVKHIKYSFTRDWINHVRSATGKNMFAVAEFWKNDLGAIENYLQKTNWNHSVFDVPLHYNLYNASKSGGNYDMRNIFNGTVVQRHPSHAVTFVDNHDSQPEEALESFVEEWFKPLAYALTLTREQGYPSVFYGDYYGIPTHGVPAMRSKIDPILEARQKYAYGPQHDYLDHPDVIGWTREGDSSHPKSGLATLITDGPGGSKRMYAGLKNAGETWYDITGNRSDTVKIGSDGWGEFHVNDGSVSIYVQK

SEQ ID NO: 39348 - protein, 478 aa, Bacillus sp.
NGTMMQYFEWYLPNDGNHWNRLNSDASNLKSKGITAVWIPPAWKGASQNDVGYGAYDLYDLGEFNQKGTVRTKYGTRSQLQAAVTSLKNNGIQVYGDVVMNHKGGADATEMVRAVEVNPNNRNQEVTGEYTIEAWTRFDFPGRGNTHSSFKWRWYHFDGVDWDQSRRLDNRIYKFRGKAWDWEVDTEFGNYDYLMYADYDMDHPEVVNELRNWGVWYTNTLGLDGFRIDAVKHIKYSFTRDWINHVRSATGKNMFAVAEFWKNDLGAIENYLQKTNWNHSVFDVPLHYNLYNASKSGGNYDMRNIFNGTVVQRHPSHAVTFVDNHDSQPEEALESFVEEWFKPLAYALTLTREQGYPSVFYGDYYGIPTHGVPAMRSKIDPILEARQKYAYGPQHDYLDHPDVIGWTREGDSSHPKSGLATLITDGPGGSKRMYAGLKNAGETWYDITGNRSDTVKIGSDGWGEFHVNDGSVSIYVQK

SEQ ID NO: 39349 - protein, 478 aa, Bacillus sp.
NGTMMQYFEWYLPNDGNHWNRLNSDASNLKSKGITAVWIPPAWKGASQNDVGYGAYDLYDLGEFNQKGTVRTKYGTRSQLQAAVTSLKNNGIQVYGDVVMNHKGGADATEMVRAVEVNPNNRNQEVTGEYTIEAWTRFDFPGRGNTHSSFKWRWYHFDGVDWDQSRNTQNRIYKFRGKAWDWEVDTEFGNYDYLMYADYDMDHPEVVNELRNWGVWYTNTLGLDGFRIDAVKHIKYSFTRDWINHVRSATGKNMFAVAEFWKNDLGAIENYLQKTNWNHSVFDVPLHYNLYNASKRGGNYDMRNIFNGTVVQRHPSHAVTFVDNHDSQPEEALESFVEEWFKPLAYALTLTREQGYPSVFYGDYYGIPTHGVPAMRSKIDPILEARQKYAYGPQHDYLDHPDVIGWTREGDSSHPKSGLATLITDGPGGSKRMYAGLKNAGETWYDITGNRSDTVKIGSDGWGEFHVNDGSVSIYVQK

SEQ ID NO: 39350 - protein, 478 aa, Bacillus sp.
NGTMMQYFEWYLPNDGNHWNRLNSDASNLKSKGITAVWIPPAWKGASQNDVGYGAYDLYDLGEFNQKGTVRTKYGTRSQLQAAVTSLKNNGIQVYGDVVMNHKGGADATEMVRAVEVNPNNRNQEVTGEYTIEAWTRFDFPGRGNTHSSFKWRWYHFDGVDWDQSRQTDNRIYKFRGKAWDWEVDTEFGNYDYLMYADYDMDHPEVVNELRNWGVWYTNTLGLDGFRIDAVKHIKYSFTRDWINHVRSATGKNMFAVAEFWKNDLGAIENYLQKTNWNHSVFDVPLHYNLYNASKSGGNYDMRNIFNGTVVQRHPSHAVTFVDNHDSQPEEALESFVEEWFKPLAYALTLTREQGYPSVFYGDYYGIPTHGVPAMRSKIDPILEARQKYAYGPQHDYLDHPDVIGWTREGDSSHPKSGLATLITDGPGGSKRMYAGLKNAGETWYDITGNRSDTVKIGSDGWGEFHVNDGSVSIYVQK

SEQ ID NO: 39351 - protein, 478 aa, Bacillus sp.
NGTMMQYFEWYLPNDGNHWNRLNSDASNLKSKGITAVWIPPAWKGASQNDVGYGAYDLYDLGEFNQKGTVRTKYGTRSQLQAAVTSLKNNGIQVYGDVVMNHKGGADATEMVRAVEVNPNNRNQEVTGEYTIEAWTRFDFPGRGNTHSSFKWRWYHFDGVDWDQSRELQNRIYKFRGKAWDWEVDTEFGNYDYLMYADYDMDHPEVVNELRNWGVWYTNTLGLDGFRIDAVKHIKYSFTRDWINHVRSATGKNMFAVAEFWKNDLGAIENYLQKTNWNHSVFDVPLHYNLYNASKSGGNYDMRNIFNGTVVQRHPSHAVTFVDNHDSQPEEALESFVEEWFKPLAYALTLTREQGYPSVFYGDYYGIPTHGVPAMRSKIDPILEARQKYAYGPQHDYLDHPDVIGWTREGDSSHPKSGLATLITDGPGGSKRMYAGLKNAGETWYDITGNRSDTVKIGSDGWGEFHVNDGSVSIYVQK

SEQ ID NO: 39352 - protein, 478 aa, Bacillus sp.
NGTMMQYFEWYLPNDGNHWNRLNSDASNLKSKGITAVWIPPAWKGASQNDVGYGAYDLYDLGEFNQKGTVRTKYGTRSQLQAAVTSLKNNGIQVYGDVVMNHKGGADATEMVRAVEVNPNNRNQEVTGEYTIEAWTRFDFPGRGNTHSSFKWRWYHFDGVDWDQSREFDNRIYKFRGKAWDWEVDTEFGNYDYLMYADYDMDHPEVVNELRNWGVWYTNTLGLDGFRIDAVKHIKYSFTRDWINHVRSATGKNMFAVAEFWKNDLGAIENYLQKTNWNHSVFDVPLHYNLYNASKSGGNYDMRNIFNGTVVQRHPSHAVTFVDNHDSQPEEALESFVETWFKPLAYALTLTREQGYPSVFYGDYYGIPTHGVPAMRSKIDPILEARQKYAYGPQHDYLDHPDVIGWTREGDSSHPKSGLATLITDGPGGSKRMYAGLKNAGETWYDITGNRSDTVKIGSDGWGEFHVNDASVSIYVQK

SEQ ID NO: 39353 - protein, 478 aa, Synthetic construct
NGTMMQYFEWYLPNDGNHWNRLNSDASNLKSKGITAVWIPPAWKGASQNDVGYGAYDLYDLGEFNQKGTVRTKYGTRSQLQAAVTSLKNNGIQVYGDVVMNHKGGADATEMVRAVEVNPNNRNQEVTGEYTIEAWTRFDFPGRGNTHSSFKWRWYHFDGVDWDQSRRLNNRIYKFRGKAWDWEVDTEYGNYDYLMYADIDMDHPEVVNELRNWGVWYTNTLGLDGFRIDAVKHIKYSFTRDWINHVRSATGKNMFAVAEFWKNDLGAIENYLQKTNWNHSVFDVPLHYNLYNASKSGGNYDMRNIFNGTVVQRHPSHAVTFVDNHDSQPEEALESFVEEWFKPLAYALTLTREQGYPSVFYGDYYGIPTHGVPAMRSKIDPILEARQKYAYGPQHDYLDHPDVIGWTREGDSSHPKSGLATLITDGPGGSKRMYAGLKNAGETWYDITGNRSDTVKIGSDGWGEFHVNDGSVSIYVQK

SEQ ID NO: 39354 - protein, 478 aa, Bacillus sp.
NGTMMQYFEWYLPNDGNHWNRLNSDASNLKSKGITAVWIPPAWKGASQNDVGYGAYDLYDLGEFNQKGTVRTKYGTRSQLQDAVTSLKNNGIQVYGDVVMNHKGGADATEMVRAVEVNPNNRNQEVTGEYTIEAWTRFDFPGRGNTHSSFKWRWYHFDGVDWDQSRRLNNRIYKFRGKAWDWEVDTEFGNYDYLMYADYDMDHPEVVNELRNWGVWYTNTLGLDGFRIDAVKHIKYSFTRDWINHVRSATGKNMFAVAEFWKNDLGAIENYLQKTNWNHSVFDVPLHYNLYNASKSGGNYDMRNIFNGTVVQSHPMHAVTFVDNHDSQPEEALESFVEEWFKPLAYALTLTREQGYPSVFYGDYYGIPTHGVPAMRSKIDPILEARQKYAYGPQHDYLDHPDVIGWTREGDSSHPKSGLATLITDGPGGSKRMYAGLKNAGETWYDITGNRSDTVKIGSDGWGEFHVNDGSVSIYVQK

SEQ ID NO: 39355 - protein, 478 aa, Bacillus sp.
NGTMMQYFEWYLPNDGNHWNRLNSDASNLKSKGITAVWIPPAWKGASQNDVGYGAYDLYDLGEFNQKGTVRTKYGTRSQLQAAVTSLKNNGIQVYGDVVMNHKGGADATEMVRAVEVNPNNRNQEVTGEYTIEAWTRFDFPGRGNTHSSFKWRWYHFDGVDWDQSRRLNNRIYKFRGKAWDWEVDTEFGNYDYLMYADYDMDHPEVVNELRNWGVWYTNTLGLDGFRIDAVKHIKTSFTRDWINHVRSATGKNMFAVAEFWKNDLGAIENYLQKTNWNHSVFDVPLHYNLYNASKSGGNYDMRNIFNGTVVQRHPSHAVTFVDNHDSQPEEALESFVEEWFKPLAYALTLTREQGYPSVFYGDYYGIPTHGVPAMRSKIDPILEARQKYAYGPQHDYLDHPDVIGWTREGDSSHPKSGLATLITDGPGGSKRMYAGLKNAGETWYDITGNRSDTVKIGSDGWGEFHVNDGSVSIYVQK

SEQ ID NO: 39356 - protein, 478 aa, Bacillus sp.
NGTMMQYFEWYLPNDGNHWNRLNSDASNLKSKGITAVWIPPAWKGASQNDVGYGAYDLYDLGEFNQKGTVRTKYGTRSQLQAAVTSLKNNGIQVYGDVVMNHKGGADATEMVRAVEVNPNNRNQEVTGEYTIEAWTTFDFPGRGNTHSSFKWRWYHFDGVDWDQSRRLNNRIYKFRGKAWDWEVDTEFGNYDYLMYADYDMDHPEVVNELRNWGVWYTNTLGLDGFRIDAVKHIKYSFTRDWINHVRSATGKNMFAVAEFWKNDLGAIENYLQKTNWNHSVFDVPLHYNLYNASKSGGNYDMRNIFNGTVVQRHPSHAVTFVDNHDSQPEEALESFVEEWFKPLAYALTLTREQGYPSVFYGDYYGIPTHGVPAMRSKIDPILEARQKYAYGPQHDYLDHPDVIGWTREGDSSHPKSGLATLITDGPGGSKRMYAGLKNAGETWYDITGNRSDTVKIGSDGWGEFHVNDGSVSIYVQK

SEQ ID NO: 39357 - protein, 478 aa, Bacillus sp.
NGTMMQYFEWYLPNDGNHWNRLNSDASNLKSKGITAVWIPPAWKGASQNDVGYGAYDLYDLGEFNQKGTVRTKYGTRSQLQAAVTSLKNNGIQVYGDVVMNHKGGADATEMVRAVEVNPNNRNQEVTGEYTIEAWTRFDFPGRGNTHSSFKWRWYHFDGVDWDQSRRTSNRIYKFRGKAWDWEVDTEFGNYDYLMYVDYDMDHPEVVNELRNWGVWYTNTLGLDGFRIDAVKHIKYSFTRDWINHVRSATGKNMFAVAEFWKNDLGAIENYLQKTNWNHSVFDVPLHYNLYNASKSGGNYDMRNIFNGTVVQRHPSHAVTFVDNHDSQPEEALESFVEEWFKPLAYALTLTREQGYPSVFYGDYYGIPTHGVPAMRSKIDPILEARQKYAYGPQHDYLDHPDVIGWTREGDSSHPKSGLATLITDGPGGSKRMYAGLKNAGETWYDITGNRSDTVKIGSDGWGEFHVNDGSVSIYVQK

SEQ ID NO: 39358 - protein, 478 aa, Synthetic construct
NGTMMQYFEWYLPNDGNHWNRLNSDASNLKSKGITAVWIPPAWKGASQNDVGYGAYDLYDLGEFNQKGTVRTKYGTRSQLQAAVTSLKNNGIQVYGDVVMNHKGGADATELVVAVEVNPNNRNQEVTGEYTIEAWTRFDFPGRGNTHSSFKWRWYHFDGVDWDQSRRLNNRIYKFRGKAWDWEVDTENGNYDYLMYADIDMDHPETVNELRNWGVWYTNTLGLDGFRIDAVKHIKYSFTRDWINHVRSATGKNMFAVAEFWKNDLGAIENYLQKTNWNHSVFDVPLHYNLYNASKSGGNYDMRNIFNGTVVQRHPSHAVTFVDNHDSQPEEALESFVEEWFKPLAYALTLTREQGYPSVFYGDYYGIPTHGVPAMRSKIDPILEARQKYAYGPQHDYLDHPDVIGWTREGDSSHPKSGLATLITDGPGGSKRMYAGLKNAGETWYDITGNRSDTVKIGSDGWGEFHVNDGSVSIYVQK

SEQ ID NO: 39359 - protein, 478 aa, Bacillus sp.
NGTMMQYFEWYLPNDGNHWNRLNSDASNLKSKGITAVWIPPAWKGASQNDVGYGAYDLYDLGEFNQKGTVRTKYGTRSQLQAAVTSLKNNGIQVYGDVVMNHKGGADATEMVRAVEVNPNNRNQEVTGEYTIEAWTRFDFPGRGNTHSSFKWRWYHFDGVDWDQSRTLNNRIYKFRGKAWDWEVDTEFGNYDYLMYADYDMDHPEVVNELRNWGVWYTNTLGLDGFRIDAVKHIKYSFTRDWINHVRSATGKNMFAVAEFWKNDLGAIENYLQKTNWNHSVFDVPLHYNLYNASKSGGNYDMRNIFNGTVVQRHPSHAVTFVDNHDSQPEEALESFVEEWFKPLAYALTLTREQGYPSVFYGDYYGIPTHGVPAMRSKIDPILEARQKYAYGPQHDYLDHPDVIGWTREGDSSHPKSGLATLITDGPGGSKRMYAGLKNAGETWYDITGNRSDTVKIGSDGWGEFHVNDGSVSIYVQK

SEQ ID NO: 39360 - protein, 478 aa, Bacillus sp.
NGTMMQYFEWYLPNDGNHWNRLNSDASNLKSKGITAVWIPPAWKGASQNDVGYGAYDLYDLGEFNQKGTVRTKYGTRSQLQAAVTSLKNNGIQVYGDVVMNHKGGADATEMVRAVEVNPNNRNQEVTGEYTIEAWTRFDFPGRGNTHSSFKWRWYHFDGVDWDQSRRLNNRIYKFRGKAWDWEVDTEFGNYDYLMYADYDMDHPEVVNELRNWGVWYTNTLGLDGFRIDAVKHIKYSFTRDWINHVRSATGKNMFAVAEFWKNDLGAIENYLQKTNWNHSVFDVPLHYNLYNASKSGGNYDMRNIFNGTVVQRHPSHAVTFVDNHDSQPEEALESFVETWFKPLAYALTLTREQGYPSVFYGDYYGIPTHGVPAMRSKIDPILEARQKYAYGPQHDYLDHPDVIGWTREGDSSHPKSGLATLITDGPGGSKRMYAGLKNAGETWYDITGNRSDTVKIGSDGWGEFHVNKGSVSIYVQK

SEQ ID NO: 39361 - protein, 478 aa, Synthetic construct
NGTMMQYFEWYLPNDGNHWNRLNSDASNLKSKGITAVWIPPAWKGASQNDVGYGAYDLYDLGEFNQKGTVRTKYGTRSQLQAAVTSLKNNGIQVYGDVVMNHKGGADATEMVRAVEVNPNNRNQEVTGEYTIEAWTRFDFPGRGNTHSSFKWRWYHFDGVDWDQSRRLNNRIYKFRGKAWDWEVDTENGNYDYLMYADYDMDYPEVVNEIRNWGVWYTNTLGLDGFRIDAVKHIKYSFTRDWINHVRSATGKNMFAVAEFWKNDLGAIENYLQKTNWNHSVFDVPLHYNLYNASKSGGNYDMRNIFNGTVVQRHPSHAVTFVDNHDSQPEEALESFVEEWFKPLAYALTLTREQGYPSVFYGDYYGIPTHGVPAMRSKIDPILEARQKYAYGPQHDYLDHPDVIGWTREGDSSHPKSGLATLITDGPGGSKRMYAGLKNAGETWYDITGNRSDTVKIGSDGWGEFHVNDGSVSIYVQK

SEQ ID NO: 39362 - protein, 478 aa, Synthetic construct
NGTMMQYFEWYLPNDGNHWNRLNSDASNLKSKGITAVWIPPAWKGASQNDVGYGAYDVYDLGEFNQKGTVRTKYGTRSQLQAAVTSLKNNGIQVYGDVVFNHKGGADATEMVRAVEVNPNNRNQEVTGEYTIEAWTRFDFPGRGNTHSSFKWRWYHFDGVDWDQSRRLNNRIYKFRGKAWDWEVDTENGNYDYLMYADYDMDHPEVVNELRNWGVWYTNTLGLDGFRIDAVKHIKYSFTRDWINHVRSATGKNMFAVAEFWKNDLGAIENYLQKTNWNHSVFDVPLHYNLYNASKSGGNYDMRNIFNGTVVQRHPSHAVTFVDNHDSQPEEALESFVEEWFKPLAYALTLTREQGYPSVFYGDYYGIPTHGVPAMRSKIDPILEARQKYAYGPQHDYLDHPDVIGWTREGDSSHPKSGLATLITDGPGGSKRMYAGLKNAGETWYDITGNRSDTVKIGSDGWGEFHVNDGSVSIYVQK

SEQ ID NO: 39363 - protein, 478 aa, Bacillus sp.
NGTMMQYFEWYLPNDGNHWNRLNSDASNLKSKGITAVWIPPAWKGASQNDVGYGAYDLYDLGEFNQKGTVRTKYGTRSQLQAAVTSLKNNGIQVYGDVVMNHKGGADATEMVRAVEVNPNNRNQEVTGEYTIEAWTRFDFPGRGNTHSSFKWRWYHFDGVDWDQSRRLNNRIYLFRGKAWDWEVPTENGNYDYLMYADIDMDHPEVVNELRNWGVWYTNTLGLDGFRIDAVKHIKYSFTRDWINHVRSATGKNMFAVAEFWKNDLGAIENYLQKTNWNHSVFDVPLHYNLYNASKSGGNYDMRNIFNGTVVQRHPSHAVTFVDNHDSQPEEALESFVEEWFKPLAYALTLTREQGYPSVFYGDYYGIPTHGVPAMRSKIDPILEARQKYAYGPQHDYLDHPDVIGWTREGDSSHPKSGLATLITDGPGGSKRMYAGLKNAGETWYDITGNRSDTVKIGSDGWGEFHVNDGSVSIYVQK

SEQ ID NO: 39364 - protein, 478 aa, Bacillus sp.
NGTMMQYFEWYLPNDGNHWNRLNSDASNLKSKGITAVWIPPAWKGISQNDVGYGAYDLYDLGEFNQKGTVRTKYGTRSQLQAAVTSLKNNGIQVYGDVVMNHKGGADATEMVRAVEVNPNNRNQEVTGEYTIEAWTRFDFPGRGNTHSSFKWRWYHFDGVDWDQSRQLENRIYKFRGKAWDWEVDTEFGNYDYLMYADYDMDHPEVVNELRNWGVWYTNTLGLDGFRIDAVKHIKYSFTRDWINHVRSATGKNMFAVAEFWKNDLGAIENYLQKTNWNHSVFDVPLHYNLYNASKSGGNYDMRNIFNGTVVQRHPSHAVTFVDNHDSQPEEALESFVEEWFKPLAYALTLTREQGYPSVFYGDYYGIPTHGVPAMRSKIDPILEARQKYAYGPQHDYLDHPDVIGWTREGDSSHPKSGLATLITDGPGGSKRMYAGLKNAGETWYDITGNRSDTVKIGSDGWGEFHVNDGSVSIYVQK

SEQ ID NO: 39365 - protein, 478 aa, Synthetic construct
NGTMMQYFEWYLPNDGNHWNRLNSDASNLKSKGITAVWIPPAWKGASQNDVGYGAYDLYDLGEFNQKGTVRTKYGTRSQLQAAVTSLKNNGIQVYGDVVMNHKGGADATEMVRAVEVNPNNRNQEVTGEYTIEAWTRFDFPGRGNTHSSFKWRWYHFDGVDWDQSRRLNNRIYKFRGKAWDWEVDTENGNYDYLMYADFDMDYPEVVNEQRNWGVWYTNTLGLDGFRIDAVKHIKYSFTRDWINHVRSATGKNMFAVAEFWKNDLGAIENYLQKTNWNHSVFDVPLHYNLYNASKSGGNYDMRNIFNGTVVQRHPSHAVTFVDNHDSQPEEALESFVEEWFKPLAYALTLTREQGYPSVFYGDYYGIPTHGVPAMRSKIDPILEARQKYAYGPQHDYLDHPDVIGWTREGDSSHPKSGLATLITDGPGGSKRMYAGLKNAGETWYDITGNRSDTVKIGSDGWGEFHVNDGSVSIYVQK

SEQ ID NO: 39366 - protein, 478 aa, Bacillus sp.
NGTMMQYFEWYLPNDGNHWNRLNSDASNLKSKGITAVWIPPAWKGASQNDVGYGAYDLYDLGEFNQKGTVRTKYGTRSQLQAAVTSLKNNGIQVYGDVVMNHKGGADATEMVRAVEVNPNNRNQEVTGEYTIEAWTRFDFPGRGNTHSSFKWRWYHFDGVDWDQSRRLNNRIYKFRGKAWDWEVDTEFGNYDYLMYADYDMDHPEVVNELRNWGVWYTNTLGLDGFRIDAVKHIKYSFTRDWINHVRSATGKNMFAVAEFWRNDLGAIENYLQKTNWNHSVFDVPLHYNLYNASKSGGNYDMRNIFNGTVVQRHPSHAVTFVDNHDSQPEEALESFVEEWFKPLAYALTLTREQGYPSVFYGDYYGIPTHGVPAMRSKIDPILEARQKYAYGPQHDYLDHPDVIGWTREGDSSHPKSGLATLITDGPGGSKRMYAGLKNAGETWYDITGNRSDTVKIGSDGWGEFHVNDGSVSIYVQK

SEQ ID NO: 39367 - protein, 478 aa, Bacillus sp.
NGTMMQYFEWYLPNDGNHWNRLNSDASNLKSKGITAVWIPPAWKAASQNDVGYGAYDLYDLGEFNQKGTVRTKYGTRSQLQAAVTSLKNNGIQVYGDVVMNHKGGADATEMVRAVEVNPNNRNQEVTGEYTIEAWTRFDFPGRGNTHSSFKWRWYHFDGVDWDQSRQLSNRIYKFRGKAWDWEVDTEFGNYDYLMYADYDMDHPEVVNELRNWGVWYTNTLGLDGFRIDAVKHIKYSFTRDWINHVRSATGKNMFAVAEFWKNDLGAIENYLQKTNWNHSVFDVPLHYNLYNASKSGGNYDMRNIFNGTVVQRHPSHAVTFVDNHDSQPEEALESFVEEWFKPLAYALTLTREQGYPSVFYGDYYGIPTHGVPAMRSKIDPILEARQKYAYGPQHDYLDHPDVIGWTREGDSSHPKSGLATLITDGPGGSKRMYAGLKNAGETWYDITGNRSDTVKIGSDGWGEFHVNDGSVSIYVQK

SEQ ID NO: 39368 - protein, 478 aa, Bacillus sp.
NGTMMQYFEWYLPNDGNHWNRLNSDASNLKSKGITAVWIPPAWKGASQNDVGYGAYDLYDLGEFNQKGTVRTKYGTRSQLQAAVTSLKNNGIQVYGDVVMNHKGGADATEMVRAVEVNPNNRNQEVTGEYTIEAWTRFDFPGRGNTHSSFKWRWYHFDGVDWDGSRRLNNRIYKFRGKAWDWEVDTEFGNYDYLMYADYDMDHPEVVNELRNWGVWYTNTLGLDGFRIDAVKHIKYSFTRDWINHVRSATGKNMFAVAEFWKNDLGAIENYLQKTNWNHSVFDVPLHYNLYNASKSGGNYDMRNIFNGTVVQRHPSHAVTFVDNHDSQPEEALESFVEEWFKPLAYALTLTREQGYPSVFYGDYYGIPTHGVPAMRSKIDPILEARQKYAYGPQHDYLDHPDVIGWTREGDSSHPKSGLATLITDGPGGSKRMYAGLKNAGETWYDITGNRSDTVKIGSDGWGEFHVNDGSVSIYVQK

SEQ ID NO: 39369 - protein, 478 aa, Bacillus sp.
NGTMMQYFEWYLPNDGNHWNRLNSDASNLKSKGITAVWIPPAWKGASQNDVGYGAYDLYDLGEFNQKGTVRTKYGTRSQLQAAVTSLKNNGIQVYGDVVMNHKGGADATEMVRAVEVNPNNRNQEVTGEYTIEAWTRFDFPGRGNTHSSFKWRWYHFDGVDWDQSRRLNNRIYKFRGKAWDWEVDTEFGNYDYLMYADYDMDHPEVVNELRTWGVWYTNTLGLDGFRIDAVKHIKYSFTRDWINHVRSATGKNMFAVAEFWKNDLGAIENYLQKTNWNHSVFDVPLHYNLYNASKSGGNYDMRNIFNGTVVQRHPSHAVTFVDNHDSQPEEALESFVEEWFKPLAYALTLTREQGYPSVFYGDYYGIPTHGVPAMRSKIDPILEARQKYAYGPQHDYLDHPDVIGWTREGDSSHPKSGLATLITDGPGGSKRMYAGLKNAGETWYDITGNRSDTVKIGSDGWGEFHVNDGSVSIYVQK

SEQ ID NO: 39370 - protein, 478 aa, Synthetic construct
NGTMMQYFEWYLPNDGNHWNRLNSDASNLKSKGITAVWIPPAWKGASQNDVGYGAYDLYDLGEFNQKGTVRTKYGTRSQLQAAVTSLKNNGIQVYGDVVMNHKGGADMTEMVRAVEVNPNNRNQEVTGEYTIEAWTRFDFPGRGNTHSSFKWRWYHFDGVDWDQSRRLNNRIYKFRGKAWDWEVDTENGNYDYLMYADIDMDHPEVVNELRNWGVWYTNTLGLDGFRIDAVKHIKYSFTRDWINHVRSATGKNMFAVAEFWKNDLGAIENYLQKTNWNHSVFDVPLHYNLYNASKSGGNYDMRNIFNGTVVQRHPSHAVTFVDNHDSQPEEALESFVEEWFKPLAYALTLTREQGYPSVFYGDYYGIPTHGVPAMRSKIDPILEARQKYAYGPQHDYLDHPDVIGWTREGDSSHPKSGLATLITDGPGGSKRMYAGLKNAGETWYDITGNRSDTVKIGSDGWGEFHVNDGSVSIYVQK

SEQ ID NO: 39371 - protein, 478 aa, Synthetic construct
NGTMMQYFEWYLPNDGNHWNRLNSDASNLKSKGITAVWIPPAWKGASQNDVGYGAYDLYDLGEFNQKGTVRTKYGTRSQLQAAVTSLKNNGIQVYGDVVMNHKGGADATEMVRAVEVNPNNRNQEVTGEYTIEAWTRFDFPGRGNTHSSFKWRWYHFDGVDWDQSRRLNNRIYKFRGKAWDWEVDTENGNYDYLMYADIDMDHPESVNELRNWGVWYTNTLGLDGFRIDAVKHIKYSFTRDWINHVRSATGKNMFAVAEFWKNDLGAIENYLQKTNWNHSVFDVPLHYNLYNASKSGGNYDMRNIFNGTVVQRHPSHAVTFVDNHDSQPEEALESFVEEWFKPLAYALTLTREQGYPSVFYGDYYGIPTHGVPAMRSKIDPILEARQKYAYGPQHDYLDHPDVIGWTREGDSSHPKSGLATLITDGPGGSKRMYAGLKNAGETWYDITGNRSDTVKIGSDGWGEFHVNDGSVSIYVQK

SEQ ID NO: 39372 - protein, 478 aa, Bacillus sp.
NGTMMQYFEWYLPNDGNHWNRLNSDASNLKSKGITAVWIPPAWKALSQNDVGYGAYDLYDLGEFNQKGTVRTKYGTRSQLQAAVTSLKNNGIQVYGDVVMNHKGGADATEMVRAVEVNPNNRNQEVTGEYTIEAWTRFDFPGRGNTHSSFKWRWYHFDGVDWDQSRRLSNRIYKFRGKAWDWEVDTEFGNYDYLMYADYDMDHPEVVNELRNWGVWYTNTLGLDGFRIDAVKHIKYSFTRDWINHVRSATGKNMFAVAEFWKNDLGAIENYLQKTNWNHSVFDVPLHYNLYNASKSGGNYDMRNIFNGTVVQRHPSHAVTFVDNHDSQPEEALESFVEEWFKPLAYALTLTREQGYPSVFYGDYYGIPTHGVPAMRSKIDPILEARQKYAYGPQHDYLDHPDVIGWTREGDSSHPKSGLATLITDGPGGSKRMYAGLKNVGETWYDITGNRSDTVKIGSDGWGEFHVNDGSVSIYVQK

SEQ ID NO: 39373 - protein, 478 aa, Synthetic construct
NGTMMQYFEWYLPNDGNHWNRLNSDASNLKSKGITAVWIPPAWKGASQNDVGYGAYDLYDLGEFNQKGTVRTKYGTRSQLQAAVTSLKNNGIQVYGDVVMNHKGGADATEMVRAVEVNPNNRNQEVTGEYTIEAWTRFDFPGRGNTHSSFKWRWYHFDGVDWDQSRRLNNRIYKFRGKAWDWEVDTENGNYDYLMYADIDMDCPEVVNELRNWGVWYTNTLGLDGFRIDAVKHIKYSFTRDWINHVRSATGKNMFAVAEFWKNDLGAIENYLQKTNWNHSVFDVPLHYNLYNASKSGGNYDMRNIFNGTVVQRHPSHAVTFVDNHDSQPEEALESFVEEWFKPLAYALTLTREQGYPSVFYGDYYGIPTHGVPAMRSKIDPILEARQKYAYGPQHDYLDHPDVIGWTREGDSSHPKSGLATLITDGPGGSKRMYAGLKNAGETWYDITGNRSDTVKIGSDGWGEFHVNDGSVSIYVQK

SEQ ID NO: 39374 - protein, 478 aa, Bacillus sp.
NGTMMQYFEWYLPNDGNHWNRLNSDASNLKSKGITAVWIPPAWKGASQNDVGYGAYDLYDLGEFNQKGTVRTKYGTRSQLQAAVTSLKNNGIQVYGDVVMNHKGGADATEMVRAVEVNPNNRNQEVTGEYTIEAWTRFDFPGRGNTHSSFKWRWYHFDGVDWDQSRRLNNRIYKFRGKAWDWEVDTEFGNYDYLMYADYDMDHPEVVNELRNWGVWYTNTLGLDGFRIDAVKHIKYSFTRDWINHVRSATGKNMFAVAEFWKNDLGAIENYLQKTNWNHSVFDVPLHYNLYNASKSGGNYDMRHIFNGTVVQRHPSHAVTFVDNHDSQPEEALESFVEEWFKPLAYALTLTREQGYPSVFYGDYYGIPTHGVPAMRSKIDPILEARQKYAYGPQHDYLDHPDVIGWTREGDSSHPKSGLATLITDGPGGSKRMYAGLKNAGETWYDITGNRSDTVKIGSDGWGEFHVNDGSVSIYVQK

SEQ ID NO: 39375 - protein, 478 aa, Bacillus sp.
NGTMMQYFEWYLPNDGNHWNRLNSDASNLKSKGITAVWIPPAWKGASQNDVGYGAYDLYDLGEFNQKGTVRTKYGTRSQLQAAVTSLKNNGIQVYGDVVMNHKGGADATEMVRAVEVNPNNRNQEVTGEYTIEAWTRFDFPGRGNTHSSFKWRWYHFDGVDWDQSRKVSNRIYKFRGKAWDWEVDTEFGNYDYLMYTDYDMDHPEVVNELRNWGVWYTNTLGLDGFRIDAVKHIKYSFTRDWINHVRSATGKNMFAVAEFWKNDLGAIENYLQKTNWNHSVFDVPLHYNLYNASKSGGNYDMRNIFNGTVVQRHPSHAVTFVDNHDSQPEEALESFVEEWFKPLAYALTLTREQGYPSVFYGDYYGIPTHGVPAMRSKIDPILEARQKYAYGPQHDYLDHPDVIGWTREGDSSHPKSGLATFITDGPGGSKRMYAGLKNAGETWYDITGNRSDTVKIGSDGWGEFHVNDGSVSIYVQK

SEQ ID NO: 39376 - protein, 478 aa, Bacillus sp.
NGTMMQYFEWYLPNDGNHWNRLNSDASNLKSKGITAVWIPPAWKGASQNDVGYGAYDLYDLGEFNQKGTVRTKYGTRSQLQAAVTSLKNNGIQVYGDVVMNHKGGADATEMVRAVEVNPNNRNQEVTGEYTIEAWTRFDFPGRGNTHSSFKWRWYHFDGVDWDQSRRLNNRIYKFRGKAWDWEVDTENGNYDYLMYADIDYDYPEVVNELRVWGVWYTNTLGLDGFRIDAVKHIKYSFTRVWINHVRSATGKNMFAVAEFWKNDLGAIENYLQKTNWNHSVFDVPLHYNLYNASKSGGNYDMRNIFNGTVVQRHPSHAVTFVDNHDSQPEEALESFVEEWFKPLAYALTLTREQGYPSVFYGDYYGIPTHGVPAMRSKIDPILEARQKYAYGPQHDYLDHPDVIGWTREGDSSHPKSGLATLITDGPGGSKRMYAGLKNAGETWYDITGNRSDTVKIGSDGWGEFHVNDGSVSIYVQK

SEQ ID NO: 39377 - protein, 478 aa, Bacillus sp.
NGTMMQYFEWYLPNDGNHWNRLNSDASNLKSKGITAVWIPPAWKGASQNDVGYGAYDLYDLGEFNQKGTVRTKYGTRSQLQAAVTSLKNNGIQVYGDVVMNHKGGADATEMVRAVEVNPNNRNQEVTGEYTIEAWTRFDFPGRGNTHSSFKWRWYHFDGVDWDQSRRLNNRIYKFRGKAWDWEVDNEFGNYDYLMYADYDMDHPEVVNELRNWGVWYTNTLGLDGFRIDAVKHIKYSFTRDWINHVRSATGKNMFAVAEFWKNDLGAIENYLQKTNWNHSVFDVPLHYNLYNASKSGGNYDMRNIFNGTVVQRHPSHAVTFVDNHDSQPEEALESFVEEWFKPLAYALTLTREQGYPSVFYGDYYGIPTHGVPAMRSKIDPILEARQKYAYGPQHDYLDHPDVIGWTREGDSSHPKSGLATLITDGPGGSKRMYAGLKNAGETWYDITGNRSDTVKIGSDGWGEFHVNDGSVSIYVQK

SEQ ID NO: 39378 - protein, 478 aa, Synthetic construct
NGTMMQYFEWYLPNDGNHWNRLNSDASNLKSKGITAVWIPPAWKGASQNDVGYGAYDIYDLGEFNQKGTVRTKYGTRSQLQAAVTSLKNNGIQVYGDVVMNHKGGADATEMVRAVEVNPNNRNQEVTGEYTIEAWTRFDFPGRGNTHSSFKWRWYHFDGVDWDQSRRLNNRIYKFRGKAWDWEVDTENGNYDYLMYADYDMDHPEVVNELRNWGVWYTNTLGLDGFRIDAVKHIKVSFTRDWINHVRSATGKNMFAVAEFWKNDLGAIENYLQKTNWNHSVFDVPLHYNLYNASKSGGNYDMRNIFNGTVVQRHPSHAVTFVDNHDSQPEEALESFVEEWFKPLAYALTLTREQGYPSVFYGDYYGIPTHGVPAMRSKIDPILEARQKYAYGPQHDYLDHPDVIGWTREGDSSHPKSGLATLITDGPGGSKRMYAGLKNAGETWYDITGNRSDTVKIGSDGWGEFHVNDGSVSIYVQK

SEQ ID NO: 39379 - protein, 478 aa, Bacillus sp.
NGTMMQYFEWYLPNDGNHWNRLNSDASNLKSKGITAVWIPPAWKGASQNDVGYGAYDLYDLGEFNQKGTVRTKYGTRSQLQAAVTSLKNNGIQVYGDVVMNHKGGADATEMVRAVEVNPNNRNQEVTGEYTIEAWTRFDFPGRGNTHSSFKWRWYHFDGVDWDQSRRLNNRIYKFRGKAWDWEVDTEFGNYDYLMYADYDMDHPEVVNELRNWGVWYTNTLGLDGFRIDAVKHIKYSFTRDWINHVRSATGKNMFAVAEFWKNDLGAIENYLQKTNWNHSVFDVPLHYNLYNASKSGGNYDMRNIFNGTVVQRHPSRAVTFVDNHDSQPEEALESFVEEWFKPLAYALTLTREQGYPSVFYGDYYGIPTHGVPAMRSKIDPILEARQKYAYGPQHDYLDHPDVIGWTREGDSSHPKSGLATLITDGPGGSKRMYAGLKNAGETWYDITGNRSDTVKIGSDGWGEFHVNDGSVSIYVQK

SEQ ID NO: 39380 - protein, 478 aa, Bacillus sp.
NGTMMQYFEWYLPNDGNHWNRLNSDASNLKSKGITAVWIPPAWKGASQNDVGYGAYDLYDLGEFNQKGTVRTKYGTRSQLQAAVTSLKNNGIQVYGDVVMNHKGGADATEMVRAVEVNPNNRNQEVTGEYTIEAWTRFDFPGRGNTHSSFKWRWYHFDGVDWDQSRETTNRIYKFRGKAWDWEVDTEFGNYDYLMYADYDMDHPEVVNELRNWGVWYTNTLGLDGFRIDAVKHIKYSFTRDWINHVRSATGKNMFAVAEFWKNDLGAIENYLQKTNWNHSVFDVPLHYNLYNASKSGGNYDMRNIFNGTVVQRHPSHAVTFVDNHDSQPEEALESFVEEWFKPLAYALTLTREQGYPSVFYGDYYGIPTHGVPAMRSKIDPILEARQKYAYGPQHDYLDHPDVIGWTREGDSSHPKSGLATLITDGPGGSKRMYAGLKNAGETWYDITGNRSDTVKIGSDGWGEFHVNDGSVSIYVQK

SEQ ID NO: 39381 - protein, 478 aa, Bacillus sp.
NGTMMQYFEWYLPNDGNHWNRLNSDASNLKSKGITAVWIPPAWKGASQNDVGYGAYDLYDLGEFNQKGTVRTKYGTRSQLQAAVTSLKNNGIQVYGDVVMNHKGGADATEMVRAVEVNPNNRNQEVTGEYTIEAWTRFDFPGRGNTHSSFKWRWYHFDGVDWDQSRQFNNRIYKFRGKAWDWEVDTEFGNYDYLMYADYDMDHPEVVNELRNWGVWYTNTLGLDGFRIDAVKHIKYSFTRDWINHVRSATGKNMFAVAEFWKNDLGAIENYLQKTNWNHSVFDVPLHYNLYNASKSGGNYDMRNIFNGTVVQRHPSHAVTFVDNHDSQPEEALESFVEEWFKPLAYALTLTREQGYPSVFYGDYYGIPTHGVPAMRSKIDPILEARQKYAYGPQHDYLDHPDVIGWTREGDSSHPKSGLATLITDGPGGSKRMYAGLKNAGETWYDITGNRSDTVKIGSDGWGEFHVNDGSVSIYVQK

SEQ ID NO: 39382 - protein, 478 aa, Bacillus sp.
NGTMMQYFEWYLPNDGNHWNRLNSDASNLKSKGITAVWIPPAWKGASQNDVGYGAYDLYDLGEFNQKGTVRTKYGTRSQLQAAVTSLKNNGIQVYGDVVMNHKGGADATEMVRAVEVNPNNRNQEVTGEYTIEAWTRFDFPGRGNTHSSFKWRWYHFDGVDWDQSRRLNNRIYKFRGKAWDWEVDTENGFYDYLMYADIDHDHPEVVNELRNWGVWYTNTLGLDGFRIDAVKHIKYSFTRDWINHVRSATGKNMFAVAEFWKNDLGAIENYLQKTNWNHSVFDVPLHYNLYNASKSGGNYDMRNIFNGTVVQRHPSHAVTFVDNHDSQPEEALESFVEEWFKPLAYALTLTREQGYPSVFYGDYYGIPTHGVPAMRSKIDPILEARQKYAYGPQHDYLDHPDVIGWTREGDSSHPKSGLATLITDGPGGSKRMYAGLKNAGETWYDITGNRSDTVKIGSDGWGEFHVNDGSVSIYVQK

SEQ ID NO: 39383 - protein, 478 aa, Synthetic construct
NGTMMQYFEWYLPNDGNHWNRLNSDASNLKSKGITAVWIPPAWKGASQNDVGYGAYDLYDLGEFNQKGTVRTKYGTRSQLQAAVTSLKNNGIQVYGDVVMNHKGGADLTEMVRAVEVNPNNRNQEVTGEYTIEAWTRFDFPGRGNTHSSFKWRWYHFDGVDWDQSRRLNNRIYKFRGKAWDWEVDTENGNYDYLMYADIDMDHPEVVNELRNWGVWYTNTLGLDGFRIDAVKHIKYSFTRDWINHVRSATGKNMFAVAEFWKNDLGAIENYLQKTNWNHSVFDVPLHYNLYNASKSGGNYDMRNIFNGTVVQRHPSHAVTFVDNHDSQPEEALESFVEEWFKPLAYALTLTREQGYPSVFYGDYYGIPTHGVPAMRSKIDPILEARQKYAYGPQHDYLDHPDVIGWTREGDSSHPKSGLATLITDGPGGSKRMYAGLKNAGETWYDITGNRSDTVKIGSDGWGEFHVNDGSVSIYVQK

SEQ ID NO: 39384 - protein, 478 aa, Bacillus sp.
NGTMMQYFEWYLPNDGNHWNRLNSDASNLKSKGITAVWIPPAWKGASQNDVGYGAYDLYDLGEFNQKGTVRTKYGTRSQLQAAVTSLKNNGIQVYGDVVMNHKGGADATEMVRAVEVNPNNRNQEVTGEYTIEAWTRFDFPGRGNTHSSFKWRWYHFDGVDWDQSRRTDNRIYKFRGKAWDWEVDTEFGNYDYLMYADYDMDHPEVVNELRNWGVWYTNTLGLDGFRIDAVKHIKYSFTRDWINHVRSATGKNMFAVAEFWKNDLGAIENYLQKTNWNHSVFDVPLHYNLYNASKSGGNYDMRNIFNGTVVQRHPSHAVTFVDNHDSQPEEALESFVEEWFKPLAYALTLTREQGYPSVFYGDYYGIPTHGVPAMRSKIDPILEARQKYAYGPQHDYLDHPDVIGWTREGDSSHPKSGLATLITDGPGGSKRMYAGLKNAGETWYDITGNRSDTVKIGSDGWGEFHVNDGSVSIYVQK

SEQ ID NO: 39385 - protein, 478 aa, Bacillus sp.
NGTMMQYFEWYLPNDGNHWNRLNSDASNLKSKGITAVWIPPAWKGASQNDVGYGAYDLYDLGEFNQKGTVRTKYGTRSQLQAAVTSLKNNGIQVYGDVVMNHKGGADATEMVRAVEVNPNNRNQEVTGEYTIEAWTSFDFPGRGNTHSSFKWRWYHFDGVDWDQSRRLNNRIYKFRGKAWDWEVDTEFGNYDYLMYADYDMDHPEVVNELRNWGVWYTNTLGLDGFRIDAVKHIKYSFTRDWINHVRSATGKNMFAVAEFWKNDLGAIENYLQKTNWNHSVFDVPLHYNLYNASKSGGNYDMRNIFNGTVVQRHPSHAVTFVDNHDSQPEEALESFVEEWFKPLAYALTLTREQGYPSVFYGDYYGIPTHGVPAMRSKIDPILEARQKYAYGPQHDYLDHPDVIGWTREGDSSHPKSGLATLITDGPGGSKRMYAGLKNAGETWYDITGNRSDTVKIGSDGWGEFHVNDGSVSIYVQK

SEQ ID NO: 39386 - protein, 478 aa, Bacillus sp.
NGTMMQYFEWYLPNDGNHWNRLNSDASNLKSKGITAVWIPPAWKGASQNDVGYGAYDLYDLGEFNQKGTVRTKYGTRSQLQAAVTSLKNNGIQVYGDVVMNHKGGADATEMVRAVEVNPNNRNQEVTGEYTIEAWTRFDFPGRGNTHSSFKWRWYHFDGVDWDQSRDLDNRIYKFRGKAWDWEVDTEFGNYDYLMYADYDMDHPEVVNELRNWGVWYTNTLGLDGFRIDAVKHIKYSFTRDWINHVRSATGKNMFAVAEFWKNDLGAIENYLQKTNWNHSVFDVPLHYNLYNASKSGGNYDMRNIFNGTVVQRHPSHAVTFVDNHDSQPEEALESFVEEWFKPLAYALTLTREQGYPSVFYGDYYGIPTHGVPAMRSKIDPILEARQKYAYGPQHDYLDHPDVIGWTREGDSSHPKSGLATLITDGPGGSKRMYAGLKNAGETWYDITGNRSDTVKIGSDGWGEFHVNDGSVSIYVQK

SEQ ID NO: 39387 - protein, 478 aa, Bacillus sp.
NGTMMQYFEWYLPNDGNHWNRLNSDASNLKSKGITAVWIPPAWKGASQNDVGYGAYDLYDLGEFNQKGTVRTKYGTRSQLQAAVTSLKNNGIQVYGDVVMNHKGGADATEMVRAVEVNPNNRNQEVTGEYTIEAWTRFDFPGRGNTHSSFKWRWYHFDGVDWDQSRRLNNRIYKFRGKAWDWEVDTEFGNYDYLMYADYDMDHPEVVNELRNWGVWYTNTLGLDGFRIDAVKHIKYSFTRDWINHVRSATGKNMFAVAEFWKNDLGAIENYLQKTNWNHSVFDVPLHYNLYNASKSGGNYDMRSIFNGTVVQRHPSHAVTFVDNHDSQPEEALESFVEEWFKPLAYALTLTREQGYPSVFYGDYYGIPTHGVPAMRSKIDPILEARQKYAYGPQHDYLDHPDVIGWTREGDSSHPKSGLATLITDGPGGSKRMYAGLKNAGETWYDITGNRSDTVKIGSDGWGEFHVNDGSVSIYVQK

SEQ ID NO: 39388 - protein, 478 aa, Bacillus sp.
NGTMMQYFEWYLPNDGNHWNRLNSDASNLKSKGITAVWIPPAWKGASQNDVGYGAYDLYDLGEFNQKGTVRTKYGTRSQLQAAVTSLKNNGIQVYGDVVMNHKGGADATEMVRAVEVNPNNRNQEVTGEYTIEAWTRFDFPGRGNTHSSFKWRWYHFDGVDWDQSRRLNNRIYKFRGKAWDWEVDTEFGNYDYLMYADYDMDHPEVVNELRNWGVWYTNTLGLDGFRIDAVKHIKYSFTRDWINHVRSATGKNMFAVAEFWKNDLGAIENYLKKTNWNHSVFDVPLHYNLYNASKSGGNYDMRNIFNGTVVQRHPSHAVTFVDNHDSQPEEALESFVEEWFKPLAYALTLTREQGYPSVFYGDYYGIPTHGVPAMRSKIDPILEARQKYAYGPQHDYLDHPDVIGWTREGDSSHPKSGLATLITDGPGGSKRMYAGLKNAGETWYDITGNRSDTVKIGSDGWGEFHVNDGSVSIYVQK

SEQ ID NO: 39389 - protein, 478 aa, Synthetic construct
NGTMMQYFEWYLPNDGNHWNRLNSDASNLKSKGITAVWIPPAWKGASQNDVGYGAYDLYDLGEFNQKGTVRTKYGTRSQLQAAVTSLKNNGIQVYGDVVMNHKGGADATEMVRAVEVNPNNRNQEVTGEYTIEAWTRFDFPGRGNTHSSFKWRWYHFDGVDWDQSRRLNNRIYKFRGKAWDWEVDTENGNYDYLMYADIDMDEPEVVNELRNWGVWYTNTLGLDGFRIDAVKHIKYSFTRDWINHVRSATGKNMFAVAEFWKNDLGAIENYLQKTNWNHSVFDVPLHYNLYNASKSGGNYDMRNIFNGTVVQRHPSHAVTFVDNHDSQPEEALESFVEEWFKPLAYALTLTREQGYPSVFYGDYYGIPTHGVPAMRSKIDPILEARQKYAYGPQHDYLDHPDVIGWTREGDSSHPKSGLATLITDGPGGSKRMYAGLKNAGETWYDITGNRSDTVKIGSDGWGEFHVNDGSVSIYVQK

SEQ ID NO: 39390 - protein, 478 aa, Bacillus sp.
NGTMMQYFEWYLPNDGNHWNRLNSDASNLKSKGITAVWIPPAWKGASQNDVGYGAYDLYDLGEFNQKGTVRTKYGTRSQLQAAVTSLKNNGIQVYGDVVMNHKGGADATEMVRAVEVNPNNRNQEVTGEYTIEAWTRFDFPGRGNTHSSFKWRWYHFDGVDWDQSRRLNNRIYKFRGKAWDWEVDTENGNYDYLMYADIDNDYPEVVNELRMWGVWYTNTLGLDGFRIDAVKHIKYSFTRDWINHVRSATGKNMFAVAEFWKNDLGAIENYLQKTNWNHSVFDVPLHYNLYNASKSGGNYDMRNIFNGTVVQRHPSHAVTFVDNHDSQPEEALESFVEEWFKPLAYALTLTREQGYPSVFYGDYYGIPTHGVPAMRSKIDPILEARQKYAYGPQHDYLDHPDVIGWTREGDSSHPKSGLATLITDGPGGSKRMYAGLKNAGETWYDITGNRSDTVKIGSDGWGEFHVNDGSVSIYVQK

SEQ ID NO: 39391 - protein, 478 aa, Bacillus sp.
NGTMMQYFEWYLPNDGNHWNRLNSDASNLKSKGITAVWIPPAWKGASQNDVGYGAYDLYDLGEFNQKGTVRTKYGTRSQLQAAVTSLKNNGIQVYGDVVMNHKGGADATEMVRAVEVNPNNRNQEVTGEYTIEAWTRFDFPGRGNTHSSFKWRWYHFDGVDWDQSRRLNNRIYKFRGKAWDWEVDTEFGNYDYLMYADYDMDHPEVVNELRNWGVWYTNTLGLDGFRIDAVKHIKYSFTRDWINHVRSATGKNMFAVAEFWLNDLGRIENYLQKTNWNHSVFDVPLHYNLYNASKSGGNYDMRNIFNGTVVQRHPSHAVTFVDNHDSQPEEALESFVEEWFKPLAYALTLTREQGYPSVFYGDYYGIPTHGVPAMRSKIDPILEARQKYAYGPQHDYLDHPDVIGWTREGDSSHPKSGLATLITDGPGGSKRMYAGLKNAGETWYDITGNRSDTVKIGSDGWGEFHVNDGSVSIYVQK

SEQ ID NO: 39392 - protein, 478 aa, Bacillus sp.
NGTMMQYFEWYLPNDGNHWNRLNSDASNLKSKGITAVWIPPAWKGVSQNDVGYGAYDLYDLGEFNQKGTVRTKYGTRSQLQAAVTSLKNNGIQVYGDVVMNHKGGADATEMVRAVEVNPNNRNQEVTGEYTIEAWTRFDFPGRGNTHSSFKWRWYHFDGVDWDQSRRFNNRIYKFRGKAWDWEVDTEFGNYDYLMYADYDMDHPEVVNELRNWGVWYTNTLGLDGFRIDAVKHIKYSFTRDWINHVRSATGKNMFAVAEFWKNDLGAIENYLQKTNWNHSVFDVPLHYNLYNASKSGGNYDMRNIFNGTVVQRHPSHAVTFVDNHDSQPEEALESFVEEWFKPLAYALTLTREQGYPSVFYGDYYGIPTHGVPAMRSKIDPILEARQKYAYGPQHDYLDHPDVIGWTREGDSSHPKSGLATLITDGPGGSKRMYAGLKNAGETWYDITGNRSDTVKIGSDGWGEFHVNDGSVSIYVQK

SEQ ID NO: 39393 - protein, 478 aa, Bacillus sp.
NGTMMQYFEWYLPNDGNHWNRLNSDASNLKSKGITAVWIPPAWKGASQNDVGYGAYDLYDLGEFNQKGTVRTKYGTRSQLQAAVTSLKNNGIQVYGDVVMNHKGGADATEMVLAVEVNPNNRNQEVTGEYTIEAWTRFDFPGRGNTHSSFKWRWYHFDGVDWDQSRRLNNRIYKFRGKAWDWEVDTEFGNYDYLMYADYDMDHPEVVNELRNWGVWYTNTLGLDGFRIDAVKHIKYSFTRDWINHVRSATGKNMFAVAEFWKNDLGAIENYLQKTNWNHSVFDVPLHYNLYNASKSGGNYDMRNIFNGTVVQRHPSHAVTFVDNHDSQPEEALESFVEEWFKPLAYALTLTREQGYPSVFYGDYYGIPTHGVPAMRSKIDPILEARQKYAYGPQHDYLDHPDVIGWTREGDSSHPKSGLATLITDGPGGSKRMYAGLKNAGETWYDITGNRSDTVKIGSDGWGEFHVNDGSVSIYVQK

SEQ ID NO: 39394 - protein, 478 aa, Bacillus sp.
NGTMMQYFEWYLPNDGNHWNRLNSDASNLKSKGITAVWIPPAWKGASQNDVGYGAYDLYDLGEFNQKGTVRTKYGTRSQLQAAVTSLKNNGIQVYGDVVMNHKGGADATEMVRAVEVNPNNRNQEVTGEYTIEAWTQFDFPGRGNTHSSFKWRWYHFDGVDWDQSRRLNNRIYKFRGKAWDWEVDTEFGNYDYLMYADYDMDHPEVVNELRNWGVWYTNTLGLDGFRIDAVKHIKYSFTRDWINHVRSATGKNMFAVAEFWKNDLGAIENYLQKTNWNHSVFDVPLHYNLYNASKSGGNYDMRNIFNGTVVQRHPSHAVTFVDNHDSQPEEALESFVEEWFKPLAYALTLTREQGYPSVFYGDYYGIPTHGVPAMRSKIDPILEARQKYAYGPQHDYLDHPDVIGWTREGDSSHPKSGLATLITDGPGGSKRMYAGLKNAGETWYDITGNRSDTVKIGSDGWGEFHVNDGSVSIYVQK

SEQ ID NO: 39395 - protein, 478 aa, Bacillus sp.
NGTMMQYFEWYLPNDGNHWNRLNSDASNLKSKGITAVWIPPAWKGASQNDVGYGAYDLYDLGEFNQKGTVRTKYGTRSQLQAAVTSLKNNGIQVYGDVVMNHKGGADATEMVRAVEVNPNNRNQEVTGEYTIEAWTRFDFPGRGNTHSSFKWRWYHFDGVDWDQSRRLNNRIYKFRGKAWDWEVDTEFGNYDYLMYADYDMDHPEVVNELRNWGVWYTNTLGLDGFRIDAVKHIKYSFTRDWINHVRSATGKNMFAVAEFWKNDLGAIENYLQKTNWNHSVFDVPLHYNLYNASKSQGNYDMRNIFNGTVVQRHPSHAVTFVDNHDSQPEEALESFVDTWFKPLAYALTLTREQGYPSVFYGDYYGIPTHGVPAMRSKIDPILEARQKYAYGPQHDYLDHPDVIGWTREGDSSHPKSGLATLITDGPGGSKRMYAGLKNAGETWYDITGNRSDTVKIGSDGWGEFHVNDGSVSIYVQK

SEQ ID NO: 39396 - protein, 478 aa, Synthetic construct
NGTMMQYFEWYLPNDGNHWNRLNSDASNLKSKGITAVWIPPAWKGASQNDVGYGAYDLYDLGEFNQKGTVRTKYGTRSQLQAAVTSLKNNGIQVYGDVVMNHKGGADATEMVRAVEVNPNNRNQEVTGEYTIEAWTRFDFPGRGNTHSSFKWRWYHFDGVDWDQSRRLNNRIYKFRGKAWDWEVDTENGNYDYLMYADNDMDYPEVVNEMRNWGVWYTNTLGLDGFRIDAVKHIKYSFTRDWINHVRSATGKNMFAVAEFWKNDLGAIENYLQKTNWNHSVFDVPLHYNLYNASKSGGNYDMRNIFNGTVVQRHPSHAVTFVDNHDSQPEEALESFVEEWFKPLAYALTLTREQGYPSVFYGDYYGIPTHGVPAMRSKIDPILEARQKYAYGPQHDYLDHPDVIGWTREGDSSHPKSGLATLITDGPGGSKRMYAGLKNAGETWYDITGNRSDTVKIGSDGWGEFHVNDGSVSIYVQK

SEQ ID NO: 39397 - protein, 478 aa, Synthetic construct
NGTMMQYFEWYLPNDGNHWNRLNSDASNLKSKGITAVWIPPAWKGASQNDVGYGAYDLYDLGEFNQKGTVRTKYGTRSQLQAAVTSLKNNGIQVYGDVVMNHKGGADATEMVRAVEVNPNNRNQEVTGEYTIEAWTRFDFPGRGNTHSSFKWRWYHFDGVDWDQSRRLNNRIYKFRGKAWDWEVDTENGNYDYLMYADIDMDHSEVVNELRNWGVWYTNTLGLDGFRIDAVKHIKYSFTRDWINHVRSATGKNMFAVAEFWKNDLGAIENYLQKTNWNHSVFDVPLHYNLYNASKSGGNYDMRNIFNGTVVQRHPSHAVTFVDNHDSQPEEALESFVEEWFKPLAYALTLTREQGYPSVFYGDYYGIPTHGVPAMRSKIDPILEARQKYAYGPQHDYLDHPDVIGWTREGDSSHPKSGLATLITDGPGGSKRMYAGLKNAGETWYDITGNRSDTVKIGSDGWGEFHVNDGSVSIYVQK

SEQ ID NO: 39398 - protein, 478 aa, Bacillus sp.
NGTMMQYFEWYLPNDGNHWNRLNSDASNLKSKGITAVWIPPAWKGASQNDVGYGAYDLYDLGEFNQKGTVRTKYGTRSQLQAAVTSLKNNGIQVYGDVVMNHKGGADATEMVRAVEVNPNNRNQEVTGEYTIEAWTRFDFPGRGNTHSSFKWRWYHFDGVDWDQSRRLNNRIYKFRGKAWDWEVDTENGNYDYLMYADIDFDHPEVVNELRNWGVWYTNTLGLDGFRIDAVKHIKYSFTRVWINHVRSATGKNMFAVAEFWKNDLGAIENYLQKTNWNHSVFDVPLHYNLYNASKSGGNYDMRNIFNGTVVQRHPSHAVTFVDNHDSQPEEALESFVEEWFKPLAYALTLTREQGYPSVFYGDYYGIPTHGVPAMRSKIDPILEARQKYAYGPQHDYLDHPDVIGWTREGDSSHPKSGLATLITDGPGGSKRMYAGLKNAGETWYDITGNRSDTVKIGSDGWGEFHVNDGSVSIYVQK

SEQ ID NO: 39399 - protein, 478 aa, Bacillus sp.
NGTMMQYFEWYLPNDGNHWNRLNSDASNLKSKGITAVWIPPAWKGASQNDVGYGAYDVYDLGEFNQKGTVRTKYGTRSQLQAAVTSLKNNGIQVYGDVVMNHKGGADATEMVRAVEVNPNNRNQEVTGEYTIEAWTRFDFPGRGNTHSSFKWRWYHFDGVDWDQSRRLNNRIYKFRGKAWDWEVDTENGNYDYLMYADIDLDHPEVVNELRVWGVWYTNTLGLDGFRIDAVKHIKYSFTRDWINHVRSATGKNMFAVAEFWKNDLGAIENYLQKTNWNHSVFDVPLHYNLYNASKSGGNYDMRNIFNGTVVQRHPSHAVTFVDNHDSQPEEALESFVEEWFKPLAYALTLTREQGYPSVFYGDYYGIPTHGVPAMRSKIDPILEARQKYAYGPQHDYLDHPDVIGWTREGDSSHPKSGLATLITDGPGGSKRMYAGLKNAGETWYDITGNRSDTVKIGSDGWGEFHVNDGSVSIYVQK

SEQ ID NO: 39400 - protein, 478 aa, Bacillus sp.
NGTMMQYFEWYLPNDGNHWNRLNSDASNLKSKGITAVWIPPAWKAASQNDVGYGAYDLYDLGEFNQKGTVRTKYGTRSQLQAAVTSLKNNGIQVYGDVVMNHKGGADATEMVRAVEVNPNNRNQEVTGEYTIEAWTRFDFPGRGNTHSSFKWRWYHFDGVDWDQSRDFSNRIYKFRGKAWDWEVDTEFGNYDYLMYADYDMDHPEVVNELRNWGVWYTNTLGLDGFRIDAVKHIKYSFTRDWINHVRSATGKNMFAVAEFWKNDLGAIENYLQKTNWNHSVFDVPLHYNLYNASKSGGNYDMRNIFNGTVVQRHPSHAVTFVDNHDSQPEEALESFVEEWFKPLAYALTLTREQGYPSVFYGDYYGIPTHGVPAMRSKIDPILEARQKYAYGPQHDYLDHPDVIGWTREGDSSHPKSGLATLITDGPGGSKRMYAGLKNAGETWYDITGNRSDTVKIGSDGWGEFHVNDGSVSIYVQK

SEQ ID NO: 39401 - protein, 478 aa, Bacillus sp.
NGTMMQYFEWYLPNDGNHWNRLNSDASNLKSKGITAVWIPPAWKGASQNDVGYGAYDLYDLGEFNQKGTVRTKYGTRSQLQAAVTSLKNNGIQVYGDVVMNHKGGADATEMVRAVEVNPNNRNQEVTGEYTIEAWTRFDFPGRGNTHSSFKWRWYHFDGVDWDQSRRLNNRIYKFRGKAWDWEVDTEFGNYDYLMYADYDMDHPEVVNELRNWGVWYTNTLGLDGFRIDAVKHIKYSFTRDWINHVRSATGKNMFAVAEFWKNDLGAIENYLQKTNWNHSVFDVPLHYNLYNASKSGGNYDMRNIFNGTVVQRHPSHAVTFVDNHDSQPEEALESFVEEWFKPLAYALTLTREQGYPSVFYGDYYGIPTHGVPAMRSKIDPILRARQKYAYGPQHDYLDHPDVIGWTREGDSSHPKSGLATLITDGPGGSKRMYAGLKNAGETWYDITGNRSDTVKIGSDGWGEFHVNDGSVSIYVQK

SEQ ID NO: 39402 - protein, 478 aa, Bacillus sp.
NGTMMQYFEWYLPNDGNHWNRLNSDASNLKSKGITAVWIPPAWKGASQNDVGYGAYDLYDLGEFNQKGTVRTKYGTRSQLQAAVTSLKNNGIQVYGDVVMNHKGGADATEMVRAVEVNPNNRNQEVTGEYTIEAWTRFDFPGRGNTHSSFKWRWYHFDGVDWDQSRRLNNRIYKFRGKAWDWEVDTEFGNYDYLMYADYDMDHPEVVSELRNWGVWYTNTLGLDGFRIDAVKHIKYSFTRDWINHVRSATGKNMFAVAEFWKNDLGAIENYLQKTNWNHSVFDVPLHYNLYNASKSGGNYDMRNIFNGTVVQRHPSHAVTFVDNHDSQPEEALESFVEEWFKPLAYALTLTREQGYPSVFYGDYYGIPTHGVPAMRSKIDPILEARQKYAYGPQHDYLDHPDVIGWTREGDSSHPKSGLATLITDGPGGSKRMYAGLKNAGETWYDITGNRSDTVKIGSDGWGEFHVNDGSVSIYVQK

SEQ ID NO: 39403 - protein, 478 aa, Bacillus sp.
NGTMMQYFEWYLPNDGNHWNRLNSDASNLKSKGITAVWIPPAWKGASQNDVGYGAYDLYDLGEFNQKGTVRTKYGTRSQLQAAVTSLKNNGIQVYGDVVMNHKGGADATEMVRAVEVNPNNRNQEVTGEYTIEAWTRFDFPGRGNTHSSFKWRWYHFDGVDWDQSRRLNNRIYKFRGKAWDWEVDTEFGNYDYLMYADYDMDHPEVVNELRNWGVWYTNTLGLDGFRIDAVKHIKYSFTRDWINHVRSATGKNMFAVAEFWKNDLGAIENYLQKTNWNHSVFDVPLHYNLYNASKSGGNYDMRNIFNGTVVQRHPSLAVTFVDNHDSQPEEALESFVEEWFKPLAYALTLTREQGYPSVFYGDYYGIPTHGVPAMRSKIDPILEARQKYAYGPQHDYLDHPDVIGWTREGDSSHPKSGLATLITDGPGGSKRMYAGLKNAGETWYDITGNRSDTVKIGSDGWGEFHVNDGSVSIYVQK

SEQ ID NO: 39404 - protein, 478 aa, Bacillus sp.
NGTMMQYFEWYLPNDGNHWNRLNSDASNLKSKGITAVWIPPAWKGASQNDVGYGAYDLYDLGEFNQKGTVRTKYGTRSQLQAAVTSLKNNGIQVYGDVVMNHKGGADATEMVRAVEVNPNNRNQEVTGEYTIEAWTRFDFPGRGNTHSSFKWRWYHFDGVDWDQSRRLNNRIYKFRGKAWDWEVDTENGNYDYLMYADIDYDYPEVVTTLRVWGVWYTNTLGLDGFRIDAVKHIKYSFTRDWINHVRSATGKNMFAVAEFWKNDLGAIENYLQKTNWNHSVFDVPLHYNLYNASKSGGNYDMRNIFNGTVVQRHPSHAVTFVDNHDSQPEEALESFVEEWFKPLAYALTLTREQGYPSVFYGDYYGIPTHGVPAMRSKIDPILEARQKYAYGPQHDYLDHPDVIGWTREGDSSHPKSGLATLITDGPGGSKRMYAGLKNAGETWYDITGNRSDTVKIGSDGWGEFHVNDGSVSIYVQK

SEQ ID NO: 39405 - protein, 478 aa, Synthetic construct
NGTMMQYFEWYLPNDGNHWNRLNSDASNLKSKGITAVWIPPAWKGASQNDVGYGAYDLYDLGEFNQKGTVRTKYGTRSQLQAAVTSLKNNGIQVYGDVVMNHKGGADATEMVRAVEVNPNNRNQEVTGEYTIEAWTRFDFPGRGNTHSSFKWRWYHFDGVDWDQSRRLNNRIYKFRGKAWDWEVDNEFGNYDYLMYADIDMDHPEVVNELRNWGVWYTNTLGLDGFRIDAVKHIKYSFTRDWINHVRSATGKNMFAVAEFWKNDLGAIENYLQKTNWNHSVFDVPLHYNLYNASKSGGNYDMRNIFNGTVVQRHPSHAVTFVDNHDSQPEEALESFVEEWFKPLAYALTLTREQGYPSVFYGDYYGIPTHGVPAMRSKIDPILEARQKYAYGPQHDYLDHPDVIGWTREGDSSHPKSGLATLITDGPGGSKRMYAGLKNAGETWYDITGNRSDTVKIGSDGWGEFHVNDGSVSIYVQK

SEQ ID NO: 39406 - protein, 478 aa, Bacillus sp.
NGTMMQYFEWYLPNDGNHWNRLNSDASNLKSKGITAVWIPPAWKGASQNDVGYGAYDLYDLGEFNQKGTVRTKYGTRSQLQAAVTSLKNNGIQVYGDVVMNHKGGADATEMVRAVEVNPNNRNQEVTGEYTIEAWTRFDFPGRGNTHSSFKWRWYHFDGVDWDQSRRLNNRIYKFRGKAWDWEVDTENGNYDYLMYADIDLDFPEVVNELRIWGVWYTNTLGLDGFRIDAVKHIKYSFTRDWINHVRSATGKNMFAVAEFWKNDLGAIENYLQKTNWNHSVFDVPLHYNLYNASKSGGNYDMRNIFNGTVVQRHPSHAVTFVDNHDSQPEEALESFVEEWFKPLAYALTLTREQGYPSVFYGDYYGIPTHGVPAMRSKIDPILEARQKYAYGPQHDYLDHPDVIGWTREGDSSHPKSGLATLITDGPGGSKRMYAGLKNAGETWYDITGNRSDTVKIGSDGWGEFHVNDGSVSIYVQK

SEQ ID NO: 39407 - protein, 478 aa, Bacillus sp.
NGTMMQYFEWYLPNDGNHWNRLNSDASNLKSKGITAVWIPPAWKGPSQNDVGYGAYDLYDLGEFNQKGTVRTKYGTRSQLQAAVTSLKNNGIQVYGDVVMNHKGGADATEMVRAVEVNPNNRNQEVTGEYTIEAWTRFDFPGRGNTHSSFKWRWYHFDGVDWDQSRQLDNRIYKFRGKAWDWEVDTEFGNYDYLMYADYDMDHPEVVNELRNWGVWYTNTLGLDGFRIDAVKHIKYSFTRDWINHVRSATGKNMFAVAEFWKNDLGAIENYLQKTNWNHSVFDVPLHYNLYNASKSGGNYDMRNIFNGTVVQRHPSHAVTFVDNHDSQPEEALESFVEEWFKPLAYALTLTREQGYPSVFYGDYYGIPTHGVPAMRSKIDPILEARQKYAYGPQHDYLDHPDVIGWTREGDSSHPKSGLATLITDGPGGSKRMYAGLKNAGETWYDITGNRSDTVKIGSDGWGEFHVNDGSVSIYVQK

SEQ ID NO: 39408 - protein, 478 aa, Bacillus sp.
NGTMMQYFEWYLPNDGNHWNRLNSDASNLKSKGITAVWIPPAWKGASQNDVGYGAYDLYDLGEFNQKGTVRTKYGTRSQLQAAVTSLKNNGIQVYGDVVMNHKGGADATEMVRAVEVNPNNRNQEVTGEYTIEAWTRFDFPGRGNTHSSFKWRWYHFDGVDWDQSRRLNNRIYKFRGKAWDWEVDTEFGNYDYLMYADYDMDHPEVVNELRNWGVWYTNTLGLDGFRIDAVKHIKYSFTRDWINHVRSATGKNMFAVAEFWKNDLGAIENYLQKTNWNHSVFDVPLHYNLYNASKSGGNYDMRFIFNGTVVQRHPSHAVTFVDNHDSQPEEALESFVEEWFKPLAYALTLTREQGYPSVFYGDYYGIPTHGVPAMRSKIDPILEARQKYAYGPQHDYLDHPDVIGWTREGDSSHPKSGLATLITDGPGGSKRMYAGLKNAGETWYDITGNRSDTVKIGSDGWGEFHVNDGSVSIYVQK

SEQ ID NO: 39409 - protein, 478 aa, Bacillus sp.
NGTMMQYFEWYLPNDGNHWNRLNSDASNLKSKGITAVWIPPAWKGASQNDVGYGAYDLYDLGEFNQKGTVRTKYGTRSQLQAAVTSLKNNGIQVYGDVVMNHKGGADATEMVRAVEVNPNNRNQEVTGEYTIEAWTRFDFPGRGNTHSSFKWRWYHFDGVDWDQSRYLNNRIYKFRGKAWDWEVDTEFGNYDYLMYADYDMDHPEVVNELRNWGVWYTNTLGLDGFRIDAVKHIKYSFTRDWINHVRSATGKNMFAVAEFWKNDLGAIENYLQKTNWNHSVFDVPLHYNLYNASKSGGNYDMRNIFNGTVVQRHPSHAVTFVDNHDSQPEEALESFVEEWFKPLAYALTLTREQGYPSVFYGDYYGIPTHGVPAMRSKIDPILEARQKYAYGPQHDYLDHPDVIGWTREGDSSHPKSGLATLITDGPGGSKRMYAGLKNAGETWYDITGNRSDTVKIGSDGWGEFHVNDGSVSIYVQK

SEQ ID NO: 39410 - protein, 478 aa, Bacillus sp.
NGTMMQYFEWYLPNDGNHWNRLNSDASNLKSKGITAVWIPPAWKGASQNDVGYGAYDLYDLGEFNQKGTVRTKYGTRSQLQAAVTSLKNNGIQVYGDVVMNHKGGADATEMVRAVEVNPNNRNQEVTGEYTIEAWTRFDFPGRGNTHSSFKWRWYHFDGVDWDQSRRLNNRIYKFRGKAWDWEVDTEFGNYDYLMYADYDMDHPEVVDELRNWGVWYTNTLGLDGFRIDAVKHIKYSFTRDWINHVRSATGKNMFAVAEFWKNDLGAIENYLQKTNWNHSVFDVPLHYNLYNASKSGGNYDMRNIFNGTVVQRHPSHAVTFVDNHDSQPEEALESFVEEWFKPLAYALTLTREQGYPSVFYGDYYGIPTHGVPAMRSKIDPILEARQKYAYGPQHDYLDHPDVIGWTREGDSSHPKSGLATLITDGPGGSKRMYAGLKNAGETWYDITGNRSDTVKIGSDGWGEFHVNDGSVSIYVQK

SEQ ID NO: 39411 - protein, 478 aa, Bacillus sp.
NGTMMQYFEWYLPNDGNHWNRLNSDASNLKSKGITAVWIPPAWKGISQNDVGYGAYDLYDLGEFNQKGTVRTKYGTRSQLQAAVTSLKNNGIQVYGDVVMNHKGGADATEMVRAVEVNPNNRNQEVTGEYTIEAWTRFDFPGRGNTHSSFKWRWYHFDGVDWDQSRRLDNRIYKFRGKAWDWEVDTEFGNYDYLMYADYDMDHPEVVNELRNWGVWYTNTLGLDGFRIDAVKHIKYSFTRDWINHVRSATGKNMFAVAEFWKNDLGAIENYLQKTNWNHSVFDVPLHYNLYNASKSGGNYDMRNIFNGTVVQRHPSHAVTFVDNHDSQPEEALESFVEEWFKPLAYALTLTREQGYPSVFYGDYYGIPTHGVPAMRSKIDPILEARQKYAYGPQHDYLDHPDVIGWTREGDSSHPKSGLATLITDGPGGSKRMYAGLKNAGETWYDITGNRSDTVKIGSDGWGEFHVNDGSVSIYVQK

SEQ ID NO: 39412 - protein, 478 aa, Bacillus sp.
NGTMMQYFEWYLPNDGNHWNRLNSDASNLKSKGITAVWIPPAWKGASQNDVGYGAYDLYDLGEFNQKGTVRTKYGTRSQLQAAVTSLKNNGIQVYGDVVMNHKGGADATEMVRAVEVNPNNRNQEVTGEYTIEAWTRFDFPGRGNTHSSFKWRWYHFDGVDWDQSRRLNNRIYKFRGKAWDWEVDTENGFYDYLMYADIDYDHPEVVGTLRNWGVWYTNTLGLDGFRIDAVKHIKYSFTRDWINHVRSATGKNMFAVAEFWKNDLGAIENYLQKTNWNHSVFDVPLHYNLYNASKSGGNYDMRNIFNGTVVQRHPSHAVTFVDNHDSQPEEALESFVEEWFKPLAYALTLTREQGYPSVFYGDYYGIPTHGVPAMRSKIDPILEARQKYAYGPQHDYLDHPDVIGWTREGDSSHPKSGLATLITDGPGGSKRMYAGLKNAGETWYDITGNRSDTVKIGSDGWGEFHVNDGSVSIYVQK

SEQ ID NO: 39413 - protein, 478 aa, Bacillus sp.
NGTMMQYFEWYLPNDGNHWNRLNSDASNLKSKGITAVWIPPAWKGASQNDVGYGAYDLYDLGEFNQKGTVRTKYGTRSQLQAAVTSLKNNGIQVYGDVVMNHKGGADATEMVRAVEVNPNNRNQEVTGEYTIEAWTRFDFPGRGNTHSSFKWRWYHFDGVDWDQSRQTQNRIYKFRGKAWDWEVDTEFGNYDYLMYADYDMDHPEVVNELRNWGVWYTNTLGLDGFRIDAVKHIKYSFTRDWINHVRSATGKNMFAVAEFWKNDLGAIENYLQKTNWNHSVFDVPLHYNLYNASKSGGNYDMRNIFNGTVVQRHPSHAVTFVDNHDSQPEEALESFVEEWFKPLAYALTLTREQGYPSVFYGDYYGIPTHGVPAMRSKIDPILEARQKYAYGPQHDYLDHPDVIGWTREGDSSHPKSGLATLITDGPGGSKRMYAGLKNAGETWYDITGNRSDTVKIGSDGWGEFHVNDGSVSIYVQK

SEQ ID NO: 39414 - protein, 478 aa, Synthetic construct
NGTMMQYFEWYLPNDGNHWNRLNSDASNLKSKGITAVWIPPAWKGASQNDVGYGAYDLYDLGEFNQKGTVRTKYGTRSQLQAAVTSLKNNGIQVYGDVVMNHKGGADATEMVRAVEVNPNNRNQEVTGEYTIEAWTRFDFPGRGNTHSSFKWRWYHFDGVDWDQSRRLNNRIYKFRGKAWDWEVDTENGNYDYLMYADIDMDHPEGVNELRNWGVWYTNTLGLDGFRIDAVKHIKYSFTRDWINHVRSATGKNMFAVAEFWKNDLGAIENYLQKTNWNHSVFDVPLHYNLYNASKSGGNYDMRNIFNGTVVQRHPSHAVTFVDNHDSQPEEALESFVEEWFKPLAYALTLTREQGYPSVFYGDYYGIPTHGVPAMRSKIDPILEARQKYAYGPQHDYLDHPDVIGWTREGDSSHPKSGLATLITDGPGGSKRMYAGLKNAGETWYDITGNRSDTVKIGSDGWGEFHVNDGSVSIYVQK

SEQ ID NO: 39415 - protein, 478 aa, Synthetic construct
NGTMMQYFEWYLPNDGNHWNRLNSDASNLKSKGITAVWIPPAWKGASQNDVGYGAYDLYDLGEFNQKGTVRTKYGTRSQLQAAVTSLKNNGIQVYGDVVMNHKGGADATEMVRAVEVNPNNRNQEVTGEYTIEAWTRFDFPGRGNTHSSFKWRWYHFDGVDWDQSRRLNNRIYKFRGKAWDWEVDTENGNYDYLMYADIDMDHPEVVNELRNWGVWYTNTLGLDGFRIDAVKHIKYSFTRDWINHVRSATGKNMFAVAEFWKNDLGAIENYLQKTNWNHSVFDVPLHYNLYNASKSGGNYDMRNIFNGTVVQRHPSHAVTFVDNHDSQPEEALESFVEEWFKPLAYALTLTREQGYPSVFYGDYYGIPTHGVPAMRSKIDPILEARQKYAYGPQHDYLDHPDVIGWTREGDSSHPKSGLATLITDGPGGSKRMYAGLKNAGETWYDITGNRSDTVTIGSDGWGEFHVNDGSVSIYVQK

SEQ ID NO: 39416 - protein, 478 aa, Bacillus sp.
NGTMMQYFEWYLPNDGNHWNRLNSDASNLKSKGITAVWIPPAWKGASQNDVGYGAYDLYDLGEFNQKGTVRTKYGTRSQLQAAVTSLKNNGIQVYGDVVMNHKGGADATEMVRAVEVNPNNRNQEVTGEYTIEAWTRFDFPGRGNTHSSFKWRWYHFDGVDWDQSRRLNNRIYKFRGKAWDWEVDTEFGNYDYLMYADYDMDHPEVVNELRNWGVWYTNTLGLDGFRIDAVKHIKSSFTRDWINHVRSATGKNMFAVAEFWKNDLGAIENYLQKTNWNHSVFDVPLHYNLYNASKSGGNYDMRNIFNGTVVQRHPSHAVTFVDNHDSQPEEALESFVEEWFKPLAYALTLTREQGYPSVFYGDYYGIPTHGVPAMRSKIDPILEARQKYAYGPQHDYLDHPDVIGWTREGDSSHPKSGLATLITDGPGGSKRMYAGLKNAGETWYDITGNRSDTVKIGSDGWGEFHVNDGSVSIYVQK

SEQ ID NO: 39417 - protein, 478 aa, Bacillus sp.
NGTMMQYFEWYLPNDGNHWNRLNSDASNLKSKGITAVWIPPAWKGASQNDVGYGAYDLYDLGEFNQKGTVRTKYGTRSQLQAAVTSLKNNGIQVYGDVVMNHKGGADATEMVRAVEVNPNNRNQEVTGEYTIEAWTRFDFPGRGNTHSSFKWRWYHFDGVDWDQSREINNRIYKFRGKAWDWEVDTEFGNYDYLMYTDYDMDHPEVVNELRNWGVWYTNTLGLDGFRIDAVKHIKYSFTRDWINHVRSATGKNMFAVAEFWKNDLGAIENYLQKTNWNHSVFDVPLHYNLYNASKSGGNYDMRNIFNGTVVQRHPSHAVTFVDNHDSQPEEALESFVEEWFKPLAYALTLTREQGYPSVFYGDYYGIPTHGVPAMRSKIDPILEARQKYAYGPQHDYLDHPDVIGWTREGDSSHPKSGLATLITDGPGGSKRMYAGLKNAGETWYDITGNRSDTVKIGSDGWGEFHVNDGSVSIYVQK

SEQ ID NO: 39418 - protein, 478 aa, Bacillus sp.
NGTMMQYFEWYLPNDGNHWNRLNSDASNLKSKGITAVWIPPAWKGASQNDVGYGAYDLYDLGEFNQKGTVRTKYGTRSQLQAAVTSLKNNGIQVYGDVVMNHKGGADATEMVRAVEVNPNNRNQEVTGEYTIEAWTRFDFPGRGNTHSSFKWRWYHFDGVDWDQSRRLNNRIYKFRGKAWDWEVDAEFGNYDYLMYADYDMDHPEVVNELRNWGVWYTNTLGLDGFRIDAVKHIKYSFTRDWINHVRSATGKNMFAVAEFWKNDLGAIENYLQKTNWNHSVFDVPLHYNLYNASKSGGNYDMRNIFNGTVVQRHPSHAVTFVDNHDSQPEEALESFVEEWFKPLAYALTLTREQGYPSVFYGDYYGIPTHGVPAMRSKIDPILEARQKYAYGPQHDYLDHPDVIGWTREGDSSHPKSGLATLITDGPGGSKRMYAGLKNAGETWYDITGNRSDTVKIGSDGWGEFHVNDGSVSIYVQK

SEQ ID NO: 39419 - protein, 478 aa, Bacillus sp.
NGTMMQYFEWYLPNDGNHWNRLNSDASNLKSKGITAVWIPPAWKGASQNDVGYGAYDLYDLGEFNQKGTVRTKYGTRSQLQAAVTSLKNNGIQVYGDVVMNHKGGADATEMVRAVEVNPNNRNQEVTGEYTIEAWTRFDFPGRGNTHSSFKWRWYHFDGVDWDQSRRLNNRIYKFRGKAWDWEVDTEFGNYDYLMYADYDMDHPEVVNELRNWGVWYTNTLGLDGFRIDAVKHIKYSFTRDWINHVRSATGKNMFAVAEFWKNDLGSIENYLQKTNWNHSVFDVPLHYNLYNASKSGGNYDMRNIFNGTVVQRHPSHAVTFVDNHDSQPEEALESFVEEWFKPLAYALTLTREQGYPSVFYGDYYGIPTHGVPAMRSKIDPILEARQKYAYGPQHDYLDHPDVIGWTREGDSSHPKSGLATLITDGPGGSKRMYAGLKNAGETWYDITGNRSDTVKIGSDGWGEFHVNDGSVSIYVQK

SEQ ID NO: 39420 - protein, 478 aa, Bacillus sp.
NGTMMQYFEWYLPNDGNHWNRLNSDASNLKSKGITAVWIPPAWKGASQNDVGYGAYDLYDLGEFNQKGTVRTKYGTRSQLQAAVTSLKNNGIQVYGDVVMNHKGGADATEMVRAVEVNPNNRNQEVTGEYTIEAWTRFDFPGRGNTHSSFKWRWYHFDGVDWDQSRRLNNRIYKFRGKAWDWEVDTEFGNYDYLMYADYDMDHPEVVNELRNWGVWYTNTLGLDGFRIDAVKHIKYSFTRDWINHVRSATGKNMFAVAEFWNNDLGMIENYLQKTNWNHSVFDVPLHYNLYNASKSGGNYDMRNIFNGTVVQRHPSHAVTFVDNHDSQPEEALESFVEEWFKPLAYALTLTREQGYPSVFYGDYYGIPTHGVPAMRSKIDPILEARQKYAYGPQHDYLDHPDVIGWTREGDSSHPKSGLATLITDGPGGSKRMYAGLKNAGETWYDITGNRSDTVKIGSDGWGEFHVNDGSVSIYVQK

SEQ ID NO: 39421 - protein, 478 aa, Synthetic construct
NGTMMQYFEWYLPNDGNHWNRLNSDASNLKSKGITAVWIPPAWKGASQNDVGYGAYDLYDLGEFNQKGTVRTKYGTRSQLQAAVTSLKNNGIQVYGDVVMNHKGGADATEMVRAVEVNPNNRNQEVTGEYTIEAWTRFDFPGRGNTHSSFKWRWYHFDGVDWDQSRRLNNRIYKFRGKAWDWEVDTENGNYDYLMYADIDMDHVEVVNELRNWGVWYTNTLGLDGFRIDAVKHIKYSFTRDWINHVRSATGKNMFAVAEFWKNDLGAIENYLQKTNWNHSVFDVPLHYNLYNASKSGGNYDMRNIFNGTVVQRHPSHAVTFVDNHDSQPEEALESFVEEWFKPLAYALTLTREQGYPSVFYGDYYGIPTHGVPAMRSKIDPILEARQKYAYGPQHDYLDHPDVIGWTREGDSSHPKSGLATLITDGPGGSKRMYAGLKNAGETWYDITGNRSDTVKIGSDGWGEFHVNDGSVSIYVQK

SEQ ID NO: 39422 - protein, 478 aa, Bacillus sp.
NGTMMQYFEWYLPNDGNHWNRLNSDASNLKSKGITAVWIPPAWKGVSQNDVGYGAYDLYDLGEFNQKGTVRTKYGTRSQLQAAVTSLKNNGIQVYGDVVMNHKGGADATEMVRAVEVNPNNRNQEVTGEYTIEAWTRFDFPGRGNTHSSFKWRWYHFDGVDWDQSRRVNNRIYKFRGKAWDWEVDTEFGNYDYLMYADYDMDHPEVVNELRNWGVWYTNTLGLDGFRIDAVKHIKYSFTRDWINHVRSATGKNMFAVAEFWKNDLGAIENYLQKTNWNHSVFDVPLHYNLYNASKSGGNYDMRNIFNGTVVQRHPSHAVTFVDNHDSQPEEALESFVEEWFKPLAYALTLTREQGYPSVFYGDYYGIPTHGVPAMRSKIDPILEARQKYAYGPQHDYLDHPDVIGWTREGDSSHPKSGLATLITDGPGGSKRMYAGLKNAGETWYDITGNRSDTVKIGSDGWGEFHVNDGSVSIYVQK

SEQ ID NO: 39423 - protein, 478 aa, Bacillus sp.
NGTMMQYFEWYLPNDGNHWNRLNSDASNLKSKGITAVWIPPAWKGASQNDVGYGAYDLYDLGEFNQKGTVRTKYGTRSQLQAAVTSLKNNGIQVYGDVVMNHKGGADATEMVRAVEVNPNNRNQEVTGEYTIEAWTRFDFPGRGNTHSSFKWRWYHFDGVDWDMSRRLNNRIYKFRGKAWDWEVDTEFGNYDYLMYADYDMDHPEVVNELRNWGVWYTNTLGLDGFRIDAVKHIKYSFTRDWINHVRSATGKNMFAVAEFWKNDLGAIENYLQKTNWNHSVFDVPLHYNLYNASKSGGNYDMRNIFNGTVVQRHPSHAVTFVDNHDSQPEEALESFVEEWFKPLAYALTLTREQGYPSVFYGDYYGIPTHGVPAMRSKIDPILEARQKYAYGPQHDYLDHPDVIGWTREGDSSHPKSGLATLITDGPGGSKRMYAGLKNAGETWYDITGNRSDTVKIGSDGWGEFHVNDGSVSIYVQK

SEQ ID NO: 39424 - protein, 478 aa, Bacillus sp.
NGTMMQYFEWYLPNDGNHWNRLNSDASNLKSKGITAVWIPPAWKGISQNDVGYGAYDLYDLGEFNQKGTVRTKYGTRSQLQAAVTSLKNNGIQVYGDVVMNHKGGADATEMVRAVEVNPNNRNQEVTGEYTIEAWTRFDFPGRGNTHSSFKWRWYHFDGVDWDQSREFNNRIYKFRGKAWDWEVDTEFGNYDYLMYADYDMDHPEVVNELRNWGVWYTNTLGLDGFRIDAVKHIKYSFTRDWINHVRSATGKNMFAVAEFWKNDLGAIENYLQKTNWNHSVFDVPLHYNLYNASKSGGNYDMRNIFNGTVVQRHPSHAVTFVDNHDSQPEEALESFVEEWFKPLAYALTLTREQGYPSVFYGDYYGIPTHGVPAMRSKIDPILEARQKYAYGPQHDYLDHPDVIGWTREGDSSHPKSGLATLITDGPGGSKRMYAGLKNAGETWYDITGNRSDTVKIGSDGWGEFHVNDGSVSIYVQK

SEQ ID NO: 39425 - protein, 478 aa, Synthetic construct
NGTMMQYFEWYLPNDGNHWNRLNSDASNLKSKGITAVWIPPAWKGASQNDVGYGAYDLYDLGEFNQKGTVRTKYGTRSQLQAAVTSLKNNGIQVYGDVVMNHKGGADATEMVRAVEVNPNNRNQEVTGEYTIEAWTRFDFPGRGNTHSSFKWRWYHFDGVDWDQSRRLNNRIYKFRGKAWDWEVDTENGNYDYLMYADYDMDFPEVVNEHRNWGVWYTNTLGLDGFRIDAVKHIKYSFTRDWINHVRSATGKNMFAVAEFWKNDLGAIENYLQKTNWNHSVFDVPLHYNLYNASKSGGNYDMRNIFNGTVVQRHPSHAVTFVDNHDSQPEEALESFVEEWFKPLAYALTLTREQGYPSVFYGDYYGIPTHGVPAMRSKIDPILEARQKYAYGPQHDYLDHPDVIGWTREGDSSHPKSGLATLITDGPGGSKRMYAGLKNAGETWYDITGNRSDTVKIGSDGWGEFHVNDGSVSIYVQK

SEQ ID NO: 39426 - protein, 478 aa, Bacillus sp.
NGTMMQYFEWYLPNDGNHWNRLNSDASNLKSKGITAVWIPPAWKGASQNDVGYGAYDLYDLGEFNQKGTVRTKYGTRSQLQAAVTSLKNNGIQVYGDVVMNHKGGADATEMVRAVEVNPNNRNQEVTGEYTIEAWTRFDFPGRGNTHSSFKWRWYHFDGVDWDQSRRLNNRIYKFRGKAWDWEVDTEFGNYDYLMYADYDMDHPEVVNELRNWGVWYTNTLGLDGFRIDAVKHIKYSFTRDWINHVRSATGKNMFAVAEFWHNDLGEIENYLQKTNWNHSVFDVPLHYNLYNASKSGGNYDMRNIFNGTVVQRHPSHAVTFVDNHDSQPEEALESFVEEWFKPLAYALTLTREQGYPSVFYGDYYGIPTHGVPAMRSKIDPILEARQKYAYGPQHDYLDHPDVIGWTREGDSSHPKSGLATLITDGPGGSKRMYAGLKNAGETWYDITGNRSDTVKIGSDGWGEFHVNDGSVSIYVQK

SEQ ID NO: 39427 - protein, 478 aa, Bacillus sp.
NGTMMQYFEWYLPNDGNHWNRLNSDASNLKSKGITAVWIPPAWKGASQNDVGYGAYDLYDLGEFNQKGTVRTKYGTRSQLQAAVTSLKNNGIQVYGDVVMNHKGGADATEMVRAVEVNPNNRNQEVTGEYTIEAWTRFDFPGRGNTHSSFKWRWYHFDGVDWDQSRKLNNRIYKFRGKAWDWEVDTEFGNYDYLMYVDYDMDHPEVVNELRNWGVWYTNTLGLDGFRIDAVKHIKYSFTRDWINHVRSATGKNMFAVAEFWKNDLGAIENYLQKTNWNHSVFDVPLHYNLYNASKSGGNYDMRNIFNGTVVQRHPSHAVTFVDNHDSQPEEALESFVEEWFKPLAYALTLTREQGYPSVFYGDYYGIPTHGVPAMRSKIDPILEARQKYAYGPQHDYLDHPDVIGWTREGDSSHPKSGLATLITDGPGGSKRMYAGLKNAGETWYDITGNRSDTVKIGSDGWGEFHVNDGSVSIYVQK

SEQ ID NO: 39428 - protein, 478 aa, Synthetic construct
NGTMMQYFEWYLPNDGNHWNRLNSDASNLKSKGITAVWIPPAWKGASQNDVGYGAYDLYDLGEFNQKGTVRTKYGTRSQLQAAVTSLKNNGIQVYGDVVMNHKGGADATEMVRAVEVNPNNRNQEVTGEYTIEAWTRFDFPGRGNTHSSFKWRWYHFDGVDWDQSRRLNNRIYKFRGKAWDWEVDTENGNYDYLMYADIDMDHPEVVNELRNWGVWYTNTLGLDGFRIDAVKHIKYSFTRDWINHVRSATGKNMFAVAEFWKNDLGAIENYLQKTNWNHSVFDVPLHYNLYNASKSGGNYDMRNIFNGTVVQRHPSHAVTFVDNHDSQPEEALESFVEEWFKPLAYALTLTREQGYPSVFYGDYYGIPTHGVPAMRSKIDPILEARQKYAYGPQHDYLDHPDVIGWTREGDSQHPKSGLATLITDGPGGSKRMYAGLKNAGETWYDITGNRSDTVKIGSDGWGEFHVNDGSVSIYVQK

SEQ ID NO: 39429 - protein, 478 aa, Synthetic construct
NGTMMQYFEWYLPNDGNHWNRLNSDASNLKSKGITAVWIPPAWKGASQNDVGYGAYDLYDLGEFNQKGTVRTKYGTRSQLQAAVTSLKNNGIQVYGDVVMNHKGGADATEMVRAVEVNPNNRNQEVTGEYTIEAWTRFDFPGRGNTHSSFKWRWYHFDGVDWDQSRRLNNRIYKFRGKAWDWEVDTENGNYDYLMYADYDMDHPESVNELRNWGVWYTNTLGLDGFRIDAVKHIKYSFTRDWINHVRSATGKNMFAVAEFWKNDLGAIENYLQKTNWNHSVFDVPLHYNLYNASKSGGNYDMRNIFNGTVVQRHPSHAVTFVDNHDSQPEEALESFVEEWFKPLAYALTLTREQGYPSVFYGDYYGIPTHGVPAMRSKIDPILEARQKYAYGPQHDYLDHPDVIGWTREGDSSHPKSGLATLITDGPGGSKRMYAGLKNAGETWYDITGNRSDTVKIGSDGWGEFHVNDGSVSIYVQK

SEQ ID NO: 39430 - protein, 478 aa, Bacillus sp.
NGTMMQYFEWYLPNDGNHWNRLNSDASNLKSKGITAVWIPPAWKGASQNDVGYGAYDLYDLGEFNQKGTVRTKYGTRSQLQAAVTSLKNNGIQVYGDVVMNHKGGADATEMVRAVEVNPNNRNQEVTGEYTIEAWTRFDFPGRGNTHSSFKWRWYHFDGVDWDRSRRLNNRIYKFRGKAWDWEVDTEFGNYDYLMYADYDMDHPEVVNELRNWGVWYTNTLGLDGFRIDAVKHIKYSFTRDWINHVRSATGKNMFAVAEFWKNDLGAIENYLQKTNWNHSVFDVPLHYNLYNASKSGGNYDMRNIFNGTVVQRHPSHAVTFVDNHDSQPEEALESFVEEWFKPLAYALTLTREQGYPSVFYGDYYGIPTHGVPAMRSKIDPILEARQKYAYGPQHDYLDHPDVIGWTREGDSSHPKSGLATLITDGPGGSKRMYAGLKNAGETWYDITGNRSDTVKIGSDGWGEFHVNDGSVSIYVQK

SEQ ID NO: 39431 - protein, 478 aa, Bacillus sp.
NGTMMQYFEWYLPNDGNHWNRLNSDASNLKSKGITAVWIPPAWKGASQNDVGYGAYDLYDLGEFNQKGTVRTKYGTRSQLQAAVTSLKNNGIQVYGDVVMNHKGGADATEMVRAVEVNPNNRNQEVTGEYTIEAWTRFDFPGRGNTHSSFKWRWYHFDGVDWDQSRDLNNRIYKFRGKAWDWEVDTEFGNYDYLMYADYDMDHPEVVNELRNWGVWYTNTLGLDGFRIDAVKHIKYSFTRDWINHVRSATGKNMFAVAEFWKNDLGAIENYLQKTNWNHSVFDVPLHYNLYNASKSGGNYDMRNIFNGTVVQRHPSHAVTFVDNHDSQPEEALESFVEEWFKPLAYALTLTREQGYPSVFYGDYYGIPTHGVPAMRSKIDPILEARQKYAYGPQHDYLDHPDVIGWTREGDSSHPKSGLATLITDGPGGSKRMYAGLKNAGETWYDITGNRSDTVKIGSDGWGEFHVNDGSVSIYVQK

SEQ ID NO: 39432 - protein, 478 aa, Bacillus sp.
NGTMMQYFEWYLPNDGNHWNRLNSDASNLKSKGITAVWIPPAWKGASQNDVGYGAYDLYDLGEFNQKGTVRTKYGTRSQLQAAVTSLKNNGIQVYGDVVMNHKGGADATEMVRAVEVNPNNRNQEVTGEYTIEAWTRFDFPGRGNTHSSFKWRWYHFDGVDWDQSRRLNNRIYKFRGKAWDWEVDTEFGNYDYLMYADYDMDHPEVVNELRNWGVWYTNTLGLDGFRIDAVKHIKYSFTRDWINHVRSATGKNMFAVAEFWKNDLGAIENYLQKTNWNHSVFDVPLHYNLYNASKSGGNYDMRNIFNGTVVQRHPSHAVTFVDNHDSQPEEALESFVEEWFKPLAYALTLTREQGYPSVFYGDYYGIPTHGVPAMRSKIDPILHARQKYAYGPQHDYLDHPDVIGWTREGDSSHPKSGLATLITDGPGGSKRMYAGLKNAGETWYDITGNRSDTVKIGSDGWGEFHVNDGSVSIYVQK

SEQ ID NO: 39433 - protein, 478 aa, Synthetic construct
NGTMMQYFEWYLPNDGNHWNRLNSDASNLKSKGITAVWIPPAWKGASQNDVGYGAYDLYDLGEFNQKGTVRTKYGTRSQLQAAVTSLKNNGIQVYGDVVMNHKGGADATEMVRAVEVNPNNRNQEVTGEYTIEAWTRFDFPGRGNTHSSFKWRWYHFDGVDWDQSRRLNNRIYKFRGKAWDWEVDAEFGNYDYLMYADIDMDHPEVVNELRNWGVWYTNTLGLDGFRIDAVKHIKYSFTRDWINHVRSATGKNMFAVAEFWKNDLGAIENYLQKTNWNHSVFDVPLHYNLYNASKSGGNYDMRNIFNGTVVQRHPSHAVTFVDNHDSQPEEALESFVEEWFKPLAYALTLTREQGYPSVFYGDYYGIPTHGVPAMRSKIDPILEARQKYAYGPQHDYLDHPDVIGWTREGDSSHPKSGLATLITDGPGGSKRMYAGLKNAGETWYDITGNRSDTVKIGSDGWGEFHVNDGSVSIYVQK

SEQ ID NO: 39434 - protein, 478 aa, Bacillus sp.
NGTMMQYFEWYLPNDGNHWNRLNSDASNLKSKGITAVWIPPAWKGASQNDVGYGAYDLYDLGEFNQKGTVRTKYGTRSQLQAAVTSLKNNGIQVYGDVVMNHKGGADATEMVRAVEVNPNNRNQEVTGEYTIEAWTRFDFPGRGNTHSSFKWRWYHFDGVDWDQSRRLNNRIYKFRGKAWDWEVDTEFGNYDYLMYADYDMDHPEVVNELRNWGVWYTNTLGLDGFRIDAVKHIKYSFTRDWINHVRSATGKNMFAVAEFWLNDLGLIENYLQKTNWNHSVFDVPLHYNLYNASKSGGNYDMRNIFNGTVVQRHPSHAVTFVDNHDSQPEEALESFVEEWFKPLAYALTLTREQGYPSVFYGDYYGIPTHGVPAMRSKIDPILEARQKYAYGPQHDYLDHPDVIGWTREGDSSHPKSGLATLITDGPGGSKRMYAGLKNAGETWYDITGNRSDTVKIGSDGWGEFHVNDGSVSIYVQK

SEQ ID NO: 39435 - protein, 478 aa, Bacillus sp.
NGTMMQYFEWYLPNDGNHWNRLNSDASNLKSKGITAVWIPPAWKGASQNDVGYGAYDLYDLGEFNQKGTVRTKYGTRSQLQAAVTSLKNNGIQVYGDVVMNHKGGADATEMVRAVEVNPNNRNQEVTGEYTIEAWTRFDFPGRGNTHSSFKWRWYHFDGVDFDQSRQLNNRIYKFRGKAWDWEVDTEFGNYDYLMYADYDMDHPEVVNELRNWGVWYTNTLGLDGFRIDAVKHIKYSFTRDWINHVRSATGKNMFAVAEFWKNDLGAIENYLQKTNWNHSVFDVPLHYNLYNASKSGGNYDMRNIFNGTVVQRHPSHAVTFVDNHDSQPEEALESFVETWFKPLAYALTLTREQGYPSVFYGDYYGIPTHGVPAMRSKIDPILEARQKYAYGPQHDYLDHPDVIGWTREGDSSHPKSGLATLITDGPGGSKRMYAGLKNAGETWYDITGNRSDTVKIGSDGWGEFHVNDGSVSIYVQK

SEQ ID NO: 39436 - protein, 478 aa, Bacillus sp.
NGTMMQYFEWYLPNDGNHWNRLNSDASNLKSKGITAVWIPPAWKGASQNDVGYGAYDLYDLGEFNQKGTVRTKYGTRSQLQAAVTSLKNNGIQVYGDVVMNHKGGADATEMVRAVEVNPNNRNQEVTGEYTIEAWTRFDFPGRGNTHSSFKWRWYHFDGVDWDQSRRLNNRIYKFRGKAWDWEVDTEFGNYDYLMYADYDMDHPEVVNELRNWGVWYTNTLGLDGFRIDAVKHIKYSFTRDWINHVRSATGKNMFAVAEFWNNDLGCIENYLQKTNWNHSVFDVPLHYNLYNASKSGGNYDMRNIFNGTVVQRHPSHAVTFVDNHDSQPEEALESFVEEWFKPLAYALTLTREQGYPSVFYGDYYGIPTHGVPAMRSKIDPILEARQKYAYGPQHDYLDHPDVIGWTREGDSSHPKSGLATLITDGPGGSKRMYAGLKNAGETWYDITGNRSDTVKIGSDGWGEFHVNDGSVSIYVQK

SEQ ID NO: 39437 - protein, 478 aa, Bacillus sp.
NGTMMQYFEWYLPNDGNHWNRLNSDASNLKSKGITAVWIPPAWKGASQNDVGYGAYDLYDLGEFNQKGTVRTKYGTRSQLQAAVTSLKNNGIQVYGDVVMNHKGGADATEMVRAVEVNPNNRNQEVTGEYTIEAWTRFDFPGRGNTHSSFKWRWYHFDGVDWDQSRRLNNRIYKFRGKAWDWEVDTEFGNYDYLMYADYDMDHPEVVNELRNWGVWYTNTLGLDGFRIDAVKHIKYSFTRDWINHVRSATGKNMFAVAEFWKNDLGAIENYLQKTNWNHSVFDVPLHYNLYNASKSGGNYDMRNIFNGTVVQRHPSHAVTFVDNHDSQPEEALESFVSEWFKPLAYALTLTREQGYPSVFYGDYYGIPTHGVPAMRSKIDPILEARQKYAYGPQHDYLDHPDVIGWTREGDSSHPKSGLATLITDGPGGSKRMYAGLKNAGETWYDITGNRSDTVKIGSDGWGEFHVNDGSVSIYVQK

SEQ ID NO: 39438 - protein, 478 aa, Bacillus sp.
NGTMMQYFEWYLPNDGNHWNRLNSDASNLKSKGITAVWIPPAWKGASQNDVGYGAYDLYDLGEFNQKGTVRTKYGTRSQLQAAVTSLKNNGIQVYGDVVMNHKGGADATEMVRAVEVNPNNRNQEVTGEYTIEAWTRFDFPGRGNTHSSFKWRWYHFDGVDWDQSRRLNNRIYKFRGKAWDWEVDTEFGNYDYLMYADYDMDHPEVVNELRNWGVWYTNTLGLDGFRIDAVKHIKYSFTRDWINHVRSATGKNMFAVAEFWHNDLGCIENYLQKTNWNHSVFDVPLHYNLYNASKSGGNYDMRNIFNGTVVQRHPSHAVTFVDNHDSQPEEALESFVEEWFKPLAYALTLTREQGYPSVFYGDYYGIPTHGVPAMRSKIDPILEARQKYAYGPQHDYLDHPDVIGWTREGDSSHPKSGLATLITDGPGGSKRMYAGLKNAGETWYDITGNRSDTVKIGSDGWGEFHVNDGSVSIYVQK

SEQ ID NO: 39439 - protein, 478 aa, Synthetic construct
NGTMMQYFEWYLPNDGNHWNRLNSDASNLKSKGITAVWIPPAWKGASQNDVGYGAYDLYDLGEFNQKGTVRTKYGTRSQLQAAVTSLKNNGIQVYGDVVMNHKGGADATEMVRAVEVNPNNRNQEVTGEYTIEAWTRFDFPGRGNTHSSFKWRWYHFDGVDWDQSRRLNNRIYKFRGKAWDWEVDTENGNYDYLMYADFDMDFPEVVNEIRNWGVWYTNTLGLDGFRIDAVKHIKYSFTRDWINHVRSATGKNMFAVAEFWKNDLGAIENYLQKTNWNHSVFDVPLHYNLYNASKSGGNYDMRNIFNGTVVQRHPSHAVTFVDNHDSQPEEALESFVEEWFKPLAYALTLTREQGYPSVFYGDYYGIPTHGVPAMRSKIDPILEARQKYAYGPQHDYLDHPDVIGWTREGDSSHPKSGLATLITDGPGGSKRMYAGLKNAGETWYDITGNRSDTVKIGSDGWGEFHVNDGSVSIYVQK

SEQ ID NO: 39440 - protein, 478 aa, Bacillus sp.
NGTMMQYFEWYLPNDGNHWNRLNSDASNLKSKGITAVWIPPAWKGASQNDVGYGAYDLYDLGEFNQKGTVRTKYGTRSQLQAAVTSLKNNGIQVYGDVVMNHKGGADATEMVRAVEVNPNNRNQEVTGEYTIEAWTRFDFPGRGNTHSSFKWRWYHFDGVDWDQSRMLNNRIYKFRGKAWDWEVDTEFGNYDYLMYADYDMDHPEVVNELRNWGVWYTNTLGLDGFRIDAVKHIKYSFTRDWINHVRSATGKNMFAVAEFWKNDLGAIENYLQKTNWNHSVFDVPLHYNLYNASKSGGNYDMRNIFNGTVVQRHPSHAVTFVDNHDSQPEEALESFVEEWFKPLAYALTLTREQGYPSVFYGDYYGIPTHGVPAMRSKIDPILEARQKYAYGPQHDYLDHPDVIGWTREGDSSHPKSGLATLITDGPGGSKRMYAGLKNAGETWYDITGNRSDTVKIGSDGWGEFHVNDGSVSIYVQK

SEQ ID NO: 39441 - protein, 478 aa, Bacillus sp.
NGTMMQYFEWYLPNDGNHWNRLNSDASNLKSKGITAVWIPPAWKGASQNDVGYGAYDLYDLGEFNQKGTVRTKYGTRSQLQAAVTSLKNNGIQVYGDVVMNHKGGADATEMVRAVEVNPNNRNQEVTGEYTIEAWTRFDFPGRGNTHSSFKWRWYHFDGVDWDQSRNLTNRIYKFRGKAWDWEVDTEFGNYDYLMYADYDMDHPEVVNELRNWGVWYTNTLGLDGFRIDAVKHIKYSFTRDWINHVRSATGKNMFAVAEFWKNDLGAIENYLQKTNWNHSVFDVPLHYNLYNASKSGGNYDMRNIFNGTVVQRHPSNAVTFVDNHDSQPEEALESFVEEWFKPLAYALTLTREQGYPSVFYGDYYGIPTHGVPAMRSKIDPILEARQKYAYGPQHDYLDHPDVIGWTREGDSSHPKSGLATLITDGPGGSKRMYAGLKNAGETWYDITGNRSDTVKIGSDGWGEFHVNDGSVSIYVQK

SEQ ID NO: 39442 - protein, 478 aa, Bacillus sp.
NGTMMQYFEWYLPNDGNHWNRLNSDASNLKSKGITAVWIPPAWKGASQNDVGYGAYDLYDLGEFNQKGTVRTKYGTRSQLQAAVTSLKNNGIQVYGDVVMNHKGGADATEMVRAVEVNPNNRNQEVTGEYTIEAWTRFDFPGRGNTHSSFKWRWYHFDGVDWDQSRRLNNRIYKFRGKAWDWEVDTEFGNYDYLMYADYDMDHPEVVNELRNWGVWYTNTLGLDGFRIDAVKHIKYSFTRDWINHVRSATGKNMFAVAEFWKNDLGAIENYLQKTNWNHSVFDVPLHYNLYNASKSAGNYDMRNIFNGTVVQRHPSHAVTFVDNHDSQPEEALESFVETWFKPLAYALTLTREQGYPSVFYGDYYGIPTHGVPAMRSKIDPILEARQKYAYGPQHDYLDHPDVIGWTREGDSSHPKSGLATLITDGPGGSKRMYAGLKNAGETWYDITGNRSDTVKIGSDGWGEFHVNDGSVSIYVQK

SEQ ID NO: 39443 - protein, 478 aa, Bacillus sp.
NGTMMQYFEWYLPNDGNHWNRLNSDASNLKSKGITAVWIPPAWKAASQNDVGYGAYDLYDLGEFNQKGTVRTKYGTRSQLQAAVTSLKNNGIQVYGDVVMNHKGGADATEMVRAVEVNPNNRNQEVTGEYTIEAWTRFDFPGRGNTHSSFKWRWYHFDGVDWDQSRKTTNRIYKFRGKAWDWEVDTEFGNYDYLMYADYDMDHPEVVNELRNWGVWYTNTLGLDGFRIDAVKHIKYSFTRDWINHVRSATGKNMFAVAEFWKNDLGAIENYLQKTNWNHSVFDVPLHYNLYNASKSGGNYDMRNIFNGTVVQRHPSHAVTFVDNHDSQPEEALESFVEEWFKPLAYALTLTREQGYPSVFYGDYYGIPTHGVPAMRSKIDPILEARQKYAYGPQHDYLDHPDVIGWTREGDSSHPKSGLATLITDGPGGSKRMYAGLKNAGETWYDITGNRSDTVKIGSDGWGEFHVNDGSVSIYVQK

SEQ ID NO: 39444 - protein, 478 aa, Bacillus sp.
NGTMMQYFEWYLPNDGNHWNRLNSDASNLKSKGITAVWIPPAWKGASQNDVGYGAYDLYDLGEFNQKGTVRTKYGTRSQLQAAVTSLKNNGIQVYGDVVMNHKGGADATEMVRAVEVNPNNRNQEVTGEYTIEAWTRFDFPGRGNTHSSFKWRWYHFDGVDWDQSRRLNNRIYKFRGKAWDWEVDTEFGNYDYLMYADYDMDHPEVVNELRNWGVWYTNTLGLDGFRIDAVKHIKYSFTRDWINHVRSATGKNMFAVAEFWKNDLGAIENYLQKTAWNHSVFDVPLHYNLYNASKSGGNYDMRNIFNGTVVQRHPSHAVTFVDNHDSQPEEALESFVEEWFKPLAYALTLTREQGYPSVFYGDYYGIPTHGVPAMRSKIDPILEARQKYAYGPQHDYLDHPDVIGWTREGDSSHPKSGLATLITDGPGGSKRMYAGLKNAGETWYDITGNRSDTVKIGSDGWGEFHVNDGSVSIYVQK

SEQ ID NO: 39445 - protein, 478 aa, Bacillus sp.
NGTMMQYFEWYLPNDGNHWNRLNSDASNLKSKGITAVWIPPAWKGASQNDVGYGAYDLYDLGEFNQKGTVRTKYGTRSQLQAAVTSLKNNGIQVYGDVVMNHKGGADATEMVRAVEVNPNNRNQEVTGEYTIEAWTRFDFPGRGNTHSSFKWRWYHFDGVDWDQSRRSNNRIYKFRGKAWDWEVDTEFGNYDYLMYADYDMDHPEVVNELRNWGVWYTNTLGLDGFRIDAVKHIKYSFTRDWINHVRSATGKNMFAVAEFWKNDLGAIENYLQKTNWNHSVFDVPLHYNLYNASKSGGNYDMRNIFNGTVVQRHPSHAVTFVDNHDSQPEEALESFVEEWFKPLAYALTLTREQGYPSVFYGDYYGIPTHGVPAMRSKIDPILEARQKYAYGPQHDYLDHPDVIGWTREGDSSHPKSGLATLITDGPGGSKRMYAGLKNAGETWYDITGNRSDTVKIGSDGWGEFHVNDGSVSIYVQK

SEQ ID NO: 39446 - protein, 478 aa, Bacillus sp.
NGTMMQYFEWYLPNDGNHWNRLNSDASNLKSKGITAVWIPPAWKGASQNDVGYGAYDLYDLGEFNQKGTVRTKYGTRSQLQAAVTSLKNNGIQVYGDVVMNHKGGADATEMVRAVEVNPNNRNQEVTGEYTIEAWTRFDFPGRGNTHSSFKWRWYHFDGVDWDQSRQTNNRIYKFRGKAWDWEVDTEFGNYDYLMYADYDMDHPEVVNELRNWGVWYTNTLGLDGFRIDAVKHIKYSFTRDWINHVRSATGKNMFAVAEFWKNDLGAIENYLQKTNWNHSVFDVPLHYNLYNASKSGGNYDMRNIFNGTVVQRHPSHAVTFVDNHDSQPEEALESFVEEWFKPLAYALTLTREQGYPSVFYGDYYGIPTHGVPAMRSKIDPILEARQKYAYGPQHDYLDHPDVIGWTREGDSSHPKSGLATLITDGPGGSKRMYAGLKNAGETWYDITGNRSDTVKIGSDGWGEFHVNDGSVSIYVQK

SEQ ID NO: 39447 - protein, 478 aa, Synthetic construct
NGTMMQYFEWYLPNDGNHWNRLNSDASNLKSKGITAVWIPPAWKGASQNDVGYGAYDLYDLGEFNQKGTVRTKYGTRSQLQAAVTSLKNNGIQVYGDVVMNHKGGADATEMVRAVEVNPNNRNQEVTGEYTIEAWTRFDFPGRGNTHSSFKWRWYHFDGVDWDQSRRLNNRIYKFRGKAWDWEVDTENGNYDYLMYADIDMDHPEVVNELRNWGVWYTNTLGLDGFRIDAVKHIKYSFTRDWINHVRSATGKNMFAVAEFWKNDLGAIENYLQKTNWNHSVFDVPLHYNLYNASKSGGNYDMRNIFNGTVVQRHPSHAVTFVDNHDSQPEEALESFVEEWFKPLAYALTLTREQGYPSVFYGDYYGIPTHGVPAMRSKIDPILEARQKYAYGPQHDYLDHPDVIGWTREGDSRHPKSGLATLITDGPGGSKRMYAGLKNAGETWYDITGNRSDTVKIGSDGWGEFHVNDGSVSIYVQK

SEQ ID NO: 39448 - protein, 478 aa, Bacillus sp.
NGTMMQYFEWYLPNDGNHWNRLNSDASNLKSKGITAVWIPPAWKGASQNDAGYGAYDLYDLGEFNQKGTVRTKYGTRSQLQAAVTSLKNNGIQVYGDVVMNHKGGADATEMVRAVEVNPNNRNQEVTGEYTIEAWTRFDFPGRGNTHSSFKWRWYHFDGVDWDQSRRLNNRIYKFRGKAWDWEVDTEFGNYDYLMYADYDMDHPEVVNELRNWGVWYTNTLGLDGFRIDAVKHIKYSFTRDWINHVRSATGKNMFAVAEFWKNDLGAIENYLQKTNWNHSVFDVPLHYNLYNASKSGGNYDMRNIFNGTVVQRHPSHAVTFVDNHDSQPEEALESFVEEWFKPLAYALTLTREQGYPSVFYGDYYGIPTHGVPAMRSKIDPILEARQKYAYGPQHDYLDHPDVIGWTREGDSSHPKSGLATLITDGPGGSKRMYAGLKNAGETWYDITGNRSDTVKIGSDGWGEFHVNDGSVSIYVQK

SEQ ID NO: 39449 - protein, 478 aa, Bacillus sp.
NGTMMQYFEWYLPNDGNHWNRLNSDASNLKSKGITAVWIPPAWKGASQNDVGYGAYDLYDLGEFNQKGTVRTKYGTRSQLQAAVTSLKNNGIQVYGDVVMNHKGGADATEMVRAVEVNPNNRNQEVTGEYTIEAWTRFDFPGRGNTHSSFKWRWYHFDGVDWDQSRRLNNRIYKFRGKAWDWEVDTEFGNYDYLMYADYDMDHPEVVNELRNWGVWYTNTLGLDGFRIDAVKHIKYSFTRDWINHVRSATGKNMFAVAEFWKNDLGAIENYLQKTDWNHSVFDVPLHYNLYNASKSGGNYDMRNIFNGTVVQRHPSHAVTFVDNHDSQPEEALESFVEEWFKPLAYALTLTREQGYPSVFYGDYYGIPTHGVPAMRSKIDPILEARQKYAYGPQHDYLDHPDVIGWTREGDSSHPKSGLATLITDGPGGSKRMYAGLKNAGETWYDITGNRSDTVKIGSDGWGEFHVNDGSVSIYVQK

SEQ ID NO: 39450 - protein, 478 aa, Bacillus sp.
NGTMMQYFEWYLPNDGNHWNRLNSDASNLKSKGITAVWIPPAWKGASQNDVGYGAYDLYDLGEFNQKGTVRTKYGTRSQLQAAVTSLKNNGIQVYGDVVMNHKGGADATEMVRAVEVNPNNRNQEVTGEYTIEAWTRFDFPGRGNTHSSFKWRWYHFDGVDWDQSRRLNNRIYKFRGKAWDWEVDTEFGNYDYLMYADYDMDHPEVVNELRNWGVWYTNTLGLDGFRIDAVKHIKYSFTRDWINHVRSATGKNMFAVAEFWLNDLGWIENYLQKTNWNHSVFDVPLHYNLYNASKSGGNYDMRNIFNGTVVQRHPSHAVTFVDNHDSQPEEALESFVEEWFKPLAYALTLTREQGYPSVFYGDYYGIPTHGVPAMRSKIDPILEARQKYAYGPQHDYLDHPDVIGWTREGDSSHPKSGLATLITDGPGGSKRMYAGLKNAGETWYDITGNRSDTVKIGSDGWGEFHVNDGSVSIYVQK

SEQ ID NO: 39451 - protein, 478 aa, Bacillus sp.
NGTMMQYFEWYLPNDGNHWNRLNSDASNLKSKGITAVWIPPAWKGASQNDVGYGAYDLYDLGEFNQKGTVRTKYGTRSQLQAAVTSLKNNGIQVYGDVVMNHKGGADATEMVRAVEVNPNNRNQEVTGEYTIEAWTRFDFPGRGNTHSSFKWRWYHFDGVDWDQSRNLNNRIYKFRGKAWDWEVDTEFGNYDYLMYADYDMDHPEVVNELRNWGVWYTNTLGLDGFRIDAVKHIKYSFTRDWINHVRSATGKNMFAVAEFWKNDLGAIENYLQKTNWNHSVFDVPLHYNLYNASKSGGNYDMRNIFNGTVVQRHPSHAVTFVDNHDSQPEEALESFVEEWFKPLAYALTLTREQGYPSVFYGDYYGIPTHGVPAMRSKIDPILEARQKYAYGPQHDYLDHPDVIGWTREGDSSHPKSGLATLITDGPGGSKRMYAGLKNAGETWYDITGNRSDTVKIGSDGWGEFHVNDGSVSIYVQK

SEQ ID NO: 39452 - protein, 478 aa, Bacillus sp.
NGTMMQYFEWYLPNDGNHWNRLNSDASNLKSKGITVVWIPPAWKGASQNDVGYGAYDIYDLGEFNQKGTVRTKYGTRSQLQAAVTSLKNNGIQVYGDVVMNHKGGADATEMVRAVEVNPNNRNQEVTGEYTIEAWTRFDFPGRGNTHSSFKWRWYHFDGVDWDQSRRLNNRIYKFRGKAWDWEVDTENGNYDYLMYADIDYDHPEVVNELRNWGVWYTNTLGLDGFRIDAVKHIKYSFTRDWINHVRSATGKNMFAVAEFWKNDLGAIENYLQKTNWNHSVFDVPLHYNLYNASKSGGNYDMRNIFNGTVVQRHPSHAVTFVDNHDSQPEEALESFVEEWFKPLAYALTLTREQGYPSVFYGDYYGIPTHGVPAMRSKIDPILEARQKYAYGPQHDYLDHPDVIGWTREGDSSHPKSGLATLITDGPGGSKRMYAGLKNAGETWYDITGNRSDTVKIGSDGWGEFHVNDGSVSIYVQK

SEQ ID NO: 39453 - protein, 478 aa, Bacillus sp.
NGTMMQYFEWYLPNDGNHWNRLNSDASNLKSKGITAVWIPPAWKAASQNDVGYGAYDLYDLGEFNQKGTVRTKYGTRSQLQAAVTSLKNNGIQVYGDVVMNHKGGADATEMVRAVEVNPNNRNQEVTGEYTIEAWTRFDFPGRGNTHSSFKWRWYHFDGVDWDQSRRITNRIYKFRGKAWDWEVDTEFGNYDYLMYADYDMDHPEVVNELRKFGVWYTNTLGLDGFRIDAVKHIKYSFTRDWINHVRSATGKNMFAVAEFWKNDLGAIENYLQKTNWNHSVFDVPLHYNLYNASKSGGNYDMRNIFNGTVVQRHPSHAVTFVDNHDSQPEEALESFVEEWFKPLAYALTLTREQGYPSVFYGDYYGIPTHGVPAMRSKIDPILEARQKYAYGPQHDYLDHPDVIGWTREGDSSHPKSGLATLITDGPGGSKRMYAGLKNAGETWYDITGNRSDTVKIGSDGWGEFHVNDGSVSIYVQK

SEQ ID NO: 39454 - protein, 478 aa, Synthetic construct
NGTMMQYFEWYLPNDGNHWNRLNSDASNLKSKGITAVWIPPAWKGASQNDVGYGAYDLYDLGEFNQKGTVRTKYGTRSQLQAAVTSLKNNGIQVYGDVVMNHKGGADATEMVRAVEVNPNNRNQEVTGEYTIEAWTRFDFPGRGNTHSSFKWRWYHFDGVDWDQSRRLNNRIYKFRGKAWDWEVDTENGNYDYLMYADIDMDHAEVVNELRNWGVWYTNTLGLDGFRIDAVKHIKYSFTRDWINHVRSATGKNMFAVAEFWKNDLGAIENYLQKTNWNHSVFDVPLHYNLYNASKSGGNYDMRNIFNGTVVQRHPSHAVTFVDNHDSQPEEALESFVEEWFKPLAYALTLTREQGYPSVFYGDYYGIPTHGVPAMRSKIDPILEARQKYAYGPQHDYLDHPDVIGWTREGDSSHPKSGLATLITDGPGGSKRMYAGLKNAGETWYDITGNRSDTVKIGSDGWGEFHVNDGSVSIYVQK

SEQ ID NO: 39455 - protein, 478 aa, Bacillus sp.
NGTMMQYFEWYLPNDGNHWNRLNSDASNLKSKGITAVWIPPAWKGASQNDVGYGAYDLYDLGEFNQKGTVRTKYGTRSQLQAAVTSLKNNGIQVYGDVVMNHKGGADATEMVRAVEVNPNNRNQEVTGEYTIEAWTRFDFPGRGNTHSSFKWRWYHFDGVDWDQSRRLSNRIYKFRGKAWDWEVDTEFGNYDYLMYTDYDMDHPEVVNELRNWGVWYTNTLGLDGFRIDAVKHIKYSFTRDWINHVRSATGKNMFAVAEFWKNDLGAIENYLQKTNWNHSVFDVPLHYNLYNASKSGGNYDMRNIFNGTVVQRHPSHAVTFVDNHDSQPEEALESFVEEWFKPLAYALTLTREQGYPSVFYGDYYGIPTHGVPAMRSKIDPILEARQKYAYGPQHDYLDHPDVIGWTREGDSSHPKSGLATLITDGPGGSKRMYAGLKNAGETWYDITGNRSDTVKIGSDGWGEFHVNDGSVSIYVQK

SEQ ID NO: 39456 - protein, 478 aa, Bacillus sp.
NGTMMQYFEWYLPNDGNHWNRLNSDASNLKSKGITAVWIPPAWKGASQNDVGYGAYDLYDLGEFNQKGTVRTKYGTRSQLQAAVTSLKNNGIQVYGDVVMNHKGGADATEMVPAVEVNPNNRNQEVTGEYTIEAWTRFDFPGRGNTHSSFKWRWYHFDGVDWDQSRRLNNRIYKFRGKAWDWEVDTEFGNYDYLMYADYDMDHPEVVNELRNWGVWYTNTLGLDGFRIDAVKHIKYSFTRDWINHVRSATGKNMFAVAEFWKNDLGAIENYLQKTNWNHSVFDVPLHYNLYNASKSGGNYDMRNIFNGTVVQRHPSHAVTFVDNHDSQPEEALESFVEEWFKPLAYALTLTREQGYPSVFYGDYYGIPTHGVPAMRSKIDPILEARQKYAYGPQHDYLDHPDVIGWTREGDSSHPKSGLATLITDGPGGSKRMYAGLKNAGETWYDITGNRSDTVKIGSDGWGEFHVNDGSVSIYVQK

SEQ ID NO: 39457 - protein, 478 aa, Synthetic construct
NGTMMQYFEWYLPNDGNHWNRLNSDASNLKSKGITAVWIPPAWKGASQNDVGYGAYDLYDLGEFNQKGTVRTKYGTRSQLQAAVTSLKNNGIQVYGDVVMNHKGGADATEMVRAVEVNPNNRCQEVTGEYTIEAWTRFDFPGRGNTHSSFKWRWYHFDGVDWDQSRRLNNRIYKFRGKAWDWEVDTENGNYDYLMYADIDMDHPEVVNELRNWGVWYTNTLGLDGFRIDAVKHIKYSFTRDWINHVRSATGKNMFAVAEFWKNDLGAIENYLQKTNWNHSVFDVPLHYNLYNASKSGGNYDMRNIFNGTVVQRHPSHAVTFVDNHDSQPEEALESFVEEWFKPLAYALTLTREQGYPSVFYGDYYGIPTHGVPAMRSKIDPILEARQKYAYGPQHDYLDHPDVIGWTREGDSSHPKSGLATLITDGPGGSKRMYAGLKNAGETWYDITGNRSDTVKIGSDGWGEFHVNDGSVSIYVQK

SEQ ID NO: 39458 - protein, 478 aa, Bacillus sp.
NGTMMQYFEWYLPNDGNHWNRLNSDASNLKSKGITAVWIPPAWKGASQNDVGYGAYDLYDLGEFNQKGTVRTKYGTRSQLQAAVTSLKNNGIQVYGDVVMNHKGGADATEMVRAVEVNPNNRNQEVTGEYTIEAWTRFDFPGRGNTHSSFKWRWYHFDGVDWDQSRRLNNRIYKFRGKAWDWEVDTEFGNYDYLMYADYDMDHPEVVNELRNWGVWYTNTLGLDGFRIDAVKHIKYSFTRDWINHVRSATGKNMFAVAEFWKNDLGAIENYLQKTNWNHSVFDVPLHYNLYNASKSGGNYDMRNIFNGTVVQRHPSQAVTFVDNHDSQPEEALESFVEEWFKPLAYALTLTREQGYPSVFYGDYYGIPTHGVPAMRSKIDPILEARQKYAYGPQHDYLDHPDVIGWTREGDSSHPKSGLATLITDGPGGSKRMYAGLKNAGETWYDITGNRSDTVKIGSDGWGEFHVNDGSVSIYVQK

SEQ ID NO: 39459 - protein, 478 aa, Bacillus sp.
NGTMMQYFEWYLPNDGNHWNRLNSDASNLKSKGITAVWIPPAWKGASQNDVGYGAYDLYDLGEFNQKGTVRTKYGTRSQLQAAVTSLKNNGIQVYGDVVMNHKGGADATEMVRAVEVNPNNRNQEVTGEYTIEAWTRFDFPGRGNTHSSFKWRWYHFDGVDWDQSRRFQNRIYKFRGKAWDWEVDTEFGNYDYLMYADYDMDHPEVVNELRNWGVWYTNTLGLDGFRIDAVKHIKYSFTRDWINHVRSATGKNMFAVAEFWKNDLGAIENYLQKTNWNHSVFDVPLHYNLYNASKSGGNYDMRNIFNGTVVQRHPSHAVTFVDNHDSQPEEALESFVEEWFKPLAYALTLTREQGYPSVFYGDYYGIPTHGVPAMRSKIDPILEARQKYAYGPQHDYLDHPDVIGWTREGDSSHPKSGLATLITDGPGGSKRMYAGLKNAGETWYDITGNRSDTVKIGSDGWGEFHVNDGSVSIYVQK

SEQ ID NO: 39460 - protein, 478 aa, Synthetic construct
NGTMMQYFEWYLPNDGNHWNRLNSDASNLKSKGITAVWIPPAWKGASQNDVGYGAYDLYDLGEFNQKGTVRTKYGTRSQLQAAVTSLKNNGIQVYGDVVMNHKGGADATEMVRAVEVNPNNRNQEVTGEYTIEAWTRFDFPGRGNTHSSFKWRWYHFDGVDWDQSRRLNNRIYKFRGKNWDWEVDTENGNYDYLMYADIDMDHPEVVNELRNWGVWYTNTLGLDGFRIDAVKHIKYSFTRDWINHVRSATGKNMFAVAEFWKNDLGAIENYLQKTNWNHSVFDVPLHYNLYNASKSGGNYDMRNIFNGTVVQRHPSHAVTFVDNHDSQPEEALESFVEEWFKPLAYALTLTREQGYPSVFYGDYYGIPTHGVPAMRSKIDPILEARQKYAYGPQHDYLDHPDVIGWTREGDSSHPKSGLATLITDGPGGSKRMYAGLKNAGETWYDITGNRSDTVKIGSDGWGEFHVNDGSVSIYVQK

SEQ ID NO: 39461 - protein, 478 aa, Synthetic construct
NGTMMQYFEWYLPNDGNHWNRLNSDASNLKSKGITAVWIPPAWKGASQNDVGYGAYDLYDLGEFNQKGTVRTKYGTRSQLQAAVTSLKNNGIQVYGDVVMNHKGGADATEMVRAVEVNPNNRNQEVTGEYTIEAWTRFDFPGRGNTHSSFKWRWYHFDGVDWDQSRRLNNRIYKFRGKAWDWEVDTENGNYDYLMYADIDMDHPEVVNELRNWGVWYTNTLGLDGFRIDAVKHIKYSFTRDWINHVRSATGKNMFAVAEFWKNDLGAIENYLQKTNWNHSVFDVPLHYNLYNASKSGGNYDMRNIFNGTVVQRHPSHAVTFVDNHDSQPEEALESFVEEWFKPLAYALTLTREQGYPSVFYGDYYGIPTHGVPAMRSKIDPILEARQKYAYGPQHDYLDHPDVIGWTREGCSSHPKSGLATLITDGPGGSKRMYAGLKNAGETWYDITGNRSDTVKIGSDGWGEFHVNDGSVSIYVQK

SEQ ID NO: 39462 - protein, 478 aa, Bacillus sp.
NGTMMQYFEWYLPNDGNHWNRLNSDASNLKSKGITAVWIPPAWKGASQNDVGYGAYDLYDLGEFNQKGTVRTKYGTRSQLQAAVTSLKNNGIQVYGDVVMNHKGGADATEMVRAVEVNPNNRNQEVTGEYTIEAWTRFDFPGRGNTHSSFKWRWYHFDGVDWDQSRDTDNRIYKFRGKAWDWEVDTEFGNYDYLMYADYDMDHPEVVNELRNWGVWYTNTLGLDGFRIDAVKHIKYSFTRDWINHVRSATGKNMFAVAEFWKNDLGAIENYLQKTNWNHSVFDVPLHYNLYNASKSGGNYDMRNIFNGTVVQRHPSHAVTFVDNHDSQPEEALESFVEEWFKPLAYALTLTREQGYPSVFYGDYYGIPTHGVPAMRSKIDPILEARQKYAYGPQHDYLDHPDVIGWTREGDSSHPKSGLATLITDGPGGSKRMYAGLKNAGETWYDITGNRSDTVKIGSDGWGEFHVNDGSVSIYVQK

SEQ ID NO: 39463 - protein, 478 aa, Bacillus sp.
NGTMMQYFEWYLPNDGNHWNRLNSDASNLKSKGITAVWIPPAWKGASQNDVGYGAYDLYDLGEFNQKGTVRTKYGTRSQLQAAVTSLKNNGIQVYGDVVMNHKGGADATEMVRAVEVNPNNRNQEVTGEYTIEAWTRFDFPGRGNTHSSFKWRWYHFDGVDWDQSRRLNNRIYKFRGKAWDWEVDTEFGNYDYLMYADYDMDHPEVVNELRNWGVWYTNTLGLDGFRIDAVKHIKYSFTRDWINHVRSATGKNMFAVAEFWKNDLGAIENYLQKTNWNHSVFDVPLHYNLYNASKSGGNYDMRNIFNGTVVQRHPSHAVTFVDNHDSQPEEALESFVDTWFKPLAYALTLTREQGYPSVFYGDYYGIPTHGVPAMRSKIDPILEARQKYAYGPQHDYLDHPDVIGWTREGDSSHPKSGLATLITDGPGGSKRMYAGLKNAGETWYDITGNRSDTVKIGSDGWGEFHVNGGSVSIYVQK

SEQ ID NO: 39464 - protein, 478 aa, Bacillus sp.
NGTMMQYFEWYLPNDGNHWNRLNSDASNLKSKGITAVWIPPAWKGASQNDVGYGAYDLYDLGEFNQKGTVRTKYGTRSQLQAAVTSLKNNGIQVYGDVVMNHKGGADATEMVRAVEVNPNNRNQEVTGEYTIEAWTRFDFPGRGNTHSSFKWRWYHFDGVDWDQSRRLNNRIYKFRGKAWDWEVDVEFGNYDYLMYADYDMDHPEVVNELRNWGVWYTNTLGLDGFRIDAVKHIKYSFTRDWINHVRSATGKNMFAVAEFWKNDLGAIENYLQKTNWNHSVFDVPLHYNLYNASKSGGNYDMRNIFNGTVVQRHPSHAVTFVDNHDSQPEEALESFVEEWFKPLAYALTLTREQGYPSVFYGDYYGIPTHGVPAMRSKIDPILEARQKYAYGPQHDYLDHPDVIGWTREGDSSHPKSGLATLITDGPGGSKRMYAGLKNAGETWYDITGNRSDTVKIGSDGWGEFHVNDGSVSIYVQK

SEQ ID NO: 39465 - protein, 478 aa, Bacillus sp.
NGTMMQYFEWYLPNDGNHWNRLNSDASNLKSKGITAVWIPPAWKGASQNDVGYGAYDLYDLGEFNQKGTVRTKYGTRSQLQAAVTSLKNNGIQVYGDVVMNHKGGADATEMVRAVEVNPNNRNQEVTGEYTIEAWTKFDFPGRGNTHSSFKWRWYHFDGVDWDQSRRLNNRIYKFRGKAWDWEVDTEFGNYDYLMYADYDMDHPEVVNELRNWGVWYTNTLGLDGFRIDAVKHIKYSFTRDWINHVRSATGKNMFAVAEFWKNDLGAIENYLQKTNWNHSVFDVPLHYNLYNASKSGGNYDMRNIFNGTVVQRHPSHAVTFVDNHDSQPEEALESFVEEWFKPLAYALTLTREQGYPSVFYGDYYGIPTHGVPAMRSKIDPILEARQKYAYGPQHDYLDHPDVIGWTREGDSSHPKSGLATLITDGPGGSKRMYAGLKNAGETWYDITGNRSDTVKIGSDGWGEFHVNDGSVSIYVQK

SEQ ID NO: 39466 - protein, 478 aa, Bacillus sp.
NGTMMQYFEWYLPNDGNHWNRLNSDASNLKSKGITAVWIPPAWKGASQNDVGYGAYDLYDLGEFNQKGTVRTKYGTRSQLQAAVTSLKNNGIQVYGDVVMNHKGGADATEMVRAVEVNPNNRNQEVTGEYTIEAWTRFDFPGRGNTHSSFKWKWYHFDGVDWDQSRRLNNRIYKFRGKAWDWEVDTEFGNYDYLMYADYDMDHPEVVNELRNWGVWYTNTLGLDGFRIDAVKHIKYSFTRDWINHVRSATGKNMFAVAEFWKNDLGAIENYLQKTNWNHSVFDVPLHYNLYNASKSGGNYDMRNIFNGTVVQRHPSHAVTFVDNHDSQPEEALESFVEEWFKPLAYALTLTREQGYPSVFYGDYYGIPTHGVPAMRSKIDPILEARQKYAYGPQHDYLDHPDVIGWTREGDSSHPKSGLATLITDGPGGSKRMYAGLKNAGETWYDITGNRSDTVKIGSDGWGEFHVNDGSVSIYVQK

SEQ ID NO: 39467 - protein, 478 aa, Bacillus sp.
NGTMMQYFEWYLPNDGNHWNRLNSDASNLKSKGITAVWIPPAWKGASQNDVGYGAYDLYDLGEFNQKGTVRTKYGTRSQLQAAVTSLKNNGIQVYGDVVMNHKGGADATEMVRAVEVNPNNRNQEVTGEYTIEAWTRFDFPGRGNTHSSFKWRWYHFDGVDWDQSRRLNNRIYKFRGKAWDWEVDTEFGNYDYLMYADYDMDHPEVVNELRNWGVWYTNTLGLDGFRIDAVKHIKYSFTRDWINHVRSATGKNMFAVAEFWKNDLGAIENYLQKTNWNHSVFDVPLHYNLYRASKSGGNYDMRNIFNGTVVQRHPSHAVTFVDNHDSQPEEALESFVEEWFKPLAYALTLTREQGYPSVFYGDYYGIPTHGVPAMRSKIDPILEARQKYAYGPQHDYLDHPDVIGWTREGDSSHPKSGLATLITDGPGGSKRMYAGLKNAGETWYDITGNRSDTVKIGSDGWGEFHVNDGSVSIYVQK

SEQ ID NO: 39468 - protein, 478 aa, Bacillus sp.
NGTMMQYFEWYLPNDGNHWNRLNSDASNLKSKGITAVWIPPAWKGASQNDVGYGAYDLYDLGEFNQKGTVRTKYGTRSQLQAAVTSLKNNGIQVYGDVVMNHKGGADATEMVRAVEVNPNNRNQEVTGEYTIEAWTRFDFPGRGNTHSSFKWRWYHFDGVDWDQSRRLNNRIYKFRGKAWDWEVDTEFGNYDYLMYADYDMDHPEVVNELRNWGVWYTNTLGLDGFRIDAVKHIKYSFTRDWINHVRSATGKNMFAVAEFWKNDLGWIENYLQKTNWNHSVFDVPLHYNLYNASKSGGNYDMRNIFNGTVVQRHPSHAVTFVDNHDSQPEEALESFVEEWFKPLAYALTLTREQGYPSVFYGDYYGIPTHGVPAMRSKIDPILEARQKYAYGPQHDYLDHPDVIGWTREGDSSHPKSGLATLITDGPGGSKRMYAGLKNAGETWYDITGNRSDTVKIGSDGWGEFHVNDGSVSIYVQK

SEQ ID NO: 39469 - protein, 478 aa, Bacillus sp.
NGTMMQYFEWYLPNDGNHWNRLNSDASNLKSKGITAVWIPPAWKGASQNDVGYGAYDLYDLGEFNQKGTVRTKYGTRSQLQAAVTSLKNNGIQVYGDVVMNHKGGADATEMVRAVEVNPNNRNQEVTGEYTIEAWTRFDFPGRGNTHSSFKWRWYHFDGVDWDQSRRLNNRIYKFRGKAWDWEVDTEFGNYDYLMYADYDMDHPEVVNELRNWGVWYTNTLGLDGFRIDAVKHIKYSFTRDWINHVRSATGKNMFAVAEFWMNDLGAIENYLQKTNWNHSVFDVPLHYNLYNASKSGGNYDMRNIFNGTVVQRHPSHAVTFVDNHDSQPEEALESFVEEWFKPLAYALTLTREQGYPSVFYGDYYGIPTHGVPAMRSKIDPILEARQKYAYGPQHDYLDHPDVIGWTREGDSSHPKSGLATLITDGPGGSKRMYAGLKNAGETWYDITGNRSDTVKIGSDGWGEFHVNDGSVSIYVQK

SEQ ID NO: 39470 - protein, 478 aa, Bacillus sp.
NGTMMQYFEWYLPNDGNHWNRLNSDASNLKSKGITAVWIPPAWKAASQNDVGYGAYDLYDLGEFNQKGTVRTKYGTRSQLQAAVTSLKNNGIQVYGDVVMNHKGGADATEMVRAVEVNPNNRNQEVTGEYTIEAWTRFDFPGRGNTHSSFKWRWYHFDGVDWDQSRDLQNRIYKFRGKAWDWEVDTEFGNYDYLMYADYDMDHPEVVNELRNWGVWYTNTLGLDGFRIDAVKHIKYSFTRDWINHVRSATGKNMFAVAEFWKNDLGAIENYLQKTNWNHSVFDVPLHYNLYNASKSGGNYDMRNIFNGTVVQRHPSHAVTFVDNHDSQPEEALESFVETWFKPLAYALTLTREQGYPSVFYGDYYGIPTHGVPAMRSKIDPILEARQKYAYGPQHDYLDHPDVIGWTREGDSSHPKSGLATLITDGPGGSKRMYAGLKNAGETWYDITGNRSDTVKIGSDGWGEFHVNDGSVSIYVQK

SEQ ID NO: 39471 - protein, 478 aa, Bacillus sp.
NGTMMQYFEWYLPNDGNHWNRLNSDASNLKSKGITAVWIPPAWKGASQNDVGYGAYDLYDLGEFNQKGTVRTKYGTRSQLQAAVTSLKNNGIQVYGDVVMNHKGGADATEMVRAVEVNPNNRNQEVTGEYTIEAWTRFDFPGRGNTHSSFKWRWYHFDGQDWDQSRRLNNRIYKFRGKAWDWEVDTEFGNYDYLMYADYDMDHPEVVNELRNWGVWYTNTLGLDGFRIDAVKHIKYSFTRDWINHVRSATGKNMFAVAEFWKNDLGAIENYLQKTNWNHSVFDVPLHYNLYNASKSGGNYDMRNIFNGTVVQRHPSHAVTFVDNHDSQPEEALESFVEEWFKPLAYALTLTREQGYPSVFYGDYYGIPTHGVPAMRSKIDPILEARQKYAYGPQHDYLDHPDVIGWTREGDSSHPKSGLATLITDGPGGSKRMYAGLKNAGETWYDITGNRSDTVKIGSDGWGEFHVNDGSVSIYVQK

SEQ ID NO: 39472 - protein, 478 aa, Bacillus sp.
NGTMMQYFEWYLPNDGNHWNRLNSDASNLKSKGITAVWIPPAWKGASQNDVGYGAYDLYDLGEFNQKGTVRTKYGTRSQLQAAVTSLKNNGIQVYGDVVMNHKGGADATEMVRAVEVNPNNRNQEVTGEYTIEAWTRFDFPGRGNTHSSFKWRWYHFDGVDWDQSRRLNNRIYKFRGKAWDWEVDTEFGNYDYLMYADYDMDHPEVVNELRNWGVWYTNTLGLDGFRIDAVKHIKYSFTRDWINHVRSATGKNMFAVAEFWKNDLGTIENYLQKTNWNHSVFDVPLHYNLYNASKSGGNYDMRNIFNGTVVQRHPSHAVTFVDNHDSQPEEALESFVEEWFKPLAYALTLTREQGYPSVFYGDYYGIPTHGVPAMRSKIDPILEARQKYAYGPQHDYLDHPDVIGWTREGDSSHPKSGLATLITDGPGGSKRMYAGLKNAGETWYDITGNRSDTVKIGSDGWGEFHVNDGSVSIYVQK

SEQ ID NO: 39473 - protein, 478 aa, Bacillus sp.
NGTMMQYFEWYLPNDGNHWNRLNSDASNLKSKGITAVWIPPAWKGASQNDVGYGAYDLYDLGEFNQKGTVRTKYGTRSQLQAAVTSLKNNGIQVYGDVVMNHKGGADATEMVRAVEVNPNNRNQEVTGEYTIEAWTRFDFPGRGNTHSSFKWRWYHFDGVDWDQSRRLNNRIYKFRGKAWDWEVDTEFGNYDYLMYADYDMDHPEVVNELRNWGVWYTNTLGLDGFRIDAVKHIKYSFTRDWINHVRSATGKNMFAVAEFWKNDLGAIENYLQKTNWNHSVFDVPLHYNLYNASKSGGNYDMRNIFNGTVVQRHPSHAVTFVDNHDSQPEEALESFVEEWFKPLAYALTLTREQGYPSVFYGDYYGIPTHGVPAMRSKIDPILEARQKYAYGPQHDYLDHPDVIGWTREGDSSRPKSGLATLITDGPGGSKRMYAGLKNAGETWYDITGNRSDTVKIGSDGWGEFHVNDGSVSIYVQK

SEQ ID NO: 39474 - protein, 478 aa, Bacillus sp.
NGTMMQYFEWYLPNDGNHWNRLNSDASNLKSKGITAVWIPPAWKGASQNDVGYGAYDLYDLGEFNQKGTVRTKYGTRSQLQAAVTSLKNNGIQVYGDVVMNHKGGADATEMVRAVEVNPNNRNQEVTGEYTIEAWTRFDFPGRGNTHSSFKWRWYHFDGVDWDQSRDFNNRIYKFRGKAWDWEVDTEFGNYDYLMYADYDMDHPEVVNELRNWGVWYTNTLGLDGFRIDAVKHIKYSFTRDWINHVRSATGKNMFAVAEFWKNDLGAIENYLQKTNWNHSVFDVPLHYNLYNASKSGGNYDMRNIFNGTVVQRHPSHAVTFVDNHDSQPEEALESFVEEWFKPLAYALTLTREQGYPSVFYGDYYGIPTHGVPAMRSKIDPILEARQKYAYGPQHDYLDHPDVIGWTREGDSSHPKSGLATLITDGPGGSKRMYAGLKNAGETWYDITGNRSDTVKIGSDGWGEFHVNDGSVSIYVQK

SEQ ID NO: 39475 - protein, 478 aa, Bacillus sp.
NGTMMQYFEWYLPNDGNHWNRLNSDASNLKSKGITAVWIPPAWKANSQNDVGYGAYDLYDLGEFNQKGTVRTKYGTRSQLQAAVTSLKNNGIQVYGDVVMNHKGGADATEMVRAVEVNPNNRNQEVTGEYTIEAWTRFDFPGRGNTHSSFKWRWYHFDGVDWDQSRKLKNRIYKFRGKAWDWEVDTEFGNYDYLMYADYDMDHPEVVNELRNWGVWYTNTLGLDGFRIDAVKHIKYSFTRDWINHVRSATGKNMFAVAEFWKNDLGAIENYLQKTNWNHSVFDVPLHYNLYNASKSGGNYDMRNIFNGTVVQRHPSHAVTFVDNHDSQPEEALESFVEEWFKPLAYALTLTREQGYPSVFYGDYYGIPTHGVPAMRSKIDPILEARQKYAYGPQHDYLDHPDVIGWTREGDSSHPKSGLATLITDGPGGSKRMYAGLKNAGETWYDITGNRSDTVKIGSDGWGEFHVNDGSVSIYVQK

SEQ ID NO: 39476 - protein, 478 aa, Bacillus sp.
NGTMMQYFEWYLPNDGNHWNRLNSDASNLKSKGITAVWIPPAWKAASQNDVGYGAYDLYDLGEFNQKGTVRTKYGTRSQLQAAVTSLKNNGIQVYGDVVMNHKGGADATEMVRAVEVNPNNRNQEVTGEYTIEAWTRFDFPGRGNTHSSFKWRWYHFDGVDWDQSRRFSNRIYKFRGKAWDWEVDTEFGNYDYLMYADYDMDHPEVVNELRNWGVWYTNTLGLDGFRIDAVKHIKYSFTRDWINHVRSATGKNMFAVAEFWKNDLGAIENYLQKTNWNHSVFDVPLHYNLYNASKSGGNYDMRNIFNGTVVQRHPSHAVTFVDNHDSQPEEALESFVEEWFKPLAYALTLTREQGYPSVFYGDYYGIPTHGVPAMRSKIDPILEARQKYAYGPQHDYLDHPDVIGWTREGDSSHPKSGLATLITDGPGGSKRMYAGLKNAGETWYDITGNRSDTVKIGSDGWGEFHVNDGSVSIYVQK

SEQ ID NO: 39477 - protein, 478 aa, Bacillus sp.
NGTMMQYFEWYLPNDGNHWNRLNSDASNLKSKGITAVWIPPAWKGASQNDVGYGAYDLYDLGEFNQKGTVRTKYGTRSQLQAAVTSLKNNGIQVYGDVVMNHKGGADATEMVRAVEVNPNNRNQEVTGEYTIEAWTRFDFPGRGNTHSSFKWRWYHFDGVDWDQSRRLLNRIYKFRGKAWDWEVDTEFGNYDYLMYADYDMDHPEVVNELRNWGVWYTNTLGLDGFRIDAVKHIKYSFTRDWINHVRSATGKNMFAVAEFWKNDLGAIENYLQKTNWNHSVFDVPLHYNLYNASKSGGNYDMRNIFNGTVVQRHPSHAVTFVDNHDSQPEEALESFVEEWFKPLAYALTLTREQGYPSVFYGDYYGIPTHGVPAMRSKIDPILEARQKYAYGPQHDYLDHPDVIGWTREGDSSHPKSGLATLITDGPGGSKRMYAGLKNAGETWYDITGNRSDTVKIGSDGWGEFHVNDGSVSIYVQK

SEQ ID NO: 39478 - protein, 478 aa, Synthetic construct
NGTMMQYFEWYLPNDGNHWNRLNSDASNLKSKGITAVWIPPAWKGASQNDVGYGAYDLYDLGEFNQKGTVRTKYGTRSQLQAAVTSLKNNGIQVYGDVVMNHKGGADATEMVRAVEVNPNNRNQEVTGEYTIEAWTRFDFPGRGNTHSSFKWRWYHFDGVDWDQSRRLNNRIYKFRGKEWDWEVDTENGNYDYLMYADIDMDHPEVVNELRNWGVWYTNTLGLDGFRIDAVKHIKYSFTRDWINHVRSATGKNMFAVAEFWKNDLGAIENYLQKTNWNHSVFDVPLHYNLYNASKSGGNYDMRNIFNGTVVQRHPSHAVTFVDNHDSQPEEALESFVEEWFKPLAYALTLTREQGYPSVFYGDYYGIPTHGVPAMRSKIDPILEARQKYAYGPQHDYLDHPDVIGWTREGDSSHPKSGLATLITDGPGGSKRMYAGLKNAGETWYDITGNRSDTVKIGSDGWGEFHVNDGSVSIYVQK

SEQ ID NO: 39479 - protein, 478 aa, Bacillus sp.
NGTMMQYFEWYLPNDGNHWNRLNSDASNLKSKGITAVWIPPAWKGASQNDVGYGAYDLYDLGEFNQKGTVRTKYGTRSQLQAAVTSLKNNGIQVYGDVVMNHKGGADATEMVRAVEVNPNNRNQEVTGEYTIEAWTRFDFPGRGNTHSSFKWRWYHFDGVDWDQSRRLNNRIYKFRGKAWDWEVDTEFGNYDYLMYADYDMDHPEVVNELRNWGVWYTNTLGLDGFRIDAVKHIKYSFTRDWINHVRSATGKNMFAVAEFWKNDLGAIENYLQKTNWNHSVFDVPLHYNLYNASKSGGNYDMRNIFNGTVVQRHPKHAVTFVDNHDSQPEEALESFVEEWFKPLAYALTLTREQGYPSVFYGDYYGIPTHGVPAMRSKIDPILEARQKYAYGPQHDYLDHPDVIGWTREGDSSHPKSGLATLITDGPGGSKRMYAGLKNAGETWYDITGNRSDTVKIGSDGWGEFHVNDGSVSIYVQK

SEQ ID NO: 39480 - protein, 478 aa, Synthetic construct
NGTMMQYFEWYLPNDGNHWNRLNSDASNLKSKGITAVWIPPAWKGASQNDVGYGAYDLYDLGEFNQKGTVRTKYGTRSQLQAAVTSLKNNGIQVYGDVVMNHKGGADATEMVRAVEVNPNNRNQEVTGEYTIEAWTRFDFPGRGNTHSSFKWRWYHFDGVDWDQSRRLNNRIYKFRGKAWDWEVDTEFGNYDYLMYADFDMDHPEVVNELRNWGVWYTNTLGLDGFRIDAVKHIKYSFTRDWINHVRSATGKNMFAVAEFWKNDLGAIENYLQKTNWNHSVFDVPLHYNLYNASKSGGNYDMRNIFNGTVVQRHPSHAVTFVDNHDSQPEEALESFVEEWFKPLAYALTLTREQGYPSVFYGDYYGIPTHGVPAMRSKIDPILEARQKYAYGPQHDYLDHPDVIGWTREGDSSHPKSGLATLITDGPGGSKRMYAGLKNAGETWYDITGNRSDTVKIGSDGWGEFHVNDGSVSIYVQK

SEQ ID NO: 39481 - protein, 478 aa, Bacillus sp.
NGTMMQYFEWYLPNDGNHWNRLNSDASNLKSKGITAVWIPPAWKGASQNDVGYGAYDLYDLGEFNQKGTVRTKYGTRSQLQAAVTSLKNNGIQVYGDVVMNHKGGADATEMVRAVEVNPNNRNQEVTGEYTIEAWTRFDFPGRGNTHSSFKWRWYHFDGVDWDQSRKLNNRIYKFRGKAWDWEVDTEFGNYDYLMYADYDYDHPESTNEMRNWGVWYTNTLGLDGFRIDAVKHIKYSFTRDWINHVRSATGKNMFAVAEFWKNDLGAIENYLQKTNWNHSVFDVPLHYNLYNASKSGGNYDMRNIFNGTVVQRHPSHAVTFVDNHDSQPEEALESFVEEWFKPLAYALTLTREQGYPSVFYGDYYGIPTHGVPAMRSKIDPILEARQKYAYGPQHDYLDHPDVIGWTREGDSSHPKSGLATLITDGPGGSKRMYAGLKNAGETWYDITGNRSDTVKIGSDGWGEFHVNDGSVSIYVQK

SEQ ID NO: 39482 - protein, 478 aa, Bacillus sp.
NGTMMQYFEWYLPNDGNHWNRLNSDASNLKSKGITAVWIPPAWKGASQNDVGYGAYDLYDLGEFNQKGTVRTKYGTRSQLQAAVTSLKNNGIQVYGDVVMNHKGGADATEMVRAVEVNPNNRNQEVTGEYTIEAWTRFDFPGRGNTHSSFKWRWYHFDGVDWDQSRRLNNRIYKFRGKAWDWEVDTEFGNYDYLMYADYDSDHPEVVNELRNWGVWYTNTLGLDGFRIDAVKHIKYSFTRDWINHVRSATGKNMFAVAEFWKNDLGAIENYLQKTNWNHSVFDVPLHYNLYNASKSGGNYDMRNIFNGTVVQRHPSHAVTFVDNHDSQPEEALESFVEEWFKPLAYALTLTREQGYPSVFYGDYYGIPTHGVPAMRSKIDPILEARQKYAYGPQHDYLDHPDVIGWTREGDSSHPKSGLATLITDGPGGSKRMYAGLKNAGETWYDITGNRSDTVKIGSDGWGEFHVNDGSVSIYVQK

SEQ ID NO: 39483 - protein, 478 aa, Bacillus sp.
NGTMMQYFEWYLPNDGNHWNRLNSDASNLKSKGITAVWIPPAWKGASQNDVGYGAYDLYDLGEFNQKGTVRTKYGTRSQLQAAVTSLKNNGIQVYGDVVMNHKGGADATEMVRAVEVNPNNRNQEVTGEYTIEAWTRFDFPGRGNTHSSFKWRWYHFDGVDWDQSREFNNRIYKFRGKAWDWEVDTEFGNYDYLMYADYDMDHPEVVNELRNWGVWYTNTLGLDGFRIDAVKHIKYSFTRDWINHVRSATGKNMFAVAEFWKNDLGAIENYLQKTNWNHSVFDVPLHYNLYNASQSGGNYDMRNIFNGTVVQRHPSHAVTFVDNHDSQPEEALESFVEPWFKPLAYALTLTREQGYPSVFYGDYYGIPTHGVPAMRSKIDPILEARQKYAYGPQHDYLDHPDVIGWTREGDSSHPKSGLATLITDGPGGSKRMYAGLKNAGETWYDITGNRSDTVKIGSDGWGEFHVNDGSVSIYVQK

SEQ ID NO: 39484 - protein, 478 aa, Bacillus sp.
NGTMMQYFEWYLPNDGNHWNRLNSDASNLKSKGITAVWIPPAWKAVSQNDVGYGAYDLYDLGEFNQKGTVRTKYGTRSQLQAAVTSLKNNGIQVYGDVVMNHKGGADATEMVRAVEVNPNNRNQEVTGEYTIEAWTRFDFPGRGNTHSSFKWRWYHFDGVDWDQSRELSNRIYKFRGKAWDWEVDTEFGNYDYLMYADYDMDHPEVVNELRNWGVWYTNTLGLDGFRIDAVKHIKYSFTRDWINHVRSATGKNMFAVAEFWKNDLGAIENYLQKTNWNHSVFDVPLHYNLYNASKSGGNYDMRNIFNGTVVQRHPSHAVTFVDNHDSQPEEALESFVEEWFKPLAYALTLTREQGYPSVFYGDYYGIPTHGVPAMRSKIDPILEARQKYAYGPQHDYLDHPDVIGWTREGDSSHPKSGLATLITDGPGGSKRMYAGLKNAGETWYDITGNRSDTVKIGSDGWGEFHVNDGSVSIYVQK

SEQ ID NO: 39485 - protein, 478 aa, Bacillus sp.
NGTMMQYFEWYLPNDGNHWNRLNSDASNLKSKGITAVWIPPAWKGASQNDVGYGAYDLYDLGEFNQKGTVRTKYGTRSQLQAAVTSLKNNGIQVYGDVVMNHKGGADATEMVRAVEVNPNNRNQEVTGEYTIEAWTRFDFPGRGNTHSSFKWRWYHFDGVDWDQSRRLNNRIYKFRGKAWDWEVDTEFGNYDYLMYADYDMDHPEVVNELRNWGVWYTNTLGLDGFRIDAVKHIKYSFTRDWINHVRSATGKNMFAVAEFWKNDLGAIENYLQKTNWNHSVFDVPLHYNLYNASKSGGNYDMRNIFNGTVVQRHPSHAVTFVDNHDSQPEEALESFVEEWFKPLAYALTLTREQGYPSVFYGDYYGIPTHGVPAMRSKIDPILAARQKYAYGPQHDYLDHPDVIGWTREGDSSHPKSGLATLITDGPGGSKRMYAGLKNAGETWYDITGNRSDTVKIGSDGWGEFHVNDGSVSIYVQK

SEQ ID NO: 39486 - protein, 478 aa, Synthetic construct
NGTMMQYFEWYLPNDGNHWNRLNSDASNLKSKGITAVWIPPAWKGASQNDVGYGAYDLYDLGEFNQKGTVRTKYGTRSQLQAAVTSLKNNGIQVYGDVVMNHKGGADATEMVRAVEVNPNNRNQEVTGEYTIEAWTRFDFPGRGNTHSSFKWRWYHFDGVDWDQSRRLNNRIYKFRGKAWDWEVDTENGNYDYLMYADIDMDHTEVVNELRNWGVWYTNTLGLDGFRIDAVKHIKYSFTRDWINHVRSATGKNMFAVAEFWKNDLGAIENYLQKTNWNHSVFDVPLHYNLYNASKSGGNYDMRNIFNGTVVQRHPSHAVTFVDNHDSQPEEALESFVEEWFKPLAYALTLTREQGYPSVFYGDYYGIPTHGVPAMRSKIDPILEARQKYAYGPQHDYLDHPDVIGWTREGDSSHPKSGLATLITDGPGGSKRMYAGLKNAGETWYDITGNRSDTVKIGSDGWGEFHVNDGSVSIYVQK

SEQ ID NO: 39487 - protein, 478 aa, Bacillus sp.
NGTMMQYFEWYLPNDGNHWNRLNSDASNLKSKGITAVWIPPAWKGASQNDVGYGAYDVYDLGEFNQKGTVRTKYGTRSQLQAAVTSLKNNGIQVYGDVVFNHKGGADATEMVRAVEVNPNNRNQEVTGEYTIEAWTRFDFPGRGNTHSSFKWRWYHFDGVDWDQSRRLNNRIYKFRGKAWDWEVDTENGNYDYLMYADIDYDFPEVVNELRIWGVWYTNTLGLDGFRIDAVKHIKYSFTRDWINHVRSATGKNMFAVAEFWKNDLGAIENYLQKTNWNHSVFDVPLHYNLYNASKSGGNYDMRNIFNGTVVQRHPSHAVTFVDNHDSQPEEALESFVEEWFKPLAYALTLTREQGYPSVFYGDYYGIPTHGVPAMRSKIDPILEARQKYAYGPQHDYLDHPDVIGWTREGDSSHPKSGLATLITDGPGGSKRMYAGLKNAGETWYDITGNRSDTVKIGSDGWGEFHVNDGSVSIYVQK

SEQ ID NO: 39488 - protein, 478 aa, Bacillus sp.
NGTMMQYFEWYLPNDGNHWNRLNSDASNLKSKGITAVWIPPAWKGASQNDVGYGAYDLYDLGEFNQKGTVRTKYGTRSQLQAAVTSLKNNGIQVYGDVVMNHKGGADATEMVRAVEVNPNNRNQEVTGEYTIEAWTRFDFPGRGNTHSSFKWRWYHFDGVDWDQSRRLNNRIYKFRGKAWDWEVDTEFGNYDYLMYADYDMDHPEVVNELRNWGVWYTNTLGLDGFRIDAVKHIKYSFTRDWINHVRSATGKNMFAVAEFWKNDLGAIENYLQKTNWNHSVFDVPLHYNLYKASKSGGNYDMRNIFNGTVVQRHPSHAVTFVDNHDSQPEEALESFVEEWFKPLAYALTLTREQGYPSVFYGDYYGIPTHGVPAMRSKIDPILEARQKYAYGPQHDYLDHPDVIGWTREGDSSHPKSGLATLITDGPGGSKRMYAGLKNAGETWYDITGNRSDTVKIGSDGWGEFHVNDGSVSIYVQK

SEQ ID NO: 39489 - protein, 478 aa, Bacillus sp.
NGTMMQYFEWYLPNDGNHWNRLNSDASNLKSKGITAVWIPPAWKGVSQNDVGYGAYDLYDLGEFNQKGTVRTKYGTRSQLQAAVTSLKNNGIQVYGDVVMNHKGGADATEMVRAVEVNPNNRNQEVTGEYTIEAWTRFDFPGRGNTHSSFKWRWYHFDGVDWDQSRRFQNRIYKFRGKAWDWEVDTEFGNYDYLMYADYDMDHPEVVNELRNWGVWYTNTLGLDGFRIDAVKHIKYSFTRDWINHVRSATGKNMFAVAEFWKNDLGAIENYLQKTNWNHSVFDVPLHYNLYNASKSGGNYDMRNIFNGTVVQRHPSHAVTFVDNHDSQPEEALESFVEEWFKPLAYALTLTREQGYPSVFYGDYYGIPTHGVPAMRSKIDPILEARQKYAYGPQHDYLDHPDVIGWTREGDSSHPKSGLATLITDGPGGSKRMYAGLKNAGETWYDITGNRSDTVKIGSDGWGEFHVNDGSVSIYVQK

SEQ ID NO: 39490 - protein, 478 aa, Bacillus sp.
NGTMMQYFEWYLPNDGNHWNRLNSDASNLKSKGITAVWIPPAWKAASQNDVGYGAYDLYDLGEFNQKGTVRTKYGTRSQLQAAVTSLKNNGIQVYGDVVMNHKGGADATEMVRAVEVNPNNRNQEVTGEYTIEAWTRFDFPGRGNTHSSFKWRWYHFDGVDWDQSRQVSNRIYKFRGKAWDWEVDTEFGNYDYLMYADYDMDHPEVVNELRNWGVWYTNTLGLDGFRIDAVKHIKYSFTRDWINHVRSATGKNMFAVAEFWKNDLGAIENYLQKTNWNHSVFDVPLHYNLYNASKSGGNYDMRNIFNGTVVQRHPSHAVTFVDNHDSQPEEALESFVEEWFKPLAYALTLTREQGYPSVFYGDYYGIPTHGVPAMRSKIDPILEARQKYAYGPQHDYLDHPDVIGWTREGDSSHPKSGLATLITDGPGGSKRMYAGLKNAGETWYDITGNRSDTVKIGSDGWGEFHVNDGSVSIYVQK

SEQ ID NO: 39491 - protein, 478 aa, Synthetic construct
NGTMMQYFEWYLPNDGNHWNRLNSDASNLKSKGITAVWIPPAWKGASQNDVGYGAYDLYDLGEFNQKGTVRTKYGTRSQLQAAVTSLKNNGIQVYGDVVMNHKGGADATEMVRAVEVNPNNRNQEVTGEYTIEAWTRFDFPGRGNTHSSFKWRWYHFDGVDWDQSRRLNNRIYKFRGKAWDWEVDTENGNYDYLMYADIDMDHHEVVNELRNWGVWYTNTLGLDGFRIDAVKHIKYSFTRDWINHVRSATGKNMFAVAEFWKNDLGAIENYLQKTNWNHSVFDVPLHYNLYNASKSGGNYDMRNIFNGTVVQRHPSHAVTFVDNHDSQPEEALESFVEEWFKPLAYALTLTREQGYPSVFYGDYYGIPTHGVPAMRSKIDPILEARQKYAYGPQHDYLDHPDVIGWTREGDSSHPKSGLATLITDGPGGSKRMYAGLKNAGETWYDITGNRSDTVKIGSDGWGEFHVNDGSVSIYVQK

SEQ ID NO: 39492 - protein, 478 aa, Bacillus sp.
NGTMMQYFEWYLPNDGNHWNRLNSDASNLKSKGITAVWIPPAWKGASQNDVGYGAYDLYDLGEFNQKGTVRTKYGTRSQLQAAVTSLKNNGIQVYGDVVMNHKGGADATEMVRAVEVNPNNRNQEVTGEYTIEAWTRFDFPGRGNTHSSFKWRWYHFDGVDWDQSRRLNNRIYKFRGKAWDWEVDTENGFYDYLMYADIDYDHPEVVSTLRNWGVWYTNTLGLDGFRIDAVKHIKYSFTRDWINHVRSATGKNMFAVAEFWKNDLGAIENYLQKTNWNHSVFDVPLHYNLYNASKSGGNYDMRNIFNGTVVQRHPSHAVTFVDNHDSQPEEALESFVEEWFKPLAYALTLTREQGYPSVFYGDYYGIPTHGVPAMRSKIDPILEARQKYAYGPQHDYLDHPDVIGWTREGDSSHPKSGLATLITDGPGGSKRMYAGLKNAGETWYDITGNRSDTVKIGSDGWGEFHVNDGSVSIYVQK

SEQ ID NO: 39493 - protein, 478 aa, Synthetic construct
NGTMMQYFEWYLPNDGNHWNRLNSDASNLKSKGITAVWIPPAWKGASQNDVGYGAYDVYDLGEFNQKGTVRTKYGTRSQLQAAVTSLKNNGIQVYGDVVMNHKGGADATEMVRAVEVNPNNRNQEVTGEYTIEAWTRFDFPGRGNTHSSFKWRWYHFDGVDWDQSRRLNNRIYKFRGKAWDWEVDTENGNYDYLMYADFDMDHPEVVNELRNWGVWYTNTLGLDGFRIDAVKHIKYSFTRDWINHVRSATGKNMFAVAEFWKNDLGAIENYLQKTNWNHSVFDVPLHYNLYNASKSGGNYDMRNIFNGTVVQRHPSHAVTFVDNHDSQPEEALESFVEEWFKPLAYALTLTREQGYPSVFYGDYYGIPTHGVPAMRSKIDPILEARQKYAYGPQHDYLDHPDVIGWTREGDSSHPKSGLATLITDGPGGSKRMYAGLKNAGETWYDITGNRSDTVKIGSDGWGEFHVNDGSVSIYVQK

SEQ ID NO: 39494 - protein, 478 aa, Bacillus sp.
NGTMMQYFEWYLPNDGNHWNRLNSDASNLKSKGITAVWIPPAWKGASQNDVGYGAYDLYDLGEFNQKGTVRTKYGTRSQLQAAVTSLKNNGIQVYGDVVMNHKGGADATEMVRAVEVNPNNRNQEVTGEYTIEAWTRFDFPGRGNTHSSFKWRWYHFDGVDWDQSRQFYNRIYKFRGKAWDWEVDTEFGNYDYLMYADYDMDHPEVVNELRNWGVWYTNTLGLDGFRIDAVKHIKYSFTRDWINHVRSATGKNMFAVAEFWKNDLGAIENYLQKTNWNHSVFDVPLHYNLYNASKSGGNYDMRNIFNGTVVQRHPSHAVTFVDNHDSQPEEALESFVEEWFKPLAYALTLTREQGYPSVFYGDYYGIPTHGVPAMRSKIDPILEARQKYAYGPQHDYLDHPDVIGWTREGDSSHPKSGLATLITDGPGGSKRMYAGLKNAGETWYDITGNRSDTVKIGSDGWGEFHVNDGSVSIYVQK

SEQ ID NO: 39495 - protein, 478 aa, Bacillus sp.
NGTMMQYFEWYLPNDGNHWNRLNSDASNLKSKGITAVWIPPAWKGASQNDVGYGAYDLYDLGEFNQKGTVRTKYGTRSQLQAAVTSLKNNGIQVYGDVVMNHKGGADATEMVRAVEVNPNNRNQEVTGEYTIEAWTRFDFPGRGNTHSSFKWRWYHFDGVDWDQSRQFDNRIYKFRGKAWDWEVDTEFGNYDYLMYADYDMDHPEVVNELRNWGVWYTNTLGLDGFRIDAVKHIKYSFTRDWINHVRSATGKNMFAVAEFWKNDLGAIENYLQKTNWNHSVFDVPLHYNLYNASKSGGNYDMRNIFNGTVVQRHPSHAVTFVDNHDSQPEEALESFVEEWFKPLAYALTLTREQGYPSVFYGDYYGIPTHGVPAMRSKIDPILEARQKYAYGPQHDYLDHPDVIGWTREGDSSHPKSGLATLITDGPGGSKRMYAGLKNAGETWYDITGNRSDTVKIGSDGWGEFHVNDGSVSIYVQK

SEQ ID NO: 39496 - protein, 478 aa, Synthetic construct
NGTMMQYFEWYLPNDGNHWNRLNSDASNLKSKGITAVWIPPAWKGASQNDVGYGAYDLYDLGEFNQKGTVRTKYGTRSQLQAAVTSLKNNGIQVYGDVVMNHKGGADATEMVRAVEVNPNNRNQEVTGEYTIEAWTRFDFPGRGNTHSSFKWRWYHFDGVDWDQSRRLNNRIYKFRGKAWDWEVDTELGNYDYLMYADIDMDHPEVVNELRNWGVWYTNTLGLDGFRIDAVKHIKYSFTRDWINHVRSATGKNMFAVAEFWKNDLGAIENYLQKTNWNHSVFDVPLHYNLYNASKSGGNYDMRNIFNGTVVQRHPSHAVTFVDNHDSQPEEALESFVEEWFKPLAYALTLTREQGYPSVFYGDYYGIPTHGVPAMRSKIDPILEARQKYAYGPQHDYLDHPDVIGWTREGDSSHPKSGLATLITDGPGGSKRMYAGLKNAGETWYDITGNRSDTVKIGSDGWGEFHVNDGSVSIYVQK

SEQ ID NO: 39497 - protein, 478 aa, Bacillus sp.
NGTMMQYFEWYLPNDGNHWNRLNSDASNLKSKGITAVWIPPAWKGASQNDVGYGAYDLYDLGEFNQKGTVRTKYGTRSQLQAAVTSLKNNGIQVYGDVVMNHKGGADATEMVRAVEVNPNNRNQEVTGEYTIEAWTRFDFPGRGNTHSSFKWRWYHFDGVDWDQSRRLTNRIYKFRGKAWDWEVDTEFGNYDYLMYADYDMDHPEVVNELRNWGVWYTNTLGLDGFRIDAVKHIKYSFTRDWINHVRSATGKNMFAVAEFWKNDLGAIENYLQKTNWNHSVFDVPLHYNLYNASKSGGNYDMRNIFNGTVVQRHPSHAVTFVDNHDSQPEEALESFVEEWFKPLAYALTLTREQGYPSVFYGDYYGIPTHGVPAMRSKIDPILEARQKYAYGPQHDYLDHPDVIGWTREGDSSHPKSGLATLITDGPGGSKRMYAGLKNAGETWYDITGNRSDTVKIGSDGWGEFHVNDGSVSIYVQK

SEQ ID NO: 39498 - protein, 478 aa, Bacillus sp.
NGTMMQYFEWYLPNDGNHWNRLNSDASNLKSKGITAVWIPPAWKAVSQNDVGYGAYDLYDLGEFNQKGTVRTKYGTRSQLQAAVTSLKNNGIQVYGDVVMNHKGGADATEMVRAVEVNPNNRNQEVTGEYTIEAWTRFDFPGRGNTHSSFKWRWYHFDGVDWDQSRELSNRIYKFRGKAWDWEVDTEFGNYDYLMYADYDMDHPEVVNELRNWGVWYTNTLGLDGFRIDAVKHIKYSFTRDWINHVRSATGKNMFAVAEFWKNDLGAIENYLQKTNWNHSVFDVPLHYNLYNASKSGGNYDMRNIFNGTVVQRHPSHAVTFVDNHDSQPEEALESFVETWFKPLAYALTLTREQGYPSVFYGDYYGIPTHGVPAMRSKIDPILEARQKYAYGPQHDYLDHPDVIGWTREGDSSHPKSGLATLITDGPGGSKRMYAGLKNAGETWYDITGNRSDTVKIGSDGWGEFHVNDASVSIYVQK

SEQ ID NO: 39499 - protein, 478 aa, Synthetic construct
NGTMMQYFEWYLPNDGNHWNRLNSDASNLKSKGITAVWIPPAWKGASQNDVGYGAYDLYDLGEFNQKGTVRTKYGTRSQLQAAVTSLKNNGIQVYGDVVINHKGGADATEMVRAVEVNPNNRNQEVTGEYTIEAWTRFDFPGRGNTHSSFKWRWYHFDGVDWDQSRRLNNRIYKFRGKAWDWEVDTENGNYDYLMYADYDMDYPEVVNEIRNWGVWYTNTLGLDGFRIDAVKHIKYSFVRDWINHVRSATGKNMFAVAEFWKNDLGAIENYLQKTNWNHSVFDVPLHYNLYNASKSGGNYDMRNIFNGTVVQRHPSHAVTFVDNHDSQPEEALESFVEEWFKPLAYALTLTREQGYPSVFYGDYYGIPTHGVPAMRSKIDPILEARQKYAYGPQHDYLDHPDVIGWTREGDSSHPKSGLATLITDGPGGSKRMYAGLKNAGETWYDITGNRSDTVKIGSDGWGEFHVNDGSVSIYVQK

SEQ ID NO: 39500 - protein, 478 aa, Bacillus sp.
NGTMMQYFEWYLPNDGNHWNRLNSDASNLKSKGITAVWIPPAWKGASQNDVGYGAYDLYDLGEFNQKGTVRTKYGTRSQLQAAVTSLKNNGIQVYGDVVMNHKGGADATEMVRAVEVNPNNRNQEVTGEYTIEAWTRFDFPGRGNTHSSFKWRWYHFDGVDWDQSRVLNNRIYKFRGKAWDWEVDTEFGNYDYLMYADYDMDHPEVVNELRNWGVWYTNTLGLDGFRIDAVKHIKYSFTRDWINHVRSATGKNMFAVAEFWKNDLGAIENYLQKTNWNHSVFDVPLHYNLYNASKSGGNYDMRNIFNGTVVQRHPSHAVTFVDNHDSQPEEALESFVEEWFKPLAYALTLTREQGYPSVFYGDYYGIPTHGVPAMRSKIDPILEARQKYAYGPQHDYLDHPDVIGWTREGDSSHPKSGLATLITDGPGGSKRMYAGLKNAGETWYDITGNRSDTVKIGSDGWGEFHVNDGSVSIYVQK

SEQ ID NO: 39501 - protein, 478 aa, Bacillus sp.
NGTMMQYFEWYLPNDGNHWNRLNSDASNLKSKGITAVWIPPAWKGASQNDVGYGAYDLYDLGEFNQKGTVRTKYGTRSQLQAAVTSLKNNGIQVYGDVVMNHKGGADATEMVRAVEVNPNNRNQEVTGEYTIEAWTRFDFPGRGNTHSSFKWRWYHFDGVDWDQSRRLNNRIYKFRGKAWDWEVDTEFGNYDYLMYADYDMDHPEVVNELRNWGVWYTNTLGLDGFRIDAVKHIKYSFTRDWINHVRSATGKNMFAVAEFWKNDLGAIENYLQKTNWNHSVFDVPLHYNLYNASKSQGNYDMRNIFNGTVVQRHPSHAVTFVDNHDSQPEEALESFVETWFKPLAYALTLTREQGYPSVFYGDYYGIPTHGVPAMRSKIDPILEARQKYAYGPQHDYLDHPDVIGWTREGDSSHPKSGLATLITDGPGGSKRMYAGLKNAGETWYDITGNRSDTVKIGSDGWGEFHVNDGSVSIYVQK

SEQ ID NO: 39502 - protein, 478 aa, Synthetic construct
NGTMMQYFEWYLPNDGNHWNRLNSDASNLKSKGITAVWIPPAWKGASQNDVGYGAYDLYDLGEFNQKGTVRTKYGTRSQLQAAVTSLKNNGIQVYGDVVMNHKGGADATEMVRAVEVNPNNRNQEVTGEYTIEAWTRFDFPGRGNTHSSFKWRWYHFDGVDWDQSRRLNNRIYKFRGKAWDWEVDTENGNYDYLMYADIDMDHLEVVNELRNWGVWYTNTLGLDGFRIDAVKHIKYSFTRDWINHVRSATGKNMFAVAEFWKNDLGAIENYLQKTNWNHSVFDVPLHYNLYNASKSGGNYDMRNIFNGTVVQRHPSHAVTFVDNHDSQPEEALESFVEEWFKPLAYALTLTREQGYPSVFYGDYYGIPTHGVPAMRSKIDPILEARQKYAYGPQHDYLDHPDVIGWTREGDSSHPKSGLATLITDGPGGSKRMYAGLKNAGETWYDITGNRSDTVKIGSDGWGEFHVNDGSVSIYVQK

SEQ ID NO: 39503 - protein, 478 aa, Bacillus sp.
NGTMMQYFEWYLPNDGNHWNRLNSDASNLKSKGITAVWIPPAWKGASQNDVGYGAYDLYDLGEFNQKGTVRTKYGTRSQLQAAVTSLKNNGIQVYGDVVMNHKGGADATEMVRAVEVNPNNRNQEVTGEYTIEAWTRFDFPGRGNTHSSFKWRWYHFDGVDWDQSRRLNNRIYKFRGKAWDWEVATEFGNYDYLMYADYDMDHPEVVNELRNWGVWYTNTLGLDGFRIDAVKHIKYSFTRDWINHVRSATGKNMFAVAEFWKNDLGAIENYLQKTNWNHSVFDVPLHYNLYNASKSGGNYDMRNIFNGTVVQRHPSHAVTFVDNHDSQPEEALESFVEEWFKPLAYALTLTREQGYPSVFYGDYYGIPTHGVPAMRSKIDPILEARQKYAYGPQHDYLDHPDVIGWTREGDSSHPKSGLATLITDGPGGSKRMYAGLKNAGETWYDITGNRSDTVKIGSDGWGEFHVNDGSVSIYVQK

SEQ ID NO: 39504 - protein, 478 aa, Bacillus sp.
NGTMMQYFEWYLPNDGNHWNRLNSDASNLKSKGITAVWIPPAWKGASQNDVGYGAYDLYDLGEFNQKGTVRTKYGTRSQLQAAVTSLKNNGIQVYGDVVMNHKGGADATEMVRAVEVNPNNRNQEVTGEYTIEAWTRFDFPGRGNTHSSFKWRWYHFDGVDFDMSRELSNRIYKFRGKAWDWEVDTEFGNYDYLMYADYDMDHPEVVNELRNWGVWYTNTLGLDGFRIDAVKHIKYSFTRDWINHVRSATGKNMFAVAEFWKNDLGAIENYLQKTNWNHSVFDVPLHYNLYNASKSGGNYDMRNIFNGTVVQRHPSHAVTFVDNHDSQPEEALESFVEEWFKPLAYALTLTREQGYPSVFYGDYYGIPTHGVPAMRSKIDPILEARQKYAYGPQHDYLDHPDVIGWTREGDSSHPKSGLATLITDGPGGSKRMYAGLKNAGETWYDITGNRSDTVKIGSDGWGEFHVNDGSVSIYVQK

SEQ ID NO: 39505 - protein, 478 aa, Bacillus sp.
NGTMMQYFEWYLPNDGNHWNRLNSDASNLKSKGITAVWIPPAWKGASQNDVGYGAYDLYDLGEFNQKGTVRTKYGTRSQLQAAVTSLKNNGIQVYGDVVMNHKGGADATEMVRAVEVNPNNRNQEVTGEYTIEAWTRFDFPGRGNTHSSFKWRWYHFDGVDWDQSRRLNNRIYKFRGKAWDWEVDTENGFYDYLMYADIDYDHPEVVPTLRNWGVWYTNTLGLDGFRIDAVKHIKYSFTRDWINHVRSATGKNMFAVAEFWKNDLGAIENYLQKTNWNHSVFDVPLHYNLYNASKSGGNYDMRNIFNGTVVQRHPSHAVTFVDNHDSQPEEALESFVEEWFKPLAYALTLTREQGYPSVFYGDYYGIPTHGVPAMRSKIDPILEARQKYAYGPQHDYLDHPDVIGWTREGDSSHPKSGLATLITDGPGGSKRMYAGLKNAGETWYDITGNRSDTVKIGSDGWGEFHVNDGSVSIYVQK

SEQ ID NO: 39506 - protein, 478 aa, Bacillus sp.
NGTMMQYFEWYLPNDGNHWNRLNSDASNLKSKGITAVWIPPAWKGASQNDVGYGAYDLYDLGEFNQKGTVRTKYGTRSQLQAAVTSLKNNGIQVYGDVVMNHKGGADATEMVRAVEVNPNNRNQEVTGEYTIEAWTRFDFPGRGNTHSSFKWRWYHFDGVDWDQSRRLNNRIYKFRGKAWDWEVDTENGFYDYLMYADIDMDHPEVVSELRNWGVWYTNTLGLDGFRIDAVKHIKYSFTRDWINHVRSATGKNMFAVAEFWKNDLGAIENYLQKTNWNHSVFDVPLHYNLYNASKSGGNYDMRNIFNGTVVQRHPSHAVTFVDNHDSQPEEALESFVEEWFKPLAYALTLTREQGYPSVFYGDYYGIPTHGVPAMRSKIDPILEARQKYAYGPQHDYLDHPDVIGWTREGDSSHPKSGLATLITDGPGGSKRMYAGLKNAGETWYDITGNRSDTVKIGSDGWGEFHVNDGSVSIYVQK

SEQ ID NO: 39507 - protein, 478 aa, Bacillus sp.
NGTMMQYFEWYLPNDGNHWNRLNSDASNLKSKGITAVWIPPAWKGASQNDVGYGAYDLYDLGEFNQKGTVRTKYGTRSQLQAAVTSLKNNGIQVYGDVVMNHKGGADATEMVRAVEVNPNNRNQEVTGEYTIEAWTRFDFPGRGNTHSSFKWRWYHFDGVDWDQSRRLNNRIYKFRGKAWDWEVDTENGFYDYLMYADIDYDYPEVVTELRVWGVWYTNTLGLDGFRIDAVKHIKYSFTRDWINHVRSATGKNMFAVAEFWKNDLGAIENYLQKTNWNHSVFDVPLHYNLYNASKSGGNYDMRNIFNGTVVQRHPSHAVTFVDNHDSQPEEALESFVEEWFKPLAYALTLTREQGYPSVFYGDYYGIPTHGVPAMRSKIDPILEARQKYAYGPQHDYLDHPDVIGWTREGDSSHPKSGLATLITDGPGGSKRMYAGLKNAGETWYDITGNRSDTVKIGSDGWGEFHVNDGSVSIYVQK

SEQ ID NO: 39508 - protein, 478 aa, Bacillus sp.
NGTMMQYFEWYLPNDGNHWNRLNSDASNLKSKGITAVWIPPAWKGASQNDVGYGAYDLYDLGEFNQKGTVRTKYGTRSQLQAAVTSLKNNGIQVYGDVVMNHKGGADATEMVRAVEVNPNNRNQEVTGEYTIEAWTRFDFPGRGNTHSSFKWRWYHFDGVDWDQSRRLNNRIYKFRGKAWDWEVDTEFGNYDYLMYADYDMDHPEVVNELRNWGVWYTNTLGLDGFRIDAVKHIKYSFTRDWINHVRSATGKNMFAVAEFWRNDLGWIENYLQKTNWNHSVFDVPLHYNLYNASKSGGNYDMRNIFNGTVVQRHPSHAVTFVDNHDSQPEEALESFVEEWFKPLAYALTLTREQGYPSVFYGDYYGIPTHGVPAMRSKIDPILEARQKYAYGPQHDYLDHPDVIGWTREGDSSHPKSGLATLITDGPGGSKRMYAGLKNAGETWYDITGNRSDTVKIGSDGWGEFHVNDGSVSIYVQK

SEQ ID NO: 39509 - protein, 478 aa, Bacillus sp.
NGTMMQYFEWYLPNDGNHWNRLNSDASNLKSKGITAVWIPPAWKSASQNDVGYGAYDLYDLGEFNQKGTVRTKYGTRSQLQAAVTSLKNNGIQVYGDVVMNHKGGADATEMVRAVEVNPNNRNQEVTGEYTIEAWTRFDFPGRGNTHSSFKWRWYHFDGVDWDQSRKLDNRIYKFRGKAWDWEVDTEFGNYDYLMYADYDMDHPEVVNELRNWGVWYTNTLGLDGFRIDAVKHIKYSFTRDWINHVRSATGKNMFAVAEFWKNDLGAIENYLQKTNWNHSVFDVPLHYNLYNASKSGGNYDMRNIFNGTVVQRHPSHAVTFVDNHDSQPEEALESFVEEWFKPLAYALTLTREQGYPSVFYGDYYGIPTHGVPAMRSKIDPILEARQKYAYGPQHDYLDHPDVIGWTREGDSSHPKSGLATLITDGPGGSKRMYAGLKNAGETWYDITGNRSDTVKIGSDGWGEFHVNDGSVSIYVQK

SEQ ID NO: 39510 - protein, 478 aa, Bacillus sp.
NGTMMQYFEWYLPNDGNHWNRLNSDASNLKSKGITAVWIPPAWKGASQNDVGYGAYDLYDLGEFNQKGTVRTKYGTRSQLQAAVTSLKNNGIQVYGDVVMNHKGGADATEMVRAVEVNPNNRNQEVTGEYTIEAWTRFDFPGRGNTHSSFKWRWYHFDGVDWDQSRNFQNRIYKFRGKAWDWEVDTEFGNYDYLMYADYDMDHPEVVNELRNWGVWYTNTLGLDGFRIDAVKHIKYSFTRDWINHVRSATGKNMFAVAEFWKNDLGAIENYLQKTNWNHSVFDVPLHYNLYNASKSGGNYDMRNIFNGTVVQRHPSHAVTFVDNHDSQPEEALESFVEEWFKPLAYALTLTREQGYPSVFYGDYYGIPTHGVPAMRSKIDPILEARQKYAYGPQHDYLDHPDVIGWTREGDSSHPKSGLATLITDGPGGSKRMYAGLKNAGETWYDITGNRSDTVKIGSDGWGEFHVNDGSVSIYVQK

SEQ ID NO: 39511 - protein, 478 aa, Bacillus sp.
NGTMMQYFEWYLPNDGNHWNRLNSDASNLKSKGITAVWIPPAWKGASQNDVGYGAYDLYDLGEFNQKGTVRTKYGTRSQLQAAVTSLKNNGIQVYGDVVMNHKGGADATEMVRAVEVNPNNRNQEVTGEYTIEAWTRFDFPGRGNTHSSFKWRWYHFDGVDWDQSRELDNRIYKFRGKAWDWEVDTEFGNYDYLMYADYDMDHPEVVNELRNWGVWYTNTLGLDGFRIDAVKHIKYSFTRDWINHVRSATGKNMFAVAEFWKNDLGAIENYLQKTNWNHSVFDVPLHYNLYNASKSGGNYDMRNIFNGTVVQRHPSHAVTFVDNHDSQPEEALESFVEEWFKPLAYALTLTREQGYPSVFYGDYYGIPTHGVPAMRSKIDPILEARQKYAYGPQHDYLDHPDVIGWTREGDSSHPKSGLATLITDGPGGSKRMYAGLKNAGETWYDITGNRSDTVKIGSDGWGEFHVNDGSVSIYVQK

SEQ ID NO: 39512 - protein, 478 aa, Bacillus sp.
NGTMMQYFEWYLPNDGNHWNRLNSDASNLKSKGITAVWIPPAWKGASQNDVGYGAYDLYDLGEFNQKGTVRTKYGTRSQLQAAVTSLKNNGIQVYGDVVMNHKGGADATEMVRAVEVNPNNRNQEVTGEYTIEAWTRFDFPGRGNTHSSFKWRWYHFDGVDWDQSRRLNNRIYKFRGKAWDWEVDTEFGNYDYLMYADYDMDHPEVVNELRNWGVWYTNTLGLDGFRIDAVKHIKYSFTRDWINHVRSATGKNMFAVAEFWKNDLGAIENYLQKTVWNHSVFDVPLHYNLYNASKSGGNYDMRNIFNGTVVQRHPSHAVTFVDNHDSQPEEALESFVEEWFKPLAYALTLTREQGYPSVFYGDYYGIPTHGVPAMRSKIDPILEARQKYAYGPQHDYLDHPDVIGWTREGDSSHPKSGLATLITDGPGGSKRMYAGLKNAGETWYDITGNRSDTVKIGSDGWGEFHVNDGSVSIYVQK

SEQ ID NO: 39513 - protein, 478 aa, Bacillus sp.
NGTMMQYFEWYLPNDGNHWNRLNSDASNLKSKGITAVWIPPAWKATSQNDVGYGAYDLYDLGEFNQKGTVRTKYGTRSQLQAAVTSLKNNGIQVYGDVVMNHKGGADATEMVRAVEVNPNNRNQEVTGEYTIEAWTRFDFPGRGNTHSSFKWRWYHFDGVDWDQSRNIQNRIYKFRGKAWDWEVDTEFGNYDYLMYADYDMDHPEVVNELRNWGVWYTNTLGLDGFRIDAVKHIKYSFTRDWINHVRSATGKNMFAVAEFWKNDLGAIENYLQKTNWNHSVFDVPLHYNLYNASKSGGNYDMRNIFNGTVVQRHPSHAVTFVDNHDSQPEEALESFVEEWFKPLAYALTLTREQGYPSVFYGDYYGIPTHGVPAMRSKIDPILEARQKYAYGPQHDYLDHPDVIGWTREGDSSHPKSGLATLITDGPGGSKRMYAGLKNAGETWYDITGNRSDTVKIGSDGWGEFHVNDGSVSIYVQK

SEQ ID NO: 39514 - protein, 478 aa, Bacillus sp.
NGTMMQYFEWYLPNDGNHWNRLNSDASNLKSKGITAVWIPPAWKGASQNDVGYGAYDLYDLGEFNQKGTVRTKYGTRSQLQAAVTSLKNNGIQVYGDVVMNHKGGADATEMVDAVEVNPNNRNQEVTGEYTIEAWTRFDFPGRGNTHSSFKWRWYHFDGVDWDQSRQLDNRIYKFRGKAWDWEVDTEFGNYDYLMYADYDMDHPEVVNELRNWGVWYTNTLGLDGFRIDAVKHIKYSFTRDWINHVRSATGKNMFAVAEFWKNDLGAIENYLQKTNWNHSVFDVPLHYNLYNASKSGGNYDMRNIFNGTVVQRHPSHAVTFVDNHDSQPEEALESFVEEWFKPLAYALTLTREQGYPSVFYGDYYGIPTHGVPAMRSKIDPILEARQKYAYGPQHDYLDHPDVIGWTREGDSSHPKSGLATLITDGPGGSKRMYAGLKNAGETWYDITGNRSDTVKIGSDGWGEFHVNDGSVSIYVQK

SEQ ID NO: 39515 - protein, 478 aa, Bacillus sp.
NGTMMQYFEWYLPNDGNHWNRLNSDASNLKSKGITAVWIPPAWKGASQNDVGYGAYDLYDLGEFNQKGTVRTKYGTRSQLQAAVTSLKNNGIQVYGDVVMNHKGGADATEMVRAVEVNPNNRNQEVTGEYTIEAWTRFDFPGRGNTHSSFKWRWYHFDGVDWDQSRRLNNRIYKFRGKAWDWEVDTENGNYDYLMYADIDFDFPEVVNELRIWGVWYTNTLGLDGFRIDAVKHIKYSFTRDWINHVRSATGKNMFAVAEFWKNDLGAIENYLQKTNWNHSVFDVPLHYNLYNASKSGGNYDMRNIFNGTVVQRHPSHAVTFVDNHDSQPEEALESFVEEWFKPLAYALTLTREQGYPSVFYGDYYGIPTHGVPAMRSKIDPILEARQKYAYGPQHDYLDHPDVIGWTREGDSSHPKSGLATLITDGPGGSKRMYAGLKNAGETWYDITGNRSDTVKIGSDGWGEFHVNDGSVSIYVQK

SEQ ID NO: 39516 - protein, 478 aa, Bacillus sp.
NGTMMQYFEWYLPNDGNHWNRLNSDASNLKSKGITAVWIPPAWKGASQNDVGYGAYDLYDLGEFNQKGTVRTKYGTRSQLQAAVTSLKNNGIQVYGDVVMNHKGGADATEMVRAVEVNPNNRNQEVTGEYTIEAWTRFDFPGRGNTHSSFKWRWYHFDGVDWDQSRRLNNRIYKFRGKAWDWEVDTEFGNYDYLMYADYDMDHPEVVNELRNWGVWYTNTLGLDGFRIDAVKHIKDSFTRDWINHVRSATGKNMFAVAEFWKNDLGAIENYLQKTNWNHSVFDVPLHYNLYNASKSGGNYDMRNIFNGTVVQRHPSHAVTFVDNHDSQPEEALESFVEEWFKPLAYALTLTREQGYPSVFYGDYYGIPTHGVPAMRSKIDPILEARQKYAYGPQHDYLDHPDVIGWTREGDSSHPKSGLATLITDGPGGSKRMYAGLKNAGETWYDITGNRSDTVKIGSDGWGEFHVNDGSVSIYVQK

SEQ ID NO: 39517 - protein, 478 aa, Synthetic construct
NGTMMQYFEWYLPNDGNHWNRLNSDASNLKSKGITAVWIPPAWKGASQNDVGYGAYDLYDLGEFNQKGTVRTKYGTRSQLQAAVTSLKNNGIQVYGDVVMNHKGGADATEMVRAVEVNPNNRNQEVTGEYTIEAWTRFDFPGRGNTHSSFKWRWYHFDGVDWDQSRRLNNRIYKFRGKAWDWEVDTENGNYDYLMYADYDMDYPEVVNEQRNWGVWYTNTLGLDGFRIDAVKHIKYSFTRDWINHVRSATGKNMFAVAEFWKNDLGAIENYLQKTNWNHSVFDVPLHYNLYNASKSGGNYDMRNIFNGTVVQRHPSHAVTFVDNHDSQPEEALESFVEEWFKPLAYALTLTREQGYPSVFYGDYYGIPTHGVPAMRSKIDPILEARQKYAYGPQHDYLDHPDVIGWTREGDSSHPKSGLATLITDGPGGSKRMYAGLKNAGETWYDITGNRSDTVKIGSDGWGEFHVNDGSVSIYVQK

SEQ ID NO: 39518 - protein, 478 aa, Bacillus sp.
NGTMMQYFEWYLPNDGNHWNRLNSDASNLKSKGITAVWIPPAWKGASQNDVGYGAYDLYDLGEFNQKGTVRTKYGTRSQLQAAVTSLKNNGIQVYGDVVMNHKGGADATEMVRAVEVNPNNRNQEVTGEYTIEAWTRFDFPGRGNTHSSFKWRWYHFDGVDWDQSRRLNNRIYKFRGKAWDWEVETEFGNYDYLMYADYDMDHPEVVNELRNWGVWYTNTLGLDGFRIDAVKHIKYSFTRDWINHVRSATGKNMFAVAEFWKNDLGAIENYLSKTNWNHSVFDVPLHYNLYNASKSGGNYDMRNIFNGTVVQRHPSHAVTFVDNHDSQPEEALESFVEEWFKPLAYALTLTREQGYPSVFYGDYYGIPTHGVPAMRSKIDPILEARQKYAYGPQHDYLDHPDVIGWTREGDSSHPKSGLATLITDGPGGSKRMYAGLKNAGETWYDITGNRSDTVKIGSDGWGEFHVNDGSVSIYVQK

SEQ ID NO: 39519 - protein, 478 aa, Bacillus sp.
NGTMMQYFEWYLPNDGNHWNRLNSDASNLKSKGITAVWIPPAWKAASQNDVGYGAYDLYDLGEFNQKGTVRTKYGTRSQLQAAVTSLKNNGIQVYGDVVMNHKGGADATEMVRAVEVNPNNRNQEVTGEYTIEAWTRFDFPGRGNTHSSFKWRWYHFDGVDWDQSRDLSNRIYKFRGKAWDWEVDTEFGNYDYLMYADYDMDHPEVVNELRNWGVWYTNTLGLDGFRIDAVKHIKYSFTRDWINHVRSATGKNMFAVAEFWKNDLGAIENYLQKTNWNHSVFDVPLHYNLYNASKSGGNYDMRNIFNGTVVQRHPSHAVTFVDNHDSQPEEALESFVEEWFKPLAYALTLTREQGYPSVFYGDYYGIPTHGVPAMRSKIDPILEARQKYAYGPQHDYLDHPDVIGWTREGDSSHPKSGLATLITDGPGGSKRMYAGLKNAGETWYDITGNRSDTVKIGSDGWGEFHVNDGSVSIYVQK

SEQ ID NO: 39520 - protein, 478 aa, Bacillus sp.
NGTMMQYFEWYLPNDGNHWNRLNSDASNLKSKGITAVWIPPAWKAASQNDVGYGAYDLYDLGEFNQKGTVRTKYGTRSQLQAAVTSLKNNGIQVYGDVVMNHKGGADATEMVRAVEVNPNNRNQEVTGEYTIEAWTRFDFPGRGNTHSSFKWRWYHFDGVDWDQSRRLSNRIYKFRGKAWDWEVDTEFGNYDYLMYADYDMDHPEVVNELRNWGVWYTNTLGLDGFRIDAVKHIKYSFTRDWINHVRSATGKNMFAVAEFWKNDLGAIENYLQKTNWNHSVFDVPLHYNLYNASKSGGNYDMRNIFNGTVVQRHPSHAVTFVDNHDSQPEEALESFVEEWFKPLAYALTLTREQGYPSVFYGDYYGIPTHGVPAMRSKIDPILEARQKYAYGPQHDYLDHPDVIGWTREGDSSHPKSGLATLITDGPGGSKRMYAGLKNAGETWYDITGNRSDTVKIGSDGWGEFHVNDGSVSIYVQK

SEQ ID NO: 39521 - protein, 478 aa, Bacillus sp.
NGTMMQYFEWYLPNDGNHWNRLNSDASNLKSKGITAVWIPPAWKGASQNDVGYGAYDLYDLGEFNQKGTVRTKYGTRSQLQAAVTSLKNNGIQVYGDVVMNHKGGADATEMVRAVEVNPNNRNQEVTGEYTIEAWTRFDFPGRGNTHSSFKWRWYHFDGVDWDQSRRLNNRIYKFRGKAWDWEVDTEFGNYDYLMYADYDMDHPEVVNELRNWGVWYTNTLGLDGFRIDAVKHIKESFTRDWINHVRSATGKNMFAVAEFWKNDLGAIENYLQKTNWNHSVFDVPLHYNLYNASKSGGNYDMRNIFNGTVVQRHPSHAVTFVDNHDSQPEEALESFVEEWFKPLAYALTLTREQGYPSVFYGDYYGIPTHGVPAMRSKIDPILEARQKYAYGPQHDYLDHPDVIGWTREGDSSHPKSGLATLITDGPGGSKRMYAGLKNAGETWYDITGNRSDTVKIGSDGWGEFHVNDGSVSIYVQK

SEQ ID NO: 39522 - protein, 478 aa, Bacillus sp.
NGTMMQYFEWYLPNDGNHWNRLNSDASNLKSKGITAVWIPPAWKGASQNDVGYGAYDLYDLGEFNQKGTVRTKYGTRSQLQAAVTSLKNNGIQVYGDVVMNHKGGADATEMVRAVEVNPNNRNQEVTGEYTIEAWTRFDFPGRGNTHSSFKWRWYHFDGVDWDQSRRLNNRIYKFRGKAWDWEVDTEFGNYDYLMYADYDMDHPEVVNELRNWGVWYTNTLGLDGFRIDAVKHIKYSFTRDWINHVRSATGKNMFAVAEFWKNDLGAIENYLQKTNWNHSVFDVPLHYNLYNASKSGGNYDMREIFNGTVVQRHPSHAVTFVDNHDSQPEEALESFVEEWFKPLAYALTLTREQGYPSVFYGDYYGIPTHGVPAMRSKIDPILEARQKYAYGPQHDYLDHPDVIGWTREGDSSHPKSGLATLITDGPGGSKRMYAGLKNAGETWYDITGNRSDTVKIGSDGWGEFHVNDGSVSIYVQK

SEQ ID NO: 39523 - protein, 478 aa, Bacillus sp.
NGTMMQYFEWYLPNDGNHWNRLNSDASNLKSKGITAVWIPPAWKGASQNDVGYGAYDLYDLGEFNQKGTVRTKYGTRSQLQAAVTSLKNNGIQVYGDVVMNHKGGADATEMVRAVEVNPNNRNQEVTGEYTIEAWTRFDFPGRGNTHSSFKWRWYHFDGGDWDQSRRLNNRIYKFRGKAWDWEVDTEFGNYDYLMYADYDMDHPEVVNELRNWGVWYTNTLGLDGFRIDAVKHIKYSFTRDWINHVRSATGKNMFAVAEFWKNDLGAIENYLQKTNWNHSVFDVPLHYNLYNASKSGGNYDMRNIFNGTVVQRHPSHAVTFVDNHDSQPEEALESFVEEWFKPLAYALTLTREQGYPSVFYGDYYGIPTHGVPAMRSKIDPILEARQKYAYGPQHDYLDHPDVIGWTREGDSSHPKSGLATLITDGPGGSKRMYAGLKNAGETWYDITGNRSDTVKIGSDGWGEFHVNDGSVSIYVQK

SEQ ID NO: 39524 - protein, 478 aa, Bacillus sp.
NGTMMQYFEWYLPNDGNHWNRLNSDASNLKSKGITAVWIPPAWKAASQNDVGYGAYDLYDLGEFNQKGTVRTKYGTRSQLQAAVTSLKNNGIQVYGDVVMNHKGGADATEMVRAVEVNPNNRNQEVTGEYTIEAWTRFDFPGRGNTHSSFKWRWYHFDGVDWDQSRNLSNRIYKFRGKAWDWEVDTEFGNYDYLMYADYDMDHPEVVNELRNWGVWYTNTLGLDGFRIDAVKHIKYSFTRDWINHVRSATGKNMFAVAEFWKNDLGAIENYLQKTNWNHSVFDVPLHYNLYNASKSGGNYDMRNIFNGTVVQRHPSHAVTFVDNHDSQPEEALESFVEEWFKPLAYALTLTREQGYPSVFYGDYYGIPTHGVPAMRSKIDPILEARQKYAYGPQHDYLDHPDVIGWTREGDSSHPKSGLATLITDGPGGSKRMYAGLKNAGETWYDITGNRSDTVKIGSDGWGEFHVNDGSVSIYVQK

SEQ ID NO: 39525 - protein, 478 aa, Bacillus sp.
NGTMMQYFEWYLPNDGNHWNRLNSDASNLKSKGITAVWIPPAWKGASQNDVGYGAYDLYDLGEFNQKGTVRTKYGTRSQLQAAVTSLKNNGIQVYGDVVMNHKGGADATEMVRAVEVNPNNRNQEVTGEYTIEAWTRFDFPGRGNTHSSFKWRWYHFDGSDWDQSRRLNNRIYKFRGKAWDWEVDTEFGNYDYLMYADYDMDHPEVVNELRNWGVWYTNTLGLDGFRIDAVKHIKYSFTRDWINHVRSATGKNMFAVAEFWKNDLGAIENYLQKTNWNHSVFDVPLHYNLYNASKSGGNYDMRNIFNGTVVQRHPSHAVTFVDNHDSQPEEALESFVEEWFKPLAYALTLTREQGYPSVFYGDYYGIPTHGVPAMRSKIDPILEARQKYAYGPQHDYLDHPDVIGWTREGDSSHPKSGLATLITDGPGGSKRMYAGLKNAGETWYDITGNRSDTVKIGSDGWGEFHVNDGSVSIYVQK

SEQ ID NO: 39526 - protein, 478 aa, Bacillus sp.
NGTMMQYFEWYLPNDGNHWNRLNSDASNLKSKGITAVWIPPAWKGASQNDVGYGAYDLYDLGEFNQKGTVRTKYGTRSQLQAAVTSLKNNGIQVYGDVVMNHKGGADATEMVRAVEVNPNNRNQEVTGEYTIEAWTRFDFPGRGNTHSSFKWRWYHFDGVDWDQSRRLNNRIYKFRGKAWDWEVDTEFGNYDYLMYADYDMDHPEVVNELRNWGVWYTNTLGLDGFRIDAVKHIKYSFTRDWINHVRSATGKNMFAVAEFWKNDLGAIENYLQKTNWNHSVFDVPLHNNLYTASKSGGNYDMRNIFNGTVVQRHPSHAVTFVDNHDSQPEEALESFVEEWFKPLAYALTLTREQGYPSVFYGDYYGIPTHGVPAMRSKIDPILEARQKYAYGPQHDYLDHPDVIGWTREGDSSHPKSGLATLITDGPGGSKRMYAGLKNAGETWYDITGNRSDTVKIGSDGWGEFHVNDGSVSIYVQK

SEQ ID NO: 39527 - protein, 478 aa, Bacillus sp.
NGTMMQYFEWYLPNDGNHWNRLNSDASNLKSKGITAVWIPPAWKGASQNDVGYGAYDLYDLGEFNQKGTVRTKYGTRSQLQAAVTSLKNNGIQVYGDVVMNHKGGADATEMVRAVEVNPNNRNQEVTGEYTIEAWTRFDFPGRGNTHSSFKWRWYHFDGVDWDQSRRLNNRIYKFRGKAWDWEVDTEFGNYDYLMYADYDMDHPEVVNELRNWGVWYTNTLGLDGFRIDAVKHIKYSFTRDWINHVRSATGKNMFAVAEFWKNDLGAIENYLQKTLWNHSVFDVPLHYNLYNASKSGGNYDMRNIFNGTVVQRHPSHAVTFVDNHDSQPEEALESFVEEWFKPLAYALTLTREQGYPSVFYGDYYGIPTHGVPAMRSKIDPILEARQKYAYGPQHDYLDHPDVIGWTREGDSSHPKSGLATLITDGPGGSKRMYAGLKNAGETWYDITGNRSDTVKIGSDGWGEFHVNDGSVSIYVQK

SEQ ID NO: 39528 - protein, 478 aa, Bacillus sp.
NGTMMQYFEWYLPNDGNHWNRLNSDASNLKSKGITAVWIPPAWKGASQNDVGYGAYDLYDLGEFNQKGTVRTKYGTRSQLQAAVTSLKNNGIQVYGDVVMNHKGGADATEMVRAVEVNPNNRNQEVTGEYTIEAWTRFDFPGRGNTHSSFKWRWYHFDGVDWDQSRRLNNRIYKFRGKAWEWEVDTENGFYDYLMYADIDYDHPSVVNELRNWGVWYTNTLGLDGFRIDAVKHIKYSFTRDWINHVRSATGKNMFAVAEFWKNDLGAIENYLQKTNWNHSVFDVPLHYNLYNASKSGGNYDMRNIFNGTVVQRHPSHAVTFVDNHDSQPEEALESFVEEWFKPLAYALTLTREQGYPSVFYGDYYGIPTHGVPAMRSKIDPILEARQKYAYGPQHDYLDHPDVIGWTREGDSSHPKSGLATLITDGPGGSKRMYAGLKNAGETWYDITGNRSDTVKIGSDGWGEFHVNDGSVSIYVQK

SEQ ID NO: 39529 - protein, 478 aa, Synthetic construct
NGTMMQYFEWYLPNDGNHWNRLNSDASNLKSKGITAVWIPPAWKGASQNDVGYGAYDVYDLGEFNQKGTVRTKYGTRSQLQAAVTSLKNNGIQVYGDVVMNHKGGADATEMVRAVEVNPNNRNQEVTGEYTIEAWTRFDFPGRGNTHSSFKWRWYHFDGVDWDQSRRLNNRIYKFRGKAWDWEVDTENGNYDYLMYADYDMDHPEVVNELRNWGVWYTNTLGLDGFRIDAVKHIKYSFVRDWINHVRSATGKNMFAVAEFWKNDLGAIENYLQKTNWNHSVFDVPLHYNLYNASKSGGNYDMRNIFNGTVVQRHPSHAVTFVDNHDSQPEEALESFVEEWFKPLAYALTLTREQGYPSVFYGDYYGIPTHGVPAMRSKIDPILEARQKYAYGPQHDYLDHPDVIGWTREGDSSHPKSGLATLITDGPGGSKRMYAGLKNAGETWYDITGNRSDTVKIGSDGWGEFHVNDGSVSIYVQK

SEQ ID NO: 39530 - protein, 478 aa, Bacillus sp.
NGTMMQYFEWYLPNDGNHWNRLNSDASNLKSKGITAVWIPPAWKGASQNDVGYGAYDLYDLGEFNQKGTVRTKYGTRSQLQAAVTSLKNNGIQVYGDVVMNHKGGADATEMVRAVEVNPNNRNQEVTGEYTIEAWTRFDFPGRGNTHSSFKWRWYHFDGVDWDQSRRLNNRIYKFRGKAWDWEVDGEFGNYDYLMYADYDMDHPEVVNELRNWGVWYTNTLGLDGFRIDAVKHIKYSFTRDWINHVRSATGKNMFAVAEFWKNDLGAIENYLQKTNWNHSVFDVPLHYNLYNASKSGGNYDMRNIFNGTVVQRHPSHAVTFVDNHDSQPEEALESFVEEWFKPLAYALTLTREQGYPSVFYGDYYGIPTHGVPAMRSKIDPILEARQKYAYGPQHDYLDHPDVIGWTREGDSSHPKSGLATLITDGPGGSKRMYAGLKNAGETWYDITGNRSDTVKIGSDGWGEFHVNDGSVSIYVQK

SEQ ID NO: 39531 - protein, 478 aa, Bacillus sp.
NGTMMQYFEWYLPNDGNHWNRLNSDASNLKSKGITAVWIPPAWKGASQNDVGYGAYDLYDLGEFNQKGTVRTKYGTRSQLQAAVTSLKNNGIQVYGDVVMNHKGGADATEMVRAVEVNPNNRNQEVTGEYTIEAWTRFDFPGRGNTHSSFKWRWYHFDGVDWDQSRRLNNRIYKFRGKAWDWEVDTEFGNYDYLMYADYDMDHPEVVNELRNWGVWYTNTLGLDGFRIDAVKHIKYSFTRDWINHVRSATGKNMFAVAEFWKNDLGAIENYLQKTNWNHSVFDVPLHYNLYNASKSGGNYDMRNIFNGTVVQRHPSAAVTFVDNHDSQPEEALESFVEEWFKPLAYALTLTREQGYPSVFYGDYYGIPTHGVPAMRSKIDPILEARQKYAYGPQHDYLDHPDVIGWTREGDSSHPKSGLATLITDGPGGSKRMYAGLKNAGETWYDITGNRSDTVKIGSDGWGEFHVNDGSVSIYVQK

SEQ ID NO: 39532 - protein, 478 aa, Bacillus sp.
NGTMMQYFEWYLPNDGNHWNRLNSDASNLKSKGITAVWIPPAWKGASQNDVGYGAYDLYDLGEFNQKGTVRTKYGTRSQLQAAVTSLKNNGIQVYGDVVMNHKGGADATEMVRAVEVNPNNRNQEVTGEYTIEAWTRFDFPGRGNTHSSFKWRWYHFDGVDWDQSRRLNNRIYKFRGKAWDWEVDTEFGNYDYLMYADYDMDHPEVVNELRNWGVWYTNTLGLDGFRIDAVKHIKYSFTRDWINHVRSATGKNMFAVAEFWKNDLGAIENYLQKTNWNHSVFDVPLHYNLYNASKSGGNYDMRNIFNGTVVQRHPSHAVTFVDNHDSQPEEALESFVEEWFKPLAYAVTLTREQGYPSVFYGDYYGIPTHGVPAMRSKIDPILEARQKYAYGPQHDYLDHPDVIGWTREGDSSHPKSGLATLITDGPGGSKRMYAGLKNAGETWYDITGNRSDTVKIGSDGWGEFHVNDGSVSIYVQK

SEQ ID NO: 39533 - protein, 478 aa, Synthetic construct
NGTMMQYFEWYLPNDGNHWNRLNSDASNLKSKGITAVWIPPAWKGASQNDVGYGAYDLYDLGEFNQKGTVRTKYGTRSQLQAAVTSLKNNGIQVYGDVVMNHKGGADATEMVRAVEVNPNNRNQEVTGEYTIEAWTRFDFPGRGNTHSSFKWRWYHFDGVDWDQSRRLNNRIYKFRGKAWDWEVDTENGNYDYLMYADIDMDHWEVVNELRNWGVWYTNTLGLDGFRIDAVKHIKYSFTRDWINHVRSATGKNMFAVAEFWKNDLGAIENYLQKTNWNHSVFDVPLHYNLYNASKSGGNYDMRNIFNGTVVQRHPSHAVTFVDNHDSQPEEALESFVEEWFKPLAYALTLTREQGYPSVFYGDYYGIPTHGVPAMRSKIDPILEARQKYAYGPQHDYLDHPDVIGWTREGDSSHPKSGLATLITDGPGGSKRMYAGLKNAGETWYDITGNRSDTVKIGSDGWGEFHVNDGSVSIYVQK

SEQ ID NO: 39534 - protein, 478 aa, Bacillus sp.
NGTMMQYFEWYLPNDGNHWNRLNSDASNLKSKGITAVWIPPAWKGASQNDVGYGAYDLYDLGEFNQKGTVRTKYGTRSQLQAAVTSLKNNGIQVYGDVVMNHKGGADATEMVRAVEVNPNNRNQEVTGEYTIEAWTRFDFPGRGNTHSSFKWRWYHFDGVDWDQSRRLNNRIYKFRGKAWDWEVDTENGNYDYLMYADIDLDHPEVVNELRVWGVWYTNTLGLDGFRIDAVKHIKYSFTRLWINHVRSATGKNMFAVAEFWKNDLGAIENYLQKTNWNHSVFDVPLHYNLYNASKSGGNYDMRNIFNGTVVQRHPSHAVTFVDNHDSQPEEALESFVEEWFKPLAYALTLTREQGYPSVFYGDYYGIPTHGVPAMRSKIDPILEARQKYAYGPQHDYLDHPDVIGWTREGDSSHPKSGLATLITDGPGGSKRMYAGLKNAGETWYDITGNRSDTVKIGSDGWGEFHVNDGSVSIYVQK

SEQ ID NO: 39535 - protein, 478 aa, Bacillus sp.
NGTMMQYFEWYLPNDGNHWNRLNSDASNLKSKGITAVWIPPAWKGASQNDVGYGAYDLYDLGEFNQKGTVRTKYGTRSQLQAAVTSLKNNGIQVYGDVVMNHKGGADATEMVRAVEVNPNNRNQEVTGEYTIEAWTRFDFPGRGNTHSSFKWRWYHFDGVDWDQSRRLNNRIYKFRGKAWDWEVDTEFGNYDYLMYADYDMDHPEVVNELRNWGVWYTNTLGLDGFRIDAVKHIKYSFTRDWINHVRSATGKNMFAVAEFWKNDLGAIENYLQKTNWNHSVFDVPLHYNLYNASKSGGNYDMRNIFNGTVVQRHPSHAVTFVDNHDSQPEEALESFVEEWFKPLAYALTLTREQGYPSVFYGDYYGIPTHGVPAMRSKIDPILIARQKYAYGPQHDYLDHPDVIGWTREGDSSHPKSGLATLITDGPGGSKRMYAGLKNAGETWYDITGNRSDTVKIGSDGWGEFHVNDGSVSIYVQK

SEQ ID NO: 39536 - protein, 478 aa, Bacillus sp.
NGTMMQYFEWYLPNDGNHWNRLNSDASNLKSKGITAVWIPPAWKGASQNDVGYGAYDLYDLGEFNQKGTVRTKYGTRSQLQAAVTSLKNNGIQVYGDVVMNHKGGADATEMVRAVEVNPNNRNQEVTGEYTIEAWTRFDFPGRGNTHSSFKWRWYHFDGVDWDQSRRLNNRIYKFRGKAWDWEVDTEFGNYDYLMYADYDMDHPEVVNELRNWGVWYTNTLGLDGFRIDAVKHIKYSFTRDWINHVRSATGKNMFAVAEFWHNDLGRIENYLQKTNWNHSVFDVPLHYNLYNASKSGGNYDMRNIFNGTVVQRHPSHAVTFVDNHDSQPEEALESFVEEWFKPLAYALTLTREQGYPSVFYGDYYGIPTHGVPAMRSKIDPILEARQKYAYGPQHDYLDHPDVIGWTREGDSSHPKSGLATLITDGPGGSKRMYAGLKNAGETWYDITGNRSDTVKIGSDGWGEFHVNDGSVSIYVQK

SEQ ID NO: 39537 - protein, 478 aa, Bacillus sp.
NGTMMQYFEWYLPNDGNHWNRLNSDASNLKSKGITAVWIPPAWKGTSQNDVGYGAYDLYDLGEFNQKGTVRTKYGTRSQLQAAVTSLKNNGIQVYGDVVMNHKGGADATEMVRAVEVNPNNRNQEVTGEYTIEAWTRFDFPGRGNTHSSFKWRWYHFDGVDWDQSRELTNRIYKFRGKAWDWEVDTEFGNYDYLMYADYDMDHPEVVNELRNWGVWYTNTLGLDGFRIDAVKHIKYSFTRDWINHVRSATGKNMFAVAEFWKNDLGAIENYLQKTNWNHSVFDVPLHYNLYNASKSGGNYDMRNIFNGTVVQRHPSHAVTFVDNHDSQPEEALESFVEEWFKPLAYALTLTREQGYPSVFYGDYYGIPTHGVPAMRSKIDPILEARQKYAYGPQHDYLDHPDVIGWTREGDSSHPKSGLATLITDGPGGSKRMYAGLKNAGETWYDITGNRSDTVKIGSDGWGEFHVNDGSVSIYVQK

SEQ ID NO: 39538 - protein, 478 aa, Bacillus sp.
NGTMMQYFEWYLPNDGNHWNRLNSDASNLKSKGITAVWIPPAWKGTSQNDVGYGAYDLYDLGEFNQKGTVRTKYGTRSQLQAAVTSLKNNGIQVYGDVVMNHKGGADATEMVRAVEVNPNNRNQEVTGEYTIEAWTRFDFPGRGNTHSSFKWRWYHFDGVDWDQSRRFNNRIYKFRGKAWDWEVDTEFGNYDYLMYADYDMDHPEVVNELRNWGVWYTNTLGLDGFRIDAVKHIKYSFTRDWINHVRSATGKNMFAVAEFWKNDLGAIENYLQKTNWNHSVFDVPLHYNLYNASKSGGNYDMRNIFNGTVVQRHPSHAVTFVDNHDSQPEEALESFVEEWFKPLAYALTLTREQGYPSVFYGDYYGIPTHGVPAMRSKIDPILEARQKYAYGPQHDYLDHPDVIGWTREGDSSHPKSGLATLITDGPGGSKRMYAGLKNAGETWYDITGNRSDTVKIGSDGWGEFHVNDGSVSIYVQK

SEQ ID NO: 39539 - protein, 478 aa, Bacillus sp.
NGTMMQYFEWYLPNDGNHWNRLNSDASNLKSKGITAVWIPPAWKAASQNDVGYGAYDLYDLGEFNQKGTVRTKYGTRSQLQAAVTSLKNNGIQVYGDVVMNHKGGADATEMVRAVEVNPNNRNQEVTGEYTIEAWTRFDFPGRGNTHSSFKWRWYHFDGVDWDQSRKLQNRIYKFRGKAWDWEVDTEFGNYDYLMYADYDMDHPEVVNELRNWGVWYTNTLGLDGFRIDAVKHIKYSFTRDWINHVRSATGKNMFAVAEFWKNDLGAIENYLQKTNWNHSVFDVPLHYNLYNASKSGGNYDMRNIFNGTVVQRHPSHAVTFVDNHDSQPEEALESFVEEWFKPLAYALTLTREQGYPSVFYGDYYGIPTHGVPAMRSKIDPILEARQKYAYGPQHDYLDHPDVIGWTREGDSSHPKSGLATLITDGPGGSKRMYAGLKNAGETWYDITGNRSDTVKIGSDGWGEFHVNDGSVSIYVQK

SEQ ID NO: 39540 - protein, 478 aa, Bacillus sp.
NGTMMQYFEWYLPNDGNHWNRLNSDASNLKSKGITAVWIPPAWKATSQNDVGYGAYDLYDLGEFNQKGTVRTKYGTRSQLQAAVTSLKNNGIQVYGDVVMNHKGGADATEMVRAVEVNPNNRNQEVTGEYTIEAWTRFDFPGRGNTHSSFKWRWYHFDGVDWDQSRQINNRIYKFRGKAWDWEVDTEFGNYDYLMYADYDMDHPEVVNELRNWGVWYTNTLGLDGFRIDAVKHIKYSFTRDWINHVRSATGKNMFAVAEFWKNDLGAIENYLQKTNWNHSVFDVPLHYNLYNASKSGGNYDMRNIFNGTVVQRHPSHAVTFVDNHDSQPEEALESFVEEWFKPLAYALTLTREQGYPSVFYGDYYGIPTHGVPAMRSKIDPILEARQKYAYGPQHDYLDHPDVIGWTREGDSSHPKSGLATLITDGPGGSKRMYAGLKNAGETWYDITGNRSDTVKIGSDGWGEFHVNDGSVSIYVQK

SEQ ID NO: 39541 - protein, 478 aa, Bacillus sp.
NGTMMQYFEWYLPNDGNHWNRLNSDASNLKSKGITAVWIPPALKGTSQNDVGYGAYDLYDLGEFNQKGTVRTKYGTRSQLQAAVTSLKNNGIQVYGDVVMNHKGGADATEMVRAVEVNPNNRNQEVTGEYTIEAWTRFDFPGRGNTHSSFKWRWYHFDGVDWDQSRQLSNRIYKFRGKAWDWEVDTEFGNYDYLMYTDYDMDHPEVVNELRNWGVWYTNTLGLDGFRIDAVKHIKYSFTRDWINHVRSATGKNMFAVAEFWKNDLGAIENYLQKTNWNHSVFDVPLHYNLYNASKSGGNYDMRNIFNGTVVQRHPSHAVTFVDNHDSQPEEALESFVEEWFKPLAYALTLTREQGYPSVFYGDYYGIPTHGVPAMRSKIDPILEARQKYAYGPQHDYLDHPDVIGWTREGDSSHPKSGLATLITDGPGGSKRMYAGLKNAGETWYDITGNRSDTVKIGSDGWGEFHVNDGSVSIYVQK

SEQ ID NO: 39542 - protein, 478 aa, Bacillus sp.
NGTMMQYFEWYLPNDGNHWNRLNSDASNLKSKGITAVWIPPAWKGASQNDVGYGAYDLYDLGEFNQKGTVRTKYGTRSQLQAAVTSLKNNGIQVYGDVVMNHKGGADATEMVRAVEVNPNNRNQEVTGEYTIEAWTRFDFPGRGNTHSSFKWRWYHFDGVDWDQSRRLNNRIYKFRGKAWDWEVDTEFGNYDYLMYADYDMDHPEVVNELRNWGVWYTNTLGLDGFRIDAVKHIKISFTRDWINHVRSATGKNMFAVAEFWKNDLGAIENYLQKTNWNHSVFDVPLHYNLYNASKSGGNYDMRNIFNGTVVQRHPSHAVTFVDNHDSQPEEALESFVEEWFKPLAYALTLTREQGYPSVFYGDYYGIPTHGVPAMRSKIDPILEARQKYAYGPQHDYLDHPDVIGWTREGDSSHPKSGLATLITDGPGGSKRMYAGLKNAGETWYDITGNRSDTVKIGSDGWGEFHVNDGSVSIYVQK

SEQ ID NO: 39543 - protein, 478 aa, Synthetic construct
NGTMMQYFEWYLPNDGNHWNRLNSDASNLKSKGITAVWIPPAWKGASQNDVGYGAYDLYDLGEFNQKGTVRTKYGTRSQLQAAVTSLKNNGIQVYGDVVMNHKGGADATEMVRAVEVNPNNRNQEVTGEYTIEAWTRFDFPGRGNTHSSFKWRWYHFDGVDWDQSRRLNNRIYKFRGKAWDWEVDTENGNYDYLMYADIDMDHPEVINELRNWGVWYTNTLGLDGFRIDAVKHIKYSFTRDWINHVRSATGKNMFAVAEFWKNDLGAIENYLQKTNWNHSVFDVPLHYNLYNASKSGGNYDMRNIFNGTVVQRHPSHAVTFVDNHDSQPEEALESFVEEWFKPLAYALTLTREQGYPSVFYGDYYGIPTHGVPAMRSKIDPILEARQKYAYGPQHDYLDHPDVIGWTREGDSSHPKSGLATLITDGPGGSKRMYAGLKNAGETWYDITGNRSDTVKIGSDGWGEFHVNDGSVSIYVQK

SEQ ID NO: 39544 - protein, 478 aa, Bacillus sp.
NGTMMQYFEWYLPNDGNHWNRLNSDASNLKSKGITAVWIPPAWKGASQNDVGYGAYDLYDLGEFNQKGTVRTKYGTRSQLQAAVTSLKNNGIQVYGDVVMNHKGGADATEMVRAVEVNPNNRNQEVTGEYTIEAWTRFDFPGRGNTHSSFKWRWYHFDGVDWDQSRRLNNRIYKFRGKAWDWEVDTENGNYDYLMYADIDFDYPEVVNELRMWGVWYTNTLGLDGFRIDAVKHIKYSFTRDWINHVRSATGKNMFAVAEFWKNDLGAIENYLQKTNWNHSVFDVPLHYNLYNASKSGGNYDMRNIFNGTVVQRHPSHAVTFVDNHDSQPEEALESFVEEWFKPLAYALTLTREQGYPSVFYGDYYGIPTHGVPAMRSKIDPILEARQKYAYGPQHDYLDHPDVIGWTREGDSSHPKSGLATLITDGPGGSKRMYAGLKNAGETWYDITGNRSDTVKIGSDGWGEFHVNDGSVSIYVQK

SEQ ID NO: 39545 - protein, 478 aa, Bacillus sp.
NGTMMQYFEWYLPNDGNHWNRLNSDASNLKSKGITAVWIPPAWKGASQNDVGYGAYDLYDLGEFNQKGTVRTKYGTRSQLQAAVTSLKNNGIQVYGDVVMNHKGGADATEMVRAVEVNPNNRNQEVTGEYTIEAWTRFDFPGRGNTHSSFKWRWYHFDGVDWDQSRRLNNRIYKFRGKAWDWEVDTENGFYDYLMYADIDMDHPEVVPELRNWGVWYTNTLGLDGFRIDAVKHIKYSFTRDWINHVRSATGKNMFAVAEFWKNDLGAIENYLQKTNWNHSVFDVPLHYNLYNASKSGGNYDMRNIFNGTVVQRHPSHAVTFVDNHDSQPEEALESFVEEWFKPLAYALTLTREQGYPSVFYGDYYGIPTHGVPAMRSKIDPILEARQKYAYGPQHDYLDHPDVIGWTREGDSSHPKSGLATLITDGPGGSKRMYAGLKNAGETWYDITGNRSDTVKIGSDGWGEFHVNDGSVSIYVQK

SEQ ID NO: 39546 - protein, 478 aa, Bacillus sp.
NGTMMQYFEWYLPNDGNHWNRLNSDASNLKSKGITAVWIPPAWKGASQNDVGYGAYDLYDLGEFNQKGTVRTKYGTRSQLQAAVTSLKNNGIQVYGDVVMNHKGGADATEMVRAVEVNPNNRNQEVTGEYTIEAWTRFDFPGRGNTHSSFKWRWYHFDGVDWDQSRRLNNRIYKFRGKAWDWEVDTEFGNYDYLMYADYDMDHPEVVNELRNWGVWYTNTLGLDGFRIDAVKHIKYSFTRDWINHVRSATGKNMFAVAEFWHNDLGSIENYLQKTNWNHSVFDVPLHYNLYNASKSGGNYDMRNIFNGTVVQRHPSHAVTFVDNHDSQPEEALESFVEEWFKPLAYALTLTREQGYPSVFYGDYYGIPTHGVPAMRSKIDPILEARQKYAYGPQHDYLDHPDVIGWTREGDSSHPKSGLATLITDGPGGSKRMYAGLKNAGETWYDITGNRSDTVKIGSDGWGEFHVNDGSVSIYVQK

SEQ ID NO: 39547 - protein, 478 aa, Bacillus sp.
NGTMMQYFEWYLPNDGNHWNRLNSDASNLKSKGITAVWIPPAWKGASQNDVGYGAYDLYDLGEFNQKGTVRTKYGTRSQLQAAVTSLKNNGIQVYGDVVMNHKGGADATEMVRAVEVNPNNRNQEVTGEYTIEAWTRFDFPGRGNTHSSFKWRWYHFDGVDWDQSRQLTNRIYKFRGKAWDWEVDTEFGNYDYLMYADYDMDHPEVVNELRNWGVWYTNTLGLDGFRIDAVKHIKYSFTRDWINHVRSATGKNMFAVAEFWKNDLGAIENYLQKTNWNHSVFDVPLHYNLYNASKSGGNYDMRNIFNGTVVQRHPSHAVTFVDNHDSQPEEALESFVEEWFKPLAYALTLTREQGYPSVFYGDYYGIPTHGVPAMRSKIDPILEARQKYAYGPQHDYLDHPDVIGWTREGDSSHPKSGLATLITDGPGGSKRMYAGLKNAGETWYDITGNRSDTVKIGSDGWGEFHVNDGSVSIYVQK

SEQ ID NO: 39548 - protein, 478 aa, Synthetic construct
NGTMMQYFEWYLPNDGNHWNRLNSDASNLKSKGITAVWIPPAWKGASQNDVGYGAYDLYDLGEFNQKGTVRTKYGTRSQLQAAVTSLKNNGIQVYGDVVMNHKGGADATEMVRAVEVNPNNRNQEVTGEYTIEAWTRFDFPGRGNTHSSFKWRWYHFDGVDWDQSRRLNNRIYKFRGKAWDWEVDTENGNYDYLMYADIDMDHGEVVNELRNWGVWYTNTLGLDGFRIDAVKHIKYSFTRDWINHVRSATGKNMFAVAEFWKNDLGAIENYLQKTNWNHSVFDVPLHYNLYNASKSGGNYDMRNIFNGTVVQRHPSHAVTFVDNHDSQPEEALESFVEEWFKPLAYALTLTREQGYPSVFYGDYYGIPTHGVPAMRSKIDPILEARQKYAYGPQHDYLDHPDVIGWTREGDSSHPKSGLATLITDGPGGSKRMYAGLKNAGETWYDITGNRSDTVKIGSDGWGEFHVNDGSVSIYVQK

SEQ ID NO: 39549 - protein, 478 aa, Bacillus sp.
NGTMMQYFEWYLPNDGNHWNRLNSDASNLKSKGITAVWIPPAWKGASQNDVGYGAYDLYDLGEFNQKGTVRTKYGTRSQLQAAVTSLKNNGIQVYGDVVMNHKGGADATEMVRAVEVNPNNRNQEVTGEYTIEAWTRFDFPGRGNTHSSFKWRWYHFDGLDWDQSRRLNNRIYKFRGKAWDWEVDTEFGNYDYLMYADYDMDHPEVVNELRNWGVWYTNTLGLDGFRIDAVKHIKYSFTRDWINHVRSATGKNMFAVAEFWKNDLGAIENYLQKTNWNHSVFDVPLHYNLYNASKSGGNYDMRNIFNGTVVQRHPSHAVTFVDNHDSQPEEALESFVEEWFKPLAYALTLTREQGYPSVFYGDYYGIPTHGVPAMRSKIDPILEARQKYAYGPQHDYLDHPDVIGWTREGDSSHPKSGLATLITDGPGGSKRMYAGLKNAGETWYDITGNRSDTVKIGSDGWGEFHVNDGSVSIYVQK

SEQ ID NO: 39550 - protein, 478 aa, Bacillus sp.
NGTMMQYFEWYLPNDGNHWNRLNSDASNLKSKGITAVWIPPAWKGASQNDVGYGAYDLYDLGEFNQKGTVRTKYGTRSQLQAAVTSLKNNGIQVYGDVVMNHKGGADATEMVRAVEVNPNNRNQEVTGEYTIEAWTRFDFPGRGNTHSSFKWRWYHFDGVDWDQSRRLNNRIYKFRGKAWDWEVDTEFGNYDYLMYADYDMDHPEVVNELRNWGVWYTNTLGLDGFRIDAVKHIKYSFTRDWINHVRSATGKNMFAVAEFWLNDLGSIENYLQKTNWNHSVFDVPLHYNLYNASKSGGNYDMRNIFNGTVVQRHPSHAVTFVDNHDSQPEEALESFVEEWFKPLAYALTLTREQGYPSVFYGDYYGIPTHGVPAMRSKIDPILEARQKYAYGPQHDYLDHPDVIGWTREGDSSHPKSGLATLITDGPGGSKRMYAGLKNAGETWYDITGNRSDTVKIGSDGWGEFHVNDGSVSIYVQK

SEQ ID NO: 39551 - protein, 478 aa, Bacillus sp.
NGTMMQYFEWYLPNDGNHWNRLNSDASNLKSKGITAVWIPPAWKGASQNDTGYGAYDLYDLGEFNQKGTVRTKYGTRSQLQAAVTSLKNNGIQVYGDVVMNHKGGADATEMVRAVEVNPNNRNQEVTGEYTIEAWTRFDFPGRGNTHSSFKWRWYHFDGVDWDQSRRLNNRIYKFRGKAWDWEVDTEFGNYDYLMYADYDMDHPEVVNELRNWGVWYTNTLGLDGFRIDAVKHIKYSFTRDWINHVRSATGKNMFAVAEFWKNDLGAIENYLQKTNWNHSVFDVPLHYNLYNASKSGGNYDMRNIFNGTVVQRHPSHAVTFVDNHDSQPEEALESFVEEWFKPLAYALTLTREQGYPSVFYGDYYGIPTHGVPAMRSKIDPILEARQKYAYGPQHDYLDHPDVIGWTREGDSSHPKSGLATLITDGPGGSKRMYAGLKNAGETWYDITGNRSDTVKIGSDGWGEFHVNDGSVSIYVQK

SEQ ID NO: 39552 - protein, 478 aa, Bacillus sp.
NGTMMQYFEWYLPNDGNHWNRLNSDASNLKSKGITAVWIPPAWKGASQNDVGYGAYDLYDLGEFNQKGTVRTKYGTRSQLQAAVTSLKNNGIQVYGDVVMNHKGGADATEMVRAVEVNPNNRNQEVTGEYTIEAWTRFDFPGRGNTHSSFKWRWYHFDGVDWDQSRRLNNRIYKFRGKAWDWEVDTEFGNYDYLMYADYDMDHPEVVNELRNWGVWYTNTLGLDGFRIDAVKHIKYSFTRDWINHVRSATGKNMFAVAEFWKNDLGAIENYLQKTNWNHSVFDVPLHYNLYNASKSGGNYDMRNIFNGTVVQRHPSHAVTFVDNHDSQPEEALESFVEEWFKPLAYALTLTREQGYPSVFYGDYYGIPTHGVPAMRSKIDPILMARQKYAYGPQHDYLDHPDVIGWTREGDSSHPKSGLATLITDGPGGSKRMYAGLKNAGETWYDITGNRSDTVKIGSDGWGEFHVNDGSVSIYVQK

SEQ ID NO: 39553 - protein, 478 aa, Bacillus sp.
NGTMMQYFEWYLPNDGNHWNRLNSDASNLKSKGITAVWIPPAWKGASQNDVGYGAYDLYDLGEFNQKGTVRTKYGTRSQLQAAVTSLKNNGIQVYGDVVMNHKGGADATEMVRAVEVNPNNRNQEVTGEYTIEAWTRFDFPGRGNTHSSFKWRWYHFDGVDWDQSRQLNNRIYKFRGKAWDWEVDTEFGNYDYLMYADYDMDHPEVVNELRNWGVWYTNTLGLDGFRIDAVKHIKYSFTRDWINHVRSATGKNMFAVAEFWKNDLGAIENYLQKTNWNHSVFDVPLHYNLYNASKSGGNYDMRNIFNGTVVQRHPSHAVTFVDNHDSQPEEALESFVEEWFKPLAYALTLTREQGYPSVFYGDYYGIPTHGVPAMRSKIDPILEARQKYAYGPQHDYLDHPDVIGWTREGDSSHPKSGLATLITDGPGGSKRMYAGLKNAGETWYDITGNRSDTVKIGSDGWGEFHVNDGSVSIYVQK

SEQ ID NO: 39554 - protein, 478 aa, Bacillus sp.
NGTMMQYFEWYLPNDGNHWNRLNSDASNLKSKGITAVWIPPAWKGASQNDVGYGAYDLYDLGEFNQKGTVRTKYGTRSQLQAAVTSLKNNGIQVYGDVVMNHKGGADATEMVRAVEVNPNNRNQEVTGEYTIEAWTRFDFPGRGNTHSSFKWRWYHFDGVDWDQSRELNNRIYKFRGKAWDWEVDTEFGNYDYLMYADYDMDHPEVVNELRNWGVWYTNTLGLDGFRIDAVKHIKYSFTRDWINHVRSATGKNMFAVAEFWKNDLGAIENYLQKTNWNHSVFDVPLHYNLYNASKSGGNYDMRNIFNGTVVQRHPSHAVTFVDNHDSQPEEALESFVEEWFKPLAYALTLTREQGYPSVFYGDYYGIPTHGVPAMRSKIDPILEARQKYAYGPQHDYLDHPDVIGWTREGDSSHPKSGLATLITDGPGGSKRMYAGLKNAGETWYDITGNRSDTVKIGSDGWGEFHVNDGSVSIYVQK

SEQ ID NO: 39555 - protein, 478 aa, Synthetic construct
NGTMMQYFEWYLPNDGNHWNRLNSDASNLKSKGITAVWIPPAWKGASQNDVGYGAYDLYDLGEFNQKGTVRTKYGTRSQLQAAVTSLKNNGIQVYGDVVMNHKGGADATEMVRAVEVNPNNRNQEVTGEYTIEAWTRFDFPGRGNTHSSFKWRWYHFDGVDWDQSRRLNNRIYKFRGKAWDWEVDTENGNYDYLMYADIDMDHPECVNELRNWGVWYTNTLGLDGFRIDAVKHIKYSFTRDWINHVRSATGKNMFAVAEFWKNDLGAIENYLQKTNWNHSVFDVPLHYNLYNASKSGGNYDMRNIFNGTVVQRHPSHAVTFVDNHDSQPEEALESFVEEWFKPLAYALTLTREQGYPSVFYGDYYGIPTHGVPAMRSKIDPILEARQKYAYGPQHDYLDHPDVIGWTREGDSSHPKSGLATLITDGPGGSKRMYAGLKNAGETWYDITGNRSDTVKIGSDGWGEFHVNDGSVSIYVQK

SEQ ID NO: 39556 - protein, 478 aa, Bacillus sp.
NGTMMQYFEWYLPNDGNHWNRLNSDASNLKSKGITAVWIPPAWKGTSQNDVGYGAYDLYDLGEFNQKGTVRTKYGTRSQLQAAVTSLKNNGIQVYGDVVMNHKGGADATEMVRAVEVNPNNRNQEVTGEYTIEAWTRFDFPGRGNTHSSFKWRWYHFDGVDWDQSRDLDNRIYKFRGKAWDWEVDTEFGNYDYLMYADYDMDHPEVVNELRNWGVWYTNTLGLDGFRIDAVKHIKYSFTRDWINHVRSATGKNMFAVAEFWKNDLGAIENYLQKTNWNHSVFDVPLHYNLYNASKSGGNYDMRNIFNGTVVQRHPSHAVTFVDNHDSQPEEALESFVEEWFKPLAYALTLTREQGYPSVFYGDYYGIPTHGVPAMRSKIDPILEARQKYAYGPQHDYLDHPDVIGWTREGDSSHPKSGLATLITDGPGGSKRMYAGLKNAGETWYDITGNRSDTVKIGSDGWGEFHVNDGSVSIYVQK

SEQ ID NO: 39557 - protein, 478 aa, Bacillus sp.
NGTMMQYFEWYLPNDGNHWNRLNSDASNLKSKGITAVWIPPAWKGASQNDVGYGAYDLYDLGEFNQKGTVRTKYGTRSQLQAAVTSLKNNGIQVYGDVVMNHKGGADATEMVRAVEVNPNNRNQEVTGEYTIEAWTRFDFPGRGNTHSSFKWRWYHFDGVDWDQSRRLNNRIYKFRGKAWDWEVDTEFGNYDYLMYADYDGDHPEVVNELRNWGVWYTNTLGLDGFRIDAVKHIKYSFTRDWINHVRSATGKNMFAVAEFWKNDLGAIENYLQKTNWNHSVFDVPLHYNLYNASKSGGNYDMRNIFNGTVVQRHPSHAVTFVDNHDSQPEEALESFVEEWFKPLAYALTLTREQGYPSVFYGDYYGIPTHGVPAMRSKIDPILEARQKYAYGPQHDYLDHPDVIGWTREGDSSHPKSGLATLITDGPGGSKRMYAGLKNAGETWYDITGNRSDTVKIGSDGWGEFHVNDGSVSIYVQK

SEQ ID NO: 39558 - protein, 478 aa, Bacillus sp.
NGTMMQYFEWYLPNDGNHWNRLNSDASNLKSKGITAVWIPPAWKGASQNDVGYGAYDLYDLGEFNQKGTVRTKYGTRSQLQAAVTSLKNNGIQVYGDVVMNHKGGADATEMVRAVEVNPNNRNQEVTGEYTIEAWTRFDFPGRGNTHSSFKWRWYHFDGVDWDQSRRLNNRIYKFRGKAWDWEVDTEFGNYDYLMYADYDMDHPEVVNELRNWGVWYTNTLGLDGFRIDAVKHIKYSFTRDWINHVRSATGKNMFAVAEFWSYDLGKIENYLQKTNWNHSVFDVPLHNNLYTASKSGGNYDMRNIFNGTVVQRHPSHAVTFVDNHDSQPEEALESFVEEWFKPLAYALTLTREQGYPSVFYGDYYGIPTHGVPAMRSKIDPILEARQKYAYGPQHDYLDHPDVIGWTREGDSSHPKSGLATLITDGPGGSKRMYAGLKNAGETWYDITGNRSDTVKIGSDGWGEFHVNDGSVSIYVQK

SEQ ID NO: 39559 - protein, 478 aa, Bacillus sp.
NGTMMQYFEWYLPNDGNHWNRLNSDASNLKSKGITAVWIPPAWKGISQNDVGYGAYDLYDLGEFNQKGTVRTKYGTRSQLQAAVTSLKNNGIQVYGDVVMNHKGGADATEMVRAVEVNPNNRNQEVTGEYTIEAWTRFDFPGRGNTHSSFKWRWYHFDGVDWDQSRDLTNRIYKFRGKAWDWEVDTEFGNYDYLMYADYDMDHPEVVNELRNWGVWYTNTLGLDGFRIDAVKHIKYSFTRDWINHVRSATGKNMFAVAEFWKNDLGAIENYLQKTNWNHSVFDVPLHYNLYNASKSGGNYDMRNIFNGTVVQRHPSHAVTFVDNHDSQPEEALESFVEEWFKPLAYALTLTREQGYPSVFYGDYYGIPTHGVPAMRSKIDPILEARQKYAYGPQHDYLDHPDVIGWTREGDSSHPKSGLATLITDGPGGSKRMYAGLKNAGETWYDITGNRSDTVKIGSDGWGEFHVNDGSVSIYVQK

SEQ ID NO: 39560 - protein, 478 aa, Bacillus sp.
NGTMMQYFEWYLPNDGNHWNRLNSDASNLKSKGITAVWIPPAWKGASQNDVGYGAYDLYDLGEFNQKGTVRTKYGTRSQLQAAVTSLKNNGIQVYGDVVMNHKGGADATEMVRAVEVNPNNRNQEVTGEYTIEAWTRFDFPGRGNTHSSFKWRWYHFDGVDWDQSRRVDNRIYKFRGKAWDWEVDTEFGNYDYLMYADYDMDHPEVVNELRNWGVWYTNTLGLDGFRIDAVKHIKYSFTRDWINHVRSATGKNMFAVAEFWKNDLGAIENYLQKTNWNHSVFDVPLHYNLYNASKSGGNYDMRNIFNGTVVQRHPSHAVTFVDNHDSQPEEALESFVEEWFKPLAYALTLTREQGYPSVFYGDYYGIPTHGVPAMRSKIDPILEARQKYAYGPQHDYLDHPDVIGWTREGDSSHPKSGLATLITDGPGGSKRMYAGLKNAGETWYDITGNRSDTVKIGSDGWGEFHVNDGSVSIYVQK

SEQ ID NO: 39561 - protein, 478 aa, Synthetic construct
NGTMMQYFEWYLPNDGNHWNRLNSDASNLKSKGITAVWIPPAWKGASQNDVGYGAYDLYDLGEFNQKGTVRTKYGTRSQLQAAVTSLKNNGIQVYGDVVMNHKGGADATEMVRAVEVNPNNRNQEVTGEYTIEAWTRFDFPGRGNTHSSFKWRWYHFDGVDWDQSRRLNNRIYKFRGKAWDWEVDTENGNYDYLMYADIDMDFPEVVNELRNWGVWYTNTLGLDGFRIDAVKHIKYSFTRDWINHVRSATGKNMFAVAEFWKNDLGAIENYLQKTNWNHSVFDVPLHYNLYNASKSGGNYDMRNIFNGTVVQRHPSHAVTFVDNHDSQPEEALESFVEEWFKPLAYALTLTREQGYPSVFYGDYYGIPTHGVPAMRSKIDPILEARQKYAYGPQHDYLDHPDVIGWTREGDSSHPKSGLATLITDGPGGSKRMYAGLKNAGETWYDITGNRSDTVKIGSDGWGEFHVNDGSVSIYVQK

SEQ ID NO: 39562 - protein, 478 aa, Bacillus sp.
NGTMMQYFEWYLPNDGNHWNRLNSDASNLKSKGITAVWIPPAWKGASQNDVGYGAYDLYDLGEFNQKGTVRTKYGTRSQLQAAVTSLKNNGIQVYGDVVMNHKGGADATEMVRAVEVNPNNRNQEVTGEYTIEAWTRFDFPGRGNTHSSFKWRWYHFDGVDWDQSRRTNNRIYKFRGKAWDWEVDTEFGNYDYLMYADYDMDHPEVVNELRNWGVWYTNTLGLDGFRIDAVKHIKYSFTRDWINHVRSATGKNMFAVAEFWKNDLGAIENYLQKTNWNHSVFDVPLHYNLYNASKSGGNYDMRNIFNGTVVQRHPSHAVTFVDNHDSQPEEALESFVEEWFKPLAYALTLTREQGYPSVFYGDYYGIPTHGVPAMRSKIDPILEARQKYAYGPQHDYLDHPDVIGWTREGDSSHPKSGLATLITDGPGGSKRMYAGLKNAGETWYDITGNRSDTVKIGSDGWGEFHVNDGSVSIYVQK

SEQ ID NO: 39563 - protein, 478 aa, Bacillus sp.
NGTMMQYFEWYLPNDGNHWNRLNSDASNLKSKGITAVWIPPAWKGASQNDVGYGAYDLYDLGEFNQKGTVRTKYGTRSQLQAAVTSLKNNGIQVYGDVVMNHKGGADATEMVRAVEVNPNNRNQEVTGEYTIEAWTRFDFPGRGNTHSSFKWRWYHFDGVDWDQSRRLNNRIYKFRGKAWDWEVDTEFGNYDYLMYADYDMDHPEVVNELRNWGVWYTNTLGLDGFRIDAVKHIKYSFTRDWINHVRSATGKNMFAVAEFWKNDLGAIENYLQKTNWNHSVFDVPLHYNLYNASKSGGNYDMRNIFNGTVVQRHPSHAVTFVDNHDSQPEEALESFVETWFKPLAYALTLTREQGYPSVFYGDYYGIPTHGVPAMRSKIDPILEARQKYAYGPQHDYLDHPDVIGWTREGDSSHPKSGLATLITDGPGGSKRMYAGLKNAGETWYDITGNRSDTVKIGSDGWGEFHVNQGSVSIYVQK

SEQ ID NO: 39564 - protein, 478 aa, Synthetic construct
NGTMMQYFEWYLPNDGNHWNRLNSDASNLKSKGITAVWIPPAWKGASQNDVGYGAYDLYDLGEFNQKGTVRTKYGTRSQLQAAVTSLKNNGIQVYGDVVMNHKGGADATEMVRAVEVNPNNRNQEVTGEYTIEAWTRFDFPGRGNTHSSFKWRWYHFDGVDWDQSRRLNNRIYKFRGKAWDWEVDTENGNYDYLMYADIDMDQPEVVNELRNWGVWYTNTLGLDGFRIDAVKHIKYSFTRDWINHVRSATGKNMFAVAEFWKNDLGAIENYLQKTNWNHSVFDVPLHYNLYNASKSGGNYDMRNIFNGTVVQRHPSHAVTFVDNHDSQPEEALESFVEEWFKPLAYALTLTREQGYPSVFYGDYYGIPTHGVPAMRSKIDPILEARQKYAYGPQHDYLDHPDVIGWTREGDSSHPKSGLATLITDGPGGSKRMYAGLKNAGETWYDITGNRSDTVKIGSDGWGEFHVNDGSVSIYVQK

SEQ ID NO: 39565 - protein, 478 aa, Bacillus sp.
NGTMMQYFEWYLPNDGNHWNRLNSDASNLKSKGITAVWIPPAWKGASQNDVGYGAYDLYDLGEFNQKGTVRTKYGTRSQLQAAVTSLKNNGIQVYGDVVMNHKGGADATEMVRAVEVNPNNRNQEVTGEYTIEAWTRFDFPGRGNTHSSFKWRWYHFDGVDWDQSRRLNNRIYKFRGKAWDWEVDTENGNYDYLMYADIDFDYPEVVNELRQWGVWYTNTLGLDGFRIDAVKHIKYSFTRDWINHVRSATGKNMFAVAEFWKNDLGAIENYLQKTNWNHSVFDVPLHYNLYNASKSGGNYDMRNIFNGTVVQRHPSHAVTFVDNHDSQPEEALESFVEEWFKPLAYALTLTREQGYPSVFYGDYYGIPTHGVPAMRSKIDPILEARQKYAYGPQHDYLDHPDVIGWTREGDSSHPKSGLATLITDGPGGSKRMYAGLKNAGETWYDITGNRSDTVKIGSDGWGEFHVNDGSVSIYVQK

SEQ ID NO: 39566 - protein, 487 aa, Rasamsonia emersonii
GLLAAVVNAATPADWRSRSIYFLLTDRFGRTDNSITAPCDTYARKYCGGSWQGIINHLDYIQGMGFTAIWITPVTKQLSQGTGDGTGYHGYWQQDIYSLNPNFGTSQDLKNLASALHSRGMYLMVDVVANHLGYAGSGTNMDCSLFNPFNNKEYFHPYCAITNYSNQTNVEDCWLGDNIVAAADLNTSRTDVQNVWYSWVGSLVSNYSIDGLRIDTVKHVQKDFWPGYNKAAGVYCVGEVLHGDPTYTCPYQNYLDGVLNYPTYYQILSAFQSTSGSISNLYNMINQVKSSCKDSTLLGTFVENHDNPRFASHTSDYSLAKNAIAFVFLSDGIPIIYAGQEQHYSGGNDPGNREATWLSGYDTSAELYKFIASVNAMRSHAISKDGGYLTCKANYPIYQDTSTIAMRKGTDGSQVITVLSNLGASGSSYTLSLGGTGYSAGEQLTELFSCTHVTVDSSGNVPVPMASGLPRVLYPTRLLAGGKLCQS

SEQ ID NO: 39567 - protein, 482 aa, Synthetic construct
NGTMMQYFEWYVPNDGQQWNRLRTDAPYLSSVGITAVWTPPAYKGTSQADVGYGPYDLYDLGEFNQKGTVRTKYGTKGELKSAVNTLHSNGIQVYGDVVMNHKAGADATEWVDAVEVNPSNRNQEVSGTYKIQAWTKFDFPGRGNTYSSFKWRWYHFDGTDWDQSRQLNRIYKFRGTGKAWDWEVDTENGNYDYLMFADLDYDHPDVVNEMKKWGVWYANEVGLDGYRLDAVKHIKFSFLKDWVDNARAATGKEMFTVGEYWQNDLGALNNYLAKVNYNQSLFDAPLHYNFYAASTGGGYYDMRNILNNTLVASNPTKAVTLVENHDTQPGQSLESTVQPWFKPLAYAFILTRSGGYPSVFYGDMYGTKGTTTREIPALKSKIEPLLKARKDYAYGTQRDYIDNPDVIGWTREGDSTKAKSGLATVITDGPGGSKRMYVGTSNAGEIWYDLTGNRTDKITIGSDGYATFPVNGGSVSVWVQQ

SEQ ID NO: 39568 - protein, 483 aa, Synthetic construct
NGTMMQYFEWYVPNDGQQWNRLRTDAPYLSSVGITAVWTPPAYKGTSQADVGYGPYDLYDLGEFNQKGTVRTKYGTKGELKSAVNTLHSNGIQVYGDVVMNHKGGADATEMVRAVEVNPNNRNQEVSGEYTIEAWTKFDFPGRGNTHSNFKWRWYHFDGVDWDQSRKLNNRIYKFRGDGKGWDWEVDTENGNYDYLMYADIDYDHPDVVNEMKKWGVWYANEVGLDGYRLDAVKHIKFSFLKDWVDNARAATGKEMFTVGEYWQNDLGALNNYLAKVNYNQSLFDAPLHYNFYAASTGGGYYDMRNILNNTLVASNPTKAVTLVENHDTQPGQSLESTVQPWFKPLAYAFILTRSGGYPSVFYGDMYGTKGTTTREIPALKSKIEPLLKARKDYAYGTQRDYIDNPDVIGWTREGDSTKAKSGLATVITDGPGGSKRMYVGTSNAGEIWYDLTGNRTDKITIGSDGYATFPVNGGSVSVWVQQ

SEQ ID NO: 39569 - protein, 488 aa, Synthetic construct
NGTMMQYFEWYVPNDGQQWNRLRTDAPYLSSVGITAVWTPPAYKGTSQADVGYGPYDLYDLGEFNQKGTVRTKYGTKGELKSAVNTLHSNGIQVYGDVVMNHKAGADGTEFVDAVEVDPSNRNQETSGTYQIQAWTKFDFPGRGNTYSSFKWRWYHFDGTDWDESRKLNRIYKFRSTGKAWDWEVDTENGNYDYLMFADLDMDHPYDYDHPDVVNEMKKWGVWYANEVGLDGYRLDAVKHIKFSFLKDWVDNARAATGKEMFTVGEYWQNDLGALNNYLAKVNYNQSLFDAPLHYNFYAASTGGGYYDMRNILNNTLVASNPTKAVTLVENHDTQPGQSLESTVQPWFKPLAYAFILTRSGGYPSVFYGDMYGTKGTTTREIPALKSKIEPLLKARKDYAYGTQRDYIDNPDVIGWTREGDSTKAKSGLATVITDGPGGSKRMYVGTSNAGEIWYDLTGNNSTKITIGSDGYATFPVNKGSVSVWVQQ

SEQ ID NO: 39570 - protein, 478 aa, Bacillus sp.
NETMMQYFEWDLPNDGTLWNRLHNNAQNLKNAGITALWLPPAYKGTSQSDVGYGVYDLYDLGEFNQKGTIRTKYGTKTQLERAIRSLKANGIQVYADVVFNHKAGADGTEFVDAVEVDPSNRNQEVSGTYQIEAWTKFDFPGRGNTYSSFKWRWYHFDGTDWDESRALQNRIYKFRGKAWDWEVDTENGNYDYLMFADLDMDHPEVVTELNRWGTWYVNTTNIDGFRLDAVKHIKFSFMRDWLTYVRNQTGKNLFAVGEFWKNDLGALENYITKTNGSMSLFDAPLHNNFYTASKSDGYFDMRNLLNGTLVQRHPSHAVTFVDNHDTQPGQSLQSWVEEWFKPLAYAFILTRQEGYPCVFYGDYYGIPKYNIPGLKSKIDPLLIARRDYAYGTQRDYIDHQDIIGWTREGIDTKPNSGLAALITDGPGGSKWMYVGKKHAGKVFYDLTGNRSDTVTINADGWGEFKVNGGSVSIWVAK

SEQ ID NO: 39571 - protein, 481 aa, Synthetic construct
LNGTMMQYFEWYLPNDGNHWNRLNSDASNLKSKGITAVWIPPAWKGASQNDVGYGAYDLYDLGEFNQKGTVRTKYGTRSQLQAAVTSLKNNGIQVYGDVVMNHKGGADATEMVRAVEVNPNNRNQEVTGEYTIEAWTRFDFPGRGNTHSSFKWRWYHFDGVDWDQSRRLNNRIYKFRGHGKAWDWEVDTENGNYDYLMYADIDMDHPEVVNELRNWGVWYTNTLGLDGFRIDAVKHIKYSFTRDWINHVRSATGKNMFAVAEFWKNDLGAIENYLQKTNWNHSVFDVPLHYNLYNASKSGGNYDMRNIFNGTVVQRHPSHAVTFVDNHDSQPEEALESFVEEWFKPLAYALTLTREQGYPSVFYGDYYGIPTHGVPAMRSKIDPILEARQKYAYGPQHDYLDHPDVIGWTREGDSSHPKSGLATLITDGPGGSKRMYAGLKNAGETWYDITGNRSDTVKIGSDGWGEFHVNDGSVSIYVQK

SEQ ID NO: 39572 - protein, 477 aa, Bacillus sp.
NGTMMQYFEWYLPNDGNHWNRLNSDASNLKSKGITAVWIPPAWKGSQNDVGYGAYDLYDLGEFNQKGTVRTKYGTRSQLQAAVTSLKNNGIQVYGDVVMNHKGGADATEMVRAVEVNPNNRNQEVTGEYTIEAWTRFDFPGRGNTHSSFKWRWYHFDGVDWDQSRRLNNRIYKFRGKAWDWEVDTEFGNYDYLMYTDYDMDHPEVVNELRNWGVWYTNTLGLDGFRIDAVKHIKYSFTRDWINHVRSATGKNMFAVAEFWKNDLGAIENYLQKTNWNHSVFDVPLHYNLYNASKSGGNYDMRNIFNGTVVQRHPSHAVTFVDNHDSQPEEALESFVEEWFKPLAYALTLTREQGYPSVFYGDYYGIPTHGVPAMRSKIDPILEARQKYAYGPQHDYLDHPDVIGWTREGDSSHPKSGLATLITDGPGGSKRMYAGLKNAGETWYDITGNRSDTVKIGSDGWGEFHVNDGSVSIYVQK

SEQ ID NO: 39573 - protein, 478 aa, Bacillus sp.
NGTIMQYFEWNVPNDGQHWNRLHNNAQNLKNAGITAIWIPPAWKGTSQSDTGYGAYDLYDLGEFNQKGTVRTKYGTKAELERAIRSLKANGIQVYGDVVMNHKAGADFTERVQAVEVNPQNRNQEVSGTYQIEAWTGFNFPGRGNQHSSFKWRWYHFDGTDWDQSRQLSNRIYKFRGKAWDWEVDTEFGNYDYLMYADLDMDHPEVINELNRWGVWYANTLNLDGFRLDAVKHIKFSFMRDWLGHVRGQTGKNLFAVAEYWKNDLGALENYLSKTNWTMSAFDVPLHYNLYQASNSSGNYDMRNLLNGTLVQRHPSHAVTFVDNHDTQPGEALESFVQGWFKPLAYATILTREQGYPQVFYGDYYGIPSDGVPSYRQQIDPLLAARQQYAYGPQHDYLDHPDVIGWTREGDSSHPKSGLATLITDGPGGSKRMYAGLKNAGETWYDITGNRSDTVKIGSDGWGEFHVNKQSVSIYVQK

SEQ ID NO: 39574 - protein, 478 aa, Bacillus sp.
NGTIMQYFEWNVPNDGQHWNRLHNNAQNLKNAGITAIWIPPAWKGTSQSDTGYGAYDLYDLGEFNQRGTVRTKYGTKAELERAIRSLKANGIQVYGDVVMNHKAGADQTEHVQAVEVNPQNRNQEVSGTYQIEAWTGFNFPGRGNQHSSFKWRWYHFDGTDFDQSRGVSNRIYKFRTKAWDWEVDTEFGNYDYLMYADLDMDHPEVINELNRWGVWYANTLNLDGFRLDAVKHIKFSFMRDWLGHVRGQTGKNLFAVAEYWKNDLGALENYLSKTNWTMSAFDVPLHYNLYQASNSSGNYDMRNLLNGTLVQRHPSHAVTFVDNHDTQPGEALESFVQGWFKPLAYATILTREQGYPQVFYGDYYGIPSDGVPSYRQQIDPLLKARQQYAYGPQHDYLDHPDVIGWTREGDSSHPKSGLATLITDGPGGSKRMYAGLKNAGETWYDITGNRSDTVKIGSDGWGEFHVNDGSVSIYVQK

SEQ ID NO: 39575 - protein, 478 aa, Bacillus sp.
NGTIMQYFEWNVPNDGQHWNRLHNNAQNLKNAGITAIWIPPAWKGTSQSDTGYGAYDLYDLGEFNQRGTVRTKYGTKAELERAIRSLKANGIQVYGDVVMNHKAGADFTEQVQALEVNPQNRNQEVSGTYQIEAWTGFNFPGRGNQHSSFKWRWYHFDGTDWDQSRQLSNRIYKFRTKAWDWEVDTEFGNYDYLMYADLDMDHPEVINELNRWGVWYANTLNLDGFRLDAVKHIKFSFMRDWLGHVRGQTGKNLFAVAEYWKNDLGALENYLSKTNWTMSAFDVPLHYNLYQASNSSGNYDMRNLLNGTLVQRHPSHAVTFVDNHDTQPGEALESFVQGWFKPLAYATILTREQGYPQVFYGDYYGIPSDGVPSYRQQIDPLLKARQQYAYGPQHDYLDHPDVIGWTREGDSSHPKSGLATLITDGPGGSKRMYAGLKNAGETWYDITGNRSDTVKIGSDGWGEFHVNDGSVSIYVQK

SEQ ID NO: 39576 - protein, 478 aa, Bacillus sp.
NGTIMQYFEWNVPNDGQHWNRLHNNAQNLKNAGITAIWIPPAWKGTSQSDTGYGAYDLYDLGEFNQRGTVRTKYGTKAELERAIRSLKANGIQVYGDVVMNHKAGADQTEQVQAVEVNPQNRNQEVSGTYQIEAWTGFNFPGRGNQHSSFKWRWYHFDGTDFDQSRGLSNRIYKFRTKAWDWEVDTEFGNYDYLMYADLDMDHPEVINELNRWGVWYANTLNLDGFRLDAVKHIKFSFMRDWLGHVRGQTGKNLFAVAEYWKNDLGALENYLSKTNWTMSAFDVPLHYNLYQASNSSGNYDMRNLLNGTLVQRHPSHAVTFVDNHDTQPGEALESFVQGWFKPLAYATILTREQGYPQVFYGDYYGIPSDGVPSYRQQIDPLLKARQQYAYGPQHDYLDHPDVIGWTREGDSSHPKSGLATLITDGPGGSKRMYAGLKNAGETWYDITGNRSDTVKIGSDGWGEFHVNDGSVSIYVQK

SEQ ID NO: 39577 - protein, 478 aa, Bacillus sp.
NGTIMQYFEWNVPNDGQHWNRLHNNAQNLKNAGITAIWIPPAWKGTSQSDTGYGAYDLYDLGEFNQKGTVRTKYGTKAELERAIRSLKANGIQVYGDVVMNHKAGADFTERVQAVEVNPQNRNQEVSGTYQIEAWTGFNFPGRGNQHSSFKWRWYHFDGTDWDQSRQLSNRIYKFRGKAWDWEVDTEFGNYDYLMYADLDMDHPEVINELNRWGVWYANTLNLDGFRLDAVKHIKFSFMRDWLGHVRGQTGKNLFAVAEYWKNDLGALENYLSKTNWTMSAFDVPLHYNLYQASNSSGNYDMRNLLNGTLVQRHPSHAVTFVDNHDTQPGEALESFVQGWFKPLAYATILTREQGYPQVFYGDYYGIPSDGVPSYRQQIDPLLAARQQYAYGPQHDYLDHPDVIGWTREGDSSHPKSGLATLITDGPGGSKRMYAGLKNAGETWYDITGNRSDTVKIGSDGWGEFHVNKSSVSIYVQK

SEQ ID NO: 39578 - protein, 478 aa, Bacillus sp.
NGTIMQYFEWNVPNDGQHWNRLHNNAQNLKNAGITAIWIPPAWKGTSQSDTGYGAYDLYDLGEFNQKGTVRTKYGTKAELERAIRSLKANGIQVYGDVVMNHKAGADFTERVQAVEVNPQNRNQEVSGTYQIEAWTGFNFPGRGNQHSSFKWRWYHFDGTDWDQSRQLSNRIYKFRGKAWDWEVDTEFGNYDYLMYADLDMDHPEVINELNRWGVWYANTLNLDGFRLDAVKHIKFSFMRDWLGHVRGQTGKNLFAVAEYWKNDLGALENYLSKTNWTMSAFDVPLHYNLYQASNSSGNYDMRNLLNGTLVQRHPSHAVTFVDNHDTQPGEALESFVQGWFKPLAYATILTREQGYPQVFYGDYYGIPSDGVPSYRQQIDPLLAARQQYAYGPQHDYLDHPDVIGWTREGDSSHPKSGLATLITDGPGGSKRMYAGLKNAGETWYDITGNRSDTVKIGSDGWGEFHVNKASVSIYVQK

SEQ ID NO: 39579 - protein, 478 aa, Bacillus sp.
NGTIMQYFEWNVPNDGQHWNRLHNNAQNLKNAGITAIWIPPAWKGTSQSDTGYGAYDLYDLGEFNQRGTVRTKYGTKAELERAIRSLKANGIQVYGDVVMNHKAGADFTEQVQAVEVNPQNRNQEVSGTYQIEAWTGFNFPGRGNQHSSFKWRWYHFDGTDFDQSRRVSNRIYKFRGKAWDWEVDTEFGNYDYLMYADLDMDHPEVINELNRWGVWYANTLNLDGFRLDAVKHIKFSFMRDWLGHVRGQTGKNLFAVGEYWKNDLGALENYLSKTNWTMSAFDVPLHYNLYQASNSSGNYDMRNLLNGTLVQRHPSHAVTFVDNHDTQPGEALESFVQGWFKPLAYATILTREQGYPQVFYGDYYGIPSDGVPSYRQQIDPLLKARQQYAYGPQHDYLDHPDVIGWTREGDSSHPKSGLATLITDGPGGSKRMYAGLKNAGETWYDITGNRSDTVKIGSDGWGEFHVNDGSVSIYVQK

SEQ ID NO: 39580 - protein, 480 aa, Bacillus sp.
NGTVMQYFEWYLPNDGNHWNRLNSDASNLKSKGITAVWIPPAWKGASQNDVGYGAYDLYDLGEFNQKGTVRTKYGTRSQLQAAVTSLKNNGIQVYGDVVMNHKGGADATEMVRAVEVNPNNRNQEVTGEYTIEAWTRFDFPGRGNTHSSFKWRWYHFDGVDWDQSRRLNNRIYKFRGHGKAWDWEVDTEFGNYDYLMYADYDMDHPEVVNELRNWGVWYTNTLGLDGFRIDAVKHIKYSFTRDWINHVRSATGKNMFAVAEFWKNDLGAIENYLQKTNWNHSVFDVPLHYNLYNASKSGGNYDMRNIFNGTVVQRHPSHAVTFVDNHDSQPEEALESFVEEWFKPLAYALTLTREQGYPSVFYGDYYGIPTHGVPAMRSKIDPILEARQKYAYGPQHDYLDHPDVIGWTREGDSSHPKSGLATLITDGPGGSKRMYAGLKNAGETWYDITGNRSDTVKIGSDGWGEFHVNDGSVSIYVQK

SEQ ID NO: 39581 - protein, 480 aa, Bacillus sp.
NGTMMQYFEWYLPNDGNHWNRLNSDASNLKSKGITAVWIPPAWKGASQNDVGYGAYDLYDLGEFNQKGTVRTKYGTRSQLQAAVTSLKNNGIQVYGDVVMNHKGGADATEMVRAVEVNPNNRNQEVTGEYTIEAWTRFDFPGRGNTHSSFKWRWYHFDGVDWDQSRRLNNRIYKFRGHGKAWDWEVDTEFGNYDYLMYADYDMDHPEVVNELRNWGVWYTNTLGLDGFRIDAVKHIKYSFTRDWINHVRSATGKNMFAVAEFWKNDLGAIENYLQKTNWNHSVFDVPLHYNLYNASRSGGNYDMRNIFNGTVVQRHPSHAVTFVDNHDSQPEEALESFVEEWFKPLAYALTLTREQGYPSVFYGDYYGIPTHGVPAMRSKIDPILEARQKYAYGPQHDYLDHPDVIGWTREGDSSHPKSGLATLITDGPGGSKRMYAGLKNAGETWYDITGNRSDTVKIGSDGWGEFHVNDGSVSIYVQK

SEQ ID NO: 39582 - protein, 480 aa, Bacillus sp.
NGTMMQYFEWYLPNDGNHWNRLNSDASNLKSKGITAVWIPPAWKGASQNDTGYGAYDLYDLGEFNQKGTVRTKYGTRSQLQAAVTSLKNNGIQVYGDVVMNHKGGADATEMVRAVEVNPNNRNQEVTGEYTIEAWTRFDFPGRGNTHSSFKWRWYHFDGVDWDQSRRLNNRIYKFRGHGKAWDWEVDTEFGNYDYLMYADYDMDHPEVVNELRNWGVWYTNTLGLDGFRIDAVKHIKYSFTRDWINHVRSATGKNMFAVAEFWKNDLGAIENYLQKTNWNHSVFDVPLHYNLYNASKSGGNYDMRNIFNGTVVQRHPSHAVTFVDNHDSQPEEALESFVEEWFKPLAYALTLTREQGYPSVFYGDYYGIPTHGVPAMRSKIDPILEARQKYAYGPQHDYLDHPDVIGWTREGDSSHPKSGLATLITDGPGGSKRMYAGLKNAGETWYDITGNRSDTVKIGSDGWGEFHVNDGSVSIYVQK

SEQ ID NO: 39583 - protein, 480 aa, Synthetic construct
NGTMMQYFEWYLPNDGNHWNRLNSDASNLKSKGITAVWIPPAWKGASQNDVGYGAYDLYDLGEFNQKGTVRTKYGTRSQLQAAVTSLKNNGIQVYGDVVMNHKGGADATEMVRAVEVNPNNRNQEVTGEYTIEAWTRFDFPGRGNTHSSFKWRWYHFDGVDWDQSRRLNNRIYKFRGHGKAWDWEVDTEFGNYDYLMYADYDMDHPEVVNELRNWGVWYTNTLGLDGFRIDAVKHIKYSFTRDWINHVRSATGKNMFAVAEFWHNDLGRIENYLQKTNWNHSVFDVPLHYNLYNASKSGGNYDMRNIFNGTVVQRHPSHAVTFVDNHDSQPEEALESFVEEWFKPLAYALTLTREQGYPSVFYGDYYGIPTHGVPAMRSKIDPILEARQKYAYGPQHDYLDHPDVIGWTREGDSSHPKSGLATLITDGPGGSKRMYAGLKNAGETWYDITGNRSDTVKIGSDGWGEFHVNDGSVSIYVQK

SEQ ID NO: 39584 - protein, 480 aa, Bacillus sp.
NGTMMQYFEWYLPNDGNHWNRLNSDASNLKSKGITAVWIPPAWKGTSQNDVGYGAYDLYDLGEFNQKGTVRTKYGTRSQLQAAVTSLKNNGIQVYGDVVMNHKGGADATEMVRAVEVNPNNRNQEVTGEYTIEAWTRFDFPGRGNTHSSFKWRWYHFDGVDWDQSRELTNRIYKFRGHGKAWDWEVDTEFGNYDYLMYADYDMDHPEVVNELRNWGVWYTNTLGLDGFRIDAVKHIKYSFTRDWINHVRSATGKNMFAVAEFWKNDLGAIENYLQKTNWNHSVFDVPLHYNLYNASKSGGNYDMRNIFNGTVVQRHPSHAVTFVDNHDSQPEEALESFVEEWFKPLAYALTLTREQGYPSVFYGDYYGIPTHGVPAMRSKIDPILEARQKYAYGPQHDYLDHPDVIGWTREGDSSHPKSGLATLITDGPGGSKRMYAGLKNAGETWYDITGNRSDTVKIGSDGWGEFHVNDGSVSIYVQK

SEQ ID NO: 39585 - protein, 480 aa, Synthetic construct
NGTMMQYFEWYLPNDGNHWNRLNSDASNLKSKGITAVWIPPAWKGASQNDVGYGAYDLYDLGEFNQKGTVRTKYGTRSQLQAAVTSLKNNGIQVYGDVVMNHKGGADATEMVRAVEVNPNNRNQEVTGEYTIEAWTRFDFPGRGNTHSSFKWRWYHFDGVDWDRSRRLNNRIYKFRGHGKAWDWEVDTEFGNYDYLMYADYDMDHPEVVNELRNWGVWYTNTLGLDGFRIDAVKHIKYSFTRDWINHVRSATGKNMFAVAEFWKNDLGAIENYLQKTNWNHSVFDVPLHYNLYNASKSGGNYDMRNIFNGTVVQRHPSHAVTFVDNHDSQPEEALESFVEEWFKPLAYALTLTREQGYPSVFYGDYYGIPTHGVPAMRSKIDPILEARQKYAYGPQHDYLDHPDVIGWTREGDSSHPKSGLATLITDGPGGSKRMYAGLKNAGETWYDITGNRSDTVKIGSDGWGEFHVNDGSVSIYVQK

SEQ ID NO: 39586 - protein, 480 aa, Synthetic construct
NGTMMQYFEWYLPNDGNHWNRLNSDASNLKSKGITAVWIPPAWKGASQNDVGYGAYDLYDLGEFNQKGTVRTKYGTRSQLQAAVTSLKNNGIQVYGDVVMNHKGGADATEMVRAVEVNPNNRNQEVTGEYTIEAWTRFDFPGRGNTHSSFKWRWYHFDGVDWDQSRRLNNRIYKFRGHGKAWDWEVDTEFGNYDYLMYADYDMDHPEVVNELRNWGVWYTNTLGLDGFRIDAVKHIKYSFTRDWINHVRSATGKNMFAVAEFWKNDLGAIENYLQKTLWNHSVFDVPLHYNLYNASKSGGNYDMRNIFNGTVVQRHPSHAVTFVDNHDSQPEEALESFVEEWFKPLAYALTLTREQGYPSVFYGDYYGIPTHGVPAMRSKIDPILEARQKYAYGPQHDYLDHPDVIGWTREGDSSHPKSGLATLITDGPGGSKRMYAGLKNAGETWYDITGNRSDTVKIGSDGWGEFHVNDGSVSIYVQK

SEQ ID NO: 39587 - protein, 480 aa, Bacillus sp.
NGTMMQYFEWYLPNDGNHWNRLNSDASNLKSKGITAVWIPPAWKGASQNDVGYGAYDLYDLGEFNQKGTVRTKYGTRSQLQAAVTSLKNNGIQVYGDVVMNHKGGADATEMVRAVEVNPNNRNQEVTGEYTIEAWTRFDFPGRGNTHSSFKWRWYHFDGVDWDMSRRLNNRIYKFRGHGKAWDWEVDTEFGNYDYLMYADYDMDHPEVVNELRNWGVWYTNTLGLDGFRIDAVKHIKYSFTRDWINHVRSATGKNMFAVAEFWKNDLGAIENYLQKTNWNHSVFDVPLHYNLYNASKSGGNYDMRNIFNGTVVQRHPSHAVTFVDNHDSQPEEALESFVEEWFKPLAYALTLTREQGYPSVFYGDYYGIPTHGVPAMRSKIDPILEARQKYAYGPQHDYLDHPDVIGWTREGDSSHPKSGLATLITDGPGGSKRMYAGLKNAGETWYDITGNRSDTVKIGSDGWGEFHVNDGSVSIYVQK

SEQ ID NO: 39588 - protein, 480 aa, Synthetic construct
NGTMMQYFEWYLPNDGNHWNRLNSDASNLKSKGITAVWIPPAWKGASQNDVGYGAYDLYDLGEFNQKGTVRTKYGTRSQLQAAVTSLKNNGIQVYGDVVMNHKGGADATEMVRAVEVNPNNRNQEVTGEYTIEAWTRFDFPGRGNTHSSFKWRWYHFDGVDWDQSRRLNNRIYKFRGHGKAWDWEVDTENGNYDYLMYADIDMDHPEVVNELRNWGVWYTNTLGLDGFRIDAVKHIKYSFTRDWINHVRSATGKNMFAVAEFWKNDLGAIENYLQKTNWNHSVFDVPLHYNLYNASKSGGNYDMRNIFNGTVVQRHPSHAVTFVDNHDSQPEEALESFVEEWFKPLAYALTLTREQGYPSVFYGDYYGIPTHGVPAMRSKIDPILEARQKYAYGPQHDYLDHPDVIGWTREGDSSHPKSGLATLITDGPGGSKRMYAGLKNAGETWYDITGNRSDTVKIGSDGTGEFHVNDGSVSIYVQK

SEQ ID NO: 39589 - protein, 480 aa, Synthetic construct
NGTMMQYFEWYLPNDGNHWNRLNSDASNLKSKGITAVWIPPAWKGASQNDVGYGAYDLYDLGEFNQKGTVRTKYGTRSQLQAAVTSLKNNGIQVYGDVVMNHKGGADATEMVRAVEVNPNNRNQEVTGEYTIEAWTRFDFPGRGNTHSSFKWRWYHFDGVDWDQSRRLNNRIYKFRGHGKAWDWEVDTENGNYDYLMYADIDMDHPEVVNELRNWGVWYTNTLGLDGFRIDAVKHIKYSFTRDWINHVRSATGKNMFAVAEFWKNDLGAIENYLQKTNWNHSVFDVPLHYNLYNASKSGGNYDMRNIFNGTVVQRHPSHAVTFVDNHDSQPEEALESFVEEWFKPLAYALTLTREQGYPSVFYGDYYGIPTHGVPAMRSKIDPILEARQKYAYGPQHDYLDHPDVIGWTREGDSSHPKSGLATLISDGPGGSKRMYAGLKNAGETWYDITGNRSDTVKIGSDGWGEFHVNDGSVSIYVQK

SEQ ID NO: 39590 - protein, 480 aa, Synthetic construct
NGTMMQYFEWYLPNDGNHWNRLNSDASNLKSKGITAVWIPPAWKGASQNDVGYGAYDLYDLGEFNQKGTVRTKYGTRSQLQAAVTSLKNNGIQVYGDVVMNHKGGADATEMVRAVEVNPNNRNQEVTGEYTIEAWTRFDFPGRGNTHSSFKWRWYHFDGVDWDQSRRLNNRIYKFRGHGKAWDWEVDTEFGNYDYLMYADYDADHPEVVNELRNWGVWYTNTLGLDGFRIDAVKHIKYSFTRDWINHVRSATGKNMFAVAEFWKNDLGAIENYLQKTNWNHSVFDVPLHYNLYNASKSGGNYDMRNIFNGTVVQRHPSHAVTFVDNHDSQPEEALESFVEEWFKPLAYALTLTREQGYPSVFYGDYYGIPTHGVPAMRSKIDPILEARQKYAYGPQHDYLDHPDVIGWTREGDSSHPKSGLATLITDGPGGSKRMYAGLKNAGETWYDITGNRSDTVKIGSDGWGEFHVNDGSVSIYVQK

SEQ ID NO: 39591 - protein, 478 aa, Bacillus sp.
NGTIMQYFEWNVPNDGQHWNRLHNNAQNLKNAGITAIWIPPAWKGTSQNDVGYGAYDLYDLGEFNQKGTVRTKYGTKAELERAIRSLKANGIQVYGDVVMNHKGGADFTERVQAVEVNPQNRNQEVSGTYEIEAWTGFNFPGRGNQHSSFKWRWYHFDGTDWDQSRQLSNRIYKFGGKAWDWEVDTENGNYDYLMYADVDMNHPEVINELNRWGVWYANTLNLDGFRLDAVKHIQFSFMRNWLGHVRGQTGKNLFAVAEYWKNDLGALENYLSKTNWTMSAFDVPLHYNLYQASNSGGNYDMRNLLNGTLVQRHPSHAVTFVDNHDTQPGEALESFVQGWFKPLAYATILTREQGYPQVFYGDYYGIPSDGVPSYRQQIDPLLKARQKYAYGPQHDYLDHPDVIGWTREGDSSHPKSGLATLITDGPGGSKRMYAGLKNAGETWYDITGNRSDTVKIGSDGWGEFHVNDGSVSIYVQK

SEQ ID NO: 39592 - protein, 480 aa, Bacillus sp.
NGTMMQYFEWYLPNDGNHWNRLNSDASNLKSKGITAVWIPPAWKGASQNDVGYGAYDLYDLGEFNQKGTVRTKYGTRSQLQAAVTSLKNNGIQVYGDVVMNHKGGADATEMVRAVEVNPNNRNQEVTGEYTIEAWTRFDFPGRGNTHSSFKWRWYHFDGVDWDQSRRLNNRIYKFRGHGKAWDWEVDTEFGNYDYLMYADYDMDHPEVVNELRNWGVWYTNTLGLDGFRIDAVKHIKYSFTRDWINHVRSATGKNMFAVAEFWKNDLGVIENYLQKTNWNHSVFDVPLHYNLYNASKSGGNYDMRNIFNGTVVQRHPSHAVTFVDNHDSQPEEALESFVEEWFKPLAYALTLTREQGYPSVFYGDYYGIPTHGVPAMRSKIDPILEARQKYAYGPQHDYLDHPDVIGWTREGDSSHPKSGLATLITDGPGGSKRMYAGLKNAGETWYDITGNRSDTVKIGSDGWGEFHVNDGSVSIYVQK

SEQ ID NO: 39593 - protein, 480 aa, Bacillus sp.
NGTMMQYFEWYLPNDGNHWNRLNSDASNLKSKGITAVWIPPAWKAVSQNDVGYGAYDLYDLGEFNQKGTVRTKYGTRSQLQAAVTSLKNNGIQVYGDVVMNHKGGADATEMVRAVEVNPNNRNQEVTGEYTIEAWTRFDFPGRGNTHSSFKWRWYHFDGVDWDQSRELSNRIYKFRGHGKAWDWEVDTEFGNYDYLMYADYDMDHPEVVNELRNWGVWYTNTLGLDGFRIDAVKHIKYSFTRDWINHVRSATGKNMFAVAEFWKNDLGAIENYLQKTNWNHSVFDVPLHYNLYNASKSGGNYDMRNIFNGTVVQRHPSHAVTFVDNHDSQPEEALESFVEEWFKPLAYALTLTREQGYPSVFYGDYYGIPTHGVPAMRSKIDPILEARQKYAYGPQHDYLDHPDVIGWTREGDSSHPKSGLATLITDGPGGSKRMYAGLKNAGETWYDITGNRSDTVKIGSDGWGEFHVNDGSVSIYVQK

SEQ ID NO: 39594 - protein, 480 aa, Synthetic construct
NGTMMQYFEWYLPNDGNHWNRLNSDASNLKSKGITAVWIPPAWKGASQNDVGYGAYDLYDLGEFNQKGTVRTKYGTRSQLQAAVTSLKNNGIQVYGDVVMNHKGGADATEMVRAVEVNPNNRNQEVTGEYTIEAWTRFDFPGRGNTHSSWKWRWYHFDGVDWDQSRRLNNRIYKFRGHGKAWDWEVDTENGNYDYLMYADIDMDHPEVVNELRNWGVWYTNTLGLDGFRIDAVKHIKYSFTRDWINHVRSATGKNMFAVAEFWKNDLGAIENYLQKTNWNHSVFDVPLHYNLYNASKSGGNYDMRNIFNGTVVQRHPSHAVTFVDNHDSQPEEALESFVEEWFKPLAYALTLTREQGYPSVFYGDYYGIPTHGVPAMRSKIDPILEARQKYAYGPQHDYLDHPDVIGWTREGDSSHPKSGLATLITDGPGGSKRMYAGLKNAGETWYDITGNRSDTVKIGSDGWGEFHVNDGSVSIYVQK

SEQ ID NO: 39595 - protein, 480 aa, Bacillus sp.
NGTMMQYFEWYLPNDGNHWNRLNSDASNLKSKGITAVWIPPAWKGASQNDVGYGAYDLYDLGEFNQKGTVRTKYGTRSQLQAAVTSLKNNGIQVYGDVVMNHKGGADATEMVRAVEVNPNNRNQEVTGEYTIEAWTRFDFPGRGNTHSSFKWRWYHFDGVDWDQSRRFQNRIYKFRGHGKAWDWEVDTEFGNYDYLMYADYDMDHPEVVNELRNWGVWYTNTLGLDGFRIDAVKHIKYSFTRDWINHVRSATGKNMFAVAEFWKNDLGAIENYLQKTNWNHSVFDVPLHYNLYNASKSGGNYDMRNIFNGTVVQRHPSHAVTFVDNHDSQPEEALESFVEEWFKPLAYALTLTREQGYPSVFYGDYYGIPTHGVPAMRSKIDPILEARQKYAYGPQHDYLDHPDVIGWTREGDSSHPKSGLATLITDGPGGSKRMYAGLKNAGETWYDITGNRSDTVKIGSDGWGEFHVNDGSVSIYVQK

SEQ ID NO: 39596 - protein, 480 aa, Synthetic construct
NGTMMQYFEWYLPNDGNHWNRLNSDASNLKSKGITAVWIPPAWKGASQNDVGYGAYDLYDLGEFNQKGTVRTKYGTRSQLQAAVTSLKNNGIQVYGDVVMNHKGGADATEMVRAVEVNPNNRNQEVTGEYTIEAWTRFDFPGRGNTHSSFKWRWYHFDGVDWDQSRDLDNRIYKFRGHGKAWDWEVDTEFGNYDYLMYADYDMDHPEVVNELRNWGVWYTNTLGLDGFRIDAVKHIKYSFTRDWINHVRSATGKNMFAVAEFWKNDLGAIENYLQKTNWNHSVFDVPLHYNLYNASKSGGNYDMRNIFNGTVVQRHPSHAVTFVDNHDSQPEEALESFVEEWFKPLAYALTLTREQGYPSVFYGDYYGIPTHGVPAMRSKIDPILEARQKYAYGPQHDYLDHPDVIGWTREGDSSHPKSGLATLITDGPGGSKRMYAGLKNAGETWYDITGNRSDTVKIGSDGWGEFHVNDGSVSIYVQK

SEQ ID NO: 39597 - protein, 480 aa, Synthetic construct
NGTMMQYFEWYLPNDGNHWNRLNSDASNLKSKGITAVWIPPAWKGVSQNDVGYGAYDLYDLGEFNQKGTVRTKYGTRSQLQAAVTSLKNNGIQVYGDVVMNHKGGADATEMVRAVEVNPNNRNQEVTGEYTIEAWTRFDFPGRGNTHSSFKWRWYHFDGVDWDQSRDLENRIYKFRGHGKAWDWEVDTEFGNYDYLMYADYDMDHPEVVNELRNWGVWYTNTLGLDGFRIDAVKHIKYSFTRDWINHVRSATGKNMFAVAEFWKNDLGAIENYLQKTNWNHSVFDVPLHYNLYNASKSGGNYDMRNIFNGTVVQRHPSHAVTFVDNHDSQPEEALESFVEEWFKPLAYALTLTREQGYPSVFYGDYYGIPTHGVPAMRSKIDPILEARQKYAYGPQHDYLDHPDVIGWTREGDSSHPKSGLATLITDGPGGSKRMYAGLKNAGETWYDITGNRSDTVKIGSDGWGEFHVNDGSVSIYVQK

SEQ ID NO: 39598 - protein, 480 aa, Bacillus sp.
NGTMMQYFEWYLPNDGNHWNRLNSDASNLKSKGIKAVWIPPAWKGASQNDVGYGAYDLYDLGEFNQKGTVRTKYGTRSQLQAAVTSLKNNGIQVYGDVVMNHKGGADATEMVRAVEVNPNNRNQEVTGEYTIEAWTRFDFPGRGNTHSSFKWRWYHFDGVDWDQSRRLNNRIYKFRGHGKAWDWEVDTEFGNYDYLMYADYDMDHPEVVNELRNWGVWYTNTLGLDGFRIDAVKHIKYSFTRDWINHVRSATGKNMFAVAEFWKNDLGAIENYLQKTNWNHSVFDVPLHYNLYNASKSGGNYDMRNIFNGTVVQRHPSHAVTFVDNHDSQPEEALESFVETWFKPLAYALTLTREQGYPSVFYGDYYGIPTHGVPAMRSKIDPILEARQKYAYGPQHDYLDHPDVIGWTREGDSSHPKSGLATLITDGPGGSKRMYAGLKNAGETWYDITGNRSDTVKIGSDGWGEFHVNDGSVSIYVQK

SEQ ID NO: 39599 - protein, 480 aa, Bacillus sp.
NGTMMQYFEWYLPNDGNHWNRLNSDASNLKSKGITAVWIPPAWKGISQNDVGYGAYDLYDLGEFNQKGTVRTKYGTRSQLQAAVTSLKNNGIQVYGDVVMNHKGGADATEMVRAVEVNPNNRNQEVTGEYTIEAWTRFDFPGRGNTHSSFKWRWYHFDGVDWDQSRDLTNRIYKFRGHGKAWDWEVDTEFGNYDYLMYADYDMDHPEVVNELRNWGVWYTNTLGLDGFRIDAVKHIKYSFTRDWINHVRSATGKNMFAVAEFWKNDLGAIENYLQKTNWNHSVFDVPLHYNLYNASKSGGNYDMRNIFNGTVVQRHPSHAVTFVDNHDSQPEEALESFVEEWFKPLAYALTLTREQGYPSVFYGDYYGIPTHGVPAMRSKIDPILEARQKYAYGPQHDYLDHPDVIGWTREGDSSHPKSGLATLITDGPGGSKRMYAGLKNAGETWYDITGNRSDTVKIGSDGWGEFHVNDGSVSIYVQK

SEQ ID NO: 39600 - protein, 480 aa, Bacillus sp.
NGTMMQYFEWYLPNDGNHWNRLNSDASNLKSKGITAVWIPPAWKGASQNDAGYGAYDLYDLGEFNQKGTVRTKYGTRSQLQAAVTSLKNNGIQVYGDVVMNHKGGADATEMVRAVEVNPNNRNQEVTGEYTIEAWTRFDFPGRGNTHSSFKWRWYHFDGVDWDQSRRLNNRIYKFRGHGKAWDWEVDTEFGNYDYLMYADYDMDHPEVVNELRNWGVWYTNTLGLDGFRIDAVKHIKYSFTRDWINHVRSATGKNMFAVAEFWKNDLGAIENYLQKTNWNHSVFDVPLHYNLYNASKSGGNYDMRNIFNGTVVQRHPSHAVTFVDNHDSQPEEALESFVEEWFKPLAYALTLTREQGYPSVFYGDYYGIPTHGVPAMRSKIDPILEARQKYAYGPQHDYLDHPDVIGWTREGDSSHPKSGLATLITDGPGGSKRMYAGLKNAGETWYDITGNRSDTVKIGSDGWGEFHVNDGSVSIYVQK

SEQ ID NO: 39601 - protein, 480 aa, Bacillus sp.
NGTMMQYFEWYLPNDGNHWNRLNSDASNLKSKGITAVWIPPAWKGASQNDVGYGAYDLYDLGEFNQKGTVRTKYGTRSQLQAAVTSLKNNGIQVYGDVVMNHKGGADATEMVRAVEVNPNNRNQEVTGEYTIEAWTRFDFPGRGNTHSSFKWRWYHFDGVDWDQSRELQNRIYKFRGHGKAWDWEVDTEFGNYDYLMYADYDMDHPEVVNELRNWGVWYTNTLGLDGFRIDAVKHIKYSFTRDWINHVRSATGKNMFAVAEFWKNDLGAIENYLQKTNWNHSVFDVPLHYNLYNASKSGGNYDMRNIFNGTVVQRHPSHAVTFVDNHDSQPEEALESFVEEWFKPLAYALTLTREQGYPSVFYGDYYGIPTHGVPAMRSKIDPILEARQKYAYGPQHDYLDHPDVIGWTREGDSSHPKSGLATLITDGPGGSKRMYAGLKNAGETWYDITGNRSDTVKIGSDGWGEFHVNDGSVSIYVQK

SEQ ID NO: 39602 - protein, 480 aa, Synthetic construct
NGTMMQYFEWYLPNDGNHWNRLNSDASNLKSKGITAVWIPPAWKGASQNDVGYGAYDLYDLGEFNQKGTVRTKYGTRSQLQAAVTSLKNNGIQVYGDVVMNHKGGADATEMVRAVEVNPNNRNQEVTGEYTIEAWTRFDFPGRGNTHSSFKWRWYHFDGVDWDQSRRLNNRIYKFRGHGKAWDWEVDTENGNYDYLMYADIDMDHPEVVNELRNWGVWYTNTLGLDGFRIDAVKHIKYSFTRDWINHVRSATGKNMFAVAEFWKNDLGAIENYLQKTNWNHSVFDVPLHYNLYNASKSGGNYDMRNIFNGTVVQRHPSHAVTFVDNHDSQPEEALESFVEEWFKPLAYALTLTREQGYPSVFYGDYYGIPTHGVPAMRSKIDPILEARQKYAYGPQHDYLDHPDVIGWTREGDSSHPKSGLATLMTDGPGGSKRMYAGLKNAGETWYDITGNRSDTVKIGSDGWGEFHVNDGSVSIYVQK

SEQ ID NO: 39603 - protein, 480 aa, Synthetic construct
NGTMMQYFEWYLPNDGNHWNRLNSDASNLKSKGITAVWIPPAWKGASQNDVGYGAYDLYDLGEFNQKGTVRTKYGTRSQLQAAVTSLKNNGIQVYGDVVMNHKGGADATEMVRAVEVNPNNRNQEVTGEYTIEAWTRFDFPGRGNTHSSFKWRWYHFDGVDWDQSRRLNNRIYKFRGHGKAWDWEVDTENGNYDYLMYADIDMDHPEVVNELRNWGVWYTNTLGLDGFRIDAVKHIKYSFTRDWINHVRSATGKNMFAVAEFWKNDLGAIENYLQKTNWTHSVFDVPLHYNLYNASKSGGNYDMRNIFNGTVVQRHPSHAVTFVDNHDSQPEEALESFVEEWFKPLAYALTLTREQGYPSVFYGDYYGIPTHGVPAMRSKIDPILEARQKYAYGPQHDYLDHPDVIGWTREGDSSHPKSGLATLITDGPGGSKRMYAGLKNAGETWYDITGNRSDTVKIGSDGWGEFHVNDGSVSIYVQK

SEQ ID NO: 39604 - protein, 480 aa, Bacillus sp.
NGTMMQYFEWYLPNDGNHWNRLNSDASNLKSKGITAVWIPPAWKGASQNDVGYGAYDLYDLGEFNQKGTVRTKYGTRSQLQAAVTSLKNNGIQVYGDVVMNHKGGADATEMVLAVEVNPNNRNQEVTGEYTIEAWTRFDFPGRGNTHSSFKWRWYHFDGVDWDQSRRLNNRIYKFRGHGKAWDWEVDTEFGNYDYLMYADYDMDHPEVVNELRNWGVWYTNTLGLDGFRIDAVKHIKYSFTRDWINHVRSATGKNMFAVAEFWKNDLGAIENYLQKTNWNHSVFDVPLHYNLYNASKSGGNYDMRNIFNGTVVQRHPSHAVTFVDNHDSQPEEALESFVEEWFKPLAYALTLTREQGYPSVFYGDYYGIPTHGVPAMRSKIDPILEARQKYAYGPQHDYLDHPDVIGWTREGDSSHPKSGLATLITDGPGGSKRMYAGLKNAGETWYDITGNRSDTVKIGSDGWGEFHVNDGSVSIYVQK

SEQ ID NO: 39605 - protein, 478 aa, Bacillus sp.
NGTIMQYFEWNVPNDGQHWNRLHNNAQNLKNAGITAIWIPPAWKGTSQNDVGYGAYDLYDLGEFNQKGTVRTKYGTKAELERAIRSLKANGIQVYGDVVMNHKGGADFTERVQAVEVNPQNRNQEVSGTYEIEAWTGFNFPGRGNQHSSFKWRWYHFDGTDWDQSRQLSNRIYKFRGKAWDWEVDTENGNYDYLMYADVDMNHPEVINELNRWGVWYANTLNLDGFRLDAVKHIQFSFMRNWLGHVRGQTGKNLFAVAEYWKNDLGALENYLSKTNWTMSAFDVPLHYNLYQASNSGGNYDMRNLLNGTLVQRHPSHAVTFVDNHDTQPGEALESFVQGWFKPLAYATILTREQGYPQVFYGDYYGIPSDGVPSYRQQIDPLLKARQKYAYGPQHDYLDHPDVIGWTREGDSSHPKSGLATLITDGPGGSKRMYAGLKNAGETWYDITGNRSDTVKIGSDGWGEFHVNDGSVSIYVQK

SEQ ID NO: 39606 - protein, 480 aa, Bacillus sp.
NGTMMQYFEWYLPNDGNHWNRLNSDASNLKSKGITAVWIPPAWKGISQNDVGYGAYDLYDLGEFNQKGTVRTKYGTRSQLQAAVTSLKNNGIQVYGDVVMNHKGGADATEMVRAVEVNPNNRNQEVTGEYTIEAWTRFDFPGRGNTHSSFKWRWYHFDGVDWDQSRDLNNRIYKFRGHGKAWDWEVDTEFGNYDYLMYADYDMDHPEVVNELRNWGVWYTNTLGLDGFRIDAVKHIKYSFTRDWINHVRSATGKNMFAVAEFWKNDLGAIENYLQKTNWNHSVFDVPLHYNLYNASKSGGNYDMRNIFNGTVVQRHPSHAVTFVDNHDSQPEEALESFVEEWFKPLAYALTLTREQGYPSVFYGDYYGIPTHGVPAMRSKIDPILEARQKYAYGPQHDYLDHPDVIGWTREGDSSHPKSGLATLITDGPGGSKRMYAGLKNAGETWYDITGNRSDTVKIGSDGWGEFHVNDGSVSIYVQK

SEQ ID NO: 39607 - protein, 480 aa, Synthetic construct
NGTMMQYFEWYLPNDGNHWNRLNSDASNLKSKGITAVWIPPAWKGASQNDVGYGAYDLYDLGEFNQKGTVRTKYGTRSQLQAAVTSLKNNGIQVYGDVVMNHKGGADATEMVRAVEVNPNNRNQEVTGEYTIEAWTRFDFPGRGNTHSSFKWRWYHFDGVDWDQSRRLNNRIYKFRGHGKAWDWEVDTEFGNYDYLMYADYDMDHPEVVNELRNWGVWYTNTLGLDGFRIDAVKHIKYSFTRDWINHVRSATGKNMFAVAEFWVNDLGYIENYLQKTNWNHSVFDVPLHYNLYNASKSGGNYDMRNIFNGTVVQRHPSHAVTFVDNHDSQPEEALESFVEEWFKPLAYALTLTREQGYPSVFYGDYYGIPTHGVPAMRSKIDPILEARQKYAYGPQHDYLDHPDVIGWTREGDSSHPKSGLATLITDGPGGSKRMYAGLKNAGETWYDITGNRSDTVKIGSDGWGEFHVNDGSVSIYVQK

SEQ ID NO: 39608 - protein, 480 aa, Synthetic construct
NGTMMQYFEWYLPNDGNHWNRLNSDASNLKSKGITAVWIPPAWKGASQNDVGYGAYDLYDLGEFNQKGTVRTKYGTRSQLQAAVTSLKNNGIQVYGDVVMNHKGGADATEMVRAVEVNPNNRNQEVTGEYTIEAWTRFDFPGRGNTHSSFKWRWYHFDGVDWDQSRRLNNRIYKFRGHGKAWDWEVDTENGNYDYLMYADIDMDHPEVVNELRNWGVWYTNTLGLDGFRIDAVKHIKYSFTRDWINHVRSATGKNMFAVAEFWKNDLGAIENYLQKTNWNHSVFDVPLHYNLYNASKSGGNYDMRNIFNGTVVQRHPSHAVTFVDNHDSQPEEALESFVEEWFKPLAYALTLTREQGYPSVFYGDYYGIPTHGVPAMRSKIDPILEARQKYAYGPQHDYLDHPDVIGWTREGDSSHPKSGLATVITDGPGGSKRMYAGLKNAGETWYDITGNRSDTVKIGSDGWGEFHVNDGSVSIYVQK

SEQ ID NO: 39609 - protein, 480 aa, Synthetic construct
NGTMMQYFEWYLPNDGNHWNRLNSDASNLKSKGITAVWIPPAWKGASQNDVGYGAYDVYDLGEFNQKGTVRTKYGTRSQLQAAVTSLKNNGIQVYGDVVMNHKGGADATEMVRAVEVNPNNRNQEVTGEYTIEAWTRFDFPGRGNTHSSFKWRWYHFDGVDWDQSRRLNNRIYKFRGHGKAWDWEVDTENGNYDYLMYADYDMDHPEVVNELRNWGVWYTNTLGLDGFRIDAVKHIKYSFVRDWINHVRSATGKNMFAVAEFWKNDLGAIENYLQKTNWNHSVFDVPLHYNLYNASKSGGNYDMRNIFNGTVVQRHPSHAVTFVDNHDSQPEEALESFVEEWFKPLAYALTLTREQGYPSVFYGDYYGIPTHGVPAMRSKIDPILEARQKYAYGPQHDYLDHPDVIGWTREGDSSHPKSGLATLITDGPGGSKRMYAGLKNAGETWYDITGNRSDTVKIGSDGWGEFHVNDGSVSIYVQK

SEQ ID NO: 39610 - protein, 480 aa, Synthetic construct
NGTMMQYFEWYLPNDGNHWNRLNSDASNLKSKGITAVWIPPAWKGASQNDVGYGAYDLYDLGEFNQKGTVRTKYGTRSQLQAAVTSLKNNGIQVYGDVVMNHKGGADATEMVRAVEVNPNNRNQEVTGEYTIEAWTRFDFPGRGNTHSSFKWRWYHFDGVDWDQSRRLNNRIYKFRGHGKAWDWEVDTEFGNYDYLMYADYDMDHPEVVNELRNWGVWYTNTLGLDGFRIDAVKHIKYSFTRDWINHVRSATGKNMFAVAEFWKNDLGAIENYLQKTNWNHSVFDVPLHYNLYNASKSGGNYDMRNIFNGTVVQRHPSHAVTFVDNHDSQPEEALESFVDTWFKPLAYALTLTREQGYPSVFYGDYYGIPTHGVPAMRSKIDPILEARQKYAYGPQHDYLDHPDVIGWTREGDSSHPKSGLATLITDGPGGSKRMYAGLKNAGETWYDITGNRSDTVKIGSDGWGEFHVNGGSVSIYVQK

SEQ ID NO: 39611 - protein, 480 aa, Bacillus sp.
NGTMMQYFEWYLPNDGNHWNRLNSDASNLKSKGITAVWIPPAWKGASQNDVGYGAYDLYDLGEFNQKGTVRTKYGTRSQLQAAVTSLKNNGIQVYGDVVMNHKGGADATEMVRAVEVNPNNRNQEVTGEYTIEAWTRFDFPGRGNTHSSFKWRWYHFDGVDWDQSRRLSNRIYKFRGHGKAWDWEVDTEFGNYDYLMYTDYDMDHPEVVNELRNWGVWYTNTLGLDGFRIDAVKHIKYSFTRDWINHVRSATGKNMFAVAEFWKNDLGAIENYLQKTNWNHSVFDVPLHYNLYNASKSGGNYDMRNIFNGTVVQRHPSHAVTFVDNHDSQPEEALESFVEEWFKPLAYALTLTREQGYPSVFYGDYYGIPTHGVPAMRSKIDPILEARQKYAYGPQHDYLDHPDVIGWTREGDSSHPKSGLATLITDGPGGSKRMYAGLKNAGETWYDITGNRSDTVKIGSDGWGEFHVNDGSVSIYVQK

SEQ ID NO: 39612 - protein, 480 aa, Bacillus sp.
NGTMMQYFEWYLPNDGNHWNRLNSDASNLKSKGITAVWIPPAWKGASQNDVGYGAYDLYDLGEFNQKGTVRTKYGTRSQLQAAVTSLKNNGIQVYGDVVMNHKGGADATEMVRAVEVNPNNRNQEVTGEYTIEAWTRFDFPGRGNTHSSFKWRWYHFDGVDWDQSRRVNNRIYKFRGHGKAWDWEVDTEFGNYDYLMYADYDMDHPEVVNELRNWGVWYTNTLGLDGFRIDAVKHIKYSFTRDWINHVRSATGKNMFAVAEFWKNDLGAIENYLQKTNWNHSVFDVPLHYNLYNASKSGGNYDMRNIFNGTVVQRHPSHAVTFVDNHDSQPEEALESFVEEWFKPLAYALTLTREQGYPSVFYGDYYGIPTHGVPAMRSKIDPILEARQKYAYGPQHDYLDHPDVIGWTREGDSSHPKSGLATLITDGPGGSKRMYAGLKNAGETWYDITGNRSDTVKIGSDGWGEFHVNDGSVSIYVQK

SEQ ID NO: 39613 - protein, 480 aa, Bacillus sp.
NGTMMQYFEWYLPNDGNHWNRLNSDASNLKSKGITAVWIPPAWKGASQNDVGYGAYDLYDLGEFNQKGTVRTKYGTRSQLQAAVTSLKNNGIQVYGDVVMNHKGGADATEMVRAVEVNPNNRNQEVTGEYTIEAWTRFDFPGRGNTHSSFKWRWYHFDGVDWDQSRRLNNRIYKFRGHGKAWDWEVDTEFGNYDYLMYADYDMDHPEVVNELRNWGVWYTNTLGLDGFRIDAVKHIKYSFTRDWINHVRSATGKNMFAVAEFWKNDLGAIENYLQKTNWNHSVFDVPLHYNLYNASKSGGNYDMRNIFNGTVVQRHPSHAVTFVDNHDSQPEEALESFVSEWFKPLAYALTLTREQGYPSVFYGDYYGIPTHGVPAMRSKIDPILEARQKYAYGPQHDYLDHPDVIGWTREGDSSHPKSGLATLITDGPGGSKRMYAGLKNAGETWYDITGNRSDTVKIGSDGWGEFHVNDGSVSIYVQK

SEQ ID NO: 39614 - protein, 480 aa, Bacillus sp.
NGTMMQYFEWYLPNDGNHWNRLNSDASNLKSKGITAVWIPPAWKGASQNDVGYGAYDLYDLGEFNQKGTVRTKYGTRSQLQAAVTSLKNNGIQVYGDVVMNHKGGADATEMVRAVEVNPNNRNQEVTGEYTIEAWTRFDFPGRGNTHSSFKWRWYHFDGVDWDQSRRLNNRIYKFRGHGKAWDWEVDTEFGNYDYLMYADYDMDHPEVVNELRNWGVWYTNTLGLDGFRIDAVKHIKYSFTRDWINHVRSATGKNMFAVAEFWKNDLGAIENYLQKTNWNHSVFDVPLHYNLYNASKSGGNYDMRNIFNGTVVQRHPSHAVTFVDNHDSQPEEALESFVEEWFKPLAYALTLTREQGYPSVFYGDYYGIPTHGVPAMRSKIDPILHARQKYAYGPQHDYLDHPDVIGWTREGDSSHPKSGLATLITDGPGGSKRMYAGLKNAGETWYDITGNRSDTVKIGSDGWGEFHVNDGSVSIYVQK

SEQ ID NO: 39615 - protein, 480 aa, Bacillus sp.
NGTMMQYFEWYLPNDGNHWNRLNSDASNLKSKGITAVWIPPAWKGASQNDVGYGAYDLYDLGEFNQKGTVRTKYGTRSQLQAAVTSLKNNGIQVYGDVVMNHKGGADATEMVRAVEVNPNNRNQEVTGEYTIEAWTRFDFPGRGNTHSSFKWRWYHFDGVDWDQSRRLNNRIYKFRGHGKAWDWEVDTEFGNYDYLMYADYDMDHPEVVNELRNWGVWYTNTLGLDGFRIDAVKHIKYSFTRDWINHVRKATGKNMFAVAEFWKNDLGAIENYLQKTNWNHSVFDVPLHYNLYNASKSGGNYDMRNIFNGTVVQRHPSHAVTFVDNHDSQPEEALESFVEEWFKPLAYALTLTREQGYPSVFYGDYYGIPTHGVPAMRSKIDPILEARQKYAYGPQHDYLDHPDVIGWTREGDSSHPKSGLATLITDGPGGSKRMYAGLKNAGETWYDITGNRSDTVKIGSDGWGEFHVNDGSVSIYVQK

SEQ ID NO: 39616 - protein, 480 aa, Bacillus sp.
NGTMMQYFEWYLPNDGNHWNRLNSDASNLKSKGITAVWIPPAWKGASQNDVGYGAYDLYDLGEFNQKGTVRTKYGTRSQLQAAVTSLKNNGIQVYGDVVMNHKGGADATEMVRAVEVNPNNRNQEVTGEYTIEAWTRFDFPGRGNTHSSFKWRWYHFDGVDWDQSRRLNNRIYKFRGHGKAWDWEVDTEFGNYDYLMYADYDMDHPEVVNELRNWGVWYTNTLGLDGFRIDAVKHIKYSFTRDWINHVRSATGKNMFAVAEFWKNDLGCIENYLQKTNWNHSVFDVPLHYNLYNASKSGGNYDMRNIFNGTVVQRHPSHAVTFVDNHDSQPEEALESFVEEWFKPLAYALTLTREQGYPSVFYGDYYGIPTHGVPAMRSKIDPILEARQKYAYGPQHDYLDHPDVIGWTREGDSSHPKSGLATLITDGPGGSKRMYAGLKNAGETWYDITGNRSDTVKIGSDGWGEFHVNDGSVSIYVQK

SEQ ID NO: 39617 - protein, 480 aa, Synthetic construct
NGTMMQYFEWYLPNDGNHWNRLNSDASNLKSKGITAVWIPPAWKGASQNDVGYGAYDLYDLGEFNQKGTVRTKYGTRSQLQAAVTSLKNNGIQVYGDVVMNHKGGADATEMVRAVEVNPNNRNQEVTGEYTIEAWTRFDFPGRGNTHSSFKWRWYHFDGVDWDQSRRLNNRIYKFRGHGKAWDWEVDTENGNYDYLMYADIDMDHPEVVNELRNWGVWYTNTLGLDGFRIDAVKHIKYSFTRDWINHVRSATGKNMFAVAEFWKNDLGAIENYLQKTNWNHSVFDVPLHYNLYNASKSGGNYDMRNIFNGTVVQRHPSHAVTFVDNHDSQPEEALESFVEEWFKPLAYALTLTREQGYPSVFYGDYYGIPTHGVPAMRSKIDPILEARQKYAYGPQHDYLDHPDVIGWTREGDSSHPNSGLATLITDGPGGSKRMYAGLKNAGETWYDITGNRSDTVKIGSDGWGEFHVNDGSVSIYVQK

SEQ ID NO: 39618 - protein, 480 aa, Synthetic construct
NGTMMQYFEWYLPNDGNHWNRLNSDASNLKSKGITAVWIPPAWKGASQNDVGYGAYDLYDLGEFNQKGTVRTKYGTRSQLQAAVTSLKNNGIQVYGDVVMNHKGGADATEMVRAVEVNPNNRNQEVTGEYTIEAWTRFDFPGRGNTHSSFKWRWYHFDGVDWDQSRRLNNRIYKFRGHGKAWDWEVDTEFGNYDYLMYADYDMDHPEVVNELRNWGVWYTNTLGLDGFRIDAVKHIKYSFTRDWINHVRSATGKNMFAVAEFWKNDLGAIENYLQKTNWNHSVFDVPLHYNLYRASKSGGNYDMRNIFNGTVVQRHPSHAVTFVDNHDSQPEEALESFVEEWFKPLAYALTLTREQGYPSVFYGDYYGIPTHGVPAMRSKIDPILEARQKYAYGPQHDYLDHPDVIGWTREGDSSHPKSGLATLITDGPGGSKRMYAGLKNAGETWYDITGNRSDTVKIGSDGWGEFHVNDGSVSIYVQK

SEQ ID NO: 39619 - protein, 480 aa, Bacillus sp.
NGTMMQYFEWYLPNDGNHWNRLNSDASNLKSKGITAVWIPPAWKGASQNDVGYGAYDLYDLGEFNQKGTVRTKYGTRSQLQAAVTSLKNNGIQVYGDVVMNHKGGADATEMVRAVEVNPNNRNQEVTGEYTIEAWTRFDFPGRGNTHSSFKWRWYHFDGVDWDQSREFNNRIYKFRGHGKAWDWEVDTEFGNYDYLMYADYDMDHPEVVNELRNWGVWYTNTLGLDGFRIDAVKHIKYSFTRDWINHVRSATGKNMFAVAEFWKNDLGAIENYLQKTNWNHSVFDVPLHYNLYNASQSGGNYDMRNIFNGTVVQRHPSHAVTFVDNHDSQPEEALESFVEPWFKPLAYALTLTREQGYPSVFYGDYYGIPTHGVPAMRSKIDPILEARQKYAYGPQHDYLDHPDVIGWTREGDSSHPKSGLATLITDGPGGSKRMYAGLKNAGETWYDITGNRSDTVKIGSDGWGEFHVNDGSVSIYVQK

SEQ ID NO: 39620 - protein, 480 aa, Bacillus sp.
NGTMMQYFEWYLPNDGNHWNRLNSDASNLKSKGITAVWIPPAWKGVSQNDVGYGAYDLYDLGEFNQKGTVRTKYGTRSQLQAAVTSLKNNGIQVYGDVVMNHKGGADATEMVRAVEVNPNNRNQEVTGEYTIEAWTRFDFPGRGNTHSSFKWRWYHFDGVDWDQSRRVNNRIYKFRGHGKAWDWEVDTEFGNYDYLMYADYDMDHPEVVNELRNWGVWYTNTLGLDGFRIDAVKHIKYSFTRDWINHVRSATGKNMFAVAEFWKNDLGAIENYLQKTNWNHSVFDVPLHYNLYNASKSGGNYDMRNIFNGTVVQRHPSHAVTFVDNHDSQPEEALESFVEEWFKPLAYALTLTREQGYPSVFYGDYYGIPTHGVPAMRSKIDPILEARQKYAYGPQHDYLDHPDVIGWTREGDSSHPKSGLATLITDGPGGSKRMYAGLKNAGETWYDITGNRSDTVKIGSDGWGEFHVNDGSVSIYVQK

SEQ ID NO: 39621 - protein, 480 aa, Bacillus sp.
NGTMMQYFEWYLPNDGNHWNRLNSDASNLKSKGITAVWIPPAWKGASQNDVGYGAYDLYDLGEFNQKGTVRTKYGTRSQLQAAVTSLKNNGIQVYGDVVMNHKGGADATEMVRAVEVNPNNRNQEVTGEYTIEAWTRFDFPGRGNTHSSFKWRWYHFDGVDWDQSREINNRIYKFRGHGKAWDWEVDTEFGNYDYLMYTDYDMDHPEVVNELRNWGVWYTNTLGLDGFRIDAVKHIKYSFTRDWINHVRSATGKNMFAVAEFWKNDLGAIENYLQKTNWNHSVFDVPLHYNLYNASKSGGNYDMRNIFNGTVVQRHPSHAVTFVDNHDSQPEEALESFVEEWFKPLAYALTLTREQGYPSVFYGDYYGIPTHGVPAMRSKIDPILEARQKYAYGPQHDYLDHPDVIGWTREGDSSHPKSGLATLITDGPGGSKRMYAGLKNAGETWYDITGNRSDTVKIGSDGWGEFHVNDGSVSIYVQK

SEQ ID NO: 39622 - protein, 480 aa, Bacillus sp.
NGTMMQYFEWYLPNDGNHWNRLNSDASNLKSKGITAVWIPPAWKGASQNDVGYGAYDLYDLGEFNQKGTVRTKYGTRSQLQAAVTSLKNNGIQVYGDVVMNHKGGADATEMVRAVEVNPNNRNQEVTGEYTIEAWTRFDFPGRGNTHSSFKWRWYHFDGVDWDQSRKLNNRIYKFRGHGKAWDWEVDTEFGNYDYLMYADYDYDHPESTNEMRNWGVWYTNTLGLDGFRIDAVKHIKYSFTRDWINHVRSATGKNMFAVAEFWKNDLGAIENYLQKTNWNHSVFDVPLHYNLYNASKSGGNYDMRNIFNGTVVQRHPSHAVTFVDNHDSQPEEALESFVEEWFKPLAYALTLTREQGYPSVFYGDYYGIPTHGVPAMRSKIDPILEARQKYAYGPQHDYLDHPDVIGWTREGDSSHPKSGLATLITDGPGGSKRMYAGLKNAGETWYDITGNRSDTVKIGSDGWGEFHVNDGSVSIYVQK

SEQ ID NO: 39623 - protein, 480 aa, Synthetic construct
NGTMMQYFEWYLPNDGNHWNRLNSDASNLKSKGITAVWIPPAWKGASQNDVGYGAYDLYDLGEFNQKGTVRTKYGTRSQLQAAVTSLKNNGIQVYGDVVMNHKGGADATEMVRAVEVNPNNRNQEVTGEYTIEAWTRFDFPGRGNTHSSFKWRWYHFDGVDWDQSRRLNNRIYKFRGHGKAWDWEVDTEFGNYDYLMYADYDYDHPEVTNEVRNWGVWYTNTLGLDGFRIDAVKHIKYSFTRDWINHVRSATGKNMFAVAEFWKNDLGAIENYLQKTNWNHSVFDVPLHYNLYNASKSGGNYDMRNIFNGTVVQRHPSHAVTFVDNHDSQPEEALESFVEEWFKPLAYALTLTREQGYPSVFYGDYYGIPTHGVPAMRSKIDPILEARQKYAYGPQHDYLDHPDVIGWTREGDSSHPKSGLATLITDGPGGSKRMYAGLKNAGETWYDITGNRSDTVKIGSDGWGEFHVNDGSVSIYVQK

SEQ ID NO: 39624 - protein, 480 aa, Bacillus sp.
NGTMMQYFEWYLPNDGNHWNRLNSDASNLKSKGITAVWIPPAWKGISQNDVGYGAYDLYDLGEFNQKGTVRTKYGTRSQLQAAVTSLKNNGIQVYGDVVMNHKGGADATEMVRAVEVNPNNRNQEVTGEYTIEAWTRFDFPGRGNTHSSFKWRWYHFDGVDWDQSRQLENRIYKFRGHGKAWDWEVDTEFGNYDYLMYADYDMDHPEVVNELRNWGVWYTNTLGLDGFRIDAVKHIKYSFTRDWINHVRSATGKNMFAVAEFWKNDLGAIENYLQKTNWNHSVFDVPLHYNLYNASKSGGNYDMRNIFNGTVVQRHPSHAVTFVDNHDSQPEEALESFVEEWFKPLAYALTLTREQGYPSVFYGDYYGIPTHGVPAMRSKIDPILEARQKYAYGPQHDYLDHPDVIGWTREGDSSHPKSGLATLITDGPGGSKRMYAGLKNAGETWYDITGNRSDTVKIGSDGWGEFHVNDGSVSIYVQK

SEQ ID NO: 39625 - protein, 480 aa, Bacillus sp.
NGTMMQYFEWYLPNDGNHWNRLNSDASNLKSKGITAVWIPPAWKGASQNDVGYGAYDLYDLGEFNQKGTVRTKYGTRSQLQAAVTSLKNNGIQVYGDVVMNHKGGADATEMVRAVEVNPNNRNQEVTGEYTIEAWTRFDFPGRGNTHSSFKWRWYHFDGVDWDQSRRVTNRIYKFRGHGKAWDWEVDTEFGNYDYLMYADYDMDHPEVVNELRNWGVWYTNTLGLDGFRIDAVKHIKYSFTRDWINHVRSATGKNMFAVAEFWKNDLGAIENYLQKTNWNHSVFDVPLHYNLYNASKSGGNYDMRNIFNGTVVQRHPSHAVTFVDNHDSQPEEALESFVEEWFKPLAYALTLTREQGYPSVFYGDYYGIPTHGVPAMRSKIDPILEARQKYAYGPQHDYLDHPDVIGWTREGDSSHPKSGLATLITDGPGGSKRMYAGLKNAGETWYDITGNRSDTVKIGSDGWGEFHVNDGSVSIYVQK

SEQ ID NO: 39626 - protein, 480 aa, Bacillus sp.
NGTMMQYFEWYLPNDGNHWNRLNSDASNLKSKGITAVWIPPAWKGASQNDVGYGAYDLYDLGEFNQKGTVRTKYGTRSQLQAAVTSLKNNGIQVYGDVVMNHKGGADATEMVRAVEVNPNNRNQEVTGEYTIEAWTRFDFPGRGNTHSSFKWRWYHFDGVDWDQSRRLNNRIYKFRGHGKAWDWEVDTEFGNYDYLMYADYDMDHPEVVNELRNWGVWYTNTLGLDGFRIDAVKHIKYSFTRDWINHVRSATGKNMFAVAEFWLNDLGGIENYLQKTNWNHSVFDVPLHYNLYNASKSGGNYDMRNIFNGTVVQRHPSHAVTFVDNHDSQPEEALESFVEEWFKPLAYALTLTREQGYPSVFYGDYYGIPTHGVPAMRSKIDPILEARQKYAYGPQHDYLDHPDVIGWTREGDSSHPKSGLATLITDGPGGSKRMYAGLKNAGETWYDITGNRSDTVKIGSDGWGEFHVNDGSVSIYVQK

SEQ ID NO: 39627 - protein, 480 aa, Bacillus sp.
NGTMMQYFEWYLPNDGNHWNRLNSDASNLKSKGITAVWIPPAWKGASQNDVGYGAYDLYDLGEFNQKGTVRTKYGTRSQLQAAVTSLKNNGIQVYGDVVMNHKGGADATEMVRAVEVNPNNRNQEVTGEYTIEAWTRFDFPGRGNTHSSFKWRWYHFDGVDWDQSRRLNNRIYKFRGHGKAWDWEVDTEFGNYDYLMYADYDMDHPEVVNELRNWGVWYTNTLGLDGFRIDAVKHIKYSFTRDWINHVRSATGKNMFAVAEFWLNDLGLIENYLQKTNWNHSVFDVPLHYNLYNASKSGGNYDMRNIFNGTVVQRHPSHAVTFVDNHDSQPEEALESFVEEWFKPLAYALTLTREQGYPSVFYGDYYGIPTHGVPAMRSKIDPILEARQKYAYGPQHDYLDHPDVIGWTREGDSSHPKSGLATLITDGPGGSKRMYAGLKNAGETWYDITGNRSDTVKIGSDGWGEFHVNDGSVSIYVQK

SEQ ID NO: 39628 - protein, 480 aa, Bacillus sp.
NGTMMQYFEWYLPNDGNHWNRLNSDASNLKSKGITAVWIPPAWKGASQNDVGYGAYDLYDLGEFNQKGTVRTKYGTRSQLQAAVTSLKNNGIQVYGDVVMNHKGGADATEMVDAVEVNPNNRNQEVTGEYTIEAWTRFDFPGRGNTHSSFKWRWYHFDGVDWDQSRQLDNRIYKFRGHGKAWDWEVDTEFGNYDYLMYADYDMDHPEVVNELRNWGVWYTNTLGLDGFRIDAVKHIKYSFTRDWINHVRSATGKNMFAVAEFWKNDLGAIENYLQKTNWNHSVFDVPLHYNLYNASKSGGNYDMRNIFNGTVVQRHPSHAVTFVDNHDSQPEEALESFVEEWFKPLAYALTLTREQGYPSVFYGDYYGIPTHGVPAMRSKIDPILEARQKYAYGPQHDYLDHPDVIGWTREGDSSHPKSGLATLITDGPGGSKRMYAGLKNAGETWYDITGNRSDTVKIGSDGWGEFHVNDGSVSIYVQK

SEQ ID NO: 39629 - protein, 480 aa, Bacillus sp.
NGTMMQYFEWYLPNDGNHWNRLNSDASNLKSKGITAVWIPPAWKGASQNDVGYGAYDLYDLGEFNQKGTVRTKYGTRSQLQAAVTSLKNNGIQVYGDVVMNHKGGADATEMVRAVEVNPNNRNQEVTGEYTIEAWTRFDFPGRGNTHSSFKWRWYHFDGVDWDQSRRLNNRIYKFRGHGKAWDWEVDTEFGNYDYLMYADYDMDHPEVVNELRNWGVWYTNTLGLDGFRIDAVKHIKYSFTRDWINHVRSATGKNMFAVAEFWKNDLGAIENYLQKTNWNHSVFDVPLHYNLYNASKSGGNYDMRNIFNGTVVQRHPSHAVTFVDNHDSQPEEALESFVEEWFKPLAYALTLTREQGYPSVFYGDYYGIPTHGVPAMRSKIDPILLARQKYAYGPQHDYLDHPDVIGWTREGDSSHPKSGLATLITDGPGGSKRMYAGLKNAGETWYDITGNRSDTVKIGSDGWGEFHVNDGSVSIYVQK

SEQ ID NO: 39630 - protein, 480 aa, Bacillus sp.
NGTMMQYFEWYLPNDGNHWNRLNSDASNLKSKGITAVWIPPAWKAASQNDVGYGAYDLYDLGEFNQKGTVRTKYGTRSQLQAAVTSLKNNGIQVYGDVVMNHKGGADATEMVRAVEVNPNNRNQEVTGEYTIEAWTRFDFPGRGNTHSSFKWRWYHFDGVDWDQSRQVSNRIYKFRGHGKAWDWEVDTEFGNYDYLMYADYDMDHPEVVNELRNWGVWYTNTLGLDGFRIDAVKHIKYSFTRDWINHVRSATGKNMFAVAEFWKNDLGAIENYLQKTNWNHSVFDVPLHYNLYNASKSGGNYDMRNIFNGTVVQRHPSHAVTFVDNHDSQPEEALESFVEEWFKPLAYALTLTREQGYPSVFYGDYYGIPTHGVPAMRSKIDPILEARQKYAYGPQHDYLDHPDVIGWTREGDSSHPKSGLATLITDGPGGSKRMYAGLKNAGETWYDITGNRSDTVKIGSDGWGEFHVNDGSVSIYVQK

SEQ ID NO: 39631 - protein, 480 aa, Synthetic construct
NGTMMQYFEWYLPNDGNHWNRLNSDASNLKSKGITAVWIPPAWKGASQNDVGYGAYDLYDLGEFNQKGTVRTKYGTRSQLQAAVTSLKNNGIQVYGDVVMNHKGGADATEMVRAVEVNPNNRNQEVTGEYTIEAWTRFDFPGRGNTHSSFKWRWYHFDGVDWDQSRRLNNRIYKFRGHGKAWDWEVDTENGNYDYLMYADIDMDHPEVVNELRNWGVWYTNTLGLDGFRIDAVKHIKYSFTRDWINHVRSATGKNMFAVAEFWKNDLGAIENYLQKTNWNHSVFDVPLHYNLYNASKSGGNYDMRNIFNGTVVQRHPSHAVTFVDNHDSQPEEALESFVEEWFKPLAYALTLTREQGYPSVFYGDYYGIPTHGVPAMRSKIDPILEARQKYAYGPQHDYLDHPDVIGWTREGDSSHPKSGLATLITDGPGGSKRMYAGLKNAGETWYDITGNRSDTVKIGSDGWGTFHVNDGSVSIYVQK

SEQ ID NO: 39632 - protein, 480 aa, Bacillus sp.
NGTMMQYFEWYLPNDGNHWNRLNSDASNLKSKGITAVWIPPAWKGASQNDVGYGAYDLYDLGEFNQKGTVRTKYGTRSQLQAAVTSLKNNGIQVYGDVVMNHKGGADATEMVRAVEVNPNNRNQEVTGEYTIEAWTRFDFPGRGNTHSSFKWRWYHFDGVDWDQSRNFQNRIYKFRGHGKAWDWEVDTEFGNYDYLMYADYDMDHPEVVNELRNWGVWYTNTLGLDGFRIDAVKHIKYSFTRDWINHVRSATGKNMFAVAEFWKNDLGAIENYLQKTNWNHSVFDVPLHYNLYNASKSGGNYDMRNIFNGTVVQRHPSHAVTFVDNHDSQPEEALESFVEEWFKPLAYALTLTREQGYPSVFYGDYYGIPTHGVPAMRSKIDPILEARQKYAYGPQHDYLDHPDVIGWTREGDSSHPKSGLATLITDGPGGSKRMYAGLKNAGETWYDITGNRSDTVKIGSDGWGEFHVNDGSVSIYVQK

SEQ ID NO: 39633 - protein, 480 aa, Synthetic construct
NGTMMQYFEWYLPNDGNHWNRLNSDASNLKSKGITAVWIPPAWKGASQNDVGYGAYDLYDLGEFNQKGTVRTKYGTRSQLQAAVTSLKNNGIQVYGDVVMNHKGGADATEMVRAVEVNPNNRNQEVTGEYTIEAWTRFDFPGRGNTHSSFKWRWYHFDGVDWDQSREFDNRIYKFRGHGKAWDWEVDTEFGNYDYLMYADYDMDHPEVVNELRNWGVWYTNTLGLDGFRIDAVKHIKYSFTRDWINHVRSATGKNMFAVAEFWKNDLGAIENYLQKTNWNHSVFDVPLHYNLYNASKSGGNYDMRNIFNGTVVQRHPSHAVTFVDNHDSQPEEALESFVEEWFKPLAYALTLTREQGYPSVFYGDYYGIPTHGVPAMRSKIDPILEARQKYAYGPQHDYLDHPDVIGWTREGDSSHPKSGLATLITDGPGGSKRMYAGLKNAGETWYDITGNRSDTVKIGSDGWGEFHVNDGSVSIYVQK

SEQ ID NO: 39634 - protein, 480 aa, Bacillus sp.
NGTMMQYFEWYLPNDGNHWNRLNSDASNLKSKGITAVWIPPAWKGASQNDVGYGAYDLYDLGEFNQKGTVRTKYGTRSQLQAAVTSLKNNGIQVYGDVVMNHKGGADATEMVRAVEVNPNNRNQEVTGEYTIEAWTRFDFPGRGNTHSSFKWRWYHFDGVDWDQSRRLNNRIYKFRGHGKAWDWEVDTEFGNYDYLMYADYDMDHPEVVNELRNWGVWYTNTLGLDGFRIDAVKHIKYSFTRDWINHVRSATGKNMFAVAEFWKNDLGTIENYLQKTNWNHSVFDVPLHYNLYNASKSGGNYDMRNIFNGTVVQRHPSHAVTFVDNHDSQPEEALESFVEEWFKPLAYALTLTREQGYPSVFYGDYYGIPTHGVPAMRSKIDPILEARQKYAYGPQHDYLDHPDVIGWTREGDSSHPKSGLATLITDGPGGSKRMYAGLKNAGETWYDITGNRSDTVKIGSDGWGEFHVNDGSVSIYVQK

SEQ ID NO: 39635 - protein, 480 aa, Bacillus sp.
NGTMMQYFEWYLPNDGNHWNRLNSDASNLKSKGITAVWIPPAWKGASQNDVGYGAYDLYDLGEFNQKGTVRTKYGTRSQLQSAVTSLKNNGIQVYGDVVMNHKGGADATEMVRAVEVNPNNRNQEVTGEYTIEAWTRFDFPGRGNTHSSFKWRWYHFDGVDWDQSRRLNNRIYKFRGHGKAWDWEVDTEFGNYDYLMYADYDMDHPEVVNELRNWGVWYTNTLGLDGFRIDAVKHIKYSFTRDWINHVRSATGKNMFAVAEFWKNDLGAIENYLQKTNWNHSVFDVPLHYNLYNASKSGGNYDMRNIFNGTVVQRHPSHAVTFVDNHDSQPEEALESFVEEWFKPLAYALTLTREQGYPSVFYGDYYGIPTHGVPAMRSKIDPILEARQKYAYGPQHDYLDHPDVIGWTREGDSSHPKSGLATLITDGPGGSKRMYAGLKNAGETWYDITGNRSDTVKIGSDGWGEFHVNDGSVSIYVQK

SEQ ID NO: 39636 - protein, 480 aa, Bacillus sp.
NGTMMQYFEWYLPNDGNHWNRLNSDASNLKSKGITAVWIPPAWKGISQNDVGYGAYDLYDLGEFNQKGTVRTKYGTRSQLQAAVTSLKNNGIQVYGDVVMNHKGGADATEMVRAVEVNPNNRNQEVTGEYTIEAWTRFDFPGRGNTHSSFKWRWYHFDGVDWDQSRRLDNRIYKFRGHGKAWDWEVDTEFGNYDYLMYADYDMDHPEVVNELRNWGVWYTNTLGLDGFRIDAVKHIKYSFTRDWINHVRSATGKNMFAVAEFWKNDLGAIENYLQKTNWNHSVFDVPLHYNLYNASKSGGNYDMRNIFNGTVVQRHPSHAVTFVDNHDSQPEEALESFVEEWFKPLAYALTLTREQGYPSVFYGDYYGIPTHGVPAMRSKIDPILEARQKYAYGPQHDYLDHPDVIGWTREGDSSHPKSGLATLITDGPGGSKRMYAGLKNAGETWYDITGNRSDTVKIGSDGWGEFHVNDGSVSIYVQK

SEQ ID NO: 39637 - protein, 480 aa, Bacillus sp.
NGTMMQYFEWYLPNDGNHWNRLNSDASNLKSKGITAVWIPPAWKAASQNDVGYGAYDLYDLGEFNQKGTVRTKYGTRSQLQAAVTSLKNNGIQVYGDVVMNHKGGADATEMVRAVEVNPNNRNQEVTGEYTIEAWTRFDFPGRGNTHSSFKWRWYHFDGVDWDQSRRITNRIYKFRGHGKAWDWEVDTEFGNYDYLMYADYDMDHPEVVNELRKFGVWYTNTLGLDGFRIDAVKHIKYSFTRDWINHVRSATGKNMFAVAEFWKNDLGAIENYLQKTNWNHSVFDVPLHYNLYNASKSGGNYDMRNIFNGTVVQRHPSHAVTFVDNHDSQPEEALESFVEEWFKPLAYALTLTREQGYPSVFYGDYYGIPTHGVPAMRSKIDPILEARQKYAYGPQHDYLDHPDVIGWTREGDSSHPKSGLATLITDGPGGSKRMYAGLKNAGETWYDITGNRSDTVKIGSDGWGEFHVNDGSVSIYVQK

SEQ ID NO: 39638 - protein, 480 aa, Synthetic construct
NGTMMQYFEWYLPNDGNHWNRLNSDASNLKSKGITAVWIPPAWKGASQNDVGYGAYDLYDLGEFNQKGTVRTKYGTRSQLQAAVTSLKNNGIQVYGDVVMNHKGGADATEMVRAVEVNPNNRNQEVTGEYTIEAWTRFDFPGRGNTHSSFKWRWYHFDGVDWDQSRRLNNRIYKFRGHGKAWDWEVDTEFGNYDYLMYADYDMDHPEVVNELRNWGVWYTNTLGLDGFRIDAVKHIKYSFTRDWINHVRSATGKNMFAVAEFWKNDLGAIENYLQKTNWNHSVFDVPLHYNLYNASKSGGNYDMRNIFNGTVVQRHPSHAVTFVDNHDSQPEEALESFVEEWFKPLAYALTLTREQGYPSVFYGDYYGIPTHGVPAMRSKIDPILRARQKYAYGPQHDYLDHPDVIGWTREGDSSHPKSGLATLITDGPGGSKRMYAGLKNAGETWYDITGNRSDTVKIGSDGWGEFHVNDGSVSIYVQK

SEQ ID NO: 39639 - protein, 480 aa, Synthetic construct
NGTMMQYFEWYLPNDGNHWNRLNSDASNLKSKGITAVWIPPAWKGASQNDVGYGAYDLYDLGEFNQKGTVRTKYGTRSQLQAAVTSLKNNGIQVYGDVVMNHKGGADATEMVRAVEVNPNNRNQEVTGEYTIEAWTRFDFPGRGNTHSSFKWRWYHFDGVDWDQSRRLNNRIYKFRGHGKAWDWEVDTEFGNYDYLMYADYDMDHPEVVNELRNWGVWYTNTLGLDGFRIDAVKHIKYSFTRDWINHVRSATGKNMFAVAEFWNNDLGAIENYLQKTNWNHSVFDVPLHYNLYNASKSGGNYDMRNIFNGTVVQRHPSHAVTFVDNHDSQPEEALESFVEEWFKPLAYALTLTREQGYPSVFYGDYYGIPTHGVPAMRSKIDPILEARQKYAYGPQHDYLDHPDVIGWTREGDSSHPKSGLATLITDGPGGSKRMYAGLKNAGETWYDITGNRSDTVKIGSDGWGEFHVNDGSVSIYVQK

SEQ ID NO: 39640 - protein, 480 aa, Bacillus sp.
NGTMMQYFEWYLPNDGNHWNRLNSDASNLKSKGITAVWIPPAWKGASQNDVGYGAYDLYDLGEFNQKGTVRTKYGTRSQLQAAVTSLKNNGIQVYGDVVMNHKGGADATEMVRAVEVNPNNRNQEVTGEYTIEAWTRFDFPGRGNTHSSFKWRWYHFDGVDWDQSRRLNNRIYKFRGHGKAWDWEVDAEFGNYDYLMYADYDMDHPEVVNELRNWGVWYTNTLGLDGFRIDAVKHIKYSFTRDWINHVRSATGKNMFAVAEFWKNDLGAIENYLQKTNWNHSVFDVPLHYNLYNASKSGGNYDMRNIFNGTVVQRHPSHAVTFVDNHDSQPEEALESFVEEWFKPLAYALTLTREQGYPSVFYGDYYGIPTHGVPAMRSKIDPILEARQKYAYGPQHDYLDHPDVIGWTREGDSSHPKSGLATLITDGPGGSKRMYAGLKNAGETWYDITGNRSDTVKIGSDGWGEFHVNDGSVSIYVQK

SEQ ID NO: 39641 - protein, 480 aa, Synthetic construct
NGTMMQYFEWYLPNDGNHWNRLNSDASNLKSKGITAVWIPPAWKGASQNDVGYGAYDLYDLGEFNQKGTVRTKYGTRSQLQAAVTSLKNNGIQVYGDVVMNHKGGADATEMVRAVEVNPNNRNQEVTGEYTIEAWTRFDFPGRGNTHSSFKWRWYHFDGLDWDQSRRLNNRIYKFRGHGKAWDWEVDTEFGNYDYLMYADYDMDHPEVVNELRNWGVWYTNTLGLDGFRIDAVKHIKYSFTRDWINHVRSATGKNMFAVAEFWKNDLGAIENYLQKTNWNHSVFDVPLHYNLYNASKSGGNYDMRNIFNGTVVQRHPSHAVTFVDNHDSQPEEALESFVEEWFKPLAYALTLTREQGYPSVFYGDYYGIPTHGVPAMRSKIDPILEARQKYAYGPQHDYLDHPDVIGWTREGDSSHPKSGLATLITDGPGGSKRMYAGLKNAGETWYDITGNRSDTVKIGSDGWGEFHVNDGSVSIYVQK

SEQ ID NO: 39642 - protein, 480 aa, Bacillus sp.
NGTMMQYFEWYLPNDGNHWNRLNSDASNLKSKGITAVWIPPAWKGASQNDVGYGAYDLYDLGEFNQKGTVRTKYGTRSQLQAAVTSLKNNGIQVYGDVVMNHKGGADATEMVRAVEVNPNNRNQEVTGEYTIEAWTRFDFPGRGNTHSSFKWRWYHFDGVDWDQSRRLNNRIYKFRGHGKAWDWEVETEFGNYDYLMYADYDMDHPEVVNELRNWGVWYTNTLGLDGFRIDAVKHIKYSFTRDWINHVRSATGKNMFAVAEFWKNDLGAIENYLSKTNWNHSVFDVPLHYNLYNASKSGGNYDMRNIFNGTVVQRHPSHAVTFVDNHDSQPEEALESFVEEWFKPLAYALTLTREQGYPSVFYGDYYGIPTHGVPAMRSKIDPILEARQKYAYGPQHDYLDHPDVIGWTREGDSSHPKSGLATLITDGPGGSKRMYAGLKNAGETWYDITGNRSDTVKIGSDGWGEFHVNDGSVSIYVQK

SEQ ID NO: 39643 - protein, 479 aa, Bacillus sp.
NGTMMQYFEWYLPNDGNHWNRLNSDASNLKSKGITAVWIPPAWKGASQNDVGYGAYDLYDLGEFNQKGTVRTKYGTRSQLQAAVTSLKNNGIQVYGDVVMNHKGGADATEMVRAVEVNPNNRNQEVTGEYTIEAWTRFDFPGRGNTHSSFKWRWYHFDGVDWDQSRLNNRIYKFRGHGKAWDWEVDTEFGNYDYLMYADYDMDHPEVVNELRNWGVWYTNTLGLDGFRIDAVKHIKYSFTRDWINHVRSATGKNMFAVAEFWKNDLGAIENYLQKTNWNHSVFDVPLHYNLYNASKSGGNYDMRNIFNGTVVQRHPSHAVTFVDNHDSQPEEALESFVEEWFKPLAYALTLTREQGYPSVFYGDYYGIPTHGVPAMRSKIDPILEARQKYAYGPQHDYLDHPDVIGWTREGDSSHPKSGLATLITDGPGGSKRMYAGLKNAGETWYDITGNRSDTVKIGSDGWGEFHVNDGSVSIYVQK

SEQ ID NO: 39644 - protein, 480 aa, Bacillus sp.
NGTMMQYFEWYLPNDGNHWNRLNSDASNLKSKGITAVWIPPAWKGASQNDVGYGAYDLYDLGEFNQKGTVRTKYGTRSQLQAAVTSLKNNGIQVYGDVVMNHKGGADATEMVRAVEVNPNNRNQEVTGEYTIEAWTRFDFPGRGNTHSSFKWRWYHFDGVDWDQSRKLNNRIYKFRGHGKAWDWEVDTEFGNYDYLMYVDYDMDHPEVVNELRNWGVWYTNTLGLDGFRIDAVKHIKYSFTRDWINHVRSATGKNMFAVAEFWKNDLGAIENYLQKTNWNHSVFDVPLHYNLYNASKSGGNYDMRNIFNGTVVQRHPSHAVTFVDNHDSQPEEALESFVEEWFKPLAYALTLTREQGYPSVFYGDYYGIPTHGVPAMRSKIDPILEARQKYAYGPQHDYLDHPDVIGWTREGDSSHPKSGLATLITDGPGGSKRMYAGLKNAGETWYDITGNRSDTVKIGSDGWGEFHVNDGSVSIYVQK

SEQ ID NO: 39645 - protein, 480 aa, Bacillus sp.
NGTMMQYFEWYLPNDGNHWNRLNSDASNLKSKGITAVWIPPAWKGVSQNDVGYGAYDLYDLGEFNQKGTVRTKYGTRSQLQAAVTSLKNNGIQVYGDVVMNHKGGADATEMVRAVEVNPNNRNQEVTGEYTIEAWTRFDFPGRGNTHSSFKWRWYHFDGVDWDQSRRFQNRIYKFRGHGKAWDWEVDTEFGNYDYLMYADYDMDHPEVVNELRNWGVWYTNTLGLDGFRIDAVKHIKYSFTRDWINHVRSATGKNMFAVAEFWKNDLGAIENYLQKTNWNHSVFDVPLHYNLYNASKSGGNYDMRNIFNGTVVQRHPSHAVTFVDNHDSQPEEALESFVEEWFKPLAYALTLTREQGYPSVFYGDYYGIPTHGVPAMRSKIDPILEARQKYAYGPQHDYLDHPDVIGWTREGDSSHPKSGLATLITDGPGGSKRMYAGLKNAGETWYDITGNRSDTVKIGSDGWGEFHVNDGSVSIYVQK

SEQ ID NO: 39646 - protein, 480 aa, Bacillus sp.
NGTMMQYFEWYLPNDGNHWNRLNSDASNLKSKGITAVWIPPAWKGASQNDVGYGAYDLYDLGEFNQKGTVRTKYGTRSQLQAAVTSLKNNGIQVYGDVVMNHKGGADATEMVRAVEVNPNNRNQEVTGEYTIEAWTRFDFPGRGNTHSSFKWRWYHFDGVDWDQSRNVNNRIYKFRGHGKAWDWEVDTEFGNYDYLMYADYDMDHPEVVNELRNWGVWYTNTLGLDGFRIDAVKHIKYSFTRDWINHVRSATGKNMFAVAEFWKNDLGAIENYLQKTNWNHSVFDVPLHYNLYNASKSGGNYDMRNIFNGTVVQRHPSHAVTFVDNHDSQPEEALESFVEEWFKPLAYALTLTREQGYPSVFYGDYYGIPTHGVPAMRSKIDPILEARQKYAYGPQHDYLDHPDVIGWTREGDSSHPKSGLATLITDGPGGSKRMYAGLKNAGETWYDITGNRSDTVKIGSDGWGEFHVNDGSVSIYVQK

SEQ ID NO: 39647 - protein, 480 aa, Bacillus sp.
NGTMMQYFEWYLPNDGNHWNRLNSDASNLKSKGITAVWIPPAWKGASQNDVGYGAYDLYDLGEFNQKGTVRTKYGTRSQLQAAVTSLKNNGIQVYGDVVMNHKGGADATEMVRAVEVNPNNRNQEVTGEYTIEAWTRFDFPGRGNTHSSFKWRWYHFDGVDWDQSRRLNNRIYKFRGHGKAWDWEVDTEFGNYDYLMYADYDMDHPEVVNELRNWGVWYTNTLGLDGFRIDAVKHIKYSFTRDWINHVRSATGKNMFAVAEFWKNDLGAIENYLQKTNWNHSVFDVPLHYNLYNASKSGGNYDMRNIFNGTVVQRHPSHAVTFVDNHDSQPEEALESFVEKWFKPLAYALTLTREQGYPSVFYGDYYGIPTHGVPAMRSKIDPILEARQKYAYGPQHDYLDHPDVIGWTREGDSSHPKSGLATLITDGPGGSKRMYAGLKNAGETWYDITGNRSDTVKIGSDGWGEFHVNDGSVSIYVQK

SEQ ID NO: 39648 - protein, 480 aa, Bacillus sp.
NGTMMQYFEWYLPNDGNHWNRLNSDASNLKSKGITAVWIPPAWKGASQNDVGYGAYDLYDLGEFNQKGTVRTKYGTRSQLQAAVTSLKNNGIQVYGDVVMNHKSGADATEMVRAVEVNPNNRNQEVTGEYTIEAWTRFDFPGRGNTHSSFKWRWYHFDGVDWDQSRRLNNRIYKFRGHGKAWDWEVDTEFGNYDYLMYADYDMDHPEVVNELRNWGVWYTNTLGLDGFRIDAVKHIKYSFTRDWINHVRSATGKNMFAVAEFWKNDLGAIENYLQKTNWNHSVFDVPLHYNLYNASKSGGNYDMRNIFNGTVVQRHPSHAVTFVDNHDSQPEEALESFVEEWFKPLAYALTLTREQGYPSVFYGDYYGIPTHGVPAMRSKIDPILEARQKYAYGPQHDYLDHPDVIGWTREGDSSHPKSGLATLITDGPGGSKRMYAGLKNAGETWYDITGNRSDTVKIGSDGWGEFHVNDGSVSIYVQK

SEQ ID NO: 39649 - protein, 480 aa, Bacillus sp.
NGTMMQYFEWYLPNDGNHWNRLNSDASNLKSKGITAVWIPPAWKGASQNDVGYGAYDLYDLGEFNQKGTVRTKYGTRSQLQAAVTSLKNNGIQVYGDVVMNHKGGADATEMVRAVEVNPNNRNQEVTGEYTIEAWTRFDFPGRGNTHSSFKWRWYHFDGVDWDQSRRLNNRIYKFRGHGKAWDWEVDTEFGNYDYLMYADYDMDHPEVVNELRNWGVWYTNTLGLDGFRIDAVKHIKYSFTRDWINHVRSATGKNMFAVAEFWKNDLGAIENYLQKTNWNHSVFDVPLHYNLYNASKSQGNYDMRNIFNGTVVQRHPSHAVTFVDNHDSQPEEALESFVDTWFKPLAYALTLTREQGYPSVFYGDYYGIPTHGVPAMRSKIDPILEARQKYAYGPQHDYLDHPDVIGWTREGDSSHPKSGLATLITDGPGGSKRMYAGLKNAGETWYDITGNRSDTVKIGSDGWGEFHVNDGSVSIYVQK

SEQ ID NO: 39650 - protein, 480 aa, Synthetic construct
NGTMMQYFEWYLPNDGNHWNRLNSDASNLKSKGITAVWIPPAWKGASQNDVGYGAYDLYDLGEFNQKGTVRTKYGTRSQLQAAVTSLKNNGIQVYGDVVMNHKGGADATEMVRAVEVNPNNRNQEVTGEYTIEAWTRFDFPGRGNTHSSFKWRWYHFDGVDWDQSRALNNRIYKFRGHGKAWDWEVDTEFGNYDYLMYADYDMDHPEVVNELRNWGVWYTNTLGLDGFRIDAVKHIKYSFTRDWINHVRSATGKNMFAVAEFWKNDLGAIENYLQKTNWNHSVFDVPLHYNLYNASKSGGNYDMRNIFNGTVVQRHPSHAVTFVDNHDSQPEEALESFVEEWFKPLAYALTLTREQGYPSVFYGDYYGIPTHGVPAMRSKIDPILEARQKYAYGPQHDYLDHPDVIGWTREGDSSHPKSGLATLITDGPGGSKRMYAGLKNAGETWYDITGNRSDTVKIGSDGWGEFHVNDGSVSIYVQK

SEQ ID NO: 39651 - protein, 480 aa, Bacillus sp.
NGTMMQYFEWYLPNDGNHWNRLNSDASNLKSKGITAVWIPPAWKGASQNDVGYGAYDLYDLGEFNQKGTVRTKYGTRSQLQAAVTSLKNNGIQVYGDVVMNHKGGADATEMVRAVEVNPNNRNQEVTGEYTIEAWTRFDFPGRGNTHSSFKWRWYHFDGVDWDQSRRLNNRIYKFRGHGKAWDWEVDTEFGNYDYLMYADYDMDHPEVVNELRNWGVWYTNTLGLDGFRIDAVKHIKYSFTRDWINHVRSATGKNMFAVAEFWLNDLGAIENYLQKTNWNHSVFDVPLHYNLYNASKSGGNYDMRNIFNGTVVQRHPSHAVTFVDNHDSQPEEALESFVEEWFKPLAYALTLTREQGYPSVFYGDYYGIPTHGVPAMRSKIDPILEARQKYAYGPQHDYLDHPDVIGWTREGDSSHPKSGLATLITDGPGGSKRMYAGLKNAGETWYDITGNRSDTVKIGSDGWGEFHVNDGSVSIYVQK

SEQ ID NO: 39652 - protein, 480 aa, Synthetic construct
NGTMMQYFEWYLPNDGNHWNRLNSDASNLKSKGITAVWIPPAWKGASQNDVGYGAYDLYDLGEFNQKGTVRTKYGTRSQLQAAVTSLKNNGIQVYGDVVMNHKGGADATEMVRAVEVNPNNRNQEVTGEYTIEAWTRFDFPGRGNTHSSFKWRWYHFDGVDWDQSRRLNNRIYKFRGHGKAWDWEVDTENGNYDYLMYADIDMDHPEVVNELRNWGVWYTNTLGLDGFRIDAVKHIKYSFTRDWINHVRSATGKNMFAVAEFWKNDLGAIENYLQKTNWNHSVFDVPLHYNLYNASKSGGNYDMRNIFNGTVVQRHPSHAVTFVDNHDSQPEEALESFVEEWFKPLAYALTLTREQGYPSVFYGDYYGIPTHGVPAMRSKIDPILEARQKYAYGPQHDYLDHPDVIGWTREGDSSHPKSGLATLITDGPGGSKRMYAGLKNAGETWYDITGNRSDTVKIGSDGWGEFHVNKGSVSIYVQK

SEQ ID NO: 39653 - protein, 480 aa, Synthetic construct
NGTMMQYFEWYLPNDGNHWNRLNSDASNLKSKGITAVWIPPAWKGASQNDVGYGAYDLYDLGEFNQKGTVRTKYGTRSQLQAAVTSLKNNGIQVYGDVVMNHKGGADATEMVRAVEVNPNNRNQEVTGEYTIEAWTRFDFPGRGNTHSSFKWRWYHFDGVDWDQSRRLNNRIYKFRGHGKAWDWEVDTEFGNYDYLMYADYDMDHPEVVNELRNWGVWYTNTLGLDGFRIDAVKHIKYSFTRDWINHVRSATGKNMFAVAEFWKNDLGAIENYLQKTNWNHSVFDVPLHYNLYNASKSGGNYDMRNIFNGTVVQRHPSHAVTFVDNHDSQPEEALESFVEEWFKPLAYAVTLTREQGYPSVFYGDYYGIPTHGVPAMRSKIDPILEARQKYAYGPQHDYLDHPDVIGWTREGDSSHPKSGLATLITDGPGGSKRMYAGLKNAGETWYDITGNRSDTVKIGSDGWGEFHVNDGSVSIYVQK

SEQ ID NO: 39654 - protein, 480 aa, Synthetic construct
NGTMMQYFEWYLPNDGNHWNRLNSDASNLKSKGITAVWIPPAWKGASQNDVGYGAYDLYDLGEFNQKGTVRTKYGTRSQLQAAVTSLKNNGIQVYGDVVMNHKGGADQTEMVRAVEVNPNNRNQEVTGEYTIEAWTRFDFPGRGNTHSSFKWRWYHFDGVDWDQSRRLNNRIYKFRGHGKAWDWEVDTENGNYDYLMYADIDMDHPEVVNELRNWGVWYTNTLGLDGFRIDAVKHIKYSFTRDWINHVRSATGKNMFAVAEFWKNDLGAIENYLQKTNWNHSVFDVPLHYNLYNASKSGGNYDMRNIFNGTVVQRHPSHAVTFVDNHDSQPEEALESFVEEWFKPLAYALTLTREQGYPSVFYGDYYGIPTHGVPAMRSKIDPILEARQKYAYGPQHDYLDHPDVIGWTREGDSSHPKSGLATLITDGPGGSKRMYAGLKNAGETWYDITGNRSDTVKIGSDGWGEFHVNDGSVSIYVQK

SEQ ID NO: 39655 - protein, 480 aa, Synthetic construct
NGTMMQYFEWYLPNDGNHWNRLNSDASNLKSKGITAVWIPPAWKGASQNDVGYGAYDLYDLGEFNQKGTVRTKYGTRSQLQAAVTSLKNNGIQVYGDVVMNHKGGADATEMVRAVEVNPNNRNQEVTGEYTIEAWTKFDFPGRGNTHSSFKWRWYHFDGVDWDQSRRLNNRIYKFRGHGKAWDWEVDTEFGNYDYLMYADYDMDHPEVVNELRNWGVWYTNTLGLDGFRIDAVKHIKYSFTRDWINHVRSATGKNMFAVAEFWKNDLGAIENYLQKTNWNHSVFDVPLHYNLYNASKSGGNYDMRNIFNGTVVQRHPSHAVTFVDNHDSQPEEALESFVEEWFKPLAYALTLTREQGYPSVFYGDYYGIPTHGVPAMRSKIDPILEARQKYAYGPQHDYLDHPDVIGWTREGDSSHPKSGLATLITDGPGGSKRMYAGLKNAGETWYDITGNRSDTVKIGSDGWGEFHVNDGSVSIYVQK

SEQ ID NO: 39656 - protein, 480 aa, Bacillus sp.
NGTMMQYFEWYLPNDGNHWNRLNSDASNLKSKGITAVWIPPAWKGISQNDVGYGAYDLYDLGEFNQKGTVRTKYGTRSQLQAAVTSLKNNGIQVYGDVVMNHKGGADATEMVRAVEVNPNNRNQEVTGEYTIEAWTRFDFPGRGNTHSSFKWRWYHFDGVDWDQSRRFNNRIYKFRGHGKAWDWEVDTEFGNYDYLMYADYDMDHPEVVNELRNWGVWYTNTLGLDGFRIDAVKHIKYSFTRDWINHVRSATGKNMFAVAEFWKNDLGAIENYLQKTNWNHSVFDVPLHYNLYNASKSGGNYDMRNIFNGTVVQRHPSHAVTFVDNHDSQPEEALESFVEEWFKPLAYALTLTREQGYPSVFYGDYYGIPTHGVPAMRSKIDPILEARQKYAYGPQHDYLDHPDVIGWTREGDSSHPKSGLATLITDGPGGSKRMYAGLKNAGETWYDITGNRSDTVKIGSDGWGEFHVNDGSVSIYVQK

SEQ ID NO: 39657 - protein, 480 aa, Bacillus sp.
NGTMMQYFEWYLPNDGNHWNRLNSDASNLKSKGITAVWIPPAWKAASQNDVGYGAYDLYDLGEFNQKGTVRTKYGTRSQLQAAVTSLKNNGIQVYGDVVMNHKGGADATEMVRAVEVNPNNRNQEVTGEYTIEAWTRFDFPGRGNTHSSFKWRWYHFDGVDWDQSRDLSNRIYKFRGHGKAWDWEVDTEFGNYDYLMYADYDMDHPEVVNELRNWGVWYTNTLGLDGFRIDAVKHIKYSFTRDWINHVRSATGKNMFAVAEFWKNDLGAIENYLQKTNWNHSVFDVPLHYNLYNASKSGGNYDMRNIFNGTVVQRHPSHAVTFVDNHDSQPEEALESFVEEWFKPLAYALTLTREQGYPSVFYGDYYGIPTHGVPAMRSKIDPILEARQKYAYGPQHDYLDHPDVIGWTREGDSSHPKSGLATLITDGPGGSKRMYAGLKNAGETWYDITGNRSDTVKIGSDGWGEFHVNDGSVSIYVQK

SEQ ID NO: 39658 - protein, 480 aa, Bacillus sp.
NGTMMQYFEWYLPNDGNHWNRLNSDASNLKSKGITAVWIPPAWKGASQNDVGYGAYDLYDLGEFNQKGTVRTKYGTRSQLQAAVTSLKNNGIQVYGDVVMNHKGGADATEMVRAVEVNPNNRNQEVTGEYTIEAWTRFDFPGRGNTHSSFKWRWYHFDGVDWDQSRRLNNRIYKFRGHGKAWDWEVDTEFGNYDYLMYADYDMDHPEVVNELRNWGVWYTNTLGLDGFRIDAVKHIKYSFTRDWINHVRSATGKNMFAVAEFWSYDLGKIENYLQKTNWNHSVFDVPLHNNLYTASKSGGNYDMRNIFNGTVVQRHPSHAVTFVDNHDSQPEEALESFVEEWFKPLAYALTLTREQGYPSVFYGDYYGIPTHGVPAMRSKIDPILEARQKYAYGPQHDYLDHPDVIGWTREGDSSHPKSGLATLITDGPGGSKRMYAGLKNAGETWYDITGNRSDTVKIGSDGWGEFHVNDGSVSIYVQK
